United States Patent Application Publication US 2007/0214517 A1 - sequence listing, part 35

SEQ ID NO: 41139 - protein, 1074 aa, Arabidopsis thaliana
  peptide (1)..(1074): Ceres Seq. ID no. 13489163
  misc_feature (845)..(1073): Pfam Name: Survival motor neuron (SMN) interacting protein Pfam Description: Survival motor neuron (SMN) interacting protein
  misc_feature (642)..(702): Homolog of NCBI NO: 15227950 NR Description: hypothetical protein [Arabidopsis thaliana]
  misc_feature (990)..(1050): Homolog of NCBI NO: 15227950 NR Description: hypothetical protein [Arabidopsis thaliana]
  misc_feature (611)..(912): Homolog of NCBI NO: 15227950 NR Description: hypothetical protein [Arabidopsis thaliana]
  misc_feature (1)..(294): Homolog of NCBI NO: 15229201 NR Description: expressed protein [Arabidopsis thaliana]
  misc_feature (818)..(1073): Homolog of NCBI NO: 25405723 NR Description: hypothetical protein F20D21.20 [imported] -
  misc_feature (560)..(1074): Homolog of NCBI NO: 18404909 NR Description: expressed protein [Arabidopsis thaliana]
  misc_feature (1)..(520): Homolog of NCBI NO: 22330247 NR Description: hypothetical protein [Arabidopsis thaliana]
MKALKSYVKDLDSKAIPGFLAQVFETKETNSLSGEYTISLYEILARVHGPNIVPQIDTIMSTIVKTLASSAGSFPLQQACSKVIPAIARYGIDPTTTEDKKRVIIHSLCKPLTDSLLASQESLTSGAALCLKALVDSDNWRFASDEMVNRVCQNVVVALDSNSNQTHLQMGLVMSLAKHNPLIVEAYARLLIHTGLRILGFGVSEGNSQKRLSAVQMLNFLMKCLDPRSIYSEVELIIKEMERCQSDQMAYVRGAAYEAMMTSKRIAAELESKMEKGCRSVTGSNFSRRNCSSIVPDYSLSPESQTLGSFSGYDSPVESSPISHTSCNSEFDRRSVNRKLWRRDENGGVVDISLKDGLFSRVTKGSTTVSDSPLVPYDTCENGDEFEGFLMESLRNTTPSPQRQRSRRINAEDFNIFSTPRKLISSLQYPDDVDLDHSDIQSPILRGEREKTIGSRKNPKLRKQFPTMVETMSSTITVSEDTAQTQMITGKKKKKKMSYAKLVIAISFVVVALFATVILMNRFKVDNFFRFNQTGSSNLLASRKGTIYSLVKGFAHIRLMMTNSDSDHCTPAKTSISGDGLEKESDFKKQLNSEIDPQASSSQNDAITMEDGAVSVNNRDLQEIKESSFSKGSEQYRVDGALEESLNFEEKEQESEAQRLLEAEKRRLLAEIELGSIFRKSVDVDTLPKIEETMDNDVDKIELVDHTALVDVVHHPKRPGTAQNEKDTPRKLKKIGDKRNVIEGSGVENNGKQFRRLYTRKQLESMRFAHIVNQKNLWSEMYSRILPEVVTEYESLVYVKNYKSSKSNRVRGRTESGNEENLGTEEGTEDPEDYTDDNDDYNSILRPAFEVDGEPDFSTGPPEDGLEYLRRVRWEAKGIPNVRVAKIDESTYIKKEQSVYMPLIPEIPKCPEYLLPMKEWEDSLLLDFVHLRQTLTQSANSCEDEIISSQCVEDLLVEMFNKHLHTEEDESFGEVVTDIQGMDSVTRVSKLKKRICLVEKESGLQSSDCKWVVALCASLETPLDADTCACLRGLLRKCASVRAETSLEVGDEEVITMANMLITIAGRYFGQMGQ

SEQ ID NO: 41140 - protein, 1015 aa, Arabidopsis thaliana
  peptide (1)..(1015): Ceres Seq. ID no. 13489164
  misc_feature (786)..(1014): Pfam Name: Survival motor neuron (SMN) interacting protein Pfam Description: Survival motor neuron (SMN) interacting protein
  misc_feature (583)..(643): Homolog of NCBI NO: 15227950 NR Description: hypothetical protein [Arabidopsis thaliana]
  misc_feature (931)..(991): Homolog of NCBI NO: 15227950 NR Description: hypothetical protein [Arabidopsis thaliana]
  misc_feature (552)..(853): Homolog of NCBI NO: 15227950 NR Description: hypothetical protein [Arabidopsis thaliana]
  misc_feature (1)..(235): Homolog of NCBI NO: 15229201 NR Description: expressed protein [Arabidopsis thaliana]
  misc_feature (759)..(1014): Homolog of NCBI NO: 25405723 NR Description: hypothetical protein F20D21.20 [imported] -
  misc_feature (501)..(1015): Homolog of NCBI NO: 18404909 NR Description: expressed protein [Arabidopsis thaliana]
  misc_feature (1)..(461): Homolog of NCBI NO: 22330247 NR Description: hypothetical protein [Arabidopsis thaliana]
MSTIVKTLASSAGSFPLQQACSKVIPAIARYGIDPTTTEDKKRVIIHSLCKPLTDSLLASQESLTSGAALCLKALVDSDNWRFASDEMVNRVCQNVVVALDSNSNQTHLQMGLVMSLAKHNPLIVEAYARLLIHTGLRILGFGVSEGNSQKRLSAVQMLNFLMKCLDPRSIYSEVELIIKEMERCQSDQMAYVRGAAYEAMMTSKRIAAELESKMEKGCRSVTGSNFSRRNCSSIVPDYSLSPESQTLGSFSGYDSPVESSPISHTSCNSEFDRRSVNRKLWRRDENGGVVDISLKDGLFSRVTKGSTTVSDSPLVPYDTCENGDEFEGFLMESLRNTTPSPQRQRSRRINAEDFNIFSTPRKLISSLQYPDDVDLDHSDIQSPILRGEREKTIGSRKNPKLRKQFPTMVETMSSTITVSEDTAQTQMITGKKKKKKMSYAKLVIAISFVVVALFATVILMNRFKVDNFFRFNQTGSSNLLASRKGTIYSLVKGFAHIRLMMTNSDSDHCTPAKTSISGDGLEKESDFKKQLNSEIDPQASSSQNDAITMEDGAVSVNNRDLQEIKESSFSKGSEQYRVDGALEESLNFEEKEQESEAQRLLEAEKRRLLAEIELGSIFRKSVDVDTLPKIEETMDNDVDKIELVDHTALVDVVHHPKRPGTAQNEKDTPRKLKKIGDKRNVIEGSGVENNGKQFRRLYTRKQLESMRFAHIVNQKNLWSEMYSRILPEVVTEYESLVYVKNYKSSKSNRVRGRTESGNEENLGTEEGTEDPEDYTDDNDDYNSILRPAFEVDGEPDFSTGPPEDGLEYLRRVRWEAKGIPNVRVAKIDESTYIKKEQSVYMPLIPEIPKCPEYLLPMKEWEDSLLLDFVHLRQTLTQSANSCEDEIISSQCVEDLLVEMFNKHLHTEEDESFGEVVTDIQGMDSVTRVSKLKKRICLVEKESGLQSSDCKWVVALCASLETPLDADTCACLRGLLRKCASVRAETSLEVGDEEVITMANMLITIAGRYFGQMGQ

SEQ ID NO: 41141 - DNA, 742 bp, Arabidopsis thaliana
  misc_feature (1)..(742): Ceres Seq. ID no. 12325739
  misc_feature: MA Experiment ID: 108434 Result: Down-regulated in Transcription
  misc_feature: MA Experiment 108434 PARAMETER Experiment Name: At_Root_Tips_cDNA_P Parameter: Tissue Value: Root Tips
  misc_feature: MA Experiment ID: 108462 Result: Up-regulated in Transcription
  misc_feature: MA Experiment 108462 PARAMETER Experiment Name: At_Germinating_Seeds_cDNA_P Parameter: Age (day) Value: 2 vs. 0
  misc_feature: MA Experiment 108462 PARAMETER Experiment Name: At_Germinating_Seeds_cDNA_P Parameter: Tissue Value: Germinating Seeds
  misc_feature: MA Experiment ID: 108464 Result: Up-regulated in Transcription
  misc_feature: MA Experiment 108464 PARAMETER Experiment Name: At_Germinating_Seeds_cDNA_P Parameter: Age (day) Value: 4 vs. 0
  misc_feature: MA Experiment 108464 PARAMETER Experiment Name: At_Germinating_Seeds_cDNA_P Parameter: Tissue Value: Germinating Seeds
  misc_feature: MA Experiment ID: 108595 Result: Up-regulated in Transcription
  misc_feature: MA Experiment 108595 PARAMETER Experiment Name: At_Ler-pi_Ovule_cDNA_P Parameter: Plant Line Value: null
  misc_feature: MA Experiment ID: 108607 Result: Up-regulated in Transcription
  misc_feature: MA Experiment 108607 PARAMETER Experiment Name: At_100uM_ABA_cDNA_P Parameter: Timepoint (hr) Value: 4
  misc_feature: MA Experiment 108607 PARAMETER Experiment Name: At_100uM_ABA_cDNA_P Parameter: Tissue Value: Aerial
  misc_feature: MA Experiment 108607 PARAMETER Experiment Name: At_100uM_ABA_cDNA_P Parameter: Treatment Value: 100uM ABA vs. No Treatment
  misc_feature: MA Experiment ID: 20000068 Result: Down-regulated in Transcription
  misc_feature: MA Experiment ID: 20000224 Result: Up-regulated in Transcription
  misc_feature: MA Experiment ID: 20000269 Result: Up-regulated in Transcription
  misc_feature: MA Experiment 20000269 PARAMETER Experiment Name: At_1mM_KNO3_L-vs-H_Roots_P Parameter: Age (day) Value: 7,10,12
  misc_feature: MA Experiment 20000269 PARAMETER Experiment Name: At_1mM_KNO3_L-vs-H_Roots_P Parameter: Organism Value: A. thaliana
  misc_feature: MA Experiment 20000269 PARAMETER Experiment Name: At_1mM_KNO3_L-vs-H_Roots_P Parameter: Plant Line Value: WS
  misc_feature: MA Experiment 20000269 PARAMETER Experiment Name: At_1mM_KNO3_L-vs-H_Roots_P Parameter: Timepoint (day) Value: 7,10,12
  misc_feature: MA Experiment 20000269 PARAMETER Experiment Name: At_1mM_KNO3_L-vs-H_Roots_P Parameter: Tissue Value: Roots
  misc_feature: MA Experiment 20000269 PARAMETER Experiment Name: At_1mM_KNO3_L-vs-H_Roots_P Parameter: Treatment Value: 1mM KNO3 vs. 50mM KNO3
  misc_feature: MA Experiment ID: 20000286 Result: Down-regulated in Transcription
  misc_feature: MA Experiment 20000286 PARAMETER Experiment Name: At_Open_Flower_P Parameter: Age (day) Value: 21
  misc_feature: MA Experiment 20000286 PARAMETER Experiment Name: At_Open_Flower_P Parameter: Plant Line Value: WS
  misc_feature: MA Experiment 20000286 PARAMETER Experiment Name: At_Open_Flower_P Parameter: Tissue Value: Half Open vs. Whole Plant
  misc_feature: MA Experiment ID: 20000445 Result: Down-regulated in Transcription
  misc_feature: MA Experiment 20000445 PARAMETER Experiment Name: At_100uM_NAA__P Parameter: Age (day) Value: 14
  misc_feature: MA Experiment 20000445 PARAMETER Experiment Name: At_100uM_NAA__P Parameter: Organism Value: A. thaliana
  misc_feature: MA Experiment 20000445 PARAMETER Experiment Name: At_100uM_NAA__P Parameter: Plant Line Value: WS
  misc_feature: MA Experiment 20000445 PARAMETER Experiment Name: At_100uM_NAA__P Parameter: Timepoint (hr) Value: 6
  misc_feature: MA Experiment 20000445 PARAMETER Experiment Name: At_100uM_NAA__P Parameter: Tissue Value: Aerial
  misc_feature: MA Experiment 20000445 PARAMETER Experiment Name: At_100uM_NAA__P Parameter: Treatment Value: 100uM NAA vs. No Treatment
  misc_feature: MA Experiment ID: 20000573 Result: Up-regulated in Transcription
  misc_feature: MA Experiment 20000573 PARAMETER Experiment Name: At_100uM_ABA_Mutants__P Parameter: Organism Value: A. thaliana
  misc_feature: MA Experiment 20000573 PARAMETER Experiment Name: At_100uM_ABA_Mutants__P Parameter: Plant Line Value: CS22 vs. Ler wt
  misc_feature: MA Experiment 20000573 PARAMETER Experiment Name: At_100uM_ABA_Mutants__P Parameter: Timepoint (hr) Value: N/A
  misc_feature: MA Experiment 20000573 PARAMETER Experiment Name: At_100uM_ABA_Mutants__P Parameter: Tissue Value: Whole Plant
  misc_feature: MA Experiment 20000573 PARAMETER Experiment Name: At_100uM_ABA_Mutants__P Parameter: Treatment Value: None
  misc_feature: MA Experiment ID: 20000574 Result: Up-regulated in Transcription
  misc_feature: MA Experiment 20000574 PARAMETER Experiment Name: At_100uM_ABA_Mutants__P Parameter: Organism Value: A. thaliana
  misc_feature: MA Experiment 20000574 PARAMETER Experiment Name: At_100uM_ABA_Mutants__P Parameter: Plant Line Value: CS23 vs. Ler wt
  misc_feature: MA Experiment 20000574 PARAMETER Experiment Name: At_100uM_ABA_Mutants__P Parameter: Timepoint (hr) Value: N/A
  misc_feature: MA Experiment 20000574 PARAMETER Experiment Name: At_100uM_ABA_Mutants__P Parameter: Tissue Value: Whole Plant
  misc_feature: MA Experiment 20000574 PARAMETER Experiment Name: At_100uM_ABA_Mutants__P Parameter: Treatment Value: None
aaaaaacattcagagagaaaattcagcatttttgatagctcaagcacttgattctttccaaaggggtttcctgaggccaagtaacaatggcgaaaggagttgcagttttgaacagcagtgagggtgttacggggactatctttttcacccaggaaggcgatggtgtgaccactgtgagtggaacagtttctggccttaagcctggtcttcatggtttccatgtccatgctcttggtgacaccactaacggttgcatgtctactggtccacatttcaaccccgatggtaaaacacacggtgcccctgaggatgctaatcgacatgctggtgatctaggaaacatcactgttggagatgatggaactgccaccttcacaatcactgattgccagattcctcttactggaccaaactctattgttggtagggctgttgttgtccatgcagaccctgatgacctcggaaagggaggccatgaactcagcctggctactggaaacgcaggcggccgtgttgcttgcggcatcattggtctccagggctaaagctgctacgtttccaaagaagagattgatgtaataaggaggtccaaccttagacctgggtttggtagttgtgtgtatcttctggtgtgtggctaaaaacctttgagcttagtgtggctcaaagcatctttaattcagacagaaaacagagaaaattccgtacttttattatttcatgaataaaaaagagttggttt

SEQ ID NO: 41142 - protein, 152 aa, Arabidopsis thaliana; identical to SEQ ID NO: 22423
  peptide (1)..(152): Ceres Seq. ID no. 12325740
  misc_feature (2)..(152): Pfam Name: Copper/zinc superoxide dismutase (SODC) Pfam Description: Copper/zinc superoxide dismutase (SODC)
  misc_feature (1)..(152): Homolog of NCBI NO: 4102859 NR Description: cytoplasmic superoxide dismutase 1 [Populus
  misc_feature (1)..(152): Homolog of NCBI NO: 4102861 NR Description: copper/zinc-superoxide dismutase [Populus
  misc_feature (1)..(152): Homolog of NCBI NO: 12230587 NR Description: Superoxide dismutase [Cu-Zn] 2
  misc_feature (2)..(152): Homolog of NCBI NO: 134602 NR Description: SUPEROXIDE DISMUTASE [CU-ZN]
  misc_feature (1)..(152): Homolog of NCBI NO: 12230586 NR Description: Superoxide dismutase [Cu-Zn] 1
  misc_feature (1)..(152): Homolog of NCBI NO: 24421235 NR Description: superoxide dismutase [Brassica juncea]
  misc_feature (1)..(152): Homolog of NCBI NO: 3288850 NR Description: cytosolic Cu/Zn superoxide dismutase
  misc_feature (1)..(152): Homolog of NCBI NO: 2305111 NR Description: Cu/Zn superoxide dismutase [Raphanus sativus]
  misc_feature (1)..(146): Homolog of NCBI NO: 9802567 NR Description: F22O13.32 [Arabidopsis thaliana]
  misc_feature (1)..(152): Homolog of NCBI NO: 15223944 NR Description: copper/zinc superoxidase dismutase (CSD1)

SEQ ID NO: 41143 - protein, 96 aa, Arabidopsis thaliana; identical to SEQ ID NO: 22424
  peptide (1)..(96): Ceres Seq. ID no. 12325741
  misc_feature (1)..(96): Pfam Name: Copper/zinc superoxide dismutase (SODC) Pfam Description: Copper/zinc superoxide dismutase (SODC)
  misc_feature (1)..(96): Homolog of NCBI NO: 4102859 NR Description: cytoplasmic superoxide dismutase 1 [Populus
  misc_feature (1)..(96): Homolog of NCBI NO: 4102861 NR Description: copper/zinc-superoxide dismutase [Populus
  misc_feature (1)..(96): Homolog of NCBI NO: 12230587 NR Description: Superoxide dismutase [Cu-Zn] 2
  misc_feature (1)..(96): Homolog of NCBI NO: 134602 NR Description: SUPEROXIDE DISMUTASE [CU-ZN]
  misc_feature (1)..(96): Homolog of NCBI NO: 12230586 NR Description: Superoxide dismutase [Cu-Zn] 1
  misc_feature (1)..(96): Homolog of NCBI NO: 24421235 NR Description: superoxide dismutase [Brassica juncea]
  misc_feature (1)..(96): Homolog of NCBI NO: 3288850 NR Description: cytosolic Cu/Zn superoxide dismutase
  misc_feature (1)..(96): Homolog of NCBI NO: 2305111 NR Description: Cu/Zn superoxide dismutase [Raphanus sativus]
  misc_feature (1)..(90): Homolog of NCBI NO: 9802567 NR Description: F22O13.32 [Arabidopsis thaliana]
  misc_feature (1)..(96): Homolog of NCBI NO: 15223944 NR Description: copper/zinc superoxidase dismutase (CSD1)

SEQ ID NO: 41144 - DNA, 1124 bp, Arabidopsis thaliana
  misc_feature (1)..(1124): Ceres Seq. ID no. 13499879
  misc_feature: MA Experiment ID: 108463 Result: Up-regulated in Transcription
  misc_feature: MA Experiment 108463 PARAMETER Experiment Name: At_Germinating_Seeds_cDNA_P Parameter: Age (day) Value: 3 vs. 0
  misc_feature: MA Experiment 108463 PARAMETER Experiment Name: At_Germinating_Seeds_cDNA_P Parameter: Tissue Value: Germinating Seeds
  misc_feature: MA Experiment ID: 108464 Result: Up-regulated in Transcription
  misc_feature: MA Experiment 108464 PARAMETER Experiment Name: At_Germinating_Seeds_cDNA_P Parameter: Age (day) Value: 4 vs. 0
  misc_feature: MA Experiment 108464 PARAMETER Experiment Name: At_Germinating_Seeds_cDNA_P Parameter: Tissue Value: Germinating Seeds
  misc_feature: MA Experiment ID: 108595 Result: Up-regulated in Transcription
  misc_feature: MA Experiment 108595 PARAMETER Experiment Name: At_Ler-pi_Ovule_cDNA_P Parameter: Plant Line Value: null
  misc_feature: MA Experiment ID: 20000072 Result: Down-regulated in Transcription
  misc_feature: MA Experiment 20000072 PARAMETER Experiment Name: At_100uM_ABA_Mutants_cDNA_P Parameter: Plant Line Value: CS8105
  misc_feature: MA Experiment 20000072 PARAMETER Experiment Name: At_100uM_ABA_Mutants_cDNA_P Parameter: Timepoint (hr) Value: 6
  misc_feature: MA Experiment 20000072 PARAMETER Experiment Name: At_100uM_ABA_Mutants_cDNA_P Parameter: Tissue Value: Aerial
  misc_feature: MA Experiment 20000072 PARAMETER Experiment Name: At_100uM_ABA_Mutants_cDNA_P Parameter: Treatment Value: 100uM ABA vs. No Treatment
  misc_feature: MA Experiment ID: 20000111 Result: Down-regulated in Transcription
  misc_feature: MA Experiment 20000111 PARAMETER Experiment Name: At_42deg_Heat_cDNA_P Parameter: Temperature (deg C) Value: 42 vs. 22
  misc_feature: MA Experiment 20000111 PARAMETER Experiment Name: At_42deg_Heat_cDNA_P Parameter: Timepoint (hr) Value: 6
  misc_feature: MA Experiment 20000111 PARAMETER Experiment Name: At_42deg_Heat_cDNA_P Parameter: Tissue Value: Aerial
  misc_feature: MA Experiment ID: 20000224 Result: Down-regulated in Transcription
  misc_feature: MA Experiment ID: 20000234 Result: Down-regulated in Transcription
  misc_feature: MA Experiment 20000234 PARAMETER Experiment Name: At_Siliques_P Parameter: Age (day) Value: 21
  misc_feature: MA Experiment 20000234 PARAMETER Experiment Name: At_Siliques_P Parameter: Organism Value: A. thaliana
  misc_feature: MA Experiment 20000234 PARAMETER Experiment Name: At_Siliques_P Parameter: Plant Line Value: WS
  misc_feature: MA Experiment 20000234 PARAMETER Experiment Name: At_Siliques_P Parameter: Tissue Value: Less Than 5mm Siliques vs. Whole Plant
  misc_feature: MA Experiment ID: 20000235 Result: Down-regulated in Transcription
  misc_feature: MA Experiment 20000235 PARAMETER Experiment Name: At_Siliques_P Parameter: Age (day) Value: 21
  misc_feature: MA Experiment 20000235 PARAMETER Experiment Name: At_Siliques_P Parameter: Organism Value: A. thaliana
  misc_feature: MA Experiment 20000235 PARAMETER Experiment Name: At_Siliques_P Parameter: Plant Line Value: WS
  misc_feature: MA Experiment 20000235 PARAMETER Experiment Name: At_Siliques_P Parameter: Tissue Value: 5-10mm Siliques vs. Whole Plant
  misc_feature: MA Experiment ID: 20000264 Result: Down-regulated in Transcription
  misc_feature: MA Experiment 20000264 PARAMETER Experiment Name: At_Open_Flower_P Parameter: Age (day) Value: 21
  misc_feature: MA Experiment 20000264 PARAMETER Experiment Name: At_Open_Flower_P Parameter: Plant Line Value: WS
  misc_feature: MA Experiment 20000264 PARAMETER Experiment Name: At_Open_Flower_P Parameter: Tissue Value: Open Flower vs. Whole Plant
  misc_feature: MA Experiment ID: 20000439 Result: Down-regulated in Transcription
  misc_feature: MA Experiment 20000439 PARAMETER Experiment Name: At_Roots__P Parameter: Age (day) Value: 14 vs. 21
  misc_feature: MA Experiment 20000439 PARAMETER Experiment Name: At_Roots__P Parameter: Organism Value: A. thaliana
  misc_feature: MA Experiment 20000439 PARAMETER Experiment Name: At_Roots__P Parameter: Tissue Value: Roots vs. Whole Plant
  misc_feature: MA Experiment ID: 20000527 Result: Up-regulated in Transcription
  misc_feature: MA Experiment 20000527 PARAMETER Experiment Name: At_10percent_PEG_P Parameter: Age (day) Value: 20
  misc_feature: MA Experiment 20000527 PARAMETER Experiment Name: At_10percent_PEG_P Parameter: Organism Value: A. thaliana
  misc_feature: MA Experiment 20000527 PARAMETER Experiment Name: At_10percent_PEG_P Parameter: Plant Line Value: WS
  misc_feature: MA Experiment 20000527 PARAMETER Experiment Name: At_10percent_PEG_P Parameter: Timepoint (day) Value: 20
  misc_feature: MA Experiment 20000527 PARAMETER Experiment Name: At_10percent_PEG_P Parameter: Tissue Value: Whole Plant
  misc_feature: MA Experiment 20000527 PARAMETER Experiment Name: At_10percent_PEG_P Parameter: Treatment Value: 10percent PEG vs. No Treatment
  misc_feature: MA Experiment ID: 20000794 Result: Down-regulated in Transcription
  misc_feature: MA Experiment 20000794 PARAMETER Experiment Name: At_Petals_P Parameter: Age (day) Value: 23-25 days
  misc_feature: MA Experiment 20000794 PARAMETER Experiment Name: At_Petals_P Parameter: Plant Line Value: WS
  misc_feature: MA Experiment 20000794 PARAMETER Experiment Name: At_Petals_P Parameter: Tissue Value: Petals vs. Whole plant
  misc_feature: MA Experiment ID: 20001451 Result: Up-regulated in Transcription
  misc_feature: MA Experiment 20001451 PARAMETER Experiment Name: At_Far-red-induction_P Parameter: Age (day) Value: 7
  misc_feature: MA Experiment 20001451 PARAMETER Experiment Name: At_Far-red-induction_P Parameter: Light Value: Far-red vs. White
  misc_feature: MA Experiment 20001451 PARAMETER Experiment Name: At_Far-red-induction_P Parameter: Organism Value: A. thaliana
  misc_feature: MA Experiment 20001451 PARAMETER Experiment Name: At_Far-red-induction_P Parameter: Plant Line Value: Columbia
  misc_feature: MA Experiment 20001451 PARAMETER Experiment Name: At_Far-red-induction_P Parameter: Timepoint (hr) Value: 24
  misc_feature: MA Experiment 20001451 PARAMETER Experiment Name: At_Far-red-induction_P Parameter: Tissue Value: Whole Plant
  misc_feature: MA Experiment ID: 20001557 Result: Down-regulated in Transcription
  misc_feature: MA Experiment 20001557 PARAMETER Experiment Name: At_Drought_Soil_Dry_P Parameter: Age (day) Value: 27
  misc_feature: MA Experiment 20001557 PARAMETER Experiment Name: At_Drought_Soil_Dry_P Parameter: Organism Value: A. thaliana
  misc_feature: MA Experiment 20001557 PARAMETER Experiment Name: At_Drought_Soil_Dry_P Parameter: Plant Line Value: WS
  misc_feature: MA Experiment 20001557 PARAMETER Experiment Name: At_Drought_Soil_Dry_P Parameter: Post Timepoint (hr) Value: 3
  misc_feature: MA Experiment 20001557 PARAMETER Experiment Name: At_Drought_Soil_Dry_P Parameter: Post-Treatment Value: Re-Water vs. No Drought
  misc_feature: MA Experiment 20001557 PARAMETER Experiment Name: At_Drought_Soil_Dry_P Parameter: Timepoint (day) Value: 13
  misc_feature: MA Experiment 20001557 PARAMETER Experiment Name: At_Drought_Soil_Dry_P Parameter: Treatment Value: Drought vs. No Drought
  misc_feature: MA Experiment ID: 20001558 Result: Down-regulated in Transcription
  misc_feature: MA Experiment 20001558 PARAMETER Experiment Name: At_Drought_Soil_Dry_P Parameter: Age (day) Value: 27
  misc_feature: MA Experiment 20001558 PARAMETER Experiment Name: At_Drought_Soil_Dry_P Parameter: Organism Value: A. thaliana
  misc_feature: MA Experiment 20001558 PARAMETER Experiment Name: At_Drought_Soil_Dry_P Parameter: Plant Line Value: WS
  misc_feature: MA Experiment 20001558 PARAMETER Experiment Name: At_Drought_Soil_Dry_P Parameter: Post Timepoint (hr) Value: 6
  misc_feature: MA Experiment 20001558 PARAMETER Experiment Name: At_Drought_Soil_Dry_P Parameter: Post-Treatment Value: Re-Water vs. No Drought
  misc_feature: MA Experiment 20001558 PARAMETER Experiment Name: At_Drought_Soil_Dry_P Parameter: Timepoint (day) Value: 13
  misc_feature: MA Experiment 20001558 PARAMETER Experiment Name: At_Drought_Soil_Dry_P Parameter: Treatment Value: Drought vs. No Drought
  misc_feature: MA Experiment ID: 20001904 Result: Down-regulated in Transcription
  misc_feature: MA Experiment 20001904 PARAMETER Experiment Name: At_Drought_Reproduction_P Parameter: Age (day) Value: 37
  misc_feature: MA Experiment 20001904 PARAMETER Experiment Name: At_Drought_Reproduction_P Parameter: Organism Value: A. thaliana
  misc_feature: MA Experiment 20001904 PARAMETER Experiment Name: At_Drought_Reproduction_P Parameter: Plant Line Value: WS
  misc_feature: MA Experiment 20001904 PARAMETER Experiment Name: At_Drought_Reproduction_P Parameter: Timepoint (day) Value: 7
  misc_feature: MA Experiment 20001904 PARAMETER Experiment Name: At_Drought_Reproduction_P Parameter: Tissue Value: Rosettes
  misc_feature: MA Experiment 20001904 PARAMETER Experiment Name: At_Drought_Reproduction_P Parameter: Treatment Value: Drought vs. No Drought
  misc_feature: MA Experiment ID: 20001905 Result: Down-regulated in Transcription
  misc_feature: MA Experiment 20001905 PARAMETER Experiment Name: At_Drought_Reproduction_P Parameter: Age (day) Value: 40
  misc_feature: MA Experiment 20001905 PARAMETER Experiment Name: At_Drought_Reproduction_P Parameter: Organism Value: A. thaliana
  misc_feature: MA Experiment 20001905 PARAMETER Experiment Name: At_Drought_Reproduction_P Parameter: Plant Line Value: WS
  misc_feature: MA Experiment 20001905 PARAMETER Experiment Name: At_Drought_Reproduction_P Parameter: Timepoint (day) Value: 10
  misc_feature: MA Experiment 20001905 PARAMETER Experiment Name: At_Drought_Reproduction_P Parameter: Tissue Value: Rosettes
  misc_feature: MA Experiment 20001905 PARAMETER Experiment Name: At_Drought_Reproduction_P Parameter: Treatment Value: Drought vs. No Drought
aaaacaacaacatcaacaacaaaactctttaaaaagcaagaaaactttcactagtagttgaagaatttctctcttcctctacttattattattatcaactggtgatttgatttctctctctctctctcacaatggattcattaggatcaagaagaaggacacataatagccgtagggttccttcaatgggaatagaaggggacgaagagtttcaagaagaagatgtgtggtcagttttacgagaaggagaaacttcaagtcctgaaatgaaaatacccaaaagtcatttctcttcctcatcatcttcttcctcttcaccatggaacattcgtagaagcaaggaggtctcaggagtgaaacaatcatcagcacctatgaatgtccctgattggtccaaggtttatggtgactcaaagagcaacagaaggagtagccatttgcattctcatgctgctgacgatgatgatgaagatgatgatggttgcatggttcctccacatgaatgggttgcaagaaagctagcaagaacacagatctcttctttctctatgtgtgaaggagttggaagaacacttaaaggaagagatctaagcaaagtgagaaatgctgtcttgtcaaaaactggtttcttggagtaagtaggataaaatatctcatcatcatcatcaccataattatcatccatgtgcatggaatatgaatcccataactcttgtttaacattatcatcatgaaaaactcaactttatggtatccacatcatcatcattatcaatgtcattgtcgtcatcatcatgtggggatcactataccaagagtctttttgttaagttttttttttctttattgttgttattatttttcaatgtgttatttagagtagataagtatcatagtgatgatgatgacttgtcagccccatgcatgggtcccgttttatgttcttctgttgtttttggtttctctttgaaggtttttttatgatcttaaattagagcctagagaggggcatctcctttagaacctttaattggagttgagttctttaccatgttttggtgaaagattttgtcgtttgctatcgacaatgttatatataaattagatatctttctttctttgtt

SEQ ID NO: 41145 - protein, 168 aa, Arabidopsis thaliana
  peptide (1)..(168): Ceres Seq. ID no. 13499880
  misc_feature (23)..(168): Pfam Name: Protein of unknown function, DUF584 Pfam Description: Protein of unknown function, DUF584
  misc_feature (78)..(166): Homolog of NCBI NO: 15221077 NR Description: expressed protein [Arabidopsis thaliana]
  misc_feature (17)..(166): Homolog of NCBI NO: 15242683 NR Description: expressed protein [Arabidopsis thaliana]
  misc_feature (78)..(168): Homolog of NCBI NO: 15230636 NR Description: expressed protein [Arabidopsis thaliana]
  misc_feature (26)..(166): Homolog of NCBI NO: 21553782 NR Description: unknown [Arabidopsis thaliana]
  misc_feature (26)..(166): Homolog of NCBI NO: 15239410 NR Description: expressed protein [Arabidopsis thaliana]
  misc_feature (21)..(166): Homolog of NCBI NO: 7487830 NR Description: hypothetical protein T8O5.180 - Arabidopsis
  misc_feature (21)..(166): Homolog of NCBI NO: 15234679 NR Description: hypothetical protein [Arabidopsis thaliana]
  misc_feature (1)..(168): Homolog of NCBI NO: 26452217 NR Description: unknown protein [Arabidopsis thaliana]
  misc_feature (1)..(168): Homolog of NCBI NO: 18412629 NR Description: expressed protein [Arabidopsis thaliana]
  misc_feature (1)..(168): Homolog of NCBI NO: 25354620 NR Description: hypothetical protein AT4g04630 [imported] -
MDSLGSRRRTHNSRRVPSMGIEGDEEFQEEDVWSVLREGETSSPEMKIPKSHFSSSSSSSSSPWNIRRSKEVSGVKQSSAPMNVPDWSKVYGDSKSNRRSSHLHSHAADDDDEDDDGCMVPPHEWVARKLARTQISSFSMCEGVGRTLKGRDLSKVRNAVLSKTGFLE

SEQ ID NO: 41146 - protein, 150 aa, Arabidopsis thaliana
  peptide (1)..(150): Ceres Seq. ID no. 13499881
  misc_feature (5)..(150): Pfam Name: Protein of unknown function, DUF584 Pfam Description: Protein of unknown function, DUF584
  misc_feature (60)..(148): Homolog of NCBI NO: 15221077 NR Description: expressed protein [Arabidopsis thaliana]
  misc_feature (1)..(148): Homolog of NCBI NO: 15242683 NR Description: expressed protein [Arabidopsis thaliana]
  misc_feature (60)..(150): Homolog of NCBI NO: 15230636 NR Description: expressed protein [Arabidopsis thaliana]
  misc_feature (8)..(148): Homolog of NCBI NO: 21553782 NR Description: unknown [Arabidopsis thaliana]
  misc_feature (8)..(148): Homolog of NCBI NO: 15239410 NR Description: expressed protein [Arabidopsis thaliana]
  misc_feature (3)..(148): Homolog of NCBI NO: 7487830 NR Description: hypothetical protein T8O5.180 - Arabidopsis
  misc_feature (3)..(148): Homolog of NCBI NO: 15234679 NR Description: hypothetical protein [Arabidopsis thaliana]
  misc_feature (1)..(150): Homolog of NCBI NO: 26452217 NR Description: unknown protein [Arabidopsis thaliana]
  misc_feature (1)..(150): Homolog of NCBI NO: 18412629 NR Description: expressed protein [Arabidopsis thaliana]
  misc_feature (1)..(150): Homolog of NCBI NO: 25354620 NR Description: hypothetical protein AT4g04630 [imported] -
MGIEGDEEFQEEDVWSVLREGETSSPEMKIPKSHFSSSSSSSSSPWNIRRSKEVSGVKQSSAPMNVPDWSKVYGDSKSNRRSSHLHSHAADDDDEDDDGCMVPPHEWVARKLARTQISSFSMCEGVGRTLKGRDLSKVRNAVLSKTGFLE

SEQ ID NO: 41147 - protein, 123 aa, Arabidopsis thaliana
  peptide (1)..(123): Ceres Seq. ID no. 13499882
  misc_feature (1)..(123): Pfam Name: Protein of unknown function, DUF584 Pfam Description: Protein of unknown function, DUF584
  misc_feature (33)..(121): Homolog of NCBI NO: 15221077 NR Description: expressed protein [Arabidopsis thaliana]
  misc_feature (1)..(121): Homolog of NCBI NO: 15242683 NR Description: expressed protein [Arabidopsis thaliana]
  misc_feature (33)..(123): Homolog of NCBI NO: 15230636 NR Description: expressed protein [Arabidopsis thaliana]
  misc_feature (1)..(121): Homolog of NCBI NO: 21553782 NR Description: unknown [Arabidopsis thaliana]
  misc_feature (1)..(121): Homolog of NCBI NO: 15239410 NR Description: expressed protein [Arabidopsis thaliana]
  misc_feature (1)..(121): Homolog of NCBI NO: 7487830 NR Description: hypothetical protein T8O5.180 - Arabidopsis
  misc_feature (1)..(121): Homolog of NCBI NO: 15234679 NR Description: hypothetical protein [Arabidopsis thaliana]
  misc_feature (1)..(123): Homolog of NCBI NO: 26452217 NR Description: unknown protein [Arabidopsis thaliana]
  misc_feature (1)..(123): Homolog of NCBI NO: 18412629 NR Description: expressed protein [Arabidopsis thaliana]
  misc_feature (1)..(123): Homolog of NCBI NO: 25354620 NR Description: hypothetical protein AT4g04630 [imported] -
MKIPKSHFSSSSSSSSSPWNIRRSKEVSGVKQSSAPMNVPDWSKVYGDSKSNRRSSHLHSHAADDDDEDDDGCMVPPHEWVARKLARTQISSFSMCEGVGRTLKGRDLSKVRNAVLSKTGFLE

SEQ ID NO: 41148 - DNA, 1439 bp, Arabidopsis thaliana
  misc_feature (1)..(1439): Ceres Seq. ID no. 13497231
  misc_feature: MA Experiment ID: 108574 Result: Up-regulated in Transcription
  misc_feature: MA Experiment 108574 PARAMETER Experiment Name: At_Wounding__cDNA_P Parameter: Timepoint (hr) Value: 1
  misc_feature: MA Experiment 108574 PARAMETER Experiment Name: At_Wounding__cDNA_P Parameter: Tissue Value: Aerial
  misc_feature: MA Experiment 108574 PARAMETER Experiment Name: At_Wounding__cDNA_P Parameter: Treatment Value: Wounding vs. No Wounding
  misc_feature: MA Experiment ID: 108577 Result: Up-regulated in Transcription
  misc_feature: MA Experiment 108577 PARAMETER Experiment Name: At_42deg_Heat_cDNA_P Parameter: Temperature (deg C) Value: 42 vs. 22
  misc_feature: MA Experiment 108577 PARAMETER Experiment Name: At_42deg_Heat_cDNA_P Parameter: Timepoint (hr) Value: 6
  misc_feature: MA Experiment 108577 PARAMETER Experiment Name: At_42deg_Heat_cDNA_P Parameter: Tissue Value: Aerial
  misc_feature: MA Experiment ID: 108579 Result: Up-regulated in Transcription
  misc_feature: MA Experiment 108579 PARAMETER Experiment Name: At_4deg_Cold_cDNA_P Parameter: Temperature (deg C) Value: 4 vs. 22
  misc_feature: MA Experiment 108579 PARAMETER Experiment Name: At_4deg_Cold_cDNA_P Parameter: Timepoint (hr) Value: 6
  misc_feature: MA Experiment 108579 PARAMETER Experiment Name: At_4deg_Cold_cDNA_P Parameter: Tissue Value: Aerial
  misc_feature: MA Experiment ID: 108595 Result: Down-regulated in Transcription
  misc_feature: MA Experiment 108595 PARAMETER Experiment Name: At_Ler-pi_Ovule_cDNA_P Parameter: Plant Line Value: null
  misc_feature: MA Experiment ID: 20000071 Result: Down-regulated in Transcription
  misc_feature: MA Experiment 20000071 PARAMETER Experiment Name: At_100uM_ABA_Mutants_cDNA_P Parameter: Plant Line Value: CS8104
  misc_feature: MA Experiment 20000071 PARAMETER Experiment Name: At_100uM_ABA_Mutants_cDNA_P Parameter: Timepoint (hr) Value: 6
  misc_feature: MA Experiment 20000071 PARAMETER Experiment Name: At_100uM_ABA_Mutants_cDNA_P Parameter: Tissue Value: Aerial
  misc_feature: MA Experiment 20000071 PARAMETER Experiment Name: At_100uM_ABA_Mutants_cDNA_P Parameter: Treatment Value: 100uM ABA vs. No Treatment
  misc_feature: MA Experiment ID: 20000086 Result: Down-regulated in Transcription
  misc_feature: MA Experiment 20000086 PARAMETER Experiment Name: At_100uM_ABA_Mutants_cDNA_P Parameter: Plant Line Value: CS22
  misc_feature: MA Experiment 20000086 PARAMETER Experiment Name: At_100uM_ABA_Mutants_cDNA_P Parameter: Timepoint (hr) Value: 6
  misc_feature: MA Experiment 20000086 PARAMETER Experiment Name: At_100uM_ABA_Mutants_cDNA_P Parameter: Tissue Value: Aerial
  misc_feature: MA Experiment 20000086 PARAMETER Experiment Name: At_100uM_ABA_Mutants_cDNA_P Parameter: Treatment Value: 100uM ABA vs. No Treatment
  misc_feature: MA Experiment ID: 20000087 Result: Down-regulated in Transcription
  misc_feature: MA Experiment 20000087 PARAMETER Experiment Name: At_100uM_ABA_Mutants_cDNA_P Parameter: Plant Line Value: WS
  misc_feature: MA Experiment 20000087 PARAMETER Experiment Name: At_100uM_ABA_Mutants_cDNA_P Parameter: Timepoint (hr) Value: 6
  misc_feature: MA Experiment 20000087 PARAMETER Experiment Name: At_100uM_ABA_Mutants_cDNA_P Parameter: Tissue Value: Aerial
  misc_feature: MA Experiment 20000087 PARAMETER Experiment Name: At_100uM_ABA_Mutants_cDNA_P Parameter: Treatment Value: 100uM ABA vs. No Treatment
  misc_feature: MA Experiment ID: 20000088 Result: Down-regulated in Transcription
  misc_feature: MA Experiment 20000088 PARAMETER Experiment Name: At_100uM_ABA_Mutants_cDNA_P Parameter: Plant Line Value: Landsberg
  misc_feature: MA Experiment 20000088 PARAMETER Experiment Name: At_100uM_ABA_Mutants_cDNA_P Parameter: Timepoint (hr) Value: 6
  misc_feature: MA Experiment 20000088 PARAMETER Experiment Name: At_100uM_ABA_Mutants_cDNA_P Parameter: Tissue Value: Aerial
  misc_feature: MA Experiment 20000088 PARAMETER Experiment Name: At_100uM_ABA_Mutants_cDNA_P Parameter: Treatment Value: 100uM ABA vs. No Treatment
  misc_feature: MA Experiment ID: 20000089 Result: Down-regulated in Transcription
  misc_feature: MA Experiment ID: 20000090 Result: Down-regulated in Transcription
  misc_feature: MA Experiment ID: 20000111 Result: Up-regulated in Transcription
  misc_feature: MA Experiment 20000111 PARAMETER Experiment Name: At_42deg_Heat_cDNA_P Parameter: Temperature (deg C) Value: 42 vs. 22
  misc_feature: MA Experiment 20000111 PARAMETER Experiment Name: At_42deg_Heat_cDNA_P Parameter: Timepoint (hr) Value: 6
  misc_feature: MA Experiment 20000111 PARAMETER Experiment Name: At_42deg_Heat_cDNA_P Parameter: Tissue Value: Aerial
  misc_feature: MA Experiment ID: 20000173 Result: Up-regulated in Transcription
  misc_feature: MA Experiment 20000173 PARAMETER Experiment Name: At_42deg_Heat_P Parameter: Age (day) Value: 14
  misc_feature: MA Experiment 20000173 PARAMETER Experiment Name: At_42deg_Heat_P Parameter: Organism Value: A. thaliana
  misc_feature: MA Experiment 20000173 PARAMETER Experiment Name: At_42deg_Heat_P Parameter: Plant Line Value: WS
  misc_feature: MA Experiment 20000173 PARAMETER Experiment Name: At_42deg_Heat_P Parameter: Temperature (deg C) Value: 42 vs. 22
  misc_feature: MA Experiment 20000173 PARAMETER Experiment Name: At_42deg_Heat_P Parameter: Timepoint (hr) Value: 6
  misc_feature: MA Experiment 20000173 PARAMETER Experiment Name: At_42deg_Heat_P Parameter: Tissue Value: Aerial
  misc_feature: MA Experiment ID: 20000184 Result: Up-regulated in Transcription
  misc_feature: MA Experiment 20000184 PARAMETER Experiment Name: At_Shoots__P Parameter: Age (day) Value: 7
  misc_feature: MA Experiment 20000184 PARAMETER Experiment Name: At_Shoots__P Parameter: Tissue Value: Shoots vs. Whole Plant
  misc_feature: MA Experiment ID: 20000213 Result: Up-regulated in Transcription
  misc_feature: MA Experiment 20000213 PARAMETER Experiment Name: At_4deg_Cold_P Parameter: Timepoint (hr) Value: 2
  misc_feature: MA Experiment ID: 20000234 Result: Up-regulated in Transcription
  misc_feature: MA Experiment 20000234 PARAMETER Experiment Name: At_Siliques_P Parameter: Age (day) Value: 21
  misc_feature: MA Experiment 20000234 PARAMETER Experiment Name: At_Siliques_P Parameter: Organism Value: A. thaliana
  misc_feature: MA Experiment 20000234 PARAMETER Experiment Name: At_Siliques_P Parameter: Plant Line Value: WS
  misc_feature: MA Experiment 20000234 PARAMETER Experiment Name: At_Siliques_P Parameter: Tissue Value: Less Than 5mm Siliques vs. Whole Plant
  misc_feature: MA Experiment ID: 20000235 Result: Up-regulated in Transcription
  misc_feature: MA Experiment 20000235 PARAMETER Experiment Name: At_Siliques_P Parameter: Age (day) Value: 21
  misc_feature: MA Experiment 20000235 PARAMETER Experiment Name: At_Siliques_P Parameter: Organism Value: A. thaliana
  misc_feature: MA Experiment 20000235 PARAMETER Experiment Name: At_Siliques_P Parameter: Plant Line Value: WS
  misc_feature: MA Experiment 20000235 PARAMETER Experiment Name: At_Siliques_P Parameter: Tissue Value: 5-10mm Siliques vs. Whole Plant
  misc_feature: MA Experiment ID: 20000264 Result: Up-regulated in Transcription
  misc_feature: MA Experiment 20000264 PARAMETER Experiment Name: At_Open_Flower_P Parameter: Age (day) Value: 21
  misc_feature: MA Experiment 20000264 PARAMETER Experiment Name: At_Open_Flower_P Parameter: Plant Line Value: WS
  misc_feature: MA Experiment 20000264 PARAMETER Experiment Name: At_Open_Flower_P Parameter: Tissue Value: Open Flower vs. Whole Plant
  misc_feature: MA Experiment ID: 20000437 Result: Down-regulated in Transcription
  misc_feature: MA Experiment 20000437 PARAMETER Experiment Name: At_Drought_P Parameter: Age (day) Value: 8
  misc_feature: MA Experiment 20000437 PARAMETER Experiment Name: At_Drought_P Parameter: Organism Value: A. thaliana
  misc_feature: MA Experiment 20000437 PARAMETER Experiment Name: At_Drought_P Parameter: Plant Line Value: WS
  misc_feature: MA Experiment 20000437 PARAMETER Experiment Name: At_Drought_P Parameter: Timepoint (hr) Value: 24
  misc_feature: MA Experiment 20000437 PARAMETER Experiment Name: At_Drought_P Parameter: Tissue Value: Whole Plant
  misc_feature: MA Experiment 20000437 PARAMETER Experiment Name: At_Drought_P Parameter: Treatment Value: Drought vs. No Drought
  misc_feature: MA Experiment ID: 20000438 Result: Up-regulated in Transcription
  misc_feature: MA Experiment 20000438 PARAMETER Experiment Name: At_Shoots__P Parameter: Age (day) Value: 14
  misc_feature: MA Experiment 20000438 PARAMETER Experiment Name: At_Shoots__P Parameter: Tissue Value: Shoots vs. Whole Plant
  misc_feature: MA Experiment ID: 20000495 Result: Down-regulated in Transcription
  misc_feature: MA Experiment 20000495 PARAMETER Experiment Name: At_Guard_Cells_P Parameter: Harvest Date Value: 8/2/2002
  misc_feature: MA Experiment 20000495 PARAMETER Experiment Name: At_Guard_Cells_P Parameter: Organism Value: A. thaliana
  misc_feature: MA Experiment 20000495 PARAMETER Experiment Name: At_Guard_Cells_P Parameter: Tissue Value: Guard Cells vs. Leaves
  misc_feature: MA Experiment ID: 20000573 Result: Down-regulated in Transcription
  misc_feature: MA Experiment 20000573 PARAMETER Experiment Name: At_100uM_ABA_Mutants__P Parameter: Organism Value: A. thaliana
  misc_feature: MA Experiment 20000573 PARAMETER Experiment Name: At_100uM_ABA_Mutants__P Parameter: Plant Line Value: CS22 vs. Ler wt
  misc_feature: MA Experiment 20000573 PARAMETER Experiment Name: At_100uM_ABA_Mutants__P Parameter: Timepoint (hr) Value: N/A
  misc_feature: MA Experiment 20000573 PARAMETER Experiment Name: At_100uM_ABA_Mutants__P Parameter: Tissue Value: Whole Plant
  misc_feature: MA Experiment 20000573 PARAMETER Experiment Name: At_100uM_ABA_Mutants__P Parameter: Treatment Value: None
  misc_feature: MA Experiment ID: 20001248 Result: Down-regulated in Transcription
  misc_feature: MA Experiment 20001248 PARAMETER Experiment Name: At_Far-red-induction_P Parameter: Age (day) Value: 7
  misc_feature: MA Experiment 20001248 PARAMETER Experiment Name: At_Far-red-induction_P Parameter: Light Value: Far-red vs. White
  misc_feature: MA Experiment 20001248 PARAMETER Experiment Name: At_Far-red-induction_P Parameter: Organism Value: A. thaliana
  misc_feature: MA Experiment 20001248 PARAMETER Experiment Name: At_Far-red-induction_P Parameter: Plant Line Value: Columbia
  misc_feature: MA Experiment 20001248 PARAMETER Experiment Name: At_Far-red-induction_P Parameter: Timepoint (hr) Value: 4
  misc_feature: MA Experiment 20001248 PARAMETER Experiment Name: At_Far-red-induction_P Parameter: Tissue Value: Whole Plant
  misc_feature: MA Experiment ID: 20001555 Result: Down-regulated in Transcription
  misc_feature: MA Experiment 20001555 PARAMETER Experiment Name: At_Drought_Soil_Dry_P Parameter: Age (day) Value: 24
  misc_feature: MA Experiment 20001555 PARAMETER Experiment Name: At_Drought_Soil_Dry_P Parameter: Organism Value: A. thaliana
  misc_feature: MA Experiment 20001555 PARAMETER Experiment Name: At_Drought_Soil_Dry_P Parameter: Plant Line Value: WS
  misc_feature: MA Experiment 20001555 PARAMETER Experiment Name: At_Drought_Soil_Dry_P Parameter: Post Timepoint (hr) Value: None
  misc_feature: MA Experiment 20001555 PARAMETER Experiment Name: At_Drought_Soil_Dry_P Parameter: Post-Treatment Value: None
  misc_feature: MA Experiment 20001555 PARAMETER Experiment Name: At_Drought_Soil_Dry_P Parameter: Timepoint (day) Value: 10
  misc_feature: MA Experiment 20001555 PARAMETER Experiment Name: At_Drought_Soil_Dry_P Parameter: Treatment Value: Drought vs. No Drought
  misc_feature: MA Experiment ID: 20001556 Result: Down-regulated in Transcription
  misc_feature: MA Experiment 20001556 PARAMETER Experiment Name: At_Drought_Soil_Dry_P Parameter: Age (day) Value: 26
  misc_feature: MA Experiment 20001556 PARAMETER Experiment Name: At_Drought_Soil_Dry_P Parameter: Organism Value: A. thaliana
  misc_feature: MA Experiment 20001556 PARAMETER Experiment Name: At_Drought_Soil_Dry_P Parameter: Plant Line Value: WS
  misc_feature: MA Experiment 20001556 PARAMETER Experiment Name: At_Drought_Soil_Dry_P Parameter: Post Timepoint (hr) Value: None
  misc_feature: MA Experiment 20001556 PARAMETER Experiment Name: At_Drought_Soil_Dry_P Parameter: Post-Treatment Value: None
  misc_feature: MA Experiment 20001556 PARAMETER Experiment Name: At_Drought_Soil_Dry_P Parameter: Timepoint (day) Value: 12
  misc_feature: MA Experiment 20001556 PARAMETER Experiment Name: At_Drought_Soil_Dry_P Parameter: Treatment Value: Drought vs. No Drought
  misc_feature: MA Experiment ID: 20001557 Result: Down-regulated in Transcription
  misc_feature: MA Experiment 20001557 PARAMETER Experiment Name: At_Drought_Soil_Dry_P Parameter: Age (day) Value: 27
  misc_feature: MA Experiment 20001557 PARAMETER Experiment Name: At_Drought_Soil_Dry_P Parameter: Organism Value: A. thaliana
  misc_feature: MA Experiment 20001557 PARAMETER Experiment Name: At_Drought_Soil_Dry_P Parameter: Plant Line Value: WS
  misc_feature: MA Experiment 20001557 PARAMETER Experiment Name: At_Drought_Soil_Dry_P Parameter: Post Timepoint (hr) Value: 3
  misc_feature: MA Experiment 20001557 PARAMETER Experiment Name: At_Drought_Soil_Dry_P Parameter: Post-Treatment Value: Re-Water vs. No Drought
  misc_feature: MA Experiment 20001557 PARAMETER Experiment Name: At_Drought_Soil_Dry_P Parameter: Timepoint (day) Value: 13
  misc_feature: MA Experiment 20001557 PARAMETER Experiment Name: At_Drought_Soil_Dry_P Parameter: Treatment Value: Drought vs. No Drought
  misc_feature: MA Experiment ID: 20001904 Result: Down-regulated in Transcription
  misc_feature: MA Experiment 20001904 PARAMETER Experiment Name: At_Drought_Reproduction_P Parameter: Age (day) Value: 37
  misc_feature: MA Experiment 20001904 PARAMETER Experiment Name: At_Drought_Reproduction_P Parameter: Organism Value: A. thaliana
  misc_feature: MA Experiment 20001904 PARAMETER Experiment Name: At_Drought_Reproduction_P Parameter: Plant Line Value: WS
  misc_feature: MA Experiment 20001904 PARAMETER Experiment Name: At_Drought_Reproduction_P Parameter: Timepoint (day) Value: 7
  misc_feature: MA Experiment 20001904 PARAMETER Experiment Name: At_Drought_Reproduction_P Parameter: Tissue Value: Rosettes
  misc_feature: MA Experiment 20001904 PARAMETER Experiment Name: At_Drought_Reproduction_P Parameter: Treatment Value: Drought vs. No Drought
  misc_feature: MA Experiment ID: 20001907 Result: Down-regulated in Transcription
  misc_feature: MA Experiment 20001907 PARAMETER Experiment Name: At_Drought_Reproduction_P Parameter: Age (day) Value: 37
  misc_feature: MA Experiment 20001907 PARAMETER Experiment Name: At_Drought_Reproduction_P Parameter: Organism Value: A. thaliana
  misc_feature: MA Experiment 20001907 PARAMETER Experiment Name: At_Drought_Reproduction_P Parameter: Plant Line Value: WS
  misc_feature: MA Experiment 20001907 PARAMETER Experiment Name: At_Drought_Reproduction_P Parameter: Timepoint (day) Value: 7
  misc_feature: MA Experiment 20001907 PARAMETER Experiment Name: At_Drought_Reproduction_P Parameter: Tissue Value: Siliques
  misc_feature: MA Experiment 20001907 PARAMETER Experiment Name: At_Drought_Reproduction_P Parameter: Treatment Value: Drought vs. No Drought
ttacatgaaaatgaggaggtagactcatgtaacataactcttaccaatagaggaagaagaaaaagttagcaagagtcggttacttgtgagaaattccaacaaatgccggaggatttatgcacatcttggagcatctgataagaggaaaaaattatgttcgctctcacatttctaaatccaaatccaagacttccatctccattgttccttgccaagtctactcctgaatcagcgttgagcagaagaagcagagctttttcatcttctaactcttatccttggagaccgaaccttagatttaatggcttcaagctcaagtcagctacagttccggagaatgtggaaggaggagatttggaatctggaagtttggttaaagggttgaagctaggaggcatgtttggagtttggtaccttctcaatatctactacaacattttcaacaaacaggtacttagggtttatccatatccagcgactgtaacagcatttcaattagggtgtggaacgttgatgattgctataatgtggctccttaaactccatccacgccccaaattttctccttctcagtttacggtgatcgtacaactagcagtagctcacacgttagggaacttgttaacaaatgtgagcttaggaagagtaaatgtctctttcacccacactatcaaagcaatggagcctttcttcaccgtcttgctttctgttctcttgctcggtgagtggccgagtctgtggattgtttgttcgttgttacctattgtcgctggagtctctttagcatctttcacagaagcttctttcaattggattggtttctgcagtgcaatggcttctaatgtgacgaatcaatcacgcaatgtcctcagtaaaaaattcatggttggaaaggacgctttggacaacatcaaccttttctctataataaccattatctcctttatcttactggttcctttagcaatcctcatcgatgggttcaaggttactccttcgcatttacaagtagcaacaagccagggtttgtcggtaaaagagttttgcatcatgtctctacttgctggtgtttgcttgcatagctaccaacaggtatcgtatatgatattggagatggtgtctccagtaacacactctgtagggaactgcgtgaagcgtgtggtggttattacatcatccattcttttcttcaaaactccagtctcacctcttaactctataggtaccgcgactgcactagctggagtatatttgtacagcagagccaaacgagtccaagtcaaaccaaatccaaaaatgtcttgaattttgtatatagaagctcttagtttattatttatgcgaaaaatgttgatatttttgttcatccatgtcgtttttacatgacactattaacttttgttaaattcaactaatctcattaaataattctattcttt

SEQ ID NO: 41149 - protein, 383 aa, Arabidopsis thaliana
  peptide (1)..(383): Ceres Seq. ID no. 13497232
  misc_feature (88)..(213): Pfam Name: Integral membrane protein DUF6 Pfam Description: Integral membrane protein DUF6
  misc_feature (56)..(381): Homolog of NCBI NO: 7489170 NR Description: phosphate/phosphoenolpyruvate translocator
  misc_feature (7)..(381): Homolog of NCBI NO: 7546829 NR Description: phosphate/phosphoenolpyruvate translocator
  misc_feature (7)..(381): Homolog of NCBI NO: 21554233 NR Description: phosphate/phosphoenolpyruvate translocator
  misc_feature (69)..(381): Homolog of NCBI NO: 29647427 NR Description: putative phosphoenolpyruvate/phosphate
  misc_feature (7)..(381): Homolog of NCBI NO: 1778141 NR Description: phosphate/phosphoenolpyruvate translocator
  misc_feature (42)..(381): Homolog of NCBI NO: 7489171 NR Description: phosphate/phosphoenolpyruvate translocator
  misc_feature (7)..(381): Homolog of NCBI NO: 15242801 NR Description: triose phosphate/phosphate translocator, putative
  misc_feature (1)..(383): Homolog of NCBI NO: 6016714 NR Description: putative phosphate/phosphoenolpyruvate
  misc_feature (1)..(383): Homolog of NCBI NO: 21537050 NR Description: putative phosphate/phosphoenolpyruvate
  misc_feature (1)..(383): Homolog of NCBI NO: 18395855 NR Description: triose/phosphate translocator, putative
MFALTFLNPNPRLPSPLFLAKSTPESALSRRSRAFSSSNSYPWRPNLRFNGFKLKSATVPENVEGGDLESGSLVKGLKLGGMFGVWYLLNIYYNIFNKQVLRVYPYPATVTAFQLGCGTLMIAIMWLLKLHPRPKFSPSQFTVIVQLAVAHTLGNLLTNVSLGRVNVSFTHTIKAMEPFFTVLLSVLLLGEWPSLWIVCSLLPIVAGVSLASFTEASFNWIGFCSAMASNVTNQSRNVLSKKFMVGKDALDNINLFSIITIISFILLVPLAILIDGFKVTPSHLQVATSQGLSVKEFCIMSLLAGVCLHSYQQVSYMILEMVSPVTHSVGNCVKRVVVITSSILFFKTPVSPLNSIGTATALAGVYLYSRAKRVQVKPNPKMS

SEQ ID NO: 41150 - protein, 302 aa, Arabidopsis thaliana
  peptide (1)..(302): Ceres Seq. ID no. 13497233
  misc_feature (7)..(132): Pfam Name: Integral membrane protein DUF6 Pfam Description: Integral membrane protein DUF6
  misc_feature (1)..(300): Homolog of NCBI NO: 7489170 NR Description: phosphate/phosphoenolpyruvate translocator
  misc_feature (1)..(300): Homolog of NCBI NO: 7546829 NR Description: phosphate/phosphoenolpyruvate translocator
  misc_feature (1)..(300): Homolog of NCBI NO: 21554233 NR Description: phosphate/phosphoenolpyruvate translocator
  misc_feature (1)..(300): Homolog of NCBI NO: 29647427 NR Description: putative phosphoenolpyruvate/phosphate
  misc_feature (1)..(300): Homolog of NCBI NO: 1778141 NR Description: phosphate/phosphoenolpyruvate translocator
  misc_feature (1)..(300): Homolog of NCBI NO: 7489171 NR Description: phosphate/phosphoenolpyruvate translocator
  misc_feature (1)..(300): Homolog of NCBI NO: 15242801 NR Description: triose phosphate/phosphate translocator, putative
  misc_feature (1)..(302): Homolog of NCBI NO: 6016714 NR Description: putative phosphate/phosphoenolpyruvate
  misc_feature (1)..(302): Homolog of NCBI NO: 21537050 NR Description: putative phosphate/phosphoenolpyruvate
  misc_feature (1)..(302): Homolog of NCBI NO: 18395855 NR Description: triose/phosphate translocator, putative
MFGVWYLLNIYYNIFNKQVLRVYPYPATVTAFQLGCGTLMIAIMWLLKLHPRPKFSPSQFTVIVQLAVAHTLGNLLTNVSLGRVNVSFTHTIKAMEPFFTVLLSVLLLGEWPSLWIVCSLLPIVAGVSLASFTEASFNWIGFCSAMASNVTNQSRNVLSKKFMVGKDALDNINLFSIITIISFILLVPLAILIDGFKVTPSHLQVATSQGLSVKEFCIMSLLAGVCLHSYQQVSYMILEMVSPVTHSVGNCVKRVVVITSSILFFKTPVSPLNSIGTATALAGVYLYSRAKRVQVKPNPKMS

SEQ ID NO: 41151 - protein, 263 aa, Arabidopsis thaliana
  peptide (1)..(263): Ceres Seq. ID no. 13497234
  misc_feature (1)..(93): Pfam Name: Integral membrane protein DUF6 Pfam Description: Integral membrane protein DUF6
  misc_feature (1)..(261): Homolog of NCBI NO: 7489170 NR Description: phosphate/phosphoenolpyruvate translocator
  misc_feature (1)..(261): Homolog of NCBI NO: 7546829 NR Description: phosphate/phosphoenolpyruvate translocator
  misc_feature (1)..(261): Homolog of NCBI NO: 21554233 NR Description: phosphate/phosphoenolpyruvate translocator
  misc_feature (1)..(261): Homolog of NCBI NO: 29647427 NR Description: putative phosphoenolpyruvate/phosphate
  misc_feature (1)..(261): Homolog of NCBI NO: 1778141 NR Description: phosphate/phosphoenolpyruvate translocator
  misc_feature (1)..(261): Homolog of NCBI NO: 7489171 NR Description: phosphate/phosphoenolpyruvate translocator
  misc_feature (1)..(261): Homolog of NCBI NO: 15242801 NR Description: triose phosphate/phosphate translocator, putative
  misc_feature (1)..(263): Homolog of NCBI NO: 6016714 NR Description: putative phosphate/phosphoenolpyruvate
  misc_feature (1)..(263): Homolog of NCBI NO: 21537050 NR Description: putative phosphate/phosphoenolpyruvate
  misc_feature (1)..(263): Homolog of NCBI NO: 18395855 NR Description: triose/phosphate translocator, putative
MIAIMWLLKLHPRPKFSPSQFTVIVQLAVAHTLGNLLTNVSLGRVNVSFTHTIKAMEPFFTVLLSVLLLGEWPSLWIVCSLLPIVAGVSLASFTEASFNWIGFCSAMASNVTNQSRNVLSKKFMVGKDALDNINLFSIITIISFILLVPLAILIDGFKVTPSHLQVATSQGLSVKEFCIMSLLAGVCLHSYQQVSYMILEMVSPVTHSVGNCVKRVVVITSSILFFKTPVSPLNSIGTATALAGVYLYSRAKRVQVKPNPKMS

SEQ ID NO: 41152 - DNA, 814 bp, Arabidopsis thaliana
  misc_feature (1)..(814): Ceres Seq. ID no. 12326835
  misc_feature: MA Experiment ID: 108434 Result: Up-regulated in Transcription
  misc_feature: MA Experiment 108434 PARAMETER Experiment Name: At_Root_Tips_cDNA_P Parameter: Tissue Value: Root Tips
  misc_feature: MA Experiment ID: 108462 Result: Down-regulated in Transcription
  misc_feature: MA Experiment 108462 PARAMETER Experiment Name: At_Germinating_Seeds_cDNA_P Parameter: Age (day) Value: 2 vs. 0
  misc_feature: MA Experiment 108462 PARAMETER Experiment Name: At_Germinating_Seeds_cDNA_P Parameter: Tissue Value: Germinating Seeds
  misc_feature: MA Experiment ID: 108463 Result: Down-regulated in Transcription
  misc_feature: MA Experiment 108463 PARAMETER Experiment Name: At_Germinating_Seeds_cDNA_P Parameter: Age (day) Value: 3 vs. 0
  misc_feature: MA Experiment 108463 PARAMETER Experiment Name: At_Germinating_Seeds_cDNA_P Parameter: Tissue Value: Germinating Seeds
  misc_feature: MA Experiment ID: 108464 Result: Down-regulated in Transcription
  misc_feature: MA Experiment 108464 PARAMETER Experiment Name: At_Germinating_Seeds_cDNA_P Parameter: Age (day) Value: 4 vs. 0
  misc_feature: MA Experiment 108464 PARAMETER Experiment Name: At_Germinating_Seeds_cDNA_P Parameter: Tissue Value: Germinating Seeds
  misc_feature: MA Experiment ID: 20000111 Result: Up-regulated in Transcription
  misc_feature: MA Experiment 20000111 PARAMETER Experiment Name: At_42deg_Heat_cDNA_P Parameter: Temperature (deg C) Value: 42 vs. 22
  misc_feature: MA Experiment 20000111 PARAMETER Experiment Name: At_42deg_Heat_cDNA_P Parameter: Timepoint (hr) Value: 6
  misc_feature: MA Experiment 20000111 PARAMETER Experiment Name: At_42deg_Heat_cDNA_P Parameter: Tissue Value: Aerial
  misc_feature: MA Experiment ID: 20000113 Result: Up-regulated in Transcription
  misc_feature: MA Experiment 20000113 PARAMETER Experiment Name: At_42deg_Heat_cDNA_P Parameter: Temperature (deg C) Value: 42 vs. 22
  misc_feature: MA Experiment 20000113 PARAMETER Experiment Name: At_42deg_Heat_cDNA_P Parameter: Timepoint (hr) Value: 8
  misc_feature: MA Experiment 20000113 PARAMETER Experiment Name: At_42deg_Heat_cDNA_P Parameter: Tissue Value: Aerial
accttcctcttcccctcctatataaaaaaaatcgacatcgcttttgctcacttctctctcttaggttttttttcccttctcccaatctcatcttctccgaaaacctttcttctctcaaatttctgtgaaaacatgtctgacgacgagcaccactttgaggccagcgaatccggagcttccaagacctatcctcaatcagccggtaacatccgtaaaggtggtcacatcgtcatcaaaaaccgtccctgcaaggttgttgaggtttcgacttccaaaactggcaagcacggtcacgccaaatgtcactttgttgctattgatatcttcactgctaagaagcttgaagatattgttccatcttcccacaattgtgatgttccacatgtgaaccgtgttgattaccagttgattgatatcactgaggatggcttcgtgagccttctcactgacagtggtggcaccaaggatgatctcaagcttcccaccgatgatggtctcaccgcccagatgaggcttggattcgatgagggaaaggatattgtggtgtctgtcatgtcttccatgggagaggagcagatctgtgccgtcaaggaagttggtggtggcaagtaaacaagtatcattcgatatattattaccagtttgacaacggacgtcaatgttataagaaccaaaagatgtttttctttttcctaatttagaccctttgtgtgtgtttcttgttgcaagacaaccatatctattggttttggattgttggaaaagtttgtgttgaaacattcaaagtttcttatgagatgttattcttaaaacc

SEQ ID NO: 41153 - protein, 203 aa, Arabidopsis thaliana
  peptide (1)..(203): Ceres Seq. ID no. 12326836
  misc_feature (128)..(197): Pfam Name: Eukaryotic initiation factor 5A hypusine, Pfam Description: Eukaryotic initiation factor 5A hypusine,
  misc_feature (45)..(200): Homolog of NCBI NO: 124224 NR Description: Eukaryotic translation initiation factor 5A-1
  misc_feature (45)..(200): Homolog of NCBI NO: 3024022 NR Description: Eukaryotic translation initiation factor 5A-5
  misc_feature (45)..(200): Homolog of NCBI NO: 15223002 NR Description: initiation factor 5A-4
  misc_feature (45)..(200): Homolog of NCBI NO: 20138708 NR Description: Eukaryotic translation initiation factor 5A-1
  misc_feature (45)..(203): Homolog of NCBI NO: 20138709 NR Description: Eukaryotic translation initiation factor 5A
  misc_feature (45)..(200): Homolog of NCBI NO: 13937159 NR Description: At1g69410/F10D13.8 [Arabidopsis thaliana]
  misc_feature (45)..(200): Homolog of NCBI NO: 15222317 NR Description: Eukaryotic initiation  factor 5A , putative
  misc_feature (45)..(203): Homolog of NCBI NO: 40805177 NR Description: eukaryotic translation initiation factor-5A
  misc_feature (45)..(203): Homolog of NCBI NO: 15222741 NR Description: initiation factor 5A-4, putative
  misc_feature (45)..(203): Homolog of NCBI NO: 9295717 NR Description: T24P13.1 [Arabidopsis thaliana]
TFLFPSYIKKIDIAFAHFSLLGFFSLLPISSSPKTFLLSNFCENMSDDEHHFEASESGASKTYPQSAGNIRKGGHIVIKNRPCKVVEVSTSKTGKHGHAKCHFVAIDIFTAKKLEDIVPSSHNCDVPHVNRVDYQLIDITEDGFVSLLTDSGGTKDDLKLPTDDGLTAQMRLGFDEGKDIVVSVMSSMGEEQICAVKEVGGGK

SEQ ID NO: 41154 - protein, 159 aa, Arabidopsis thaliana
  peptide (1)..(159): Ceres Seq. ID no. 12326837
  misc_feature (84)..(153): Pfam Name: Eukaryotic initiation factor 5A hypusine, Pfam Description: Eukaryotic initiation factor 5A hypusine,
  misc_feature (1)..(156): Homolog of NCBI NO: 124224 NR Description: Eukaryotic translation initiation factor 5A-1
  misc_feature (1)..(156): Homolog of NCBI NO: 3024022 NR Description: Eukaryotic translation initiation factor 5A-5
  misc_feature (1)..(156): Homolog of NCBI NO: 15223002 NR Description: initiation factor 5A-4
  misc_feature (1)..(156): Homolog of NCBI NO: 20138708 NR Description: Eukaryotic translation initiation factor 5A-1
  misc_feature (1)..(159): Homolog of NCBI NO: 20138709 NR Description: Eukaryotic translation initiation factor 5A
  misc_feature (1)..(156): Homolog of NCBI NO: 13937159 NR Description: At1g69410/F10D13.8 [Arabidopsis thaliana]
  misc_feature (1)..(156): Homolog of NCBI NO: 15222317 NR Description: Eukaryotic initiation  factor 5A , putative
  misc_feature (1)..(159): Homolog of NCBI NO: 40805177 NR Description: eukaryotic translation initiation factor-5A
  misc_feature (1)..(159): Homolog of NCBI NO: 15222741 NR Description: initiation factor 5A-4, putative
  misc_feature (1)..(159): Homolog of NCBI NO: 9295717 NR Description: T24P13.1 [Arabidopsis thaliana]
MSDDEHHFEASESGASKTYPQSAGNIRKGGHIVIKNRPCKVVEVSTSKTGKHGHAKCHFVAIDIFTAKKLEDIVPSSHNCDVPHVNRVDYQLIDITEDGFVSLLTDSGGTKDDLKLPTDDGLTAQMRLGFDEGKDIVVSVMSSMGEEQICAVKEVGGGK

SEQ ID NO: 41155 - DNA, 1260 bp, Arabidopsis thaliana
  misc_feature (1)..(1260): Ceres Seq. ID no. 12329888
  misc_feature: MA Experiment ID: 108594 Result: Down-regulated in Transcription
  misc_feature: MA Experiment 108594 PARAMETER Experiment Name: At_Ler-rhl_Root_cDNA_P Parameter: Plant Line Value: null
  misc_feature: MA Experiment ID: 108595 Result: Down-regulated in Transcription
  misc_feature: MA Experiment 108595 PARAMETER Experiment Name: At_Ler-pi_Ovule_cDNA_P Parameter: Plant Line Value: null
  misc_feature: MA Experiment ID: 20000495 Result: Down-regulated in Transcription
  misc_feature: MA Experiment 20000495 PARAMETER Experiment Name: At_Guard_Cells_P Parameter: Harvest Date Value: 8/2/2002
  misc_feature: MA Experiment 20000495 PARAMETER Experiment Name: At_Guard_Cells_P Parameter: Organism Value: A. thaliana
  misc_feature: MA Experiment 20000495 PARAMETER Experiment Name: At_Guard_Cells_P Parameter: Tissue Value: Guard Cells vs. Leaves
aacgaaaaacaaaaaaaaaaagacagaagacaaaaaaaaatcacgaaatctgattttcctctcttttgctcgaagccaagtctctgcttttactttgatccaccaacttcatcttcaacctctcgattttaggtaagattcttagagtgattttgacttatctaagaatggagctaaagagcattaaggatgcgtttgatcgtgttgcgacaaagcagaagctctcttatagcaaaactaatgagattgttcatatgttgtctcaagaaatcgataaggctttgagcatattagaggagacaccatcatcagatactatgcttcttgatcatagatctatcctcgctgatgtgaagaaagtgtttatggagattgctccaatcactcaacttgaagctactgagaaagagctacatgcggctttgaccaagtaccctaaagttcttgagaaacagctgaatccagacatatcaaaggcttatagacacaatgttgagtttgatactcatatcgttaaccagattatcgccaactttttctaccgtcaaggaatgtttgacattggtgactgttttgttgctgaaactggtgaatctgaatgttctacaagacaatctttcgtggagatgtatcggatactagaagctatgaagagacgagatcttgaaccggctcttaattgggctgtttcgaactctgacaaactaaaggaagcaaggtctgatcttgagatgaagcttcatagtctacactttctggaaatagcacgaggcaaaaactccaaagaagctatcgactatgcgagaaagcatatcgccacgtttgcagatagctgcctcccggagatccagaagctcatgtgttctctcttatggaacagaaaactcgataaatcaccatactccgagtttctctcccccgctctgtggaacaatgcagtcaaagagctaacccgacagtactgcaacctactcggtgaatcatctgaaagcccgttgagtataacagtaacagcgggcacacaagcgttaccagtactattgaaatacatgaacgtggtgatggcgaataagaagcttgattggcagaccatggaacaacttcctgttgatgcgcaactatccgaggagtttcagtttcattcggtgtttgtctgtccagtctctaaagaacagtcaagtgatgataaccctccgatgatgatgtcttgtggacatgtgctttgcaagcagacgatcaacaaaatgtcaaagaatggct

SEQ ID NO: 41156 - protein, 364 aa, Arabidopsis thaliana
  peptide (1)..(364): Ceres Seq. ID no. 12329889
  misc_feature (72)..(363): Homolog of NCBI NO: 10434433 NR Description: unnamed protein product [Homo sapiens]
  misc_feature (26)..(363): Homolog of NCBI NO: 28076879 NR Description: RIKEN cDNA 0610039K22 [Mus musculus]
  misc_feature (26)..(363): Homolog of NCBI NO: 21362098 NR Description: hypothetical protein FLJ22318 [Homo sapiens]
  misc_feature (72)..(363): Homolog of NCBI NO: 31044429 NR Description: hypothetical protein MGC59617 [Mus musculus]
  misc_feature (72)..(363): Homolog of NCBI NO: 12232469 NR Description: hypothetical protein FLJ13910 [Homo sapiens]
  misc_feature (1)..(362): Homolog of NCBI NO: 28829262 NR Description: similar to Arabidopsis thaliana (Mouse-ear
  misc_feature (5)..(363): Homolog of NCBI NO: 15242463 NR Description: putative protein
  misc_feature (1)..(363): Homolog of NCBI NO: 18400050 NR Description: expressed protein
  misc_feature (1)..(363): Homolog of NCBI NO: 21593562 NR Description: unknown [Arabidopsis thaliana]
  misc_feature (1)..(363): Homolog of NCBI NO: 15235735 NR Description: putative protein; protein id: At4g37880.1
MELKSIKDAFDRVATKQKLSYSKTNEIVHMLSQEIDKALSILEETPSSDTMLLDHRSILADVKKVFMEIAPITQLEATEKELHAALTKYPKVLEKQLNPDISKAYRHNVEFDTHIVNQIIANFFYRQGMFDIGDCFVAETGESECSTRQSFVEMYRILEAMKRRDLEPALNWAVSNSDKLKEARSDLEMKLHSLHFLEIARGKNSKEAIDYARKHIATFADSCLPEIQKLMCSLLWNRKLDKSPYSEFLSPALWNNAVKELTRQYCNLLGESSESPLSITVTAGTQALPVLLKYMNVVMANKKLDWQTMEQLPVDAQLSEEFQFHSVFVCPVSKEQSSDDNPPMMMSCGHVLCKQTINKMSKNG

SEQ ID NO: 41157 - protein, 335 aa, Arabidopsis thaliana
  peptide (1)..(335): Ceres Seq. ID no. 12329890
  misc_feature (43)..(334): Homolog of NCBI NO: 10434433 NR Description: unnamed protein product [Homo sapiens]
  misc_feature (1)..(334): Homolog of NCBI NO: 28076879 NR Description: RIKEN cDNA 0610039K22 [Mus musculus]
  misc_feature (1)..(334): Homolog of NCBI NO: 21362098 NR Description: hypothetical protein FLJ22318 [Homo sapiens]
  misc_feature (43)..(334): Homolog of NCBI NO: 31044429 NR Description: hypothetical protein MGC59617 [Mus musculus]
  misc_feature (43)..(334): Homolog of NCBI NO: 12232469 NR Description: hypothetical protein FLJ13910 [Homo sapiens]
  misc_feature (1)..(333): Homolog of NCBI NO: 28829262 NR Description: similar to Arabidopsis thaliana (Mouse-ear
  misc_feature (1)..(334): Homolog of NCBI NO: 15242463 NR Description: putative protein
  misc_feature (1)..(334): Homolog of NCBI NO: 18400050 NR Description: expressed protein
  misc_feature (1)..(334): Homolog of NCBI NO: 21593562 NR Description: unknown [Arabidopsis thaliana]
  misc_feature (1)..(334): Homolog of NCBI NO: 15235735 NR Description: putative protein; protein id: At4g37880.1
MLSQEIDKALSILEETPSSDTMLLDHRSILADVKKVFMEIAPITQLEATEKELHAALTKYPKVLEKQLNPDISKAYRHNVEFDTHIVNQIIANFFYRQGMFDIGDCFVAETGESECSTRQSFVEMYRILEAMKRRDLEPALNWAVSNSDKLKEARSDLEMKLHSLHFLEIARGKNSKEAIDYARKHIATFADSCLPEIQKLMCSLLWNRKLDKSPYSEFLSPALWNNAVKELTRQYCNLLGESSESPLSITVTAGTQALPVLLKYMNVVMANKKLDWQTMEQLPVDAQLSEEFQFHSVFVCPVSKEQSSDDNPPMMMSCGHVLCKQTINKMSKNG

SEQ ID NO: 41158 - protein, 314 aa, Arabidopsis thaliana
  peptide (1)..(314): Ceres Seq. ID no. 12329891
  misc_feature (22)..(313): Homolog of NCBI NO: 10434433 NR Description: unnamed protein product [Homo sapiens]
  misc_feature (1)..(313): Homolog of NCBI NO: 28076879 NR Description: RIKEN cDNA 0610039K22 [Mus musculus]
  misc_feature (1)..(313): Homolog of NCBI NO: 21362098 NR Description: hypothetical protein FLJ22318 [Homo sapiens]
  misc_feature (22)..(313): Homolog of NCBI NO: 31044429 NR Description: hypothetical protein MGC59617 [Mus musculus]
  misc_feature (22)..(313): Homolog of NCBI NO: 12232469 NR Description: hypothetical protein FLJ13910 [Homo sapiens]
  misc_feature (1)..(312): Homolog of NCBI NO: 28829262 NR Description: similar to Arabidopsis thaliana (Mouse-ear
  misc_feature (1)..(313): Homolog of NCBI NO: 15242463 NR Description: putative protein
  misc_feature (1)..(313): Homolog of NCBI NO: 18400050 NR Description: expressed protein
  misc_feature (1)..(313): Homolog of NCBI NO: 21593562 NR Description: unknown [Arabidopsis thaliana]
  misc_feature (1)..(313): Homolog of NCBI NO: 15235735 NR Description: putative protein; protein id: At4g37880.1
MLLDHRSILADVKKVFMEIAPITQLEATEKELHAALTKYPKVLEKQLNPDISKAYRHNVEFDTHIVNQIIANFFYRQGMFDIGDCFVAETGESECSTRQSFVEMYRILEAMKRRDLEPALNWAVSNSDKLKEARSDLEMKLHSLHFLEIARGKNSKEAIDYARKHIATFADSCLPEIQKLMCSLLWNRKLDKSPYSEFLSPALWNNAVKELTRQYCNLLGESSESPLSITVTAGTQALPVLLKYMNVVMANKKLDWQTMEQLPVDAQLSEEFQFHSVFVCPVSKEQSSDDNPPMMMSCGHVLCKQTINKMSKNG

SEQ ID NO: 41159 - DNA, 1038 bp, Arabidopsis thaliana
  misc_feature (1)..(1038): Ceres Seq. ID no. 12323926
  misc_feature: MA Experiment ID: 20000180 Result: Down-regulated in Transcription
  misc_feature: MA Experiment 20000180 PARAMETER Experiment Name: At_Germinating_Seeds_P Parameter: Age (hr) Value: 24 vs. 0
  misc_feature: MA Experiment 20000180 PARAMETER Experiment Name: At_Germinating_Seeds_P Parameter: Tissue Value: Germinating Seeds
  misc_feature: MA Experiment ID: 20000234 Result: Down-regulated in Transcription
  misc_feature: MA Experiment 20000234 PARAMETER Experiment Name: At_Siliques_P Parameter: Age (day) Value: 21
  misc_feature: MA Experiment 20000234 PARAMETER Experiment Name: At_Siliques_P Parameter: Organism Value: A. thaliana
  misc_feature: MA Experiment 20000234 PARAMETER Experiment Name: At_Siliques_P Parameter: Plant Line Value: WS
  misc_feature: MA Experiment 20000234 PARAMETER Experiment Name: At_Siliques_P Parameter: Tissue Value: Less Than 5mm Siliques vs. Whole Plant
  misc_feature: MA Experiment ID: 20000286 Result: Down-regulated in Transcription
  misc_feature: MA Experiment 20000286 PARAMETER Experiment Name: At_Open_Flower_P Parameter: Age (day) Value: 21
  misc_feature: MA Experiment 20000286 PARAMETER Experiment Name: At_Open_Flower_P Parameter: Plant Line Value: WS
  misc_feature: MA Experiment 20000286 PARAMETER Experiment Name: At_Open_Flower_P Parameter: Tissue Value: Half Open vs. Whole Plant
  misc_feature: MA Experiment ID: 20001248 Result: Up-regulated in Transcription
  misc_feature: MA Experiment 20001248 PARAMETER Experiment Name: At_Far-red-induction_P Parameter: Age (day) Value: 7
  misc_feature: MA Experiment 20001248 PARAMETER Experiment Name: At_Far-red-induction_P Parameter: Light Value: Far-red vs. White
  misc_feature: MA Experiment 20001248 PARAMETER Experiment Name: At_Far-red-induction_P Parameter: Organism Value: A. thaliana
  misc_feature: MA Experiment 20001248 PARAMETER Experiment Name: At_Far-red-induction_P Parameter: Plant Line Value: Columbia
  misc_feature: MA Experiment 20001248 PARAMETER Experiment Name: At_Far-red-induction_P Parameter: Timepoint (hr) Value: 4
  misc_feature: MA Experiment 20001248 PARAMETER Experiment Name: At_Far-red-induction_P Parameter: Tissue Value: Whole Plant
  misc_feature: MA Experiment ID: 20001450 Result: Up-regulated in Transcription
  misc_feature: MA Experiment 20001450 PARAMETER Experiment Name: At_Far-red-induction_P Parameter: Age (day) Value: 7
  misc_feature: MA Experiment 20001450 PARAMETER Experiment Name: At_Far-red-induction_P Parameter: Light Value: Far-red vs. White
  misc_feature: MA Experiment 20001450 PARAMETER Experiment Name: At_Far-red-induction_P Parameter: Organism Value: A. thaliana
  misc_feature: MA Experiment 20001450 PARAMETER Experiment Name: At_Far-red-induction_P Parameter: Plant Line Value: Columbia
  misc_feature: MA Experiment 20001450 PARAMETER Experiment Name: At_Far-red-induction_P Parameter: Timepoint (hr) Value: 8
  misc_feature: MA Experiment 20001450 PARAMETER Experiment Name: At_Far-red-induction_P Parameter: Tissue Value: Whole Plant
  misc_feature: MA Experiment ID: 20001451 Result: Up-regulated in Transcription
  misc_feature: MA Experiment 20001451 PARAMETER Experiment Name: At_Far-red-induction_P Parameter: Age (day) Value: 7
  misc_feature: MA Experiment 20001451 PARAMETER Experiment Name: At_Far-red-induction_P Parameter: Light Value: Far-red vs. White
  misc_feature: MA Experiment 20001451 PARAMETER Experiment Name: At_Far-red-induction_P Parameter: Organism Value: A. thaliana
  misc_feature: MA Experiment 20001451 PARAMETER Experiment Name: At_Far-red-induction_P Parameter: Plant Line Value: Columbia
  misc_feature: MA Experiment 20001451 PARAMETER Experiment Name: At_Far-red-induction_P Parameter: Timepoint (hr) Value: 24
  misc_feature: MA Experiment 20001451 PARAMETER Experiment Name: At_Far-red-induction_P Parameter: Tissue Value: Whole Plant
agttcttttcttctctcctcctctttcttcttcctgattggaattttagggcttttgaaagcacgaacgcgtgaagctctaatcgagaaaaaaatggaggttttggataggagagacgatgagatcagggactcgggaaacatggacagcatcaagtcacactatgttaccgactctgtttccgaggaacgccgctctcgtgagctcaaggatggagaccatcctttacggtacaagttttcgatatggtacactcgtcgcacaccaggggttcggaaccagtcttatgaagataacatcaagaagatggtagaattcagcacggttgaaggattttgggcctgctactgtcaccttgctcgttcttctctcttgcctagtccaacagatcttcatttctttaaggatgggattcgtccattgtgggaggatggtgccaactgcaatggaggaaagtggatcatacgtttctcaaaagttgtatctgctcgcttctgggaggatctgcttcttgcgttggtaggcgaccagcttgatgatgctgataacatatgtggggcagtactgagtgtccgtttcaacgaggacatcattagtgtatggaatcgcaatgcttctgaccatcaggcagtgatgggtttgagagactcaatcaagcggcatttgaagttgcctcatgcatatgtcatggaatacaagccacacgatgcttctctccgcgacaactcttcctacagaaacacatggctgagaggataggcccaaagtcgatgattgtatcatgtaatgtggagaagatttgggaagctcatctgcaacctgggaagatatctggattgaaccctgtatccaataccatactgtaccggaggcttacaatatcagaaaaaacaaaatccgggctacttctgtgtcagtatgtgttcatttcgtttttcttttacagtacatcttgttaacttcaatggtttgactcttgatcaaaactataaggatgtattttcaatgaaaactggaaattacgttctggtttacatt

SEQ ID NO: 41160 - protein, 252 aa, Arabidopsis thaliana
  peptide (1)..(252): Ceres Seq. ID no. 12323927
  misc_feature (39)..(239): Homolog of NCBI NO: 29144998 NR Description: Similar to RIKEN cDNA 2700069E09 gene [Mus
  misc_feature (39)..(240): Homolog of NCBI NO: 3201958 NR Description: eIF4E-like protein 4E-LP [Mus musculus]
  misc_feature (61)..(240): Homolog of NCBI NO: 3329384 NR Description: translation initiation factor 4e [Homo sapiens]
  misc_feature (39)..(240): Homolog of NCBI NO: 29839292 NR Description: Eukaryotic translation initiation factor 4E type (eIF-4E type 3) (eIF4E type 3) (mRNA cap-binding protein type 3) translation initiation factor 4E-like 3) (eIF4E-like protein
  misc_feature (39)..(240): Homolog of NCBI NO: 12653185 NR Description: EIF4EL3 protein [Homo sapiens]
  misc_feature (39)..(240): Homolog of NCBI NO: 4757702 NR Description: eukaryotic translation initiation factor 4E-like 3
  misc_feature (44)..(248): Homolog of NCBI NO: 37590370 NR Description: Unknown (protein for MGC:73242) [Danio rerio]
  misc_feature (39)..(248): Homolog of NCBI NO: 13624327 NR Description: RIKEN cDNA 2700069E09; DNA segment, human
  misc_feature (32)..(252): Homolog of NCBI NO: 25453555 NR Description: eukaryotic cap-binding protein [imported] -
  misc_feature (32)..(252): Homolog of NCBI NO: 15238740 NR Description: eukaryotic cap-binding protein (gb|AAC17220.1)
SSFLLSSSFFFLIGILGLLKARTREALIEKKMEVLDRRDDEIRDSGNMDSIKSHYVTDSVSEERRSRELKDGDHPLRYKFSIWYTRRTPGVRNQSYEDNIKKMVEFSTVEGFWACYCHLARSSLLPSPTDLHFFKDGIRPLWEDGANCNGGKWIIRFSKVVSARFWEDLLLALVGDQLDDADNICGAVLSVRFNEDIISVWNRNASDHQAVMGLRDSIKRHLKLPHAYVMEYKPHDASLRDNSSYRNTWLRG

SEQ ID NO: 41161 - protein, 221 aa, Arabidopsis thaliana
  peptide (1)..(221): Ceres Seq. ID no. 12323928
  misc_feature (8)..(208): Homolog of NCBI NO: 29144998 NR Description: Similar to RIKEN cDNA 2700069E09 gene [Mus
  misc_feature (8)..(209): Homolog of NCBI NO: 3201958 NR Description: eIF4E-like protein 4E-LP [Mus musculus]
  misc_feature (30)..(209): Homolog of NCBI NO: 3329384 NR Description: translation initiation factor 4e [Homo sapiens]
  misc_feature (8)..(209): Homolog of NCBI NO: 29839292 NR Description: Eukaryotic translation initiation factor 4E type (eIF-4E type 3) (eIF4E type 3) (mRNA cap-binding protein type 3) translation initiation factor 4E-like 3) (eIF4E-like protein
  misc_feature (8)..(209): Homolog of NCBI NO: 12653185 NR Description: EIF4EL3 protein [Homo sapiens]
  misc_feature (8)..(209): Homolog of NCBI NO: 4757702 NR Description: eukaryotic translation initiation factor 4E-like 3
  misc_feature (13)..(217): Homolog of NCBI NO: 37590370 NR Description: Unknown (protein for MGC:73242) [Danio rerio]
  misc_feature (8)..(217): Homolog of NCBI NO: 13624327 NR Description: RIKEN cDNA 2700069E09; DNA segment, human
  misc_feature (1)..(221): Homolog of NCBI NO: 25453555 NR Description: eukaryotic cap-binding protein [imported] -
  misc_feature (1)..(221): Homolog of NCBI NO: 15238740 NR Description: eukaryotic cap-binding protein (gb|AAC17220.1)
MEVLDRRDDEIRDSGNMDSIKSHYVTDSVSEERRSRELKDGDHPLRYKFSIWYTRRTPGVRNQSYEDNIKKMVEFSTVEGFWACYCHLARSSLLPSPTDLHFFKDGIRPLWEDGANCNGGKWIIRFSKVVSARFWEDLLLALVGDQLDDADNICGAVLSVRFNEDIISVWNRNASDHQAVMGLRDSIKRHLKLPHAYVMEYKPHDASLRDNSSYRNTWLRG

SEQ ID NO: 41162 - protein, 205 aa, Arabidopsis thaliana
  peptide (1)..(205): Ceres Seq. ID no. 12323929
  misc_feature (1)..(192): Homolog of NCBI NO: 29144998 NR Description: Similar to RIKEN cDNA 2700069E09 gene [Mus
  misc_feature (1)..(193): Homolog of NCBI NO: 3201958 NR Description: eIF4E-like protein 4E-LP [Mus musculus]
  misc_feature (14)..(193): Homolog of NCBI NO: 3329384 NR Description: translation initiation factor 4e [Homo sapiens]
  misc_feature (1)..(193): Homolog of NCBI NO: 29839292 NR Description: Eukaryotic translation initiation factor 4E type (eIF-4E type 3) (eIF4E type 3) (mRNA cap-binding protein type 3) translation initiation factor 4E-like 3) (eIF4E-like protein
  misc_feature (1)..(193): Homolog of NCBI NO: 12653185 NR Description: EIF4EL3 protein [Homo sapiens]
  misc_feature (1)..(193): Homolog of NCBI NO: 4757702 NR Description: eukaryotic translation initiation factor 4E-like 3
  misc_feature (1)..(201): Homolog of NCBI NO: 37590370 NR Description: Unknown (protein for MGC:73242) [Danio rerio]
  misc_feature (1)..(201): Homolog of NCBI NO: 13624327 NR Description: RIKEN cDNA 2700069E09; DNA segment, human
  misc_feature (1)..(205): Homolog of NCBI NO: 25453555 NR Description: eukaryotic cap-binding protein [imported] -
  misc_feature (1)..(205): Homolog of NCBI NO: 15238740 NR Description: eukaryotic cap-binding protein (gb|AAC17220.1)
MDSIKSHYVTDSVSEERRSRELKDGDHPLRYKFSIWYTRRTPGVRNQSYEDNIKKMVEFSTVEGFWACYCHLARSSLLPSPTDLHFFKDGIRPLWEDGANCNGGKWIIRFSKVVSARFWEDLLLALVGDQLDDADNICGAVLSVRFNEDIISVWNRNASDHQAVMGLRDSIKRHLKLPHAYVMEYKPHDASLRDNSSYRNTWLRG

SEQ ID NO: 41163 - DNA, 1501 bp, Arabidopsis thaliana
  misc_feature (1)..(1501): Ceres Seq. ID no. 12327967
  misc_feature: MA Experiment ID: 108434 Result: Up-regulated in Transcription
  misc_feature: MA Experiment 108434 PARAMETER Experiment Name: At_Root_Tips_cDNA_P Parameter: Tissue Value: Root Tips
  misc_feature: MA Experiment ID: 108462 Result: Down-regulated in Transcription
  misc_feature: MA Experiment 108462 PARAMETER Experiment Name: At_Germinating_Seeds_cDNA_P Parameter: Age (day) Value: 2 vs. 0
  misc_feature: MA Experiment 108462 PARAMETER Experiment Name: At_Germinating_Seeds_cDNA_P Parameter: Tissue Value: Germinating Seeds
  misc_feature: MA Experiment ID: 108463 Result: Down-regulated in Transcription
  misc_feature: MA Experiment 108463 PARAMETER Experiment Name: At_Germinating_Seeds_cDNA_P Parameter: Age (day) Value: 3 vs. 0
  misc_feature: MA Experiment 108463 PARAMETER Experiment Name: At_Germinating_Seeds_cDNA_P Parameter: Tissue Value: Germinating Seeds
  misc_feature: MA Experiment ID: 108464 Result: Down-regulated in Transcription
  misc_feature: MA Experiment 108464 PARAMETER Experiment Name: At_Germinating_Seeds_cDNA_P Parameter: Age (day) Value: 4 vs. 0
  misc_feature: MA Experiment 108464 PARAMETER Experiment Name: At_Germinating_Seeds_cDNA_P Parameter: Tissue Value: Germinating Seeds
  misc_feature: MA Experiment ID: 108595 Result: Down-regulated in Transcription
  misc_feature: MA Experiment 108595 PARAMETER Experiment Name: At_Ler-pi_Ovule_cDNA_P Parameter: Plant Line Value: null
  misc_feature: MA Experiment ID: 20000111 Result: Down-regulated in Transcription
  misc_feature: MA Experiment 20000111 PARAMETER Experiment Name: At_42deg_Heat_cDNA_P Parameter: Temperature (deg C) Value: 42 vs. 22
  misc_feature: MA Experiment 20000111 PARAMETER Experiment Name: At_42deg_Heat_cDNA_P Parameter: Timepoint (hr) Value: 6
  misc_feature: MA Experiment 20000111 PARAMETER Experiment Name: At_42deg_Heat_cDNA_P Parameter: Tissue Value: Aerial
  misc_feature: MA Experiment ID: 20000173 Result: Down-regulated in Transcription
  misc_feature: MA Experiment 20000173 PARAMETER Experiment Name: At_42deg_Heat_P Parameter: Age (day) Value: 14
  misc_feature: MA Experiment 20000173 PARAMETER Experiment Name: At_42deg_Heat_P Parameter: Organism Value: A. thaliana
  misc_feature: MA Experiment 20000173 PARAMETER Experiment Name: At_42deg_Heat_P Parameter: Plant Line Value: WS
  misc_feature: MA Experiment 20000173 PARAMETER Experiment Name: At_42deg_Heat_P Parameter: Temperature (deg C) Value: 42 vs. 22
  misc_feature: MA Experiment 20000173 PARAMETER Experiment Name: At_42deg_Heat_P Parameter: Timepoint (hr) Value: 6
  misc_feature: MA Experiment 20000173 PARAMETER Experiment Name: At_42deg_Heat_P Parameter: Tissue Value: Aerial
aaaaacaacatcaatggcaatgcacactgttcgattgtcgccggcgactcaacttcacggcggtatctctagcaatctgtcaccacccaatcgaaaacctaataattccatcgtccgatacggatgcggatcttcgaagcgtttccgtatcgtaacggtcttggcgtcactccgggaaaacgatgcaaacggaagggataactccgtgagagctatggaagtgaagaagatctttgaagactcgcctctgcttcctaagccgttatcatcgaaccagctcacggaatctgtctctaatggctcccgcgttcgtgttgcgtatcagggagtacgaggtgcatacagcgaatcagctgctgagaaggcttatccaaactgtgaagctgttccatgcgaagagtttgacactgcttttgaggcggttgagcggtggcttgttgacagagctgttttaccgattgagaactctttaggtggaagcatccatagaaattatgatcttctgctgcgacacaatttgcatattgtaggcgaagtcaagctagctgttcggcactgtttgttggctaaccacggtgtaaatattgaagatttgagaagggtgcttagccatccacaggctcttgcccaatgtgaaaacacgttaaccaaattggggttggtcagagaagcagtagatgatactgctggcgctgcgaagcaaattgcattcgaaaatttaaatgatgcagctgcagttgccagtgaaaaagctgcaaagatatatggtttgaacatagtcgctaaagatatccaggatgactgtgataatgttacaaggtttctaatgctcgcaagagaacccattatccctggaactaacagactctttaagacaagtatagttttctcgttagaggaagggcctggagtacttttcaaagcgcttgctgtgtttgcccttcggcaaatcaacctcacaaagattgaaagccgccctttaaggaaacatcctctccgagcatctggaggactaaaatactttgactatcttttctatgtggactttgaagcatctatggctgatgaagttgctcaaaacgcacttaggcatctcgaggagtttgctacctttttgcgggtactgggaagctacccagtggacactacaatgctctaaacatttcaaacatcttcttgtttgtgacagagatccgcttgatgatatcataatcctggtataaggagctatatccctgaggtgaggtctgagaggagtcaccaccttacaagacattccgctcttgttacaaattctgtttagttttccaaaaaagatcatctttgtttttagtaagaatgtagtcactaagtcagatatcaatgacaaataccaaagaactagtgttttttcgtgtttcatccatacatagatacttatcctgtgtcttttttagaaatttctttttgtatgacgtttcaaaattttgattgactattgttagtggtatatctttgagtt

SEQ ID NO: 41164 - protein, 385 aa, Arabidopsis thaliana
  peptide (1)..(385): Ceres Seq. ID no. 12327968
  misc_feature (105)..(282): Pfam Name: Prephenate dehydratase Pfam Description: Prephenate dehydratase
  misc_feature (63)..(383): Homolog of NCBI NO: 15242928 NR Description: chorismate mutase/prephenate dehydratase-like
  misc_feature (84)..(385): Homolog of NCBI NO: 38347597 NR Description: OSJNBa0042I15.10 [Oryza sativa (japonica
  misc_feature (55)..(383): Homolog of NCBI NO: 21593283 NR Description: putative chorismate mutase/prephenate dehydratase
  misc_feature (55)..(383): Homolog of NCBI NO: 15226259 NR Description: putative chorismate mutase/prephenate dehydratase
  misc_feature (60)..(383): Homolog of NCBI NO: 18390869 NR Description: expressed protein
  misc_feature (14)..(381): Homolog of NCBI NO: 15221096 NR Description: putative chloroplast prephenate dehydratase
  misc_feature (14)..(381): Homolog of NCBI NO: 14596233 NR Description: Unknown protein [Arabidopsis thaliana]
  misc_feature (84)..(383): Homolog of NCBI NO: 34394031 NR Description: putative prephenate dehydratase
  misc_feature (5)..(385): Homolog of NCBI NO: 21537054 NR Description: putative P-protein: chorismate mutase, prephenate
  misc_feature (5)..(385): Homolog of NCBI NO: 15231489 NR Description: putative P-protein: chorismate mutase, prephenate
KTTSMAMHTVRLSPATQLHGGISSNLSPPNRKPNNSIVRYGCGSSKRFRIVTVLASLRENDANGRDNSVRAMEVKKIFEDSPLLPKPLSSNQLTESVSNGSRVRVAYQGVRGAYSESAAEKAYPNCEAVPCEEFDTAFEAVERWLVDRAVLPIENSLGGSIHRNYDLLLRHNLHIVGEVKLAVRHCLLANHGVNIEDLRRVLSHPQALAQCENTLTKLGLVREAVDDTAGAAKQIAFENLNDAAAVASEKAAKIYGLNIVAKDIQDDCDNVTRFLMLAREPIIPGTNRLFKTSIVFSLEEGPGVLFKALAVFALRQINLTKIESRPLRKHPLRASGGLKYFDYLFYVDFEASMADEVAQNALRHLEEFATFLRVLGSYPVDTTML

SEQ ID NO: 41165 - protein, 381 aa, Arabidopsis thaliana
  peptide (1)..(381): Ceres Seq. ID no. 12327969
  misc_feature (101)..(278): Pfam Name: Prephenate dehydratase Pfam Description: Prephenate dehydratase
  misc_feature (59)..(379): Homolog of NCBI NO: 15242928 NR Description: chorismate mutase/prephenate dehydratase-like
  misc_feature (80)..(381): Homolog of NCBI NO: 38347597 NR Description: OSJNBa0042I15.10 [Oryza sativa (japonica
  misc_feature (51)..(379): Homolog of NCBI NO: 21593283 NR Description: putative chorismate mutase/prephenate dehydratase
  misc_feature (51)..(379): Homolog of NCBI NO: 15226259 NR Description: putative chorismate mutase/prephenate dehydratase
  misc_feature (56)..(379): Homolog of NCBI NO: 18390869 NR Description: expressed protein
  misc_feature (10)..(377): Homolog of NCBI NO: 15221096 NR Description: putative chloroplast prephenate dehydratase
  misc_feature (10)..(377): Homolog of NCBI NO: 14596233 NR Description: Unknown protein [Arabidopsis thaliana]
  misc_feature (80)..(379): Homolog of NCBI NO: 34394031 NR Description: putative prephenate dehydratase
  misc_feature (1)..(381): Homolog of NCBI NO: 21537054 NR Description: putative P-protein: chorismate mutase, prephenate
  misc_feature (1)..(381): Homolog of NCBI NO: 15231489 NR Description: putative P-protein: chorismate mutase, prephenate
MAMHTVRLSPATQLHGGISSNLSPPNRKPNNSIVRYGCGSSKRFRIVTVLASLRENDANGRDNSVRAMEVKKIFEDSPLLPKPLSSNQLTESVSNGSRVRVAYQGVRGAYSESAAEKAYPNCEAVPCEEFDTAFEAVERWLVDRAVLPIENSLGGSIHRNYDLLLRHNLHIVGEVKLAVRHCLLANHGVNIEDLRRVLSHPQALAQCENTLTKLGLVREAVDDTAGAAKQIAFENLNDAAAVASEKAAKIYGLNIVAKDIQDDCDNVTRFLMLAREPIIPGTNRLFKTSIVFSLEEGPGVLFKALAVFALRQINLTKIESRPLRKHPLRASGGLKYFDYLFYVDFEASMADEVAQNALRHLEEFATFLRVLGSYPVDTTML

SEQ ID NO: 41166 - protein, 379 aa, Arabidopsis thaliana
  peptide (1)..(379): Ceres Seq. ID no. 12327970
  misc_feature (99)..(276): Pfam Name: Prephenate dehydratase Pfam Description: Prephenate dehydratase
  misc_feature (57)..(377): Homolog of NCBI NO: 15242928 NR Description: chorismate mutase/prephenate dehydratase-like
  misc_feature (78)..(379): Homolog of NCBI NO: 38347597 NR Description: OSJNBa0042I15.10 [Oryza sativa (japonica
  misc_feature (49)..(377): Homolog of NCBI NO: 21593283 NR Description: putative chorismate mutase/prephenate dehydratase
  misc_feature (49)..(377): Homolog of NCBI NO: 15226259 NR Description: putative chorismate mutase/prephenate dehydratase
  misc_feature (54)..(377): Homolog of NCBI NO: 18390869 NR Description: expressed protein
  misc_feature (8)..(375): Homolog of NCBI NO: 15221096 NR Description: putative chloroplast prephenate dehydratase
  misc_feature (8)..(375): Homolog of NCBI NO: 14596233 NR Description: Unknown protein [Arabidopsis thaliana]
  misc_feature (78)..(377): Homolog of NCBI NO: 34394031 NR Description: putative prephenate dehydratase
  misc_feature (1)..(379): Homolog of NCBI NO: 21537054 NR Description: putative P-protein: chorismate mutase, prephenate
  misc_feature (1)..(379): Homolog of NCBI NO: 15231489 NR Description: putative P-protein: chorismate mutase, prephenate
MHTVRLSPATQLHGGISSNLSPPNRKPNNSIVRYGCGSSKRFRIVTVLASLRENDANGRDNSVRAMEVKKIFEDSPLLPKPLSSNQLTESVSNGSRVRVAYQGVRGAYSESAAEKAYPNCEAVPCEEFDTAFEAVERWLVDRAVLPIENSLGGSIHRNYDLLLRHNLHIVGEVKLAVRHCLLANHGVNIEDLRRVLSHPQALAQCENTLTKLGLVREAVDDTAGAAKQIAFENLNDAAAVASEKAAKIYGLNIVAKDIQDDCDNVTRFLMLAREPIIPGTNRLFKTSIVFSLEEGPGVLFKALAVFALRQINLTKIESRPLRKHPLRASGGLKYFDYLFYVDFEASMADEVAQNALRHLEEFATFLRVLGSYPVDTTML

SEQ ID NO: 41167 - DNA, 1129 bp, Arabidopsis thaliana
  misc_feature (1)..(1129): Ceres Seq. ID no. 12422151
  misc_feature: MA Experiment ID: 108434 Result: Down-regulated in Transcription
  misc_feature: MA Experiment 108434 PARAMETER Experiment Name: At_Root_Tips_cDNA_P Parameter: Tissue Value: Root Tips
  misc_feature: MA Experiment ID: 108463 Result: Up-regulated in Transcription
  misc_feature: MA Experiment 108463 PARAMETER Experiment Name: At_Germinating_Seeds_cDNA_P Parameter: Age (day) Value: 3 vs. 0
  misc_feature: MA Experiment 108463 PARAMETER Experiment Name: At_Germinating_Seeds_cDNA_P Parameter: Tissue Value: Germinating Seeds
  misc_feature: MA Experiment ID: 108464 Result: Up-regulated in Transcription
  misc_feature: MA Experiment 108464 PARAMETER Experiment Name: At_Germinating_Seeds_cDNA_P Parameter: Age (day) Value: 4 vs. 0
  misc_feature: MA Experiment 108464 PARAMETER Experiment Name: At_Germinating_Seeds_cDNA_P Parameter: Tissue Value: Germinating Seeds
  misc_feature: MA Experiment ID: 108501 Result: Up-regulated in Transcription
  misc_feature: MA Experiment 108501 PARAMETER Experiment Name: At_ap2_floral_buds_cDNA_P Parameter: Plant Line Value: ap2 (Ler.)
  misc_feature: MA Experiment 108501 PARAMETER Experiment Name: At_ap2_floral_buds_cDNA_P Parameter: Tissue Value: Closed Flower
  misc_feature: MA Experiment ID: 108609 Result: Up-regulated in Transcription
  misc_feature: MA Experiment 108609 PARAMETER Experiment Name: At_100uM_ABA_cDNA_P Parameter: Timepoint (hr) Value: 24
  misc_feature: MA Experiment 108609 PARAMETER Experiment Name: At_100uM_ABA_cDNA_P Parameter: Tissue Value: Aerial
  misc_feature: MA Experiment 108609 PARAMETER Experiment Name: At_100uM_ABA_cDNA_P Parameter: Treatment Value: 100uM ABA vs. No Treatment
  misc_feature: MA Experiment ID: 108667 Result: Up-regulated in Transcription
  misc_feature: MA Experiment 108667 PARAMETER Experiment Name: At_2mM_SA_cDNA_P Parameter: Plant Line Value: WS
  misc_feature: MA Experiment 108667 PARAMETER Experiment Name: At_2mM_SA_cDNA_P Parameter: Timepoint (hr) Value: 1
  misc_feature: MA Experiment 108667 PARAMETER Experiment Name: At_2mM_SA_cDNA_P Parameter: Treatment Value: 2mM SA vs. No Treatment
  misc_feature: MA Experiment ID: 20000171 Result: Down-regulated in Transcription
  misc_feature: MA Experiment 20000171 PARAMETER Experiment Name: At_42deg_Heat_P Parameter: Age (day) Value: 14
  misc_feature: MA Experiment 20000171 PARAMETER Experiment Name: At_42deg_Heat_P Parameter: Organism Value: A. thaliana
  misc_feature: MA Experiment 20000171 PARAMETER Experiment Name: At_42deg_Heat_P Parameter: Plant Line Value: WS
  misc_feature: MA Experiment 20000171 PARAMETER Experiment Name: At_42deg_Heat_P Parameter: Temperature (deg C) Value: 42 vs. 22
  misc_feature: MA Experiment 20000171 PARAMETER Experiment Name: At_42deg_Heat_P Parameter: Timepoint (hr) Value: 1
  misc_feature: MA Experiment 20000171 PARAMETER Experiment Name: At_42deg_Heat_P Parameter: Tissue Value: Aerial
  misc_feature: MA Experiment ID: 20000185 Result: Down-regulated in Transcription
  misc_feature: MA Experiment 20000185 PARAMETER Experiment Name: At_Roots__P Parameter: Age (day) Value: 7 vs. 21
  misc_feature: MA Experiment 20000185 PARAMETER Experiment Name: At_Roots__P Parameter: Organism Value: A. thaliana
  misc_feature: MA Experiment 20000185 PARAMETER Experiment Name: At_Roots__P Parameter: Tissue Value: Roots vs. Whole Plant
  misc_feature: MA Experiment ID: 20000224 Result: Down-regulated in Transcription
  misc_feature: MA Experiment ID: 20000234 Result: Down-regulated in Transcription
  misc_feature: MA Experiment 20000234 PARAMETER Experiment Name: At_Siliques_P Parameter: Age (day) Value: 21
  misc_feature: MA Experiment 20000234 PARAMETER Experiment Name: At_Siliques_P Parameter: Organism Value: A. thaliana
  misc_feature: MA Experiment 20000234 PARAMETER Experiment Name: At_Siliques_P Parameter: Plant Line Value: WS
  misc_feature: MA Experiment 20000234 PARAMETER Experiment Name: At_Siliques_P Parameter: Tissue Value: Less Than 5mm Siliques vs. Whole Plant
  misc_feature: MA Experiment ID: 20000235 Result: Down-regulated in Transcription
  misc_feature: MA Experiment 20000235 PARAMETER Experiment Name: At_Siliques_P Parameter: Age (day) Value: 21
  misc_feature: MA Experiment 20000235 PARAMETER Experiment Name: At_Siliques_P Parameter: Organism Value: A. thaliana
  misc_feature: MA Experiment 20000235 PARAMETER Experiment Name: At_Siliques_P Parameter: Plant Line Value: WS
  misc_feature: MA Experiment 20000235 PARAMETER Experiment Name: At_Siliques_P Parameter: Tissue Value: 5-10mm Siliques vs. Whole Plant
  misc_feature: MA Experiment ID: 20000264 Result: Down-regulated in Transcription
  misc_feature: MA Experiment 20000264 PARAMETER Experiment Name: At_Open_Flower_P Parameter: Age (day) Value: 21
  misc_feature: MA Experiment 20000264 PARAMETER Experiment Name: At_Open_Flower_P Parameter: Plant Line Value: WS
  misc_feature: MA Experiment 20000264 PARAMETER Experiment Name: At_Open_Flower_P Parameter: Tissue Value: Open Flower vs. Whole Plant
  misc_feature: MA Experiment ID: 20000265 Result: Down-regulated in Transcription
  misc_feature: MA Experiment 20000265 PARAMETER Experiment Name: At_Open_Flower_P Parameter: Age (day) Value: 21
  misc_feature: MA Experiment 20000265 PARAMETER Experiment Name: At_Open_Flower_P Parameter: Plant Line Value: WS
  misc_feature: MA Experiment 20000265 PARAMETER Experiment Name: At_Open_Flower_P Parameter: Tissue Value: Closed Flower vs. Whole Plant
  misc_feature: MA Experiment ID: 20000267 Result: Up-regulated in Transcription
  misc_feature: MA Experiment 20000267 PARAMETER Experiment Name: At_Drought_P Parameter: Age (day) Value: 7
  misc_feature: MA Experiment 20000267 PARAMETER Experiment Name: At_Drought_P Parameter: Organism Value: A. thaliana
  misc_feature: MA Experiment 20000267 PARAMETER Experiment Name: At_Drought_P Parameter: Plant Line Value: WS
  misc_feature: MA Experiment 20000267 PARAMETER Experiment Name: At_Drought_P Parameter: Timepoint (hr) Value: 6
  misc_feature: MA Experiment 20000267 PARAMETER Experiment Name: At_Drought_P Parameter: Tissue Value: Whole Plant
  misc_feature: MA Experiment 20000267 PARAMETER Experiment Name: At_Drought_P Parameter: Treatment Value: Drought vs. No Drought
  misc_feature: MA Experiment ID: 20000268 Result: Down-regulated in Transcription
  misc_feature: MA Experiment 20000268 PARAMETER Experiment Name: At_100mM_NaCl__P Parameter: Age (day) Value: 14
  misc_feature: MA Experiment 20000268 PARAMETER Experiment Name: At_100mM_NaCl__P Parameter: Organism Value: A. thaliana
  misc_feature: MA Experiment 20000268 PARAMETER Experiment Name: At_100mM_NaCl__P Parameter: Plant Line Value: WS
  misc_feature: MA Experiment 20000268 PARAMETER Experiment Name: At_100mM_NaCl__P Parameter: Timepoint (hr) Value: 6
  misc_feature: MA Experiment 20000268 PARAMETER Experiment Name: At_100mM_NaCl__P Parameter: Tissue Value: Whole Plant
  misc_feature: MA Experiment 20000268 PARAMETER Experiment Name: At_100mM_NaCl__P Parameter: Treatment Value: 100mM NaCl vs. No Treatment
  misc_feature: MA Experiment ID: 20000286 Result: Down-regulated in Transcription
  misc_feature: MA Experiment 20000286 PARAMETER Experiment Name: At_Open_Flower_P Parameter: Age (day) Value: 21
  misc_feature: MA Experiment 20000286 PARAMETER Experiment Name: At_Open_Flower_P Parameter: Plant Line Value: WS
  misc_feature: MA Experiment 20000286 PARAMETER Experiment Name: At_Open_Flower_P Parameter: Tissue Value: Half Open vs. Whole Plant
  misc_feature: MA Experiment ID: 20000288 Result: Down-regulated in Transcription
  misc_feature: MA Experiment 20000288 PARAMETER Experiment Name: At_Drought_P Parameter: Age (day) Value: 7
  misc_feature: MA Experiment 20000288 PARAMETER Experiment Name: At_Drought_P Parameter: Organism Value: A. thaliana
  misc_feature: MA Experiment 20000288 PARAMETER Experiment Name: At_Drought_P Parameter: Plant Line Value: WS
  misc_feature: MA Experiment 20000288 PARAMETER Experiment Name: At_Drought_P Parameter: Timepoint (hr) Value: 1
  misc_feature: MA Experiment 20000288 PARAMETER Experiment Name: At_Drought_P Parameter: Tissue Value: Whole Plant
  misc_feature: MA Experiment 20000288 PARAMETER Experiment Name: At_Drought_P Parameter: Treatment Value: Drought vs. No Drought
  misc_feature: MA Experiment ID: 20000308 Result: Down-regulated in Transcription
  misc_feature: MA Experiment 20000308 PARAMETER Experiment Name: At_100mM_NaCl__P Parameter: Age (day) Value: 17
  misc_feature: MA Experiment 20000308 PARAMETER Experiment Name: At_100mM_NaCl__P Parameter: Organism Value: A. thaliana
  misc_feature: MA Experiment 20000308 PARAMETER Experiment Name: At_100mM_NaCl__P Parameter: Plant Line Value: WS
  misc_feature: MA Experiment 20000308 PARAMETER Experiment Name: At_100mM_NaCl__P Parameter: Timepoint (hr) Value: 72
  misc_feature: MA Experiment 20000308 PARAMETER Experiment Name: At_100mM_NaCl__P Parameter: Tissue Value: Whole Plant
  misc_feature: MA Experiment 20000308 PARAMETER Experiment Name: At_100mM_NaCl__P Parameter: Treatment Value: 100mM NaCl vs. No Treatment
  misc_feature: MA Experiment ID: 20000437 Result: Down-regulated in Transcription
  misc_feature: MA Experiment 20000437 PARAMETER Experiment Name: At_Drought_P Parameter: Age (day) Value: 8
  misc_feature: MA Experiment 20000437 PARAMETER Experiment Name: At_Drought_P Parameter: Organism Value: A. thaliana
  misc_feature: MA Experiment 20000437 PARAMETER Experiment Name: At_Drought_P Parameter: Plant Line Value: WS
  misc_feature: MA Experiment 20000437 PARAMETER Experiment Name: At_Drought_P Parameter: Timepoint (hr) Value: 24
  misc_feature: MA Experiment 20000437 PARAMETER Experiment Name: At_Drought_P Parameter: Tissue Value: Whole Plant
  misc_feature: MA Experiment 20000437 PARAMETER Experiment Name: At_Drought_P Parameter: Treatment Value: Drought vs. No Drought
  misc_feature: MA Experiment ID: 20000438 Result: Down-regulated in Transcription
  misc_feature: MA Experiment 20000438 PARAMETER Experiment Name: At_Shoots__P Parameter: Age (day) Value: 14
  misc_feature: MA Experiment 20000438 PARAMETER Experiment Name: At_Shoots__P Parameter: Tissue Value: Shoots vs. Whole Plant
  misc_feature: MA Experiment ID: 20000439 Result: Down-regulated in Transcription
  misc_feature: MA Experiment 20000439 PARAMETER Experiment Name: At_Roots__P Parameter: Age (day) Value: 14 vs. 21
  misc_feature: MA Experiment 20000439 PARAMETER Experiment Name: At_Roots__P Parameter: Organism Value: A. thaliana
  misc_feature: MA Experiment 20000439 PARAMETER Experiment Name: At_Roots__P Parameter: Tissue Value: Roots vs. Whole Plant
  misc_feature: MA Experiment ID: 20000441 Result: Up-regulated in Transcription
  misc_feature: MA Experiment 20000441 PARAMETER Experiment Name: At_1uM_BR-BRZ__P Parameter: Tissue Value: Shoot Apices
  misc_feature: MA Experiment 20000441 PARAMETER Experiment Name: At_1uM_BR-BRZ__P Parameter: Treatment Value: 1uM BR vs. No Treatment
  misc_feature: MA Experiment ID: 20000443 Result: Up-regulated in Transcription
  misc_feature: MA Experiment 20000443 PARAMETER Experiment Name: At_1uM_BR-BRZ__P Parameter: Tissue Value: Shoot Apices
  misc_feature: MA Experiment 20000443 PARAMETER Experiment Name: At_1uM_BR-BRZ__P Parameter: Treatment Value: 1uM BRZ vs. No Treatment
  misc_feature: MA Experiment ID: 20000452 Result: Down-regulated in Transcription
  misc_feature: MA Experiment 20000452 PARAMETER Experiment Name: At_CS6879_Shoots-Roots_P Parameter: Age (day) Value: 14
  misc_feature: MA Experiment 20000452 PARAMETER Experiment Name: At_CS6879_Shoots-Roots_P Parameter: Organism Value: A. thaliana
  misc_feature: MA Experiment 20000452 PARAMETER Experiment Name: At_CS6879_Shoots-Roots_P Parameter: Plant Line Value: CS6879 vs. WS
  misc_feature: MA Experiment 20000452 PARAMETER Experiment Name: At_CS6879_Shoots-Roots_P Parameter: Tissue Value: Shoots
  misc_feature: MA Experiment ID: 20000460 Result: Up-regulated in Transcription
  misc_feature: MA Experiment 20000460 PARAMETER Experiment Name: At_10percent_PEG_P Parameter: Age (day) Value: 12
  misc_feature: MA Experiment 20000460 PARAMETER Experiment Name: At_10percent_PEG_P Parameter: Organism Value: A. thaliana
  misc_feature: MA Experiment 20000460 PARAMETER Experiment Name: At_10percent_PEG_P Parameter: Plant Line Value: WS
  misc_feature: MA Experiment 20000460 PARAMETER Experiment Name: At_10percent_PEG_P Parameter: Timepoint (day) Value: 12
  misc_feature: MA Experiment 20000460 PARAMETER Experiment Name: At_10percent_PEG_P Parameter: Tissue Value: Whole Plant
  misc_feature: MA Experiment 20000460 PARAMETER Experiment Name: At_10percent_PEG_P Parameter: Treatment Value: 10percent PEG vs. No Treatment
  misc_feature: MA Experiment ID: 20000495 Result: Down-regulated in Transcription
  misc_feature: MA Experiment 20000495 PARAMETER Experiment Name: At_Guard_Cells_P Parameter: Harvest Date Value: 8/2/2002
  misc_feature: MA Experiment 20000495 PARAMETER Experiment Name: At_Guard_Cells_P Parameter: Organism Value: A. thaliana
  misc_feature: MA Experiment 20000495 PARAMETER Experiment Name: At_Guard_Cells_P Parameter: Tissue Value: Guard Cells vs. Leaves
  misc_feature: MA Experiment ID: 20000527 Result: Up-regulated in Transcription
  misc_feature: MA Experiment 20000527 PARAMETER Experiment Name: At_10percent_PEG_P Parameter: Age (day) Value: 20
  misc_feature: MA Experiment 20000527 PARAMETER Experiment Name: At_10percent_PEG_P Parameter: Organism Value: A. thaliana
  misc_feature: MA Experiment 20000527 PARAMETER Experiment Name: At_10percent_PEG_P Parameter: Plant Line Value: WS
  misc_feature: MA Experiment 20000527 PARAMETER Experiment Name: At_10percent_PEG_P Parameter: Timepoint (day) Value: 20
  misc_feature: MA Experiment 20000527 PARAMETER Experiment Name: At_10percent_PEG_P Parameter: Tissue Value: Whole Plant
  misc_feature: MA Experiment 20000527 PARAMETER Experiment Name: At_10percent_PEG_P Parameter: Treatment Value: 10percent PEG vs. No Treatment
  misc_feature: MA Experiment ID: 20000573 Result: Down-regulated in Transcription
  misc_feature: MA Experiment 20000573 PARAMETER Experiment Name: At_100uM_ABA_Mutants__P Parameter: Organism Value: A. thaliana
  misc_feature: MA Experiment 20000573 PARAMETER Experiment Name: At_100uM_ABA_Mutants__P Parameter: Plant Line Value: CS22 vs. Ler wt
  misc_feature: MA Experiment 20000573 PARAMETER Experiment Name: At_100uM_ABA_Mutants__P Parameter: Timepoint (hr) Value: N/A
  misc_feature: MA Experiment 20000573 PARAMETER Experiment Name: At_100uM_ABA_Mutants__P Parameter: Tissue Value: Whole Plant
  misc_feature: MA Experiment 20000573 PARAMETER Experiment Name: At_100uM_ABA_Mutants__P Parameter: Treatment Value: None
  misc_feature: MA Experiment ID: 20000574 Result: Down-regulated in Transcription
  misc_feature: MA Experiment 20000574 PARAMETER Experiment Name: At_100uM_ABA_Mutants__P Parameter: Organism Value: A. thaliana
  misc_feature: MA Experiment 20000574 PARAMETER Experiment Name: At_100uM_ABA_Mutants__P Parameter: Plant Line Value: CS23 vs. Ler wt
  misc_feature: MA Experiment 20000574 PARAMETER Experiment Name: At_100uM_ABA_Mutants__P Parameter: Timepoint (hr) Value: N/A
  misc_feature: MA Experiment 20000574 PARAMETER Experiment Name: At_100uM_ABA_Mutants__P Parameter: Tissue Value: Whole Plant
  misc_feature: MA Experiment 20000574 PARAMETER Experiment Name: At_100uM_ABA_Mutants__P Parameter: Treatment Value: None
  misc_feature: MA Experiment ID: 20000606 Result: Up-regulated in Transcription
  misc_feature: MA Experiment 20000606 PARAMETER Experiment Name: At_CS8548_Mutant_P Parameter: Age (day) Value: 14
  misc_feature: MA Experiment 20000606 PARAMETER Experiment Name: At_CS8548_Mutant_P Parameter: Plant Line Value: CS8548 vs. wt
  misc_feature: MA Experiment 20000606 PARAMETER Experiment Name: At_CS8548_Mutant_P Parameter: Tissue Value: Whole Plant
  misc_feature: MA Experiment ID: 20000709 Result: Up-regulated in Transcription
  misc_feature: MA Experiment 20000709 PARAMETER Experiment Name: At_15mM_NH4NO3_L-to-H_P Parameter: Age (hr) Value: 14
  misc_feature: MA Experiment 20000709 PARAMETER Experiment Name: At_15mM_NH4NO3_L-to-H_P Parameter: Organism Value: A. thaliana
  misc_feature: MA Experiment 20000709 PARAMETER Experiment Name: At_15mM_NH4NO3_L-to-H_P Parameter: Plant Line Value: WS
  misc_feature: MA Experiment 20000709 PARAMETER Experiment Name: At_15mM_NH4NO3_L-to-H_P Parameter: Timepoint (hr) Value: 4
  misc_feature: MA Experiment 20000709 PARAMETER Experiment Name: At_15mM_NH4NO3_L-to-H_P Parameter: Tissue Value: Aerial
  misc_feature: MA Experiment 20000709 PARAMETER Experiment Name: At_15mM_NH4NO3_L-to-H_P Parameter: Treatment Value: 15mM NH4NO3 vs. 30mM Mannitol
  misc_feature: MA Experiment ID: 20000794 Result: Down-regulated in Transcription
  misc_feature: MA Experiment 20000794 PARAMETER Experiment Name: At_Petals_P Parameter: Age (day) Value: 23-25 days
  misc_feature: MA Experiment 20000794 PARAMETER Experiment Name: At_Petals_P Parameter: Plant Line Value: WS
  misc_feature: MA Experiment 20000794 PARAMETER Experiment Name: At_Petals_P Parameter: Tissue Value: Petals vs. Whole plant
  misc_feature: MA Experiment ID: 20001247 Result: Up-regulated in Transcription
  misc_feature: MA Experiment 20001247 PARAMETER Experiment Name: At_Far-red-induction_P Parameter: Age (day) Value: 7
  misc_feature: MA Experiment 20001247 PARAMETER Experiment Name: At_Far-red-induction_P Parameter: Light Value: Far-red vs. White
  misc_feature: MA Experiment 20001247 PARAMETER Experiment Name: At_Far-red-induction_P Parameter: Organism Value: A. thaliana
  misc_feature: MA Experiment 20001247 PARAMETER Experiment Name: At_Far-red-induction_P Parameter: Plant Line Value: Columbia
  misc_feature: MA Experiment 20001247 PARAMETER Experiment Name: At_Far-red-induction_P Parameter: Timepoint (hr) Value: 1
  misc_feature: MA Experiment 20001247 PARAMETER Experiment Name: At_Far-red-induction_P Parameter: Tissue Value: Whole Plant
  misc_feature: MA Experiment ID: 20001248 Result: Up-regulated in Transcription
  misc_feature: MA Experiment 20001248 PARAMETER Experiment Name: At_Far-red-induction_P Parameter: Age (day) Value: 7
  misc_feature: MA Experiment 20001248 PARAMETER Experiment Name: At_Far-red-induction_P Parameter: Light Value: Far-red vs. White
  misc_feature: MA Experiment 20001248 PARAMETER Experiment Name: At_Far-red-induction_P Parameter: Organism Value: A. thaliana
  misc_feature: MA Experiment 20001248 PARAMETER Experiment Name: At_Far-red-induction_P Parameter: Plant Line Value: Columbia
  misc_feature: MA Experiment 20001248 PARAMETER Experiment Name: At_Far-red-induction_P Parameter: Timepoint (hr) Value: 4
  misc_feature: MA Experiment 20001248 PARAMETER Experiment Name: At_Far-red-induction_P Parameter: Tissue Value: Whole Plant
  misc_feature: MA Experiment ID: 20001450 Result: Up-regulated in Transcription
  misc_feature: MA Experiment 20001450 PARAMETER Experiment Name: At_Far-red-induction_P Parameter: Age (day) Value: 7
  misc_feature: MA Experiment 20001450 PARAMETER Experiment Name: At_Far-red-induction_P Parameter: Light Value: Far-red vs. White
  misc_feature: MA Experiment 20001450 PARAMETER Experiment Name: At_Far-red-induction_P Parameter: Organism Value: A. thaliana
  misc_feature: MA Experiment 20001450 PARAMETER Experiment Name: At_Far-red-induction_P Parameter: Plant Line Value: Columbia
  misc_feature: MA Experiment 20001450 PARAMETER Experiment Name: At_Far-red-induction_P Parameter: Timepoint (hr) Value: 8
  misc_feature: MA Experiment 20001450 PARAMETER Experiment Name: At_Far-red-induction_P Parameter: Tissue Value: Whole Plant
  misc_feature: MA Experiment ID: 20001451 Result: Up-regulated in Transcription
  misc_feature: MA Experiment 20001451 PARAMETER Experiment Name: At_Far-red-induction_P Parameter: Age (day) Value: 7
  misc_feature: MA Experiment 20001451 PARAMETER Experiment Name: At_Far-red-induction_P Parameter: Light Value: Far-red vs. White
  misc_feature: MA Experiment 20001451 PARAMETER Experiment Name: At_Far-red-induction_P Parameter: Organism Value: A. thaliana
  misc_feature: MA Experiment 20001451 PARAMETER Experiment Name: At_Far-red-induction_P Parameter: Plant Line Value: Columbia
  misc_feature: MA Experiment 20001451 PARAMETER Experiment Name: At_Far-red-induction_P Parameter: Timepoint (hr) Value: 24
  misc_feature: MA Experiment 20001451 PARAMETER Experiment Name: At_Far-red-induction_P Parameter: Tissue Value: Whole Plant
  misc_feature: MA Experiment ID: 20001556 Result: Down-regulated in Transcription
  misc_feature: MA Experiment 20001556 PARAMETER Experiment Name: At_Drought_Soil_Dry_P Parameter: Age (day) Value: 26
  misc_feature: MA Experiment 20001556 PARAMETER Experiment Name: At_Drought_Soil_Dry_P Parameter: Organism Value: A. thaliana
  misc_feature: MA Experiment 20001556 PARAMETER Experiment Name: At_Drought_Soil_Dry_P Parameter: Plant Line Value: WS
  misc_feature: MA Experiment 20001556 PARAMETER Experiment Name: At_Drought_Soil_Dry_P Parameter: Post Timepoint (hr) Value: None
  misc_feature: MA Experiment 20001556 PARAMETER Experiment Name: At_Drought_Soil_Dry_P Parameter: Post-Treatment Value: None
  misc_feature: MA Experiment 20001556 PARAMETER Experiment Name: At_Drought_Soil_Dry_P Parameter: Timepoint (day) Value: 12
  misc_feature: MA Experiment 20001556 PARAMETER Experiment Name: At_Drought_Soil_Dry_P Parameter: Treatment Value: Drought vs. No Drought
  misc_feature: MA Experiment ID: 20001557 Result: Up-regulated in Transcription
  misc_feature: MA Experiment 20001557 PARAMETER Experiment Name: At_Drought_Soil_Dry_P Parameter: Age (day) Value: 27
  misc_feature: MA Experiment 20001557 PARAMETER Experiment Name: At_Drought_Soil_Dry_P Parameter: Organism Value: A. thaliana
  misc_feature: MA Experiment 20001557 PARAMETER Experiment Name: At_Drought_Soil_Dry_P Parameter: Plant Line Value: WS
  misc_feature: MA Experiment 20001557 PARAMETER Experiment Name: At_Drought_Soil_Dry_P Parameter: Post Timepoint (hr) Value: 3
  misc_feature: MA Experiment 20001557 PARAMETER Experiment Name: At_Drought_Soil_Dry_P Parameter: Post-Treatment Value: Re-Water vs. No Drought
  misc_feature: MA Experiment 20001557 PARAMETER Experiment Name: At_Drought_Soil_Dry_P Parameter: Timepoint (day) Value: 13
  misc_feature: MA Experiment 20001557 PARAMETER Experiment Name: At_Drought_Soil_Dry_P Parameter: Treatment Value: Drought vs. No Drought
  misc_feature: MA Experiment ID: 20001558 Result: Up-regulated in Transcription
  misc_feature: MA Experiment 20001558 PARAMETER Experiment Name: At_Drought_Soil_Dry_P Parameter: Age (day) Value: 27
  misc_feature: MA Experiment 20001558 PARAMETER Experiment Name: At_Drought_Soil_Dry_P Parameter: Organism Value: A. thaliana
  misc_feature: MA Experiment 20001558 PARAMETER Experiment Name: At_Drought_Soil_Dry_P Parameter: Plant Line Value: WS
  misc_feature: MA Experiment 20001558 PARAMETER Experiment Name: At_Drought_Soil_Dry_P Parameter: Post Timepoint (hr) Value: 6
  misc_feature: MA Experiment 20001558 PARAMETER Experiment Name: At_Drought_Soil_Dry_P Parameter: Post-Treatment Value: Re-Water vs. No Drought
  misc_feature: MA Experiment 20001558 PARAMETER Experiment Name: At_Drought_Soil_Dry_P Parameter: Timepoint (day) Value: 13
  misc_feature: MA Experiment 20001558 PARAMETER Experiment Name: At_Drought_Soil_Dry_P Parameter: Treatment Value: Drought vs. No Drought
  misc_feature: MA Experiment ID: 20001560 Result: Up-regulated in Transcription
  misc_feature: MA Experiment 20001560 PARAMETER Experiment Name: At_Drought_Soil_Dry_P Parameter: Age (day) Value: 28
  misc_feature: MA Experiment 20001560 PARAMETER Experiment Name: At_Drought_Soil_Dry_P Parameter: Organism Value: A. thaliana
  misc_feature: MA Experiment 20001560 PARAMETER Experiment Name: At_Drought_Soil_Dry_P Parameter: Plant Line Value: WS
  misc_feature: MA Experiment 20001560 PARAMETER Experiment Name: At_Drought_Soil_Dry_P Parameter: Post Timepoint (hr) Value: None
  misc_feature: MA Experiment 20001560 PARAMETER Experiment Name: At_Drought_Soil_Dry_P Parameter: Post-Treatment Value: None
  misc_feature: MA Experiment 20001560 PARAMETER Experiment Name: At_Drought_Soil_Dry_P Parameter: Timepoint (day) Value: 14
  misc_feature: MA Experiment 20001560 PARAMETER Experiment Name: At_Drought_Soil_Dry_P Parameter: Treatment Value: Drought vs. No Drought
  misc_feature: MA Experiment ID: 20001755 Result: Down-regulated in Transcription
  misc_feature: MA Experiment 20001755 PARAMETER Experiment Name: At_50mM_NH4NO3_L-to-H_P Parameter: Timepoint (hr) Value: 2
  misc_feature: MA Experiment 20001755 PARAMETER Experiment Name: At_50mM_NH4NO3_L-to-H_P Parameter: Tissue Value: Leaf
  misc_feature: MA Experiment 20001755 PARAMETER Experiment Name: At_50mM_NH4NO3_L-to-H_P Parameter: Treatment Value: 50mM NH4NO3 vs 100mM Mannitol
  misc_feature: MA Experiment ID: 20001774 Result: Down-regulated in Transcription
  misc_feature: MA Experiment 20001774 PARAMETER Experiment Name: At_Far-red-enriched-adult_P Parameter: Age (day) Value: 31
  misc_feature: MA Experiment 20001774 PARAMETER Experiment Name: At_Far-red-enriched-adult_P Parameter: Light Value: Far-red enriched vs. White
  misc_feature: MA Experiment 20001774 PARAMETER Experiment Name: At_Far-red-enriched-adult_P Parameter: Organism Value: A. thaliana
  misc_feature: MA Experiment 20001774 PARAMETER Experiment Name: At_Far-red-enriched-adult_P Parameter: Plant Line Value: Columbia
  misc_feature: MA Experiment 20001774 PARAMETER Experiment Name: At_Far-red-enriched-adult_P Parameter: Timepoint (hr) Value: 72
  misc_feature: MA Experiment 20001774 PARAMETER Experiment Name: At_Far-red-enriched-adult_P Parameter: Tissue Value: Aerial
  misc_feature: MA Experiment ID: 20001904 Result: Down-regulated in Transcription
  misc_feature: MA Experiment 20001904 PARAMETER Experiment Name: At_Drought_Reproduction_P Parameter: Age (day) Value: 37
  misc_feature: MA Experiment 20001904 PARAMETER Experiment Name: At_Drought_Reproduction_P Parameter: Organism Value: A. thaliana
  misc_feature: MA Experiment 20001904 PARAMETER Experiment Name: At_Drought_Reproduction_P Parameter: Plant Line Value: WS
  misc_feature: MA Experiment 20001904 PARAMETER Experiment Name: At_Drought_Reproduction_P Parameter: Timepoint (day) Value: 7
  misc_feature: MA Experiment 20001904 PARAMETER Experiment Name: At_Drought_Reproduction_P Parameter: Tissue Value: Rosettes
  misc_feature: MA Experiment 20001904 PARAMETER Experiment Name: At_Drought_Reproduction_P Parameter: Treatment Value: Drought vs. No Drought
  misc_feature: MA Experiment ID: 20001906 Result: Down-regulated in Transcription
  misc_feature: MA Experiment 20001906 PARAMETER Experiment Name: At_Drought_Reproduction_P Parameter: Age (day) Value: 35
  misc_feature: MA Experiment 20001906 PARAMETER Experiment Name: At_Drought_Reproduction_P Parameter: Organism Value: A. thaliana
  misc_feature: MA Experiment 20001906 PARAMETER Experiment Name: At_Drought_Reproduction_P Parameter: Plant Line Value: WS
  misc_feature: MA Experiment 20001906 PARAMETER Experiment Name: At_Drought_Reproduction_P Parameter: Timepoint (day) Value: 5
  misc_feature: MA Experiment 20001906 PARAMETER Experiment Name: At_Drought_Reproduction_P Parameter: Tissue Value: Siliques
  misc_feature: MA Experiment 20001906 PARAMETER Experiment Name: At_Drought_Reproduction_P Parameter: Treatment Value: Drought vs. No Drought
  misc_feature: MA Experiment ID: 20001907 Result: Down-regulated in Transcription
  misc_feature: MA Experiment 20001907 PARAMETER Experiment Name: At_Drought_Reproduction_P Parameter: Age (day) Value: 37
  misc_feature: MA Experiment 20001907 PARAMETER Experiment Name: At_Drought_Reproduction_P Parameter: Organism Value: A. thaliana
  misc_feature: MA Experiment 20001907 PARAMETER Experiment Name: At_Drought_Reproduction_P Parameter: Plant Line Value: WS
  misc_feature: MA Experiment 20001907 PARAMETER Experiment Name: At_Drought_Reproduction_P Parameter: Timepoint (day) Value: 7
  misc_feature: MA Experiment 20001907 PARAMETER Experiment Name: At_Drought_Reproduction_P Parameter: Tissue Value: Siliques
  misc_feature: MA Experiment 20001907 PARAMETER Experiment Name: At_Drought_Reproduction_P Parameter: Treatment Value: Drought vs. No Drought
  misc_feature: MA Experiment ID: 20001911 Result: Down-regulated in Transcription
  misc_feature: MA Experiment 20001911 PARAMETER Experiment Name: At_Drought_Reproduction_P Parameter: Age (day) Value: 40
  misc_feature: MA Experiment 20001911 PARAMETER Experiment Name: At_Drought_Reproduction_P Parameter: Organism Value: A. thaliana
  misc_feature: MA Experiment 20001911 PARAMETER Experiment Name: At_Drought_Reproduction_P Parameter: Plant Line Value: WS
  misc_feature: MA Experiment 20001911 PARAMETER Experiment Name: At_Drought_Reproduction_P Parameter: Timepoint (day) Value: 10
  misc_feature: MA Experiment 20001911 PARAMETER Experiment Name: At_Drought_Reproduction_P Parameter: Tissue Value: Flowers
  misc_feature: MA Experiment 20001911 PARAMETER Experiment Name: At_Drought_Reproduction_P Parameter: Treatment Value: Drought vs. No Drought
atacaggcatcactactacctcaaagtcctttcgtacttatcaaagctttattagtctctttgttttcttgcttctacattacagaaattaaatggcttcttttgtgatgggatacttcttattgttcgctgttgctttcatgtgtttggatgcgagaacggacaaaacgcaagattatacgtcgtttcagtaccataaaggagctctcctcaccggagacgtttccatcaacctaatctggtacggtaagtttaaaccgtcgcagcgtgcaatcgtaaccgatttcgttgcttccctctcgtcttcccggagatcgaccatggctcaaaatccctcagtcgccacgtggtggaagacggtggagaagtattaccaattccgcaagatgaccacgacacgtggactcagtctctccctcggagaacagatcctcgaccaaggatactcaatgggaaaatctttaacagagaaaaacctcaaagacttggccgcaaaaggtggccaaagctacgcggttaacgtcgtgttgacctcagctgacgtgacggtccaaggcttttgcatgaacagatgcgggtcacacgggactggttccgggtcaggcaagaaaggatcaagattcgcttacatctgggttggaaactcagaaacacaatgtccaggacaatgcgcgtggccattccacgcgccggtttacggaccgcaaagcccaccactagtggcaccaaacaacgacgttggtttagacgggatggtgattaacttggcgagtctcatggctgcgacggcaacgaacccgttcggagatggatattaccaagggcctaaaacggcaccgcttgaggctggatcggcttgtactggagtctatgggaaaggttcgtatcctggttatgctggagagttacttgtggatgcaacgaccggtgggagttataacgttaagggactgaatgggagaaaatatttgttaccggctttgtttgaccctaaaacagattcttgctcgactctgttttgaatacctattagtatacgttagatacgatattcttttatttatactttatatattcgtttttgtaatcttctttaatcagtatgtaatgaaattatttgttattgact

SEQ ID NO: 41168 - protein, 309 aa, Arabidopsis thaliana
  peptide (1)..(309): Ceres Seq. ID no. 12422152
  misc_feature (32)..(309): Pfam Name: Phosphate-induced protein 1 conserved region Pfam Description: Phosphate-induced protein 1 conserved region
  misc_feature (78)..(305): Homolog of NCBI NO: 37533672 NR Description: putative phosphate-induced protein
  misc_feature (128)..(308): Homolog of NCBI NO: 13194680 NR Description: phosphate-induced protein 1-like protein
  misc_feature (6)..(308): Homolog of NCBI NO: 15242420 NR Description: putative protein
  misc_feature (33)..(308): Homolog of NCBI NO: 31074969 NR Description: erg-1 [Solanum tuberosum]
  misc_feature (4)..(308): Homolog of NCBI NO: 15237656 NR Description: phi-1-like protein
  misc_feature (4)..(308): Homolog of NCBI NO: 3759184 NR Description: phi-1 [Nicotiana tabacum]
  misc_feature (1)..(308): Homolog of NCBI NO: 15236667 NR Description: putative phi-1-like phosphate-induced protein
  misc_feature (1)..(308): Homolog of NCBI NO: 21593043 NR Description: putative phi-1-like phosphate-induced protein
  misc_feature (1)..(240): Homolog of NCBI NO: 11762144 NR Description: At1g35140 [Arabidopsis thaliana]
  misc_feature (1)..(309): Homolog of NCBI NO: 15219504 NR Description: phosphate-induced (phi-1) protein, putative
MASFVMGYFLLFAVAFMCLDARTDKTQDYTSFQYHKGALLTGDVSINLIWYGKFKPSQRAIVTDFVASLSSSRRSTMAQNPSVATWWKTVEKYYQFRKMTTTRGLSLSLGEQILDQGYSMGKSLTEKNLKDLAAKGGQSYAVNVVLTSADVTVQGFCMNRCGSHGTGSGSGKKGSRFAYIWVGNSETQCPGQCAWPFHAPVYGPQSPPLVAPNNDVGLDGMVINLASLMAATATNPFGDGYYQGPKTAPLEAGSACTGVYGKGSYPGYAGELLVDATTGGSYNVKGLNGRKYLLPALFDPKTDSCSTLF

SEQ ID NO: 41169 - protein, 304 aa, Arabidopsis thaliana
  peptide (1)..(304): Ceres Seq. ID no. 12422153
  misc_feature (27)..(304): Pfam Name: Phosphate-induced protein 1 conserved region Pfam Description: Phosphate-induced protein 1 conserved region
  misc_feature (73)..(300): Homolog of NCBI NO: 37533672 NR Description: putative phosphate-induced protein
  misc_feature (123)..(303): Homolog of NCBI NO: 13194680 NR Description: phosphate-induced protein 1-like protein
  misc_feature (1)..(303): Homolog of NCBI NO: 15242420 NR Description: putative protein
  misc_feature (28)..(303): Homolog of NCBI NO: 31074969 NR Description: erg-1 [Solanum tuberosum]
  misc_feature (1)..(303): Homolog of NCBI NO: 15237656 NR Description: phi-1-like protein
  misc_feature (1)..(303): Homolog of NCBI NO: 3759184 NR Description: phi-1 [Nicotiana tabacum]
  misc_feature (1)..(303): Homolog of NCBI NO: 15236667 NR Description: putative phi-1-like phosphate-induced protein
  misc_feature (1)..(303): Homolog of NCBI NO: 21593043 NR Description: putative phi-1-like phosphate-induced protein
  misc_feature (1)..(235): Homolog of NCBI NO: 11762144 NR Description: At1g35140 [Arabidopsis thaliana]
  misc_feature (1)..(304): Homolog of NCBI NO: 15219504 NR Description: phosphate-induced (phi-1) protein, putative
MGYFLLFAVAFMCLDARTDKTQDYTSFQYHKGALLTGDVSINLIWYGKFKPSQRAIVTDFVASLSSSRRSTMAQNPSVATWWKTVEKYYQFRKMTTTRGLSLSLGEQILDQGYSMGKSLTEKNLKDLAAKGGQSYAVNVVLTSADVTVQGFCMNRCGSHGTGSGSGKKGSRFAYIWVGNSETQCPGQCAWPFHAPVYGPQSPPLVAPNNDVGLDGMVINLASLMAATATNPFGDGYYQGPKTAPLEAGSACTGVYGKGSYPGYAGELLVDATTGGSYNVKGLNGRKYLLPALFDPKTDSCSTLF

SEQ ID NO: 41170 - protein, 293 aa, Arabidopsis thaliana
  peptide (1)..(293): Ceres Seq. ID no. 12422154
  misc_feature (16)..(293): Pfam Name: Phosphate-induced protein 1 conserved region Pfam Description: Phosphate-induced protein 1 conserved region
  misc_feature (62)..(289): Homolog of NCBI NO: 37533672 NR Description: putative phosphate-induced protein
  misc_feature (112)..(292): Homolog of NCBI NO: 13194680 NR Description: phosphate-induced protein 1-like protein
  misc_feature (1)..(292): Homolog of NCBI NO: 15242420 NR Description: putative protein
  misc_feature (17)..(292): Homolog of NCBI NO: 31074969 NR Description: erg-1 [Solanum tuberosum]
  misc_feature (1)..(292): Homolog of NCBI NO: 15237656 NR Description: phi-1-like protein
  misc_feature (1)..(292): Homolog of NCBI NO: 3759184 NR Description: phi-1 [Nicotiana tabacum]
  misc_feature (1)..(292): Homolog of NCBI NO: 15236667 NR Description: putative phi-1-like phosphate-induced protein
  misc_feature (1)..(292): Homolog of NCBI NO: 21593043 NR Description: putative phi-1-like phosphate-induced protein
  misc_feature (1)..(224): Homolog of NCBI NO: 11762144 NR Description: At1g35140 [Arabidopsis thaliana]
  misc_feature (1)..(293): Homolog of NCBI NO: 15219504 NR Description: phosphate-induced (phi-1) protein, putative
MCLDARTDKTQDYTSFQYHKGALLTGDVSINLIWYGKFKPSQRAIVTDFVASLSSSRRSTMAQNPSVATWWKTVEKYYQFRKMTTTRGLSLSLGEQILDQGYSMGKSLTEKNLKDLAAKGGQSYAVNVVLTSADVTVQGFCMNRCGSHGTGSGSGKKGSRFAYIWVGNSETQCPGQCAWPFHAPVYGPQSPPLVAPNNDVGLDGMVINLASLMAATATNPFGDGYYQGPKTAPLEAGSACTGVYGKGSYPGYAGELLVDATTGGSYNVKGLNGRKYLLPALFDPKTDSCSTLF

SEQ ID NO: 41171 - DNA, 1669 bp, Arabidopsis thaliana
  misc_feature (1)..(1669): Ceres Seq. ID no. 12738372
  misc_feature: MA Experiment ID: 20000169 Result: Up-regulated in Transcription
  misc_feature: MA Experiment 20000169 PARAMETER Experiment Name: At_100uM_ABA_P Parameter: Age (day) Value: 14
  misc_feature: MA Experiment 20000169 PARAMETER Experiment Name: At_100uM_ABA_P Parameter: Organism Value: A. thaliana
  misc_feature: MA Experiment 20000169 PARAMETER Experiment Name: At_100uM_ABA_P Parameter: Plant Line Value: WS
  misc_feature: MA Experiment 20000169 PARAMETER Experiment Name: At_100uM_ABA_P Parameter: Timepoint (hr) Value: 6
  misc_feature: MA Experiment 20000169 PARAMETER Experiment Name: At_100uM_ABA_P Parameter: Tissue Value: Aerial
  misc_feature: MA Experiment 20000169 PARAMETER Experiment Name: At_100uM_ABA_P Parameter: Treatment Value: 100uM ABA vs. No Treatment
  misc_feature: MA Experiment ID: 20000173 Result: Down-regulated in Transcription
  misc_feature: MA Experiment 20000173 PARAMETER Experiment Name: At_42deg_Heat_P Parameter: Age (day) Value: 14
  misc_feature: MA Experiment 20000173 PARAMETER Experiment Name: At_42deg_Heat_P Parameter: Organism Value: A. thaliana
  misc_feature: MA Experiment 20000173 PARAMETER Experiment Name: At_42deg_Heat_P Parameter: Plant Line Value: WS
  misc_feature: MA Experiment 20000173 PARAMETER Experiment Name: At_42deg_Heat_P Parameter: Temperature (deg C) Value: 42 vs. 22
  misc_feature: MA Experiment 20000173 PARAMETER Experiment Name: At_42deg_Heat_P Parameter: Timepoint (hr) Value: 6
  misc_feature: MA Experiment 20000173 PARAMETER Experiment Name: At_42deg_Heat_P Parameter: Tissue Value: Aerial
  misc_feature: MA Experiment ID: 20000179 Result: Up-regulated in Transcription
  misc_feature: MA Experiment 20000179 PARAMETER Experiment Name: At_Germinating_Seeds_P Parameter: Age (hr) Value: 6 vs. 0
  misc_feature: MA Experiment 20000179 PARAMETER Experiment Name: At_Germinating_Seeds_P Parameter: Tissue Value: Germinating Seeds
  misc_feature: MA Experiment ID: 20000180 Result: Up-regulated in Transcription
  misc_feature: MA Experiment 20000180 PARAMETER Experiment Name: At_Germinating_Seeds_P Parameter: Age (hr) Value: 24 vs. 0
  misc_feature: MA Experiment 20000180 PARAMETER Experiment Name: At_Germinating_Seeds_P Parameter: Tissue Value: Germinating Seeds
  misc_feature: MA Experiment ID: 20000185 Result: Up-regulated in Transcription
  misc_feature: MA Experiment 20000185 PARAMETER Experiment Name: At_Roots__P Parameter: Age (day) Value: 7 vs. 21
  misc_feature: MA Experiment 20000185 PARAMETER Experiment Name: At_Roots__P Parameter: Organism Value: A. thaliana
  misc_feature: MA Experiment 20000185 PARAMETER Experiment Name: At_Roots__P Parameter: Tissue Value: Roots vs. Whole Plant
  misc_feature: MA Experiment ID: 20000264 Result: Up-regulated in Transcription
  misc_feature: MA Experiment 20000264 PARAMETER Experiment Name: At_Open_Flower_P Parameter: Age (day) Value: 21
  misc_feature: MA Experiment 20000264 PARAMETER Experiment Name: At_Open_Flower_P Parameter: Plant Line Value: WS
  misc_feature: MA Experiment 20000264 PARAMETER Experiment Name: At_Open_Flower_P Parameter: Tissue Value: Open Flower vs. Whole Plant
  misc_feature: MA Experiment ID: 20000265 Result: Up-regulated in Transcription
  misc_feature: MA Experiment 20000265 PARAMETER Experiment Name: At_Open_Flower_P Parameter: Age (day) Value: 21
  misc_feature: MA Experiment 20000265 PARAMETER Experiment Name: At_Open_Flower_P Parameter: Plant Line Value: WS
  misc_feature: MA Experiment 20000265 PARAMETER Experiment Name: At_Open_Flower_P Parameter: Tissue Value: Closed Flower vs. Whole Plant
  misc_feature: MA Experiment ID: 20000286 Result: Up-regulated in Transcription
  misc_feature: MA Experiment 20000286 PARAMETER Experiment Name: At_Open_Flower_P Parameter: Age (day) Value: 21
  misc_feature: MA Experiment 20000286 PARAMETER Experiment Name: At_Open_Flower_P Parameter: Plant Line Value: WS
  misc_feature: MA Experiment 20000286 PARAMETER Experiment Name: At_Open_Flower_P Parameter: Tissue Value: Half Open vs. Whole Plant
  misc_feature: MA Experiment ID: 20000439 Result: Up-regulated in Transcription
  misc_feature: MA Experiment 20000439 PARAMETER Experiment Name: At_Roots__P Parameter: Age (day) Value: 14 vs. 21
  misc_feature: MA Experiment 20000439 PARAMETER Experiment Name: At_Roots__P Parameter: Organism Value: A. thaliana
  misc_feature: MA Experiment 20000439 PARAMETER Experiment Name: At_Roots__P Parameter: Tissue Value: Roots vs. Whole Plant
  misc_feature: MA Experiment ID: 20000794 Result: Up-regulated in Transcription
  misc_feature: MA Experiment 20000794 PARAMETER Experiment Name: At_Petals_P Parameter: Age (day) Value: 23-25 days
  misc_feature: MA Experiment 20000794 PARAMETER Experiment Name: At_Petals_P Parameter: Plant Line Value: WS
  misc_feature: MA Experiment 20000794 PARAMETER Experiment Name: At_Petals_P Parameter: Tissue Value: Petals vs. Whole plant
  misc_feature: MA Experiment ID: 20001557 Result: Down-regulated in Transcription
  misc_feature: MA Experiment 20001557 PARAMETER Experiment Name: At_Drought_Soil_Dry_P Parameter: Age (day) Value: 27
  misc_feature: MA Experiment 20001557 PARAMETER Experiment Name: At_Drought_Soil_Dry_P Parameter: Organism Value: A. thaliana
  misc_feature: MA Experiment 20001557 PARAMETER Experiment Name: At_Drought_Soil_Dry_P Parameter: Plant Line Value: WS
  misc_feature: MA Experiment 20001557 PARAMETER Experiment Name: At_Drought_Soil_Dry_P Parameter: Post Timepoint (hr) Value: 3
  misc_feature: MA Experiment 20001557 PARAMETER Experiment Name: At_Drought_Soil_Dry_P Parameter: Post-Treatment Value: Re-Water vs. No Drought
  misc_feature: MA Experiment 20001557 PARAMETER Experiment Name: At_Drought_Soil_Dry_P Parameter: Timepoint (day) Value: 13
  misc_feature: MA Experiment 20001557 PARAMETER Experiment Name: At_Drought_Soil_Dry_P Parameter: Treatment Value: Drought vs. No Drought
  misc_feature: MA Experiment ID: 20001558 Result: Down-regulated in Transcription
  misc_feature: MA Experiment 20001558 PARAMETER Experiment Name: At_Drought_Soil_Dry_P Parameter: Age (day) Value: 27
  misc_feature: MA Experiment 20001558 PARAMETER Experiment Name: At_Drought_Soil_Dry_P Parameter: Organism Value: A. thaliana
  misc_feature: MA Experiment 20001558 PARAMETER Experiment Name: At_Drought_Soil_Dry_P Parameter: Plant Line Value: WS
  misc_feature: MA Experiment 20001558 PARAMETER Experiment Name: At_Drought_Soil_Dry_P Parameter: Post Timepoint (hr) Value: 6
  misc_feature: MA Experiment 20001558 PARAMETER Experiment Name: At_Drought_Soil_Dry_P Parameter: Post-Treatment Value: Re-Water vs. No Drought
  misc_feature: MA Experiment 20001558 PARAMETER Experiment Name: At_Drought_Soil_Dry_P Parameter: Timepoint (day) Value: 13
  misc_feature: MA Experiment 20001558 PARAMETER Experiment Name: At_Drought_Soil_Dry_P Parameter: Treatment Value: Drought vs. No Drought
  misc_feature: MA Experiment ID: 20001905 Result: Up-regulated in Transcription
  misc_feature: MA Experiment 20001905 PARAMETER Experiment Name: At_Drought_Reproduction_P Parameter: Age (day) Value: 40
  misc_feature: MA Experiment 20001905 PARAMETER Experiment Name: At_Drought_Reproduction_P Parameter: Organism Value: A. thaliana
  misc_feature: MA Experiment 20001905 PARAMETER Experiment Name: At_Drought_Reproduction_P Parameter: Plant Line Value: WS
  misc_feature: MA Experiment 20001905 PARAMETER Experiment Name: At_Drought_Reproduction_P Parameter: Timepoint (day) Value: 10
  misc_feature: MA Experiment 20001905 PARAMETER Experiment Name: At_Drought_Reproduction_P Parameter: Tissue Value: Rosettes
  misc_feature: MA Experiment 20001905 PARAMETER Experiment Name: At_Drought_Reproduction_P Parameter: Treatment Value: Drought vs. No Drought
  misc_feature: MA Experiment ID: 20001911 Result: Down-regulated in Transcription
  misc_feature: MA Experiment 20001911 PARAMETER Experiment Name: At_Drought_Reproduction_P Parameter: Age (day) Value: 40
  misc_feature: MA Experiment 20001911 PARAMETER Experiment Name: At_Drought_Reproduction_P Parameter: Organism Value: A. thaliana
  misc_feature: MA Experiment 20001911 PARAMETER Experiment Name: At_Drought_Reproduction_P Parameter: Plant Line Value: WS
  misc_feature: MA Experiment 20001911 PARAMETER Experiment Name: At_Drought_Reproduction_P Parameter: Timepoint (day) Value: 10
  misc_feature: MA Experiment 20001911 PARAMETER Experiment Name: At_Drought_Reproduction_P Parameter: Tissue Value: Flowers
  misc_feature: MA Experiment 20001911 PARAMETER Experiment Name: At_Drought_Reproduction_P Parameter: Treatment Value: Drought vs. No Drought
accgtgattactgattactgtgttaattatttttattctgcgtacgttacgtaagagagatattgaggaatggctgcgaagaaggtttttggatcggcggaagcgagtaatttggtgacggagcttcgtcggagttttgatgatggtgtgacacgtggttatgaatggagagtgactcagcttaagaaactgatgattatttgtgataatcatgagcctgagatcgtcgcggctcttcgcgatgatcttggtaagcctgagcttgaatcttctgtttatgaggtatctctactgagaaactctatcaagttggctcttaagcagctaaagaactggatggctccggagaaggcaaagacttctctaacaacgtttcctgcatccgcggagattgtgtctgagcctcttggtgttgtgctagtgatctcggcttggaactatccttttctgttgtctattgatcctgttattggtgcaatttctgctgggaatgctgttgttttaaagccatcagaattggctccagcttcgtcagctctgctcactaagttactggaacagtatcttgatccttctgcggtgcgagttgtcgaaggagctgttaccgaaacaagtgctctgctagagcagaagtgggacaagatattctacacaggtagttcaaaaatcggacgtgtcataatggcggcagctgcgaagcatctcacaccggttgttctagagcttggaggaaaatctcctgtcgttgtagactcggataccgatttgaaagttaccgtcaggcggataatcgtaggcaaatggggttgcaacaacggacaggcgtgcgtttcgccggactatatcttgacgacaaaagaatatgctcctaaattgattgatgccatgaagcttgaattggagaaattttatgggaagaaccctatagagtcgaaagatatgtcacgtatcgtaaactcgaatcactttgatcgcttgtctaagttgttagacgagaaggaagtttctgacaaaattgtctatggtggtgaaaaggacagagaaaacttgaaaattgctccgacaatcttgctcgatgtaccattagattctctgatcatgagtgaagaaatatttggccctctccttccaatcctcacgcttaacaacttggaagagagctttgacgtgattcgttctcgacctaagccacttgcggcatacttgtttacacataacaagaagttgaaagagagattcacagcgacagtctccgctggaggcatagtagtcaatgacatagctgttcatcttgcacttcacacattgccattcggaggagttggtgaaagtggaatgggtgcttaccatggtaaattctcatttgatgcttttagtcacaagaaggcggttctctacagaagccttttcggtgattcagccgtcaggtatccgccatactcgagaggaaagcttagattgttaaaagcccttgtcgacagcaatatattcgatttattcaaagtccttctcggtttagcttaaacggtaaaaagaccgaggacacttccctttgtaccttatttacttgttttatttttcaaacatggacttagttggttaatatgttttggtttggtgttgattctatgaatattgaagttgataaataaaagattttcggttggtt

SEQ ID NO: 41172 - protein, 484 aa, Arabidopsis thaliana; identical to SEQ ID NO: 25927
  peptide (1)..(484): Ceres Seq. ID no. 12738373
  misc_feature (1)..(445): Pfam Name: Aldehyde dehydrogenase family Pfam Description: Aldehyde dehydrogenase family
  misc_feature (331)..(483): Homolog of NCBI NO: 15234364 NR Description: aldehyde dehydrogenase like protein; protein id:
  misc_feature (18)..(228): Homolog of NCBI NO: 15234364 NR Description: aldehyde dehydrogenase like protein; protein id:
  misc_feature (1)..(483): Homolog of NCBI NO: 4973431 NR Description: putative aldehyde dehydrogenase OS-ALDH
  misc_feature (10)..(469): Homolog of NCBI NO: 23126018 NR Description: hypothetical protein [Nostoc punctiforme]
  misc_feature (8)..(483): Homolog of NCBI NO: 33317836 NR Description: aldehyde dehydrogenase [Oryza sativa (indica
  misc_feature (7)..(484): Homolog of NCBI NO: 17065876 NR Description: aldehyde dehydrogenase [Arabidopsis thaliana]
  misc_feature (7)..(484): Homolog of NCBI NO: 18418408 NR Description: putative aldehyde dehydrogenase
  misc_feature (11)..(482): Homolog of NCBI NO: 17065918 NR Description: aldehyde dehydrogenase [Craterostigma
  misc_feature (1)..(484): Homolog of NCBI NO: 15219358 NR Description: aldehyde dehydrogenase, putative
  misc_feature (1)..(484): Homolog of NCBI NO: 21536879 NR Description: aldehyde dehydrogenase, putative [Arabidopsis

SEQ ID NO: 41173 - protein, 443 aa, Arabidopsis thaliana; identical to SEQ ID NO: 25928
  peptide (1)..(443): Ceres Seq. ID no. 12738374
  misc_feature (1)..(404): Pfam Name: Aldehyde dehydrogenase family Pfam Description: Aldehyde dehydrogenase family
  misc_feature (290)..(442): Homolog of NCBI NO: 15234364 NR Description: aldehyde dehydrogenase like protein; protein id:
  misc_feature (1)..(187): Homolog of NCBI NO: 15234364 NR Description: aldehyde dehydrogenase like protein; protein id:
  misc_feature (1)..(442): Homolog of NCBI NO: 4973431 NR Description: putative aldehyde dehydrogenase OS-ALDH
  misc_feature (1)..(428): Homolog of NCBI NO: 23126018 NR Description: hypothetical protein [Nostoc punctiforme]
  misc_feature (1)..(442): Homolog of NCBI NO: 33317836 NR Description: aldehyde dehydrogenase [Oryza sativa (indica
  misc_feature (1)..(443): Homolog of NCBI NO: 17065876 NR Description: aldehyde dehydrogenase [Arabidopsis thaliana]
  misc_feature (1)..(443): Homolog of NCBI NO: 18418408 NR Description: putative aldehyde dehydrogenase
  misc_feature (1)..(441): Homolog of NCBI NO: 17065918 NR Description: aldehyde dehydrogenase [Craterostigma
  misc_feature (1)..(443): Homolog of NCBI NO: 15219358 NR Description: aldehyde dehydrogenase, putative
  misc_feature (1)..(443): Homolog of NCBI NO: 21536879 NR Description: aldehyde dehydrogenase, putative [Arabidopsis

SEQ ID NO: 41174 - protein, 395 aa, Arabidopsis thaliana; identical to SEQ ID NO: 25929
  peptide (1)..(395): Ceres Seq. ID no. 12738375
  misc_feature (1)..(356): Pfam Name: Aldehyde dehydrogenase family Pfam Description: Aldehyde dehydrogenase family
  misc_feature (242)..(394): Homolog of NCBI NO: 15234364 NR Description: aldehyde dehydrogenase like protein; protein id:
  misc_feature (1)..(139): Homolog of NCBI NO: 15234364 NR Description: aldehyde dehydrogenase like protein; protein id:
  misc_feature (1)..(394): Homolog of NCBI NO: 4973431 NR Description: putative aldehyde dehydrogenase OS-ALDH
  misc_feature (1)..(380): Homolog of NCBI NO: 23126018 NR Description: hypothetical protein [Nostoc punctiforme]
  misc_feature (1)..(394): Homolog of NCBI NO: 33317836 NR Description: aldehyde dehydrogenase [Oryza sativa (indica
  misc_feature (1)..(395): Homolog of NCBI NO: 17065876 NR Description: aldehyde dehydrogenase [Arabidopsis thaliana]
  misc_feature (1)..(395): Homolog of NCBI NO: 18418408 NR Description: putative aldehyde dehydrogenase
  misc_feature (1)..(393): Homolog of NCBI NO: 17065918 NR Description: aldehyde dehydrogenase [Craterostigma
  misc_feature (1)..(395): Homolog of NCBI NO: 15219358 NR Description: aldehyde dehydrogenase, putative
  misc_feature (1)..(395): Homolog of NCBI NO: 21536879 NR Description: aldehyde dehydrogenase, putative [Arabidopsis

SEQ ID NO: 41175 - DNA, 1348 bp, Arabidopsis thaliana
  misc_feature (1)..(1348): Ceres Seq. ID no. 12323930
  misc_feature: MA Experiment ID: 20000169 Result: Up-regulated in Transcription
  misc_feature: MA Experiment 20000169 PARAMETER Experiment Name: At_100uM_ABA_P Parameter: Age (day) Value: 14
  misc_feature: MA Experiment 20000169 PARAMETER Experiment Name: At_100uM_ABA_P Parameter: Organism Value: A. thaliana
  misc_feature: MA Experiment 20000169 PARAMETER Experiment Name: At_100uM_ABA_P Parameter: Plant Line Value: WS
  misc_feature: MA Experiment 20000169 PARAMETER Experiment Name: At_100uM_ABA_P Parameter: Timepoint (hr) Value: 6
  misc_feature: MA Experiment 20000169 PARAMETER Experiment Name: At_100uM_ABA_P Parameter: Tissue Value: Aerial
  misc_feature: MA Experiment 20000169 PARAMETER Experiment Name: At_100uM_ABA_P Parameter: Treatment Value: 100uM ABA vs. No Treatment
  misc_feature: MA Experiment ID: 20000182 Result: Up-regulated in Transcription
  misc_feature: MA Experiment 20000182 PARAMETER Experiment Name: At_2mM_SA_P Parameter: Age (day) Value: 14
  misc_feature: MA Experiment 20000182 PARAMETER Experiment Name: At_2mM_SA_P Parameter: Organism Value: A. thaliana
  misc_feature: MA Experiment 20000182 PARAMETER Experiment Name: At_2mM_SA_P Parameter: Plant Line Value: WS
  misc_feature: MA Experiment 20000182 PARAMETER Experiment Name: At_2mM_SA_P Parameter: Timepoint (hr) Value: 6
  misc_feature: MA Experiment 20000182 PARAMETER Experiment Name: At_2mM_SA_P Parameter: Tissue Value: Aerial
  misc_feature: MA Experiment 20000182 PARAMETER Experiment Name: At_2mM_SA_P Parameter: Treatment Value: 2mM SA vs. No Treatment
  misc_feature: MA Experiment ID: 20000184 Result: Up-regulated in Transcription
  misc_feature: MA Experiment 20000184 PARAMETER Experiment Name: At_Shoots__P Parameter: Age (day) Value: 7
  misc_feature: MA Experiment 20000184 PARAMETER Experiment Name: At_Shoots__P Parameter: Tissue Value: Shoots vs. Whole Plant
  misc_feature: MA Experiment ID: 20000185 Result: Down-regulated in Transcription
  misc_feature: MA Experiment 20000185 PARAMETER Experiment Name: At_Roots__P Parameter: Age (day) Value: 7 vs. 21
  misc_feature: MA Experiment 20000185 PARAMETER Experiment Name: At_Roots__P Parameter: Organism Value: A. thaliana
  misc_feature: MA Experiment 20000185 PARAMETER Experiment Name: At_Roots__P Parameter: Tissue Value: Roots vs. Whole Plant
  misc_feature: MA Experiment ID: 20000438 Result: Up-regulated in Transcription
  misc_feature: MA Experiment 20000438 PARAMETER Experiment Name: At_Shoots__P Parameter: Age (day) Value: 14
  misc_feature: MA Experiment 20000438 PARAMETER Experiment Name: At_Shoots__P Parameter: Tissue Value: Shoots vs. Whole Plant
  misc_feature: MA Experiment ID: 20000439 Result: Down-regulated in Transcription
  misc_feature: MA Experiment 20000439 PARAMETER Experiment Name: At_Roots__P Parameter: Age (day) Value: 14 vs. 21
  misc_feature: MA Experiment 20000439 PARAMETER Experiment Name: At_Roots__P Parameter: Organism Value: A. thaliana
  misc_feature: MA Experiment 20000439 PARAMETER Experiment Name: At_Roots__P Parameter: Tissue Value: Roots vs. Whole Plant
  misc_feature: MA Experiment ID: 20000453 Result: Up-regulated in Transcription
  misc_feature: MA Experiment 20000453 PARAMETER Experiment Name: At_100uM_ABA_P Parameter: Age (day) Value: 15
  misc_feature: MA Experiment 20000453 PARAMETER Experiment Name: At_100uM_ABA_P Parameter: Organism Value: A. thaliana
  misc_feature: MA Experiment 20000453 PARAMETER Experiment Name: At_100uM_ABA_P Parameter: Plant Line Value: WS
  misc_feature: MA Experiment 20000453 PARAMETER Experiment Name: At_100uM_ABA_P Parameter: Timepoint (hr) Value: 24
  misc_feature: MA Experiment 20000453 PARAMETER Experiment Name: At_100uM_ABA_P Parameter: Tissue Value: Aerial
  misc_feature: MA Experiment 20000453 PARAMETER Experiment Name: At_100uM_ABA_P Parameter: Treatment Value: 100uM ABA vs. No Treatment
  misc_feature: MA Experiment ID: 20000455 Result: Up-regulated in Transcription
  misc_feature: MA Experiment 20000455 PARAMETER Experiment Name: At_100uM_ABA_P Parameter: Age (day) Value: 16
  misc_feature: MA Experiment 20000455 PARAMETER Experiment Name: At_100uM_ABA_P Parameter: Organism Value: A. thaliana
  misc_feature: MA Experiment 20000455 PARAMETER Experiment Name: At_100uM_ABA_P Parameter: Plant Line Value: WS
  misc_feature: MA Experiment 20000455 PARAMETER Experiment Name: At_100uM_ABA_P Parameter: Timepoint (hr) Value: 48
  misc_feature: MA Experiment 20000455 PARAMETER Experiment Name: At_100uM_ABA_P Parameter: Tissue Value: Aerial
  misc_feature: MA Experiment 20000455 PARAMETER Experiment Name: At_100uM_ABA_P Parameter: Treatment Value: 100uM ABA vs. No Treatment
  misc_feature: MA Experiment ID: 20000527 Result: Down-regulated in Transcription
  misc_feature: MA Experiment 20000527 PARAMETER Experiment Name: At_10percent_PEG_P Parameter: Age (day) Value: 20
  misc_feature: MA Experiment 20000527 PARAMETER Experiment Name: At_10percent_PEG_P Parameter: Organism Value: A. thaliana
  misc_feature: MA Experiment 20000527 PARAMETER Experiment Name: At_10percent_PEG_P Parameter: Plant Line Value: WS
  misc_feature: MA Experiment 20000527 PARAMETER Experiment Name: At_10percent_PEG_P Parameter: Timepoint (day) Value: 20
  misc_feature: MA Experiment 20000527 PARAMETER Experiment Name: At_10percent_PEG_P Parameter: Tissue Value: Whole Plant
  misc_feature: MA Experiment 20000527 PARAMETER Experiment Name: At_10percent_PEG_P Parameter: Treatment Value: 10percent PEG vs. No Treatment
  misc_feature: MA Experiment ID: 20001904 Result: Up-regulated in Transcription
  misc_feature: MA Experiment 20001904 PARAMETER Experiment Name: At_Drought_Reproduction_P Parameter: Age (day) Value: 37
  misc_feature: MA Experiment 20001904 PARAMETER Experiment Name: At_Drought_Reproduction_P Parameter: Organism Value: A. thaliana
  misc_feature: MA Experiment 20001904 PARAMETER Experiment Name: At_Drought_Reproduction_P Parameter: Plant Line Value: WS
  misc_feature: MA Experiment 20001904 PARAMETER Experiment Name: At_Drought_Reproduction_P Parameter: Timepoint (day) Value: 7
  misc_feature: MA Experiment 20001904 PARAMETER Experiment Name: At_Drought_Reproduction_P Parameter: Tissue Value: Rosettes
  misc_feature: MA Experiment 20001904 PARAMETER Experiment Name: At_Drought_Reproduction_P Parameter: Treatment Value: Drought vs. No Drought
gtataaaattctacatctttcctctcattattatctctacacttctcatctctcaatcccattcgcttattatttatccatatgggaaaggttcttgagaaggaggcgtttggattggctgcgaaagacgaatcgggaattctttcgcctttcagtttctctagaagggcgacgggtgaaaaggatgtgaggttcaaagtcttgttctgtggaatttgccacactgatctgagtatggccaaaaacgaatgggggttaactacttatcctcttgtccctgggcatgagattgtgggcgtggtgactgaagttggagccaaagtgaaaaaattcaacgctggagacaaagtcggagttggctatatggccggctcgtgcaggtcatgtgacagctgcaatgatggcgacgagaactactgtccaaagatgatcttaacgtccggagccaaaaactttgacgataccatgacccatggtggatactccgaccacatggtgtgtgctgaggatttcatcatccgtattcctgacaatctcccattagacggtgccgcaccactactctgcgccggggtcacggtctactcccccatgaagtatcacgggctcgacaagcccggtatgcacatcggtgtggtgggactaggcggtttgggccatgtagcagtgaaatttgctaaggctatgggtactaaagttacggttattagtacttcggagcgtaagagagacgaggccgttactcggcttggtgcggatgccttcttggtgagccgtgacccgaaacaaatgaaggatgcaatggggactatggatggtatcattgataccgtatctgcgacccatccacttcttccgctgcttggtttgcttaaaaataagggaaaacttgttatggttggtgcaccagcagaaccgctcgagcttcctgtttttcctctcatctttgggcggaagatggtggtgggtagtatggtaggaggtataaaggagacgcaagagatggtggatttggctggaaaacacaacatcacggcggatattgagctcatctctgcggattatgtcaacaccgccatggaacggcttgcaaaggctgacgttaagtaccgatttgtgattgatgttgccaacacgatgaagccaactccttaactagaaagcttaagaattgaatatccccaaagcttttttcatgtttttgcttgtttgtttgatgttgtttgctggcgactttgtgtgtagtattaccacactgcatgtactttatcagttgaataaacttgaatattgtatttaataagctatctacattagattttggggaagtttgattaaaatttattcc

SEQ ID NO: 41176 - protein, 357 aa, Arabidopsis thaliana
  peptide (1)..(357): Ceres Seq. ID no. 12323931
  misc_feature (8)..(353): Homolog of NCBI NO: 25815120 NR Description: alcohol NADP+ oxidoreductase [Solanum tuberosum]
  misc_feature (8)..(354): Homolog of NCBI NO: 34013695 NR Description: 10-hydroxygeraniol oxidoreductase [Catharanthus
  misc_feature (7)..(354): Homolog of NCBI NO: 10720090 NR Description: Probable mannitol dehydrogenase (NAD-dependent
  misc_feature (8)..(356): Homolog of NCBI NO: 33519154 NR Description: 10-hydroxygeraniol oxidoreductase [Camptotheca
  misc_feature (8)..(356): Homolog of NCBI NO: 14279694 NR Description: sinapyl alcohol dehydrogenase [Populus
  misc_feature (8)..(354): Homolog of NCBI NO: 13507210 NR Description: cinnamyl alcohol dehydrogenase [Fragaria x
  misc_feature (7)..(354): Homolog of NCBI NO: 10720093 NR Description: Probable mannitol dehydrogenase (NAD-dependent
  misc_feature (1)..(357): Homolog of NCBI NO: 15233643 NR Description: cinnamyl-alcohol dehydrogenase ELI3-2
  misc_feature (1)..(357): Homolog of NCBI NO: 16267 NR Description: Eli3-1 [Arabidopsis thaliana]
  misc_feature (1)..(357): Homolog of NCBI NO: 15233642 NR Description: cinnamyl-alcohol dehydrogenase ELI3-1
MGKVLEKEAFGLAAKDESGILSPFSFSRRATGEKDVRFKVLFCGICHTDLSMAKNEWGLTTYPLVPGHEIVGVVTEVGAKVKKFNAGDKVGVGYMAGSCRSCDSCNDGDENYCPKMILTSGAKNFDDTMTHGGYSDHMVCAEDFIIRIPDNLPLDGAAPLLCAGVTVYSPMKYHGLDKPGMHIGVVGLGGLGHVAVKFAKAMGTKVTVISTSERKRDEAVTRLGADAFLVSRDPKQMKDAMGTMDGIIDTVSATHPLLPLLGLLKNKGKLVMVGAPAEPLELPVFPLIFGRKMVVGSMVGGIKETQEMVDLAGKHNITADIELISADYVNTAMERLAKADVKYRFVIDVANTMKPTP

SEQ ID NO: 41177 - protein, 306 aa, Arabidopsis thaliana
  peptide (1)..(306): Ceres Seq. ID no. 12323932
  misc_feature (1)..(302): Homolog of NCBI NO: 25815120 NR Description: alcohol NADP+ oxidoreductase [Solanum tuberosum]
  misc_feature (1)..(303): Homolog of NCBI NO: 34013695 NR Description: 10-hydroxygeraniol oxidoreductase [Catharanthus
  misc_feature (1)..(303): Homolog of NCBI NO: 10720090 NR Description: Probable mannitol dehydrogenase (NAD-dependent
  misc_feature (1)..(305): Homolog of NCBI NO: 33519154 NR Description: 10-hydroxygeraniol oxidoreductase [Camptotheca
  misc_feature (1)..(305): Homolog of NCBI NO: 14279694 NR Description: sinapyl alcohol dehydrogenase [Populus
  misc_feature (1)..(303): Homolog of NCBI NO: 13507210 NR Description: cinnamyl alcohol dehydrogenase [Fragaria x
  misc_feature (1)..(303): Homolog of NCBI NO: 10720093 NR Description: Probable mannitol dehydrogenase (NAD-dependent
  misc_feature (1)..(306): Homolog of NCBI NO: 15233643 NR Description: cinnamyl-alcohol dehydrogenase ELI3-2
  misc_feature (1)..(306): Homolog of NCBI NO: 16267 NR Description: Eli3-1 [Arabidopsis thaliana]
  misc_feature (1)..(306): Homolog of NCBI NO: 15233642 NR Description: cinnamyl-alcohol dehydrogenase ELI3-1
MAKNEWGLTTYPLVPGHEIVGVVTEVGAKVKKFNAGDKVGVGYMAGSCRSCDSCNDGDENYCPKMILTSGAKNFDDTMTHGGYSDHMVCAEDFIIRIPDNLPLDGAAPLLCAGVTVYSPMKYHGLDKPGMHIGVVGLGGLGHVAVKFAKAMGTKVTVISTSERKRDEAVTRLGADAFLVSRDPKQMKDAMGTMDGIIDTVSATHPLLPLLGLLKNKGKLVMVGAPAEPLELPVFPLIFGRKMVVGSMVGGIKETQEMVDLAGKHNITADIELISADYVNTAMERLAKADVKYRFVIDVANTMKPTP

SEQ ID NO: 41178 - protein, 263 aa, Arabidopsis thaliana
  peptide (1)..(263): Ceres Seq. ID no. 12323933
  misc_feature (1)..(259): Homolog of NCBI NO: 25815120 NR Description: alcohol NADP+ oxidoreductase [Solanum tuberosum]
  misc_feature (1)..(260): Homolog of NCBI NO: 34013695 NR Description: 10-hydroxygeraniol oxidoreductase [Catharanthus
  misc_feature (1)..(260): Homolog of NCBI NO: 10720090 NR Description: Probable mannitol dehydrogenase (NAD-dependent
  misc_feature (1)..(262): Homolog of NCBI NO: 33519154 NR Description: 10-hydroxygeraniol oxidoreductase [Camptotheca
  misc_feature (1)..(262): Homolog of NCBI NO: 14279694 NR Description: sinapyl alcohol dehydrogenase [Populus
  misc_feature (1)..(260): Homolog of NCBI NO: 13507210 NR Description: cinnamyl alcohol dehydrogenase [Fragaria x
  misc_feature (1)..(260): Homolog of NCBI NO: 10720093 NR Description: Probable mannitol dehydrogenase (NAD-dependent
  misc_feature (1)..(263): Homolog of NCBI NO: 15233643 NR Description: cinnamyl-alcohol dehydrogenase ELI3-2
  misc_feature (1)..(263): Homolog of NCBI NO: 16267 NR Description: Eli3-1 [Arabidopsis thaliana]
  misc_feature (1)..(263): Homolog of NCBI NO: 15233642 NR Description: cinnamyl-alcohol dehydrogenase ELI3-1
MAGSCRSCDSCNDGDENYCPKMILTSGAKNFDDTMTHGGYSDHMVCAEDFIIRIPDNLPLDGAAPLLCAGVTVYSPMKYHGLDKPGMHIGVVGLGGLGHVAVKFAKAMGTKVTVISTSERKRDEAVTRLGADAFLVSRDPKQMKDAMGTMDGIIDTVSATHPLLPLLGLLKNKGKLVMVGAPAEPLELPVFPLIFGRKMVVGSMVGGIKETQEMVDLAGKHNITADIELISADYVNTAMERLAKADVKYRFVIDVANTMKPTP

SEQ ID NO: 41179 - DNA, 1899 bp, Arabidopsis thaliana
  misc_feature (1)..(1899): Ceres Seq. ID no. 12338360
  misc_feature: MA Experiment ID: 108434 Result: Up-regulated in Transcription
  misc_feature: MA Experiment 108434 PARAMETER Experiment Name: At_Root_Tips_cDNA_P Parameter: Tissue Value: Root Tips
  misc_feature: MA Experiment ID: 108461 Result: Down-regulated in Transcription
  misc_feature: MA Experiment 108461 PARAMETER Experiment Name: At_Germinating_Seeds_cDNA_P Parameter: Age (day) Value: 1 vs. 0
  misc_feature: MA Experiment 108461 PARAMETER Experiment Name: At_Germinating_Seeds_cDNA_P Parameter: Tissue Value: Germinating Seeds
  misc_feature: MA Experiment ID: 108462 Result: Down-regulated in Transcription
  misc_feature: MA Experiment 108462 PARAMETER Experiment Name: At_Germinating_Seeds_cDNA_P Parameter: Age (day) Value: 2 vs. 0
  misc_feature: MA Experiment 108462 PARAMETER Experiment Name: At_Germinating_Seeds_cDNA_P Parameter: Tissue Value: Germinating Seeds
  misc_feature: MA Experiment ID: 108463 Result: Down-regulated in Transcription
  misc_feature: MA Experiment 108463 PARAMETER Experiment Name: At_Germinating_Seeds_cDNA_P Parameter: Age (day) Value: 3 vs. 0
  misc_feature: MA Experiment 108463 PARAMETER Experiment Name: At_Germinating_Seeds_cDNA_P Parameter: Tissue Value: Germinating Seeds
  misc_feature: MA Experiment ID: 108464 Result: Down-regulated in Transcription
  misc_feature: MA Experiment 108464 PARAMETER Experiment Name: At_Germinating_Seeds_cDNA_P Parameter: Age (day) Value: 4 vs. 0
  misc_feature: MA Experiment 108464 PARAMETER Experiment Name: At_Germinating_Seeds_cDNA_P Parameter: Tissue Value: Germinating Seeds
  misc_feature: MA Experiment ID: 20000180 Result: Down-regulated in Transcription
  misc_feature: MA Experiment 20000180 PARAMETER Experiment Name: At_Germinating_Seeds_P Parameter: Age (hr) Value: 24 vs. 0
  misc_feature: MA Experiment 20000180 PARAMETER Experiment Name: At_Germinating_Seeds_P Parameter: Tissue Value: Germinating Seeds
ccggagctttttttgttgtgatatatcccgtaaaaccctaaacatagtcacttcatcgtctcctccactgtatcattcaatctctgtcttccttctttttagcgacctcgtctccaaagctcacaaattttctacctttccggagtagagagaaagatgcaagcttgttgtggtggtaattcgatggcttctcttcagcaacctggacgggttcaaggatctgtctttcccccaattatgcctccagtgaccaaattttctcagcagttgaagttcaatatttcaaaacctttccgttcttcatttctgaaaagaaacctggtctctgaaatgagagcatcttcagtctcgctacctaatgtcgagataagcagcaaagaaatcccttttgaggactatggtcttggtgaagttgatccagaggtccgaaccatcatcacaaaggagaaagatagacaattcaggagcttggagcttattgcatctgagaatttcacgtctcgagcagttatggaggcggttggctcatgccttaccaacaagtattctgagggactgcctggtaaaagatattatggtggcaatgagtacattgatcagttggagacgctttgccagaaccgggctttggcagccttccgcttagattctacgaaatggggggttaatgttcagccgttatctggttcacctgcaaactttgctgtctacactgcgatacttagccctcatgatcggatcatgggtttggatttacctcacggtggtcatctgtcgcatgggttcatgaccgctaaaaggcgtgtatctggaacttcaatatactttgagtccatgccttatcgacttgatgaatcaacaggcattgttgactacgatatgctcgagaaaactgctacacttttcagaccaaagcttattatcgcaggagctagtgcatacagccgagattttgactatcctcgcatgaggaagatcgcagactcagttggtgcttttctgatgatggatatggctcatatcagtgggcttgtggctgcttctgtggtagctgacccttttgagtattgtgatattgttacaacaacaactcacaagtctttgagaggtccgagaggtggcatgatcttcttcaggaaggatccaattaatggggttgatcttgaatctgccgtgaacaatgctgtcttccctggtttgcagggtggccctcataaccacacaattggaggattagcagtctgcttgaaacacgcacaatcaccggaattcaaggcgtaccagaaaagagttgtgtctaactgtagagctctagctaaccgattggttgaactcgggtttaagctagtttctggtggcagcgataaccacttggttctcgtcgatcttagacccatgggtatggatggtgcgcgggttgagaaaatcttagacatggcatctattactctcaacaagaactctgtccctggggacaaaagtgcgttggtaccagggggaataaggataggatcccccgcgatgacgacaagaggactgtcagagaaagactttgtagtagtggctgacttcatcaaggaaggtgtggagataacaatggaagccaagaaagccgcgccgggttcaaagcttcaagatttcaacaagttcgtgacatctcctgagtttccattgaaagagagagtgaagagtctaaaggagagagtggaaaccttcacatctcgttttcccattcctggcgtttaagctataaacacacacagatatgctcttgttgtaccttaattattcacctttttcatctgtcttttagggtttttacttgcttgtgtcccaagtttaaagttacagttgaatcgagagaaattattttcaaaaataaatttatttgtggaacaa

SEQ ID NO: 41180 - protein, 529 aa, Arabidopsis thaliana
  peptide (1)..(529): Ceres Seq. ID no. 12338361
  misc_feature (83)..(473): Pfam Name: Serine hydroxymethyltransferase Pfam Description: Serine hydroxymethyltransferase
  misc_feature (36)..(528): Homolog of NCBI NO: 1707998 NR Description: SERINE HYDROXYMETHYLTRANSFERASE, MITOCHONDRIAL
  misc_feature (36)..(528): Homolog of NCBI NO: 15809972 NR Description: AT4g37930/F20D10_50 [Arabidopsis thaliana]
  misc_feature (36)..(528): Homolog of NCBI NO: 15235745 NR Description: glycine hydroxymethyltransferase like protein
  misc_feature (25)..(528): Homolog of NCBI NO: 31126793 NR Description: putative glycine hydroxymethyltransferase
  misc_feature (82)..(528): Homolog of NCBI NO: 17066746 NR Description: serine hydroxymethyltransferase [Chlamydomonas
  misc_feature (335)..(529): Homolog of NCBI NO: 30690400 NR Description: glycine hydroxymethyltransferase - like protein
  misc_feature (36)..(387): Homolog of NCBI NO: 30690400 NR Description: glycine hydroxymethyltransferase - like protein
  misc_feature (70)..(529): Homolog of NCBI NO: 7433550 NR Description: glycine hydroxymethyltransferase (EC 2.1.2.1)
  misc_feature (1)..(529): Homolog of NCBI NO: 14030719 NR Description: AT4g32520/F8B4_220 [Arabidopsis thaliana]
  misc_feature (1)..(529): Homolog of NCBI NO: 18418028 NR Description: glycine hydroxymethyltransferase (EC 2.1.2.1) -
MQACCGGNSMASLQQPGRVQGSVFPPIMPPVTKFSQQLKFNISKPFRSSFLKRNLVSEMRASSVSLPNVEISSKEIPFEDYGLGEVDPEVRTIITKEKDRQFRSLELIASENFTSRAVMEAVGSCLTNKYSEGLPGKRYYGGNEYIDQLETLCQNRALAAFRLDSTKWGVNVQPLSGSPANFAVYTAILSPHDRIMGLDLPHGGHLSHGFMTAKRRVSGTSIYFESMPYRLDESTGIVDYDMLEKTATLFRPKLIIAGASAYSRDFDYPRMRKIADSVGAFLMMDMAHISGLVAASVVADPFEYCDIVTTTTHKSLRGPRGGMIFFRKDPINGVDLESAVNNAVFPGLQGGPHNHTIGGLAVCLKHAQSPEFKAYQKRVVSNCRALANRLVELGFKLVSGGSDNHLVLVDLRPMGMDGARVEKILDMASITLNKNSVPGDKSALVPGGIRIGSPAMTTRGLSEKDFVVVADFIKEGVEITMEAKKAAPGSKLQDFNKFVTSPEFPLKERVKSLKERVETFTSRFPIPGV

SEQ ID NO: 41181 - protein, 520 aa, Arabidopsis thaliana
  peptide (1)..(520): Ceres Seq. ID no. 12338362
  misc_feature (74)..(464): Pfam Name: Serine hydroxymethyltransferase Pfam Description: Serine hydroxymethyltransferase
  misc_feature (27)..(519): Homolog of NCBI NO: 1707998 NR Description: SERINE HYDROXYMETHYLTRANSFERASE, MITOCHONDRIAL
  misc_feature (27)..(519): Homolog of NCBI NO: 15809972 NR Description: AT4g37930/F20D10_50 [Arabidopsis thaliana]
  misc_feature (27)..(519): Homolog of NCBI NO: 15235745 NR Description: glycine hydroxymethyltransferase like protein
  misc_feature (16)..(519): Homolog of NCBI NO: 31126793 NR Description: putative glycine hydroxymethyltransferase
  misc_feature (73)..(519): Homolog of NCBI NO: 17066746 NR Description: serine hydroxymethyltransferase [Chlamydomonas
  misc_feature (326)..(520): Homolog of NCBI NO: 30690400 NR Description: glycine hydroxymethyltransferase - like protein
  misc_feature (27)..(378): Homolog of NCBI NO: 30690400 NR Description: glycine hydroxymethyltransferase - like protein
  misc_feature (61)..(520): Homolog of NCBI NO: 7433550 NR Description: glycine hydroxymethyltransferase (EC 2.1.2.1)
  misc_feature (1)..(520): Homolog of NCBI NO: 14030719 NR Description: AT4g32520/F8B4_220 [Arabidopsis thaliana]
  misc_feature (1)..(520): Homolog of NCBI NO: 18418028 NR Description: glycine hydroxymethyltransferase (EC 2.1.2.1) -
MASLQQPGRVQGSVFPPIMPPVTKFSQQLKFNISKPFRSSFLKRNLVSEMRASSVSLPNVEISSKEIPFEDYGLGEVDPEVRTIITKEKDRQFRSLELIASENFTSRAVMEAVGSCLTNKYSEGLPGKRYYGGNEYIDQLETLCQNRALAAFRLDSTKWGVNVQPLSGSPANFAVYTAILSPHDRIMGLDLPHGGHLSHGFMTAKRRVSGTSIYFESMPYRLDESTGIVDYDMLEKTATLFRPKLIIAGASAYSRDFDYPRMRKIADSVGAFLMMDMAHISGLVAASVVADPFEYCDIVTTTTHKSLRGPRGGMIFFRKDPINGVDLESAVNNAVFPGLQGGPHNHTIGGLAVCLKHAQSPEFKAYQKRVVSNCRALANRLVELGFKLVSGGSDNHLVLVDLRPMGMDGARVEKILDMASITLNKNSVPGDKSALVPGGIRIGSPAMTTRGLSEKDFVVVADFIKEGVEITMEAKKAAPGSKLQDFNKFVTSPEFPLKERVKSLKERVETFTSRFPIPGV

SEQ ID NO: 41182 - protein, 502 aa, Arabidopsis thaliana
  peptide (1)..(502): Ceres Seq. ID no. 12338364
  misc_feature (56)..(446): Pfam Name: Serine hydroxymethyltransferase Pfam Description: Serine hydroxymethyltransferase
  misc_feature (9)..(501): Homolog of NCBI NO: 1707998 NR Description: SERINE HYDROXYMETHYLTRANSFERASE, MITOCHONDRIAL
  misc_feature (9)..(501): Homolog of NCBI NO: 15809972 NR Description: AT4g37930/F20D10_50 [Arabidopsis thaliana]
  misc_feature (9)..(501): Homolog of NCBI NO: 15235745 NR Description: glycine hydroxymethyltransferase like protein
  misc_feature (1)..(501): Homolog of NCBI NO: 31126793 NR Description: putative glycine hydroxymethyltransferase
  misc_feature (55)..(501): Homolog of NCBI NO: 17066746 NR Description: serine hydroxymethyltransferase [Chlamydomonas
  misc_feature (308)..(502): Homolog of NCBI NO: 30690400 NR Description: glycine hydroxymethyltransferase - like protein
  misc_feature (9)..(360): Homolog of NCBI NO: 30690400 NR Description: glycine hydroxymethyltransferase - like protein
  misc_feature (43)..(502): Homolog of NCBI NO: 7433550 NR Description: glycine hydroxymethyltransferase (EC 2.1.2.1)
  misc_feature (1)..(502): Homolog of NCBI NO: 14030719 NR Description: AT4g32520/F8B4_220 [Arabidopsis thaliana]
  misc_feature (1)..(502): Homolog of NCBI NO: 18418028 NR Description: glycine hydroxymethyltransferase (EC 2.1.2.1) -
MPPVTKFSQQLKFNISKPFRSSFLKRNLVSEMRASSVSLPNVEISSKEIPFEDYGLGEVDPEVRTIITKEKDRQFRSLELIASENFTSRAVMEAVGSCLTNKYSEGLPGKRYYGGNEYIDQLETLCQNRALAAFRLDSTKWGVNVQPLSGSPANFAVYTAILSPHDRIMGLDLPHGGHLSHGFMTAKRRVSGTSIYFESMPYRLDESTGIVDYDMLEKTATLFRPKLIIAGASAYSRDFDYPRMRKIADSVGAFLMMDMAHISGLVAASVVADPFEYCDIVTTTTHKSLRGPRGGMIFFRKDPINGVDLESAVNNAVFPGLQGGPHNHTIGGLAVCLKHAQSPEFKAYQKRVVSNCRALANRLVELGFKLVSGGSDNHLVLVDLRPMGMDGARVEKILDMASITLNKNSVPGDKSALVPGGIRIGSPAMTTRGLSEKDFVVVADFIKEGVEITMEAKKAAPGSKLQDFNKFVTSPEFPLKERVKSLKERVETFTSRFPIPGV

SEQ ID NO: 41183 - DNA, 658 bp, Arabidopsis thaliana
  misc_feature (1)..(658): Ceres Seq. ID no. 12395876
  misc_feature: MA Experiment ID: 20000307 Result: Up-regulated in Transcription
  misc_feature: MA Experiment 20000307 PARAMETER Experiment Name: At_Germinating_Seeds_Sub_P Parameter: Age (hr) Value: 24 vs. 0
  misc_feature: MA Experiment 20000307 PARAMETER Experiment Name: At_Germinating_Seeds_Sub_P Parameter: Organism Value: A. thaliana
  misc_feature: MA Experiment 20000307 PARAMETER Experiment Name: At_Germinating_Seeds_Sub_P Parameter: Plant Line Value: WS
  misc_feature: MA Experiment 20000307 PARAMETER Experiment Name: At_Germinating_Seeds_Sub_P Parameter: Tissue Value: Germinating Seeds
  misc_feature: MA Experiment ID: 20000355 Result: Up-regulated in Transcription
  misc_feature: MA Experiment 20000355 PARAMETER Experiment Name: At_Siliques_Sub_P Parameter: Age (day) Value: 21
  misc_feature: MA Experiment 20000355 PARAMETER Experiment Name: At_Siliques_Sub_P Parameter: Organism Value: A. thaliana
  misc_feature: MA Experiment 20000355 PARAMETER Experiment Name: At_Siliques_Sub_P Parameter: Plant Line Value: WS
  misc_feature: MA Experiment 20000355 PARAMETER Experiment Name: At_Siliques_Sub_P Parameter: Tissue Value: Less Than 5mm Siliques vs. Whole Plant
  misc_feature: MA Experiment ID: 20000440 Result: Up-regulated in Transcription
  misc_feature: MA Experiment 20000440 PARAMETER Experiment Name: At_Closed-Flower__Sub_P Parameter: Tissue Value: Closed Flower vs. Whole Plant
ctctttttcttcattcttcatctctcctcccacaaaagaggacaaaaaaccaaataacgagaagtcccatttctctttgttgtcttaggtgttaccttcatcaaccaaacgcaatggcgaacgcggcgtcggggatggcggtggaggacgagtgtaagctgaagtttttggagctaaaagcgaagagaaactataggttcataatattcaggatagatggacaacaagtggtggtagaaaagctgggaagcccccaagagaactacgacgatttcaccaattacctaccgccaaatgaatgccgctacgccgtttatgacttcgacttcaccactgctgagaatatccagaagagcaagatcttcttcatagcatggtcaccggattcatctagagtaaggatgaagatggtgtatgcgagctcaaaggacaggttcaagagggaattggatggtattcaggtggagttacaagccactgacccgagcgagatgagtctcgacatcatcaaaagtcgaactctctagatctccttgcttttctaattatatatccataatcattgtcattcaaacaatttcctcatcttatgtaactttcgatcttggtttcattcattcttgttcttgactgtttttttctattttatttacatttt

SEQ ID NO: 41184 - protein, 174 aa, Arabidopsis thaliana
  peptide (1)..(174): Ceres Seq. ID no. 12395877
  misc_feature (49)..(174): Pfam Name: Cofilin/tropomyosin-type actin-binding protein Pfam Description: Cofilin/tropomyosin-type actin-binding protein
  misc_feature (48)..(174): Homolog of NCBI NO: 231508 NR Description: ACTIN DEPOLYMERIZING FACTOR (ADF)
  misc_feature (38)..(172): Homolog of NCBI NO: 18411410 NR Description: putative actin-depolymerizing factor
  misc_feature (38)..(172): Homolog of NCBI NO: 231509 NR Description: Actin-depolymerizing factor (ADF)
  misc_feature (38)..(172): Homolog of NCBI NO: 15223471 NR Description: actin depolymerizing factor, putative
  misc_feature (38)..(172): Homolog of NCBI NO: 22857912 NR Description: pollen specific actin-depolymerizing factor 1
  misc_feature (45)..(174): Homolog of NCBI NO: 15235159 NR Description: actin depolymerizing factor-like protein; protein
  misc_feature (38)..(174): Homolog of NCBI NO: 22857914 NR Description: pollen specific actin-depolymerizing factor 2
  misc_feature (45)..(174): Homolog of NCBI NO: 10177402 NR Description: actin depolymerizing factor-like [Arabidopsis
  misc_feature (38)..(174): Homolog of NCBI NO: 18423381 NR Description: actin depolymerizing factor-like
  misc_feature (38)..(174): Homolog of NCBI NO: 21537061 NR Description: actin depolymerizing factor-like [Arabidopsis
LFLHSSSLLPQKRTKNQITRSPISLCCLRCYLHQPNAMANAASGMAVEDECKLKFLELKAKRNYRFIIFRIDGQQVVVEKLGSPQENYDDFTNYLPPNECRYAVYDFDFTTAENIQKSKIFFIAWSPDSSRVRMKMVYASSKDRFKRELDGIQVELQATDPSEMSLDIIKSRTL

SEQ ID NO: 41185 - protein, 137 aa, Arabidopsis thaliana
  peptide (1)..(137): Ceres Seq. ID no. 12395878
  misc_feature (12)..(137): Pfam Name: Cofilin/tropomyosin-type actin-binding protein Pfam Description: Cofilin/tropomyosin-type actin-binding protein
  misc_feature (11)..(137): Homolog of NCBI NO: 231508 NR Description: ACTIN DEPOLYMERIZING FACTOR (ADF)
  misc_feature (1)..(135): Homolog of NCBI NO: 18411410 NR Description: putative actin-depolymerizing factor
  misc_feature (1)..(135): Homolog of NCBI NO: 231509 NR Description: Actin-depolymerizing factor (ADF)
  misc_feature (1)..(135): Homolog of NCBI NO: 15223471 NR Description: actin depolymerizing factor, putative
  misc_feature (1)..(135): Homolog of NCBI NO: 22857912 NR Description: pollen specific actin-depolymerizing factor 1
  misc_feature (8)..(137): Homolog of NCBI NO: 15235159 NR Description: actin depolymerizing factor-like protein; protein
  misc_feature (1)..(137): Homolog of NCBI NO: 22857914 NR Description: pollen specific actin-depolymerizing factor 2
  misc_feature (8)..(137): Homolog of NCBI NO: 10177402 NR Description: actin depolymerizing factor-like [Arabidopsis
  misc_feature (1)..(137): Homolog of NCBI NO: 18423381 NR Description: actin depolymerizing factor-like
  misc_feature (1)..(137): Homolog of NCBI NO: 21537061 NR Description: actin depolymerizing factor-like [Arabidopsis
MANAASGMAVEDECKLKFLELKAKRNYRFIIFRIDGQQVVVEKLGSPQENYDDFTNYLPPNECRYAVYDFDFTTAENIQKSKIFFIAWSPDSSRVRMKMVYASSKDRFKRELDGIQVELQATDPSEMSLDIIKSRTL

SEQ ID NO: 41186 - protein, 130 aa, Arabidopsis thaliana
  peptide (1)..(130): Ceres Seq. ID no. 12395879
  misc_feature (5)..(130): Pfam Name: Cofilin/tropomyosin-type actin-binding protein Pfam Description: Cofilin/tropomyosin-type actin-binding protein
  misc_feature (4)..(130): Homolog of NCBI NO: 231508 NR Description: ACTIN DEPOLYMERIZING FACTOR (ADF)
  misc_feature (1)..(128): Homolog of NCBI NO: 18411410 NR Description: putative actin-depolymerizing factor
  misc_feature (1)..(128): Homolog of NCBI NO: 231509 NR Description: Actin-depolymerizing factor (ADF)
  misc_feature (1)..(128): Homolog of NCBI NO: 15223471 NR Description: actin depolymerizing factor, putative
  misc_feature (1)..(128): Homolog of NCBI NO: 22857912 NR Description: pollen specific actin-depolymerizing factor 1
  misc_feature (1)..(130): Homolog of NCBI NO: 15235159 NR Description: actin depolymerizing factor-like protein; protein
  misc_feature (1)..(130): Homolog of NCBI NO: 22857914 NR Description: pollen specific actin-depolymerizing factor 2
  misc_feature (1)..(130): Homolog of NCBI NO: 10177402 NR Description: actin depolymerizing factor-like [Arabidopsis
  misc_feature (1)..(130): Homolog of NCBI NO: 18423381 NR Description: actin depolymerizing factor-like
  misc_feature (1)..(130): Homolog of NCBI NO: 21537061 NR Description: actin depolymerizing factor-like [Arabidopsis
MAVEDECKLKFLELKAKRNYRFIIFRIDGQQVVVEKLGSPQENYDDFTNYLPPNECRYAVYDFDFTTAENIQKSKIFFIAWSPDSSRVRMKMVYASSKDRFKRELDGIQVELQATDPSEMSLDIIKSRTL

SEQ ID NO: 41187 - DNA, 896 bp, Arabidopsis thaliana
  misc_feature (1)..(896): Ceres Seq. ID no. 12325795
  misc_feature: MA Experiment ID: 108434 Result: Up-regulated in Transcription
  misc_feature: MA Experiment 108434 PARAMETER Experiment Name: At_Root_Tips_cDNA_P Parameter: Tissue Value: Root Tips
  misc_feature: MA Experiment ID: 108462 Result: Down-regulated in Transcription
  misc_feature: MA Experiment 108462 PARAMETER Experiment Name: At_Germinating_Seeds_cDNA_P Parameter: Age (day) Value: 2 vs. 0
  misc_feature: MA Experiment 108462 PARAMETER Experiment Name: At_Germinating_Seeds_cDNA_P Parameter: Tissue Value: Germinating Seeds
  misc_feature: MA Experiment ID: 108463 Result: Down-regulated in Transcription
  misc_feature: MA Experiment 108463 PARAMETER Experiment Name: At_Germinating_Seeds_cDNA_P Parameter: Age (day) Value: 3 vs. 0
  misc_feature: MA Experiment 108463 PARAMETER Experiment Name: At_Germinating_Seeds_cDNA_P Parameter: Tissue Value: Germinating Seeds
  misc_feature: MA Experiment ID: 108464 Result: Down-regulated in Transcription
  misc_feature: MA Experiment 108464 PARAMETER Experiment Name: At_Germinating_Seeds_cDNA_P Parameter: Age (day) Value: 4 vs. 0
  misc_feature: MA Experiment 108464 PARAMETER Experiment Name: At_Germinating_Seeds_cDNA_P Parameter: Tissue Value: Germinating Seeds
  misc_feature: MA Experiment ID: 108573 Result: Down-regulated in Transcription
  misc_feature: MA Experiment 108573 PARAMETER Experiment Name: At_Drought_cDNA_P Parameter: Timepoint (hr) Value: 6
  misc_feature: MA Experiment 108573 PARAMETER Experiment Name: At_Drought_cDNA_P Parameter: Tissue Value: Aerial
  misc_feature: MA Experiment 108573 PARAMETER Experiment Name: At_Drought_cDNA_P Parameter: Treatment Value: Drought vs. No Drought
  misc_feature: MA Experiment ID: 20000234 Result: Up-regulated in Transcription
  misc_feature: MA Experiment 20000234 PARAMETER Experiment Name: At_Siliques_P Parameter: Age (day) Value: 21
  misc_feature: MA Experiment 20000234 PARAMETER Experiment Name: At_Siliques_P Parameter: Organism Value: A. thaliana
  misc_feature: MA Experiment 20000234 PARAMETER Experiment Name: At_Siliques_P Parameter: Plant Line Value: WS
  misc_feature: MA Experiment 20000234 PARAMETER Experiment Name: At_Siliques_P Parameter: Tissue Value: Less Than 5mm Siliques vs. Whole Plant
  misc_feature: MA Experiment ID: 20000437 Result: Down-regulated in Transcription
  misc_feature: MA Experiment 20000437 PARAMETER Experiment Name: At_Drought_P Parameter: Age (day) Value: 8
  misc_feature: MA Experiment 20000437 PARAMETER Experiment Name: At_Drought_P Parameter: Organism Value: A. thaliana
  misc_feature: MA Experiment 20000437 PARAMETER Experiment Name: At_Drought_P Parameter: Plant Line Value: WS
  misc_feature: MA Experiment 20000437 PARAMETER Experiment Name: At_Drought_P Parameter: Timepoint (hr) Value: 24
  misc_feature: MA Experiment 20000437 PARAMETER Experiment Name: At_Drought_P Parameter: Tissue Value: Whole Plant
  misc_feature: MA Experiment 20000437 PARAMETER Experiment Name: At_Drought_P Parameter: Treatment Value: Drought vs. No Drought
  misc_feature: MA Experiment ID: 20000496 Result: Up-regulated in Transcription
  misc_feature: MA Experiment 20000496 PARAMETER Experiment Name: At_Guard_Cells_P Parameter: Harvest Date Value: 7/19/2002
  misc_feature: MA Experiment 20000496 PARAMETER Experiment Name: At_Guard_Cells_P Parameter: Organism Value: Canola
  misc_feature: MA Experiment 20000496 PARAMETER Experiment Name: At_Guard_Cells_P Parameter: Tissue Value: Guard Cells vs. Leaves
  misc_feature: MA Experiment ID: 20000794 Result: Down-regulated in Transcription
  misc_feature: MA Experiment 20000794 PARAMETER Experiment Name: At_Petals_P Parameter: Age (day) Value: 23-25 days
  misc_feature: MA Experiment 20000794 PARAMETER Experiment Name: At_Petals_P Parameter: Plant Line Value: WS
  misc_feature: MA Experiment 20000794 PARAMETER Experiment Name: At_Petals_P Parameter: Tissue Value: Petals vs. Whole plant
  misc_feature: MA Experiment ID: 20001558 Result: Up-regulated in Transcription
  misc_feature: MA Experiment 20001558 PARAMETER Experiment Name: At_Drought_Soil_Dry_P Parameter: Age (day) Value: 27
  misc_feature: MA Experiment 20001558 PARAMETER Experiment Name: At_Drought_Soil_Dry_P Parameter: Organism Value: A. thaliana
  misc_feature: MA Experiment 20001558 PARAMETER Experiment Name: At_Drought_Soil_Dry_P Parameter: Plant Line Value: WS
  misc_feature: MA Experiment 20001558 PARAMETER Experiment Name: At_Drought_Soil_Dry_P Parameter: Post Timepoint (hr) Value: 6
  misc_feature: MA Experiment 20001558 PARAMETER Experiment Name: At_Drought_Soil_Dry_P Parameter: Post-Treatment Value: Re-Water vs. No Drought
  misc_feature: MA Experiment 20001558 PARAMETER Experiment Name: At_Drought_Soil_Dry_P Parameter: Timepoint (day) Value: 13
  misc_feature: MA Experiment 20001558 PARAMETER Experiment Name: At_Drought_Soil_Dry_P Parameter: Treatment Value: Drought vs. No Drought
  misc_feature: MA Experiment ID: 20001757 Result: Up-regulated in Transcription
  misc_feature: MA Experiment 20001757 PARAMETER Experiment Name: At_50mM_NH4NO3_L-to-H_P Parameter: Timepoint (hr) Value: 6
  misc_feature: MA Experiment 20001757 PARAMETER Experiment Name: At_50mM_NH4NO3_L-to-H_P Parameter: Tissue Value: Leaf
  misc_feature: MA Experiment 20001757 PARAMETER Experiment Name: At_50mM_NH4NO3_L-to-H_P Parameter: Treatment Value: 50mM NH4NO3 vs 100mM Mannitol
gcatttacttaaagggcaaaaccctccagcgccgcttggatctctctctcctctgttctctcttcccttatcttcttcttatacccttcgaccaacgaagaaccctagaaatcgattaacaagatgaatagggaaaagttgatgaagatggctaacactgtccgcactggcggaaaggggacagtaagaagaaagaagaaggctgttcacaagaccactacaaccgatgacaagaggctccagagcactcttaagagagttggagtcaattccattcccgccattgaagaagttaacatttttaaggatgatgtagtcattcagttcattaaccctaaagttcaagcttcaattgctgctaacacatgggttgtgagtggtacaccacagacgaaaaaattgcaagacattcttcctcagattatcagccaacttggaccagataacttggacaacctgaagaagctagcagagcaattccagaaacaagctccaggtgcaggtgatgtcccagcaacaatccaagaagaggacgatgatgatgatgtcccagatcttgtagtgggagagactttcgagacccctgctactgaagaggctcccaaagctgctgcttcttagaggaggaggaagaagaaggagaagagctcacctgcaaaacccatcataaaaatgtttgtcgctcgacctcttctgagcactgtcagattcttgttttctctaatgcttgcgaacagaaagacttggttttattatcacttgatgctttttggtccgaacagcaattttccttttattaaggttagatcgctttttgtttaccacctgttcaaatgagtactactatgtcctgtcgcttcatacacttcttgcaacacagtcctttgttttgagcc

SEQ ID NO: 41188 - protein, 165 aa, Arabidopsis thaliana
  peptide (1)..(165): Ceres Seq. ID no. 12325796
  misc_feature (34)..(92): Pfam Name: NAC domain Pfam Description: NAC domain
  misc_feature (9)..(164): Homolog of NCBI NO: 25956272 NR Description: unnamed protein product [Lotus japonicus]
  misc_feature (1)..(157): Homolog of NCBI NO: 27573340 NR Description: putative transcription factor
  misc_feature (1)..(158): Homolog of NCBI NO: 37535464 NR Description: putative transcription factor
  misc_feature (1)..(165): Homolog of NCBI NO: 29367567 NR Description: putative transcription factor BTF3
  misc_feature (1)..(165): Homolog of NCBI NO: 24431603 NR Description: Putative transcription factor
  misc_feature (1)..(164): Homolog of NCBI NO: 33945882 NR Description: transcription factor homolog BTF3-like protein
  misc_feature (1)..(165): Homolog of NCBI NO: 16323127 NR Description: At1g17880/F2H15_10 [Arabidopsis thaliana]
  misc_feature (1)..(165): Homolog of NCBI NO: 15220876 NR Description: transcription factor, putative
  misc_feature (1)..(165): Homolog of NCBI NO: 21537065 NR Description: putative transcription factor BTF3 (RNA
  misc_feature (1)..(165): Homolog of NCBI NO: 15219413 NR Description: putative transcription factor BTF3 (RNA
MNREKLMKMANTVRTGGKGTVRRKKKAVHKTTTTDDKRLQSTLKRVGVNSIPAIEEVNIFKDDVVIQFINPKVQASIAANTWVVSGTPQTKKLQDILPQIISQLGPDNLDNLKKLAEQFQKQAPGAGDVPATIQEEDDDDDVPDLVVGETFETPATEEAPKAAAS

SEQ ID NO: 41189 - protein, 159 aa, Arabidopsis thaliana
  peptide (1)..(159): Ceres Seq. ID no. 12325797
  misc_feature (28)..(86): Pfam Name: NAC domain Pfam Description: NAC domain
  misc_feature (3)..(158): Homolog of NCBI NO: 25956272 NR Description: unnamed protein product [Lotus japonicus]
  misc_feature (1)..(151): Homolog of NCBI NO: 27573340 NR Description: putative transcription factor
  misc_feature (1)..(152): Homolog of NCBI NO: 37535464 NR Description: putative transcription factor
  misc_feature (1)..(159): Homolog of NCBI NO: 29367567 NR Description: putative transcription factor BTF3
  misc_feature (1)..(159): Homolog of NCBI NO: 24431603 NR Description: Putative transcription factor
  misc_feature (1)..(158): Homolog of NCBI NO: 33945882 NR Description: transcription factor homolog BTF3-like protein
  misc_feature (1)..(159): Homolog of NCBI NO: 16323127 NR Description: At1g17880/F2H15_10 [Arabidopsis thaliana]
  misc_feature (1)..(159): Homolog of NCBI NO: 15220876 NR Description: transcription factor, putative
  misc_feature (1)..(159): Homolog of NCBI NO: 21537065 NR Description: putative transcription factor BTF3 (RNA
  misc_feature (1)..(159): Homolog of NCBI NO: 15219413 NR Description: putative transcription factor BTF3 (RNA
MKMANTVRTGGKGTVRRKKKAVHKTTTTDDKRLQSTLKRVGVNSIPAIEEVNIFKDDVVIQFINPKVQASIAANTWVVSGTPQTKKLQDILPQIISQLGPDNLDNLKKLAEQFQKQAPGAGDVPATIQEEDDDDDVPDLVVGETFETPATEEAPKAAAS

SEQ ID NO: 41190 - protein, 157 aa, Arabidopsis thaliana
  peptide (1)..(157): Ceres Seq. ID no. 12325798
  misc_feature (26)..(84): Pfam Name: NAC domain Pfam Description: NAC domain
  misc_feature (1)..(156): Homolog of NCBI NO: 25956272 NR Description: unnamed protein product [Lotus japonicus]
  misc_feature (1)..(149): Homolog of NCBI NO: 27573340 NR Description: putative transcription factor
  misc_feature (1)..(150): Homolog of NCBI NO: 37535464 NR Description: putative transcription factor
  misc_feature (1)..(157): Homolog of NCBI NO: 29367567 NR Description: putative transcription factor BTF3
  misc_feature (1)..(157): Homolog of NCBI NO: 24431603 NR Description: Putative transcription factor
  misc_feature (1)..(156): Homolog of NCBI NO: 33945882 NR Description: transcription factor homolog BTF3-like protein
  misc_feature (1)..(157): Homolog of NCBI NO: 16323127 NR Description: At1g17880/F2H15_10 [Arabidopsis thaliana]
  misc_feature (1)..(157): Homolog of NCBI NO: 15220876 NR Description: transcription factor, putative
  misc_feature (1)..(157): Homolog of NCBI NO: 21537065 NR Description: putative transcription factor BTF3 (RNA
  misc_feature (1)..(157): Homolog of NCBI NO: 15219413 NR Description: putative transcription factor BTF3 (RNA
MANTVRTGGKGTVRRKKKAVHKTTTTDDKRLQSTLKRVGVNSIPAIEEVNIFKDDVVIQFINPKVQASIAANTWVVSGTPQTKKLQDILPQIISQLGPDNLDNLKKLAEQFQKQAPGAGDVPATIQEEDDDDDVPDLVVGETFETPATEEAPKAAAS

SEQ ID NO: 41191 - DNA, 1525 bp, Arabidopsis thaliana
  misc_feature (1)..(1525): Ceres Seq. ID no. 12323934
  misc_feature: MA Experiment ID: 20000180 Result: Up-regulated in Transcription
  misc_feature: MA Experiment 20000180 PARAMETER Experiment Name: At_Germinating_Seeds_P Parameter: Age (hr) Value: 24 vs. 0
  misc_feature: MA Experiment 20000180 PARAMETER Experiment Name: At_Germinating_Seeds_P Parameter: Tissue Value: Germinating Seeds
  misc_feature: MA Experiment ID: 20000185 Result: Up-regulated in Transcription
  misc_feature: MA Experiment 20000185 PARAMETER Experiment Name: At_Roots__P Parameter: Age (day) Value: 7 vs. 21
  misc_feature: MA Experiment 20000185 PARAMETER Experiment Name: At_Roots__P Parameter: Organism Value: A. thaliana
  misc_feature: MA Experiment 20000185 PARAMETER Experiment Name: At_Roots__P Parameter: Tissue Value: Roots vs. Whole Plant
  misc_feature: MA Experiment ID: 20000211 Result: Up-regulated in Transcription
  misc_feature: MA Experiment 20000211 PARAMETER Experiment Name: At_0.001percent_MeJA__P Parameter: Age (day) Value: 14
  misc_feature: MA Experiment 20000211 PARAMETER Experiment Name: At_0.001percent_MeJA__P Parameter: Organism Value: A. thaliana
  misc_feature: MA Experiment 20000211 PARAMETER Experiment Name: At_0.001percent_MeJA__P Parameter: Plant Line Value: WS
  misc_feature: MA Experiment 20000211 PARAMETER Experiment Name: At_0.001percent_MeJA__P Parameter: Timepoint (hr) Value: 1
  misc_feature: MA Experiment 20000211 PARAMETER Experiment Name: At_0.001percent_MeJA__P Parameter: Tissue Value: Aerial
  misc_feature: MA Experiment 20000211 PARAMETER Experiment Name: At_0.001percent_MeJA__P Parameter: Treatment Value: 0.001percent MeJA vs. No Treatment
  misc_feature: MA Experiment ID: 20000227 Result: Down-regulated in Transcription
  misc_feature: MA Experiment 20000227 PARAMETER Experiment Name: At_Root-Tips-vs-Tops_P Parameter: Tissue Value: Root Tips vs. Root Tops
  misc_feature: MA Experiment ID: 20000265 Result: Up-regulated in Transcription
  misc_feature: MA Experiment 20000265 PARAMETER Experiment Name: At_Open_Flower_P Parameter: Age (day) Value: 21
  misc_feature: MA Experiment 20000265 PARAMETER Experiment Name: At_Open_Flower_P Parameter: Plant Line Value: WS
  misc_feature: MA Experiment 20000265 PARAMETER Experiment Name: At_Open_Flower_P Parameter: Tissue Value: Closed Flower vs. Whole Plant
  misc_feature: MA Experiment ID: 20000286 Result: Up-regulated in Transcription
  misc_feature: MA Experiment 20000286 PARAMETER Experiment Name: At_Open_Flower_P Parameter: Age (day) Value: 21
  misc_feature: MA Experiment 20000286 PARAMETER Experiment Name: At_Open_Flower_P Parameter: Plant Line Value: WS
  misc_feature: MA Experiment 20000286 PARAMETER Experiment Name: At_Open_Flower_P Parameter: Tissue Value: Half Open vs. Whole Plant
  misc_feature: MA Experiment ID: 20000437 Result: Down-regulated in Transcription
  misc_feature: MA Experiment 20000437 PARAMETER Experiment Name: At_Drought_P Parameter: Age (day) Value: 8
  misc_feature: MA Experiment 20000437 PARAMETER Experiment Name: At_Drought_P Parameter: Organism Value: A. thaliana
  misc_feature: MA Experiment 20000437 PARAMETER Experiment Name: At_Drought_P Parameter: Plant Line Value: WS
  misc_feature: MA Experiment 20000437 PARAMETER Experiment Name: At_Drought_P Parameter: Timepoint (hr) Value: 24
  misc_feature: MA Experiment 20000437 PARAMETER Experiment Name: At_Drought_P Parameter: Tissue Value: Whole Plant
  misc_feature: MA Experiment 20000437 PARAMETER Experiment Name: At_Drought_P Parameter: Treatment Value: Drought vs. No Drought
  misc_feature: MA Experiment ID: 20000439 Result: Up-regulated in Transcription
  misc_feature: MA Experiment 20000439 PARAMETER Experiment Name: At_Roots__P Parameter: Age (day) Value: 14 vs. 21
  misc_feature: MA Experiment 20000439 PARAMETER Experiment Name: At_Roots__P Parameter: Organism Value: A. thaliana
  misc_feature: MA Experiment 20000439 PARAMETER Experiment Name: At_Roots__P Parameter: Tissue Value: Roots vs. Whole Plant
  misc_feature: MA Experiment ID: 20000527 Result: Down-regulated in Transcription
  misc_feature: MA Experiment 20000527 PARAMETER Experiment Name: At_10percent_PEG_P Parameter: Age (day) Value: 20
  misc_feature: MA Experiment 20000527 PARAMETER Experiment Name: At_10percent_PEG_P Parameter: Organism Value: A. thaliana
  misc_feature: MA Experiment 20000527 PARAMETER Experiment Name: At_10percent_PEG_P Parameter: Plant Line Value: WS
  misc_feature: MA Experiment 20000527 PARAMETER Experiment Name: At_10percent_PEG_P Parameter: Timepoint (day) Value: 20
  misc_feature: MA Experiment 20000527 PARAMETER Experiment Name: At_10percent_PEG_P Parameter: Tissue Value: Whole Plant
  misc_feature: MA Experiment 20000527 PARAMETER Experiment Name: At_10percent_PEG_P Parameter: Treatment Value: 10percent PEG vs. No Treatment
  misc_feature: MA Experiment ID: 20000574 Result: Down-regulated in Transcription
  misc_feature: MA Experiment 20000574 PARAMETER Experiment Name: At_100uM_ABA_Mutants__P Parameter: Organism Value: A. thaliana
  misc_feature: MA Experiment 20000574 PARAMETER Experiment Name: At_100uM_ABA_Mutants__P Parameter: Plant Line Value: CS23 vs. Ler wt
  misc_feature: MA Experiment 20000574 PARAMETER Experiment Name: At_100uM_ABA_Mutants__P Parameter: Timepoint (hr) Value: N/A
  misc_feature: MA Experiment 20000574 PARAMETER Experiment Name: At_100uM_ABA_Mutants__P Parameter: Tissue Value: Whole Plant
  misc_feature: MA Experiment 20000574 PARAMETER Experiment Name: At_100uM_ABA_Mutants__P Parameter: Treatment Value: None
  misc_feature: MA Experiment ID: 20000794 Result: Up-regulated in Transcription
  misc_feature: MA Experiment 20000794 PARAMETER Experiment Name: At_Petals_P Parameter: Age (day) Value: 23-25 days
  misc_feature: MA Experiment 20000794 PARAMETER Experiment Name: At_Petals_P Parameter: Plant Line Value: WS
  misc_feature: MA Experiment 20000794 PARAMETER Experiment Name: At_Petals_P Parameter: Tissue Value: Petals vs. Whole plant
  misc_feature: MA Experiment ID: 20001248 Result: Down-regulated in Transcription
  misc_feature: MA Experiment 20001248 PARAMETER Experiment Name: At_Far-red-induction_P Parameter: Age (day) Value: 7
  misc_feature: MA Experiment 20001248 PARAMETER Experiment Name: At_Far-red-induction_P Parameter: Light Value: Far-red vs. White
  misc_feature: MA Experiment 20001248 PARAMETER Experiment Name: At_Far-red-induction_P Parameter: Organism Value: A. thaliana
  misc_feature: MA Experiment 20001248 PARAMETER Experiment Name: At_Far-red-induction_P Parameter: Plant Line Value: Columbia
  misc_feature: MA Experiment 20001248 PARAMETER Experiment Name: At_Far-red-induction_P Parameter: Timepoint (hr) Value: 4
  misc_feature: MA Experiment 20001248 PARAMETER Experiment Name: At_Far-red-induction_P Parameter: Tissue Value: Whole Plant
  misc_feature: MA Experiment ID: 20001450 Result: Down-regulated in Transcription
  misc_feature: MA Experiment 20001450 PARAMETER Experiment Name: At_Far-red-induction_P Parameter: Age (day) Value: 7
  misc_feature: MA Experiment 20001450 PARAMETER Experiment Name: At_Far-red-induction_P Parameter: Light Value: Far-red vs. White
  misc_feature: MA Experiment 20001450 PARAMETER Experiment Name: At_Far-red-induction_P Parameter: Organism Value: A. thaliana
  misc_feature: MA Experiment 20001450 PARAMETER Experiment Name: At_Far-red-induction_P Parameter: Plant Line Value: Columbia
  misc_feature: MA Experiment 20001450 PARAMETER Experiment Name: At_Far-red-induction_P Parameter: Timepoint (hr) Value: 8
  misc_feature: MA Experiment 20001450 PARAMETER Experiment Name: At_Far-red-induction_P Parameter: Tissue Value: Whole Plant
  misc_feature: MA Experiment ID: 20001451 Result: Down-regulated in Transcription
  misc_feature: MA Experiment 20001451 PARAMETER Experiment Name: At_Far-red-induction_P Parameter: Age (day) Value: 7
  misc_feature: MA Experiment 20001451 PARAMETER Experiment Name: At_Far-red-induction_P Parameter: Light Value: Far-red vs. White
  misc_feature: MA Experiment 20001451 PARAMETER Experiment Name: At_Far-red-induction_P Parameter: Organism Value: A. thaliana
  misc_feature: MA Experiment 20001451 PARAMETER Experiment Name: At_Far-red-induction_P Parameter: Plant Line Value: Columbia
  misc_feature: MA Experiment 20001451 PARAMETER Experiment Name: At_Far-red-induction_P Parameter: Timepoint (hr) Value: 24
  misc_feature: MA Experiment 20001451 PARAMETER Experiment Name: At_Far-red-induction_P Parameter: Tissue Value: Whole Plant
  misc_feature: MA Experiment ID: 20001911 Result: Down-regulated in Transcription
  misc_feature: MA Experiment 20001911 PARAMETER Experiment Name: At_Drought_Reproduction_P Parameter: Age (day) Value: 40
  misc_feature: MA Experiment 20001911 PARAMETER Experiment Name: At_Drought_Reproduction_P Parameter: Organism Value: A. thaliana
  misc_feature: MA Experiment 20001911 PARAMETER Experiment Name: At_Drought_Reproduction_P Parameter: Plant Line Value: WS
  misc_feature: MA Experiment 20001911 PARAMETER Experiment Name: At_Drought_Reproduction_P Parameter: Timepoint (day) Value: 10
  misc_feature: MA Experiment 20001911 PARAMETER Experiment Name: At_Drought_Reproduction_P Parameter: Tissue Value: Flowers
  misc_feature: MA Experiment 20001911 PARAMETER Experiment Name: At_Drought_Reproduction_P Parameter: Treatment Value: Drought vs. No Drought
aaaccttatttcaaatggctaaaaccaaaaatgttatttctttcaaactttctctcatcttccttcttaatattttcatcgtagccaccatcgcagccgcagcggccgttaacgccggtaccaaaggtttggattctcggccgtccaaaaccaggcgtccctggcctttcaagaagctcaacaaaccggtggttttaatgatctcttgcgacggtttccggtttggttaccaatttaaaacggacacaccaaacatcgaccttctcatatccggaggaactgaggccaaacacggtttaatcccggttttccccaccatgacattcccaaaccactactctatcgcaaccggactctacccggcttaccacggtataatcatgaacaagtttaccgatccggttacgggagaggtgttcaacaaaggcttacaaccaaaatggtggttaggtgagccgctgtgggtaaccgcagtaaaccaaggtctcaaggctgtgacctacttttggccaggctctgaagttctaaaaagttcttggacttgccctgaaggatattgtccacatttcaatctttcagttcctttagaagaaagggttgattcggtcttgagccattttgatcaccttgaggacgaagttcctgatttactgatgttgtatttcgatgagccagaccaatcgggtcataactatggtcctgatgatcctcgggttacgactgctgtttctagggttgataaaatgattggtagggtgataaaggggctgaagcagagggagatctttgatgaggttcatgtgatattgcttggtgatcacggaatggtgaccaactgtgagtgtaacgagaaagcgatttacattgatgacttagcggattggatcaagatacccgcggcttggatccaggcttacagcccagtgctagcaatcaatcctcagtgggggaaagatgtcgagaatcaaagcgaaaagaacgcggaagtcgtggcgaagatgaacgaagctttgagctcagggaaagtaaaaaacggagagtttttgaaagtttacttgaaggagaagctaccagagagactgcatttttcagagagttatcggattccaccgatcataggaattgtcggagaaggtctaatggtcagacagaacagaacaaatgctcaagtttgctatggagaccatggttatgacaacgagctcttctcgatgaggactatttttgtcggacatggttctaggtttagtagaggaaaaaaagtgccatcattcgagaatgtgcagatctataacgtcgttgcagagcttcttggactccgaccagctccgaacaatggttcttctttgttccctcggagcattctcttgccttctggagcaacaagggaagtaaaatgaagtaaaatcacttagctcatgaataataagtaagatgataatgagtgactaatctatgtgctcaatcttgtgacccttaatgtttttgaataaccaggtttcgtggactgaagcgacgttaatag

SEQ ID NO: 41192 - protein, 465 aa, Arabidopsis thaliana
  peptide (1)..(465): Ceres Seq. ID no. 12323935
  misc_feature (62)..(447): Homolog of NCBI NO: 13324677 NR Description: ectonucleotide pyrophosphatase/phosphodiesterase 1
  misc_feature (62)..(447): Homolog of NCBI NO: 23503088 NR Description: Ectonucleotide pyrophosphatase/phosphodiesterase (E-NPP 1) (Phosphodiesterase I/nucleotide pyrophosphatase 1)
  misc_feature (62)..(447): Homolog of NCBI NO: 9453796 NR Description: dJ131F15.2 (phosphodiesterase I/nucleotide
  misc_feature (217)..(457): Homolog of NCBI NO: 13877571 NR Description: nucleotide pyrophosphatase-like protein
  misc_feature (15)..(457): Homolog of NCBI NO: 12081942 NR Description: nucleotide pyrophosphatase-like protein [Spinacia
  misc_feature (22)..(458): Homolog of NCBI NO: 34903578 NR Description: nucleotide pyrophosphatase homolog
  misc_feature (55)..(457): Homolog of NCBI NO: 15233659 NR Description: nucleotide pyrophosphatase - like protein
  misc_feature (5)..(465): Homolog of NCBI NO: 27808612 NR Description: At4g29690 [Arabidopsis thaliana]
  misc_feature (5)..(465): Homolog of NCBI NO: 15233662 NR Description: nucleotide pyrophosphatase - like protein
  misc_feature (5)..(465): Homolog of NCBI NO: 15233665 NR Description: nucleotide pyrophosphatase -like protein
  misc_feature (62)..(447): Homolog of NCBI NO: 13324677 NR Description: ectonucleotide pyrophosphatase/phosphodiesterase 1
  misc_feature (62)..(447): Homolog of NCBI NO: 23503088 NR Description: Ectonucleotide pyrophosphatase/phosphodiesterase (E-NPP 1) (Phosphodiesterase I/nucleotide pyrophosphatase 1)
  misc_feature (62)..(447): Homolog of NCBI NO: 9453796 NR Description: dJ131F15.2 (phosphodiesterase I/nucleotide
  misc_feature (217)..(457): Homolog of NCBI NO: 13877571 NR Description: nucleotide pyrophosphatase-like protein
  misc_feature (15)..(457): Homolog of NCBI NO: 12081942 NR Description: nucleotide pyrophosphatase-like protein [Spinacia
  misc_feature (22)..(458): Homolog of NCBI NO: 34903578 NR Description: nucleotide pyrophosphatase homolog
  misc_feature (55)..(457): Homolog of NCBI NO: 15233659 NR Description: nucleotide pyrophosphatase - like protein
  misc_feature (5)..(465): Homolog of NCBI NO: 27808612 NR Description: At4g29690 [Arabidopsis thaliana]
  misc_feature (5)..(465): Homolog of NCBI NO: 15233662 NR Description: nucleotide pyrophosphatase - like protein
  misc_feature (5)..(465): Homolog of NCBI NO: 15233665 NR Description: nucleotide pyrophosphatase -like protein
TLFQMAKTKNVISFKLSLIFLLNIFIVATIAAAAAVNAGTKGLDSRPSKTRRPWPFKKLNKPVVLMISCDGFRFGYQFKTDTPNIDLLISGGTEAKHGLIPVFPTMTFPNHYSIATGLYPAYHGIIMNKFTDPVTGEVFNKGLQPKWWLGEPLWVTAVNQGLKAVTYFWPGSEVLKSSWTCPEGYCPHFNLSVPLEERVDSVLSHFDHLEDEVPDLLMLYFDEPDQSGHNYGPDDPRVTTAVSRVDKMIGRVIKGLKQREIFDEVHVILLGDHGMVTNCECNEKAIYIDDLADWIKIPAAWIQAYSPVLAINPQWGKDVENQSEKNAEVVAKMNEALSSGKVKNGEFLKVYLKEKLPERLHFSESYRIPPIIGIVGEGLMVRQNRTNAQVCYGDHGYDNELFSMRTIFVGHGSRFSRGKKVPSFENVQIYNVVAELLGLRPAPNNGSSLFPRSILLPSGATREVK

SEQ ID NO: 41193 - protein, 461 aa, Arabidopsis thaliana
  peptide (1)..(461): Ceres Seq. ID no. 12323936
  misc_feature (58)..(443): Homolog of NCBI NO: 23503088 NR Description: Ectonucleotide pyrophosphatase/phosphodiesterase (E-NPP 1) (Phosphodiesterase I/nucleotide pyrophosphatase 1)
  misc_feature (58)..(443): Homolog of NCBI NO: 13324677 NR Description: ectonucleotide pyrophosphatase/phosphodiesterase 1
  misc_feature (58)..(443): Homolog of NCBI NO: 9453796 NR Description: dJ131F15.2 (phosphodiesterase I/nucleotide
  misc_feature (213)..(453): Homolog of NCBI NO: 13877571 NR Description: nucleotide pyrophosphatase-like protein
  misc_feature (11)..(453): Homolog of NCBI NO: 12081942 NR Description: nucleotide pyrophosphatase-like protein [Spinacia
  misc_feature (18)..(454): Homolog of NCBI NO: 34903578 NR Description: nucleotide pyrophosphatase homolog
  misc_feature (51)..(453): Homolog of NCBI NO: 15233659 NR Description: nucleotide pyrophosphatase - like protein
  misc_feature (1)..(461): Homolog of NCBI NO: 27808612 NR Description: At4g29690 [Arabidopsis thaliana]
  misc_feature (1)..(461): Homolog of NCBI NO: 15233662 NR Description: nucleotide pyrophosphatase - like protein
  misc_feature (1)..(461): Homolog of NCBI NO: 15233665 NR Description: nucleotide pyrophosphatase -like protein
  misc_feature (58)..(443): Homolog of NCBI NO: 23503088 NR Description: Ectonucleotide pyrophosphatase/phosphodiesterase (E-NPP 1) (Phosphodiesterase I/nucleotide pyrophosphatase 1)
  misc_feature (58)..(443): Homolog of NCBI NO: 13324677 NR Description: ectonucleotide pyrophosphatase/phosphodiesterase 1
  misc_feature (58)..(443): Homolog of NCBI NO: 9453796 NR Description: dJ131F15.2 (phosphodiesterase I/nucleotide
  misc_feature (213)..(453): Homolog of NCBI NO: 13877571 NR Description: nucleotide pyrophosphatase-like protein
  misc_feature (11)..(453): Homolog of NCBI NO: 12081942 NR Description: nucleotide pyrophosphatase-like protein [Spinacia
  misc_feature (18)..(454): Homolog of NCBI NO: 34903578 NR Description: nucleotide pyrophosphatase homolog
  misc_feature (51)..(453): Homolog of NCBI NO: 15233659 NR Description: nucleotide pyrophosphatase - like protein
  misc_feature (1)..(461): Homolog of NCBI NO: 27808612 NR Description: At4g29690 [Arabidopsis thaliana]
  misc_feature (1)..(461): Homolog of NCBI NO: 15233662 NR Description: nucleotide pyrophosphatase - like protein
  misc_feature (1)..(461): Homolog of NCBI NO: 15233665 NR Description: nucleotide pyrophosphatase -like protein
MAKTKNVISFKLSLIFLLNIFIVATIAAAAAVNAGTKGLDSRPSKTRRPWPFKKLNKPVVLMISCDGFRFGYQFKTDTPNIDLLISGGTEAKHGLIPVFPTMTFPNHYSIATGLYPAYHGIIMNKFTDPVTGEVFNKGLQPKWWLGEPLWVTAVNQGLKAVTYFWPGSEVLKSSWTCPEGYCPHFNLSVPLEERVDSVLSHFDHLEDEVPDLLMLYFDEPDQSGHNYGPDDPRVTTAVSRVDKMIGRVIKGLKQREIFDEVHVILLGDHGMVTNCECNEKAIYIDDLADWIKIPAAWIQAYSPVLAINPQWGKDVENQSEKNAEVVAKMNEALSSGKVKNGEFLKVYLKEKLPERLHFSESYRIPPIIGIVGEGLMVRQNRTNAQVCYGDHGYDNELFSMRTIFVGHGSRFSRGKKVPSFENVQIYNVVAELLGLRPAPNNGSSLFPRSILLPSGATREVK

SEQ ID NO: 41194 - protein, 400 aa, Arabidopsis thaliana
  peptide (1)..(400): Ceres Seq. ID no. 12323937
  misc_feature (1)..(382): Homolog of NCBI NO: 13324677 NR Description: ectonucleotide pyrophosphatase/phosphodiesterase 1
  misc_feature (1)..(382): Homolog of NCBI NO: 23503088 NR Description: Ectonucleotide pyrophosphatase/phosphodiesterase (E-NPP 1) (Phosphodiesterase I/nucleotide pyrophosphatase 1)
  misc_feature (1)..(382): Homolog of NCBI NO: 9453796 NR Description: dJ131F15.2 (phosphodiesterase I/nucleotide
  misc_feature (152)..(392): Homolog of NCBI NO: 13877571 NR Description: nucleotide pyrophosphatase-like protein
  misc_feature (1)..(392): Homolog of NCBI NO: 12081942 NR Description: nucleotide pyrophosphatase-like protein [Spinacia
  misc_feature (1)..(393): Homolog of NCBI NO: 34903578 NR Description: nucleotide pyrophosphatase homolog
  misc_feature (1)..(392): Homolog of NCBI NO: 15233659 NR Description: nucleotide pyrophosphatase - like protein
  misc_feature (1)..(400): Homolog of NCBI NO: 27808612 NR Description: At4g29690 [Arabidopsis thaliana]
  misc_feature (1)..(400): Homolog of NCBI NO: 15233662 NR Description: nucleotide pyrophosphatase - like protein
  misc_feature (1)..(400): Homolog of NCBI NO: 15233665 NR Description: nucleotide pyrophosphatase -like protein
  misc_feature (1)..(382): Homolog of NCBI NO: 13324677 NR Description: ectonucleotide pyrophosphatase/phosphodiesterase 1
  misc_feature (1)..(382): Homolog of NCBI NO: 23503088 NR Description: Ectonucleotide pyrophosphatase/phosphodiesterase (E-NPP 1) (Phosphodiesterase I/nucleotide pyrophosphatase 1)
  misc_feature (1)..(382): Homolog of NCBI NO: 9453796 NR Description: dJ131F15.2 (phosphodiesterase I/nucleotide
  misc_feature (152)..(392): Homolog of NCBI NO: 13877571 NR Description: nucleotide pyrophosphatase-like protein
  misc_feature (1)..(392): Homolog of NCBI NO: 12081942 NR Description: nucleotide pyrophosphatase-like protein [Spinacia
  misc_feature (1)..(393): Homolog of NCBI NO: 34903578 NR Description: nucleotide pyrophosphatase homolog
  misc_feature (1)..(392): Homolog of NCBI NO: 15233659 NR Description: nucleotide pyrophosphatase - like protein
  misc_feature (1)..(400): Homolog of NCBI NO: 27808612 NR Description: At4g29690 [Arabidopsis thaliana]
  misc_feature (1)..(400): Homolog of NCBI NO: 15233662 NR Description: nucleotide pyrophosphatase - like protein
  misc_feature (1)..(400): Homolog of NCBI NO: 15233665 NR Description: nucleotide pyrophosphatase -like protein
MISCDGFRFGYQFKTDTPNIDLLISGGTEAKHGLIPVFPTMTFPNHYSIATGLYPAYHGIIMNKFTDPVTGEVFNKGLQPKWWLGEPLWVTAVNQGLKAVTYFWPGSEVLKSSWTCPEGYCPHFNLSVPLEERVDSVLSHFDHLEDEVPDLLMLYFDEPDQSGHNYGPDDPRVTTAVSRVDKMIGRVIKGLKQREIFDEVHVILLGDHGMVTNCECNEKAIYIDDLADWIKIPAAWIQAYSPVLAINPQWGKDVENQSEKNAEVVAKMNEALSSGKVKNGEFLKVYLKEKLPERLHFSESYRIPPIIGIVGEGLMVRQNRTNAQVCYGDHGYDNELFSMRTIFVGHGSRFSRGKKVPSFENVQIYNVVAELLGLRPAPNNGSSLFPRSILLPSGATREVK

SEQ ID NO: 41195 - DNA, 1034 bp, Arabidopsis thaliana
  misc_feature (1)..(1034): Ceres Seq. ID no. 12328122
  misc_feature: MA Experiment ID: 108573 Result: Up-regulated in Transcription
  misc_feature: MA Experiment 108573 PARAMETER Experiment Name: At_Drought_cDNA_P Parameter: Timepoint (hr) Value: 6
  misc_feature: MA Experiment 108573 PARAMETER Experiment Name: At_Drought_cDNA_P Parameter: Tissue Value: Aerial
  misc_feature: MA Experiment 108573 PARAMETER Experiment Name: At_Drought_cDNA_P Parameter: Treatment Value: Drought vs. No Drought
  misc_feature: MA Experiment ID: 20000069 Result: Up-regulated in Transcription
  misc_feature: MA Experiment 20000069 PARAMETER Experiment Name: At_100uM_ABA_Mutants_cDNA_P Parameter: Plant Line Value: CS23
  misc_feature: MA Experiment 20000069 PARAMETER Experiment Name: At_100uM_ABA_Mutants_cDNA_P Parameter: Timepoint (hr) Value: 6
  misc_feature: MA Experiment 20000069 PARAMETER Experiment Name: At_100uM_ABA_Mutants_cDNA_P Parameter: Tissue Value: Aerial
  misc_feature: MA Experiment 20000069 PARAMETER Experiment Name: At_100uM_ABA_Mutants_cDNA_P Parameter: Treatment Value: 100uM ABA vs. No Treatment
  misc_feature: MA Experiment ID: 20000070 Result: Up-regulated in Transcription
  misc_feature: MA Experiment 20000070 PARAMETER Experiment Name: At_100uM_ABA_Mutants_cDNA_P Parameter: Plant Line Value: CS24
  misc_feature: MA Experiment 20000070 PARAMETER Experiment Name: At_100uM_ABA_Mutants_cDNA_P Parameter: Timepoint (hr) Value: 6
  misc_feature: MA Experiment 20000070 PARAMETER Experiment Name: At_100uM_ABA_Mutants_cDNA_P Parameter: Tissue Value: Aerial
  misc_feature: MA Experiment 20000070 PARAMETER Experiment Name: At_100uM_ABA_Mutants_cDNA_P Parameter: Treatment Value: 100uM ABA vs. No Treatment
  misc_feature: MA Experiment ID: 20000072 Result: Up-regulated in Transcription
  misc_feature: MA Experiment 20000072 PARAMETER Experiment Name: At_100uM_ABA_Mutants_cDNA_P Parameter: Plant Line Value: CS8105
  misc_feature: MA Experiment 20000072 PARAMETER Experiment Name: At_100uM_ABA_Mutants_cDNA_P Parameter: Timepoint (hr) Value: 6
  misc_feature: MA Experiment 20000072 PARAMETER Experiment Name: At_100uM_ABA_Mutants_cDNA_P Parameter: Tissue Value: Aerial
  misc_feature: MA Experiment 20000072 PARAMETER Experiment Name: At_100uM_ABA_Mutants_cDNA_P Parameter: Treatment Value: 100uM ABA vs. No Treatment
  misc_feature: MA Experiment ID: 20000087 Result: Up-regulated in Transcription
  misc_feature: MA Experiment 20000087 PARAMETER Experiment Name: At_100uM_ABA_Mutants_cDNA_P Parameter: Plant Line Value: WS
  misc_feature: MA Experiment 20000087 PARAMETER Experiment Name: At_100uM_ABA_Mutants_cDNA_P Parameter: Timepoint (hr) Value: 6
  misc_feature: MA Experiment 20000087 PARAMETER Experiment Name: At_100uM_ABA_Mutants_cDNA_P Parameter: Tissue Value: Aerial
  misc_feature: MA Experiment 20000087 PARAMETER Experiment Name: At_100uM_ABA_Mutants_cDNA_P Parameter: Treatment Value: 100uM ABA vs. No Treatment
  misc_feature: MA Experiment ID: 20000234 Result: Up-regulated in Transcription
  misc_feature: MA Experiment 20000234 PARAMETER Experiment Name: At_Siliques_P Parameter: Age (day) Value: 21
  misc_feature: MA Experiment 20000234 PARAMETER Experiment Name: At_Siliques_P Parameter: Organism Value: A. thaliana
  misc_feature: MA Experiment 20000234 PARAMETER Experiment Name: At_Siliques_P Parameter: Plant Line Value: WS
  misc_feature: MA Experiment 20000234 PARAMETER Experiment Name: At_Siliques_P Parameter: Tissue Value: Less Than 5mm Siliques vs. Whole Plant
  misc_feature: MA Experiment ID: 20000264 Result: Up-regulated in Transcription
  misc_feature: MA Experiment 20000264 PARAMETER Experiment Name: At_Open_Flower_P Parameter: Age (day) Value: 21
  misc_feature: MA Experiment 20000264 PARAMETER Experiment Name: At_Open_Flower_P Parameter: Plant Line Value: WS
  misc_feature: MA Experiment 20000264 PARAMETER Experiment Name: At_Open_Flower_P Parameter: Tissue Value: Open Flower vs. Whole Plant
  misc_feature: MA Experiment ID: 20000286 Result: Up-regulated in Transcription
  misc_feature: MA Experiment 20000286 PARAMETER Experiment Name: At_Open_Flower_P Parameter: Age (day) Value: 21
  misc_feature: MA Experiment 20000286 PARAMETER Experiment Name: At_Open_Flower_P Parameter: Plant Line Value: WS
  misc_feature: MA Experiment 20000286 PARAMETER Experiment Name: At_Open_Flower_P Parameter: Tissue Value: Half Open vs. Whole Plant
  misc_feature: MA Experiment ID: 20000436 Result: Up-regulated in Transcription
  misc_feature: MA Experiment 20000436 PARAMETER Experiment Name: At_Drought_P Parameter: Age (day) Value: 7
  misc_feature: MA Experiment 20000436 PARAMETER Experiment Name: At_Drought_P Parameter: Organism Value: A. thaliana
  misc_feature: MA Experiment 20000436 PARAMETER Experiment Name: At_Drought_P Parameter: Plant Line Value: WS
  misc_feature: MA Experiment 20000436 PARAMETER Experiment Name: At_Drought_P Parameter: Timepoint (hr) Value: 12
  misc_feature: MA Experiment 20000436 PARAMETER Experiment Name: At_Drought_P Parameter: Tissue Value: Whole Plant
  misc_feature: MA Experiment 20000436 PARAMETER Experiment Name: At_Drought_P Parameter: Treatment Value: Drought vs. No Drought
  misc_feature: MA Experiment ID: 20000437 Result: Up-regulated in Transcription
  misc_feature: MA Experiment 20000437 PARAMETER Experiment Name: At_Drought_P Parameter: Age (day) Value: 8
  misc_feature: MA Experiment 20000437 PARAMETER Experiment Name: At_Drought_P Parameter: Organism Value: A. thaliana
  misc_feature: MA Experiment 20000437 PARAMETER Experiment Name: At_Drought_P Parameter: Plant Line Value: WS
  misc_feature: MA Experiment 20000437 PARAMETER Experiment Name: At_Drought_P Parameter: Timepoint (hr) Value: 24
  misc_feature: MA Experiment 20000437 PARAMETER Experiment Name: At_Drought_P Parameter: Tissue Value: Whole Plant
  misc_feature: MA Experiment 20000437 PARAMETER Experiment Name: At_Drought_P Parameter: Treatment Value: Drought vs. No Drought
  misc_feature: MA Experiment ID: 20001905 Result: Up-regulated in Transcription
  misc_feature: MA Experiment 20001905 PARAMETER Experiment Name: At_Drought_Reproduction_P Parameter: Age (day) Value: 40
  misc_feature: MA Experiment 20001905 PARAMETER Experiment Name: At_Drought_Reproduction_P Parameter: Organism Value: A. thaliana
  misc_feature: MA Experiment 20001905 PARAMETER Experiment Name: At_Drought_Reproduction_P Parameter: Plant Line Value: WS
  misc_feature: MA Experiment 20001905 PARAMETER Experiment Name: At_Drought_Reproduction_P Parameter: Timepoint (day) Value: 10
  misc_feature: MA Experiment 20001905 PARAMETER Experiment Name: At_Drought_Reproduction_P Parameter: Tissue Value: Rosettes
  misc_feature: MA Experiment 20001905 PARAMETER Experiment Name: At_Drought_Reproduction_P Parameter: Treatment Value: Drought vs. No Drought
  misc_feature: MA Experiment ID: 20001911 Result: Up-regulated in Transcription
  misc_feature: MA Experiment 20001911 PARAMETER Experiment Name: At_Drought_Reproduction_P Parameter: Age (day) Value: 40
  misc_feature: MA Experiment 20001911 PARAMETER Experiment Name: At_Drought_Reproduction_P Parameter: Organism Value: A. thaliana
  misc_feature: MA Experiment 20001911 PARAMETER Experiment Name: At_Drought_Reproduction_P Parameter: Plant Line Value: WS
  misc_feature: MA Experiment 20001911 PARAMETER Experiment Name: At_Drought_Reproduction_P Parameter: Timepoint (day) Value: 10
  misc_feature: MA Experiment 20001911 PARAMETER Experiment Name: At_Drought_Reproduction_P Parameter: Tissue Value: Flowers
  misc_feature: MA Experiment 20001911 PARAMETER Experiment Name: At_Drought_Reproduction_P Parameter: Treatment Value: Drought vs. No Drought
aaaaaccctataaaataaatatcccaacgaaggcgataaaacccagattttccagatcttaaattctctcctcccccaattccatcttcgcaaattctccagattcttccgtcaatctttgagtttggtagagaaatggatcaacaaggacaatcatcagctatgaactatggttcaaacccatatcaaaccaacgccatgaccactacaccaaccggttcagaccatccagcttaccatcagatccaccagcaacaacaacaacagctcactcaacagcttcaatctttctgggagactcaattcaaagagattgagaaaaccactgatttcaagaaccatagccttccattggcaagaatcaagaaaatcatgaaagctgatgaagatgtgcgtatgatctcggccgaggcgcctgttgtgttcgccagggcctgcgagatgtttattctggagcttacgttaaggtcttggaaccatactgaggagaacaagagaaggacgttgcagaagaatgatatcgcggctgcggtgactagaactgatatttttgattttcttgtggatattgttcctcgggaggatcttcgtgatgaagtcttgggtggtgttggtgctgaagctgctacagctgcgggttatccgtatggatacttgcctcctggaacagctccaattgggaacccgggaatggttatgggtaacccgggcgcgtatccgccgaacccgtatatgggtcagccaatgtggcaacaaccaggacctgagcagcaggatcctgacaattagcttggcctaataaactagccgtctaattcgaagctctccccggtggatctactcaagaagaagaatgttaatagaaaactattgcgacataaaaagtttggtgtagtagaataatttctgttttatgatccatggatttatctattgttattcagtttggtttatcttgtcatcaaactgttttcggtcaatgtaacaaattcataaactgagaattgaacttacaaaaggctagattactactt

SEQ ID NO: 41196 - protein, 217 aa, Arabidopsis thaliana; identical to SEQ ID NO: 23371
  peptide (1)..(217): Ceres Seq. ID no. 12328123
  misc_feature (58)..(174): Homolog of NCBI NO: 2398533 NR Description: Transcription factor [Arabidopsis thaliana]
  misc_feature (42)..(181): Homolog of NCBI NO: 5257260 NR Description: Similar to sequence of BAC F7G19 from Arabidopsis
  misc_feature (1)..(174): Homolog of NCBI NO: 21554704 NR Description: transcription factor, putative [Arabidopsis
  misc_feature (1)..(174): Homolog of NCBI NO: 15223482 NR Description: transcription factor, putative
  misc_feature (34)..(206): Homolog of NCBI NO: 15242784 NR Description: transcription factor Hap5a-like protein
  misc_feature (1)..(206): Homolog of NCBI NO: 15228405 NR Description: transcription factor Hap5a
  misc_feature (24)..(217): Homolog of NCBI NO: 25372763 NR Description: hypothetical protein [imported] - Arabidopsis
  misc_feature (1)..(217): Homolog of NCBI NO: 6289057 NR Description: heme activated protein [Arabidopsis thaliana]
  misc_feature (1)..(217): Homolog of NCBI NO: 15223986 NR Description: putative transcription factor
  misc_feature (1)..(217): Homolog of NCBI NO: 15221912 NR Description: heme activated protein, putative; protein id:

SEQ ID NO: 41197 - protein, 208 aa, Arabidopsis thaliana; identical to SEQ ID NO: 23372
  peptide (1)..(208): Ceres Seq. ID no. 12328124
  misc_feature (49)..(165): Homolog of NCBI NO: 2398533 NR Description: Transcription factor [Arabidopsis thaliana]
  misc_feature (33)..(172): Homolog of NCBI NO: 5257260 NR Description: Similar to sequence of BAC F7G19 from Arabidopsis
  misc_feature (1)..(165): Homolog of NCBI NO: 21554704 NR Description: transcription factor, putative [Arabidopsis
  misc_feature (1)..(165): Homolog of NCBI NO: 15223482 NR Description: transcription factor, putative
  misc_feature (25)..(197): Homolog of NCBI NO: 15242784 NR Description: transcription factor Hap5a-like protein
  misc_feature (1)..(197): Homolog of NCBI NO: 15228405 NR Description: transcription factor Hap5a
  misc_feature (15)..(208): Homolog of NCBI NO: 25372763 NR Description: hypothetical protein [imported] - Arabidopsis
  misc_feature (1)..(208): Homolog of NCBI NO: 6289057 NR Description: heme activated protein [Arabidopsis thaliana]
  misc_feature (1)..(208): Homolog of NCBI NO: 15223986 NR Description: putative transcription factor
  misc_feature (1)..(208): Homolog of NCBI NO: 15221912 NR Description: heme activated protein, putative; protein id:

SEQ ID NO: 41198 - protein, 196 aa, Arabidopsis thaliana
  peptide (1)..(196): Ceres Seq. ID no. 12328125
  misc_feature (37)..(153): Homolog of NCBI NO: 2398533 NR Description: Transcription factor [Arabidopsis thaliana]
  misc_feature (21)..(160): Homolog of NCBI NO: 5257260 NR Description: Similar to sequence of BAC F7G19 from Arabidopsis
  misc_feature (1)..(153): Homolog of NCBI NO: 21554704 NR Description: transcription factor, putative [Arabidopsis
  misc_feature (1)..(153): Homolog of NCBI NO: 15223482 NR Description: transcription factor, putative
  misc_feature (13)..(185): Homolog of NCBI NO: 15242784 NR Description: transcription factor Hap5a-like protein
  misc_feature (1)..(185): Homolog of NCBI NO: 15228405 NR Description: transcription factor Hap5a
  misc_feature (3)..(196): Homolog of NCBI NO: 25372763 NR Description: hypothetical protein [imported] - Arabidopsis
  misc_feature (1)..(196): Homolog of NCBI NO: 6289057 NR Description: heme activated protein [Arabidopsis thaliana]
  misc_feature (1)..(196): Homolog of NCBI NO: 15223986 NR Description: putative transcription factor
  misc_feature (1)..(196): Homolog of NCBI NO: 15221912 NR Description: heme activated protein, putative; protein id:
MTTTPTGSDHPAYHQIHQQQQQQLTQQLQSFWETQFKEIEKTTDFKNHSLPLARIKKIMKADEDVRMISAEAPVVFARACEMFILELTLRSWNHTEENKRRTLQKNDIAAAVTRTDIFDFLVDIVPREDLRDEVLGGVGAEAATAAGYPYGYLPPGTAPIGNPGMVMGNPGAYPPNPYMGQPMWQQPGPEQQDPDN

SEQ ID NO: 41199 - DNA, 1115 bp, Arabidopsis thaliana
  misc_feature (1)..(1115): Ceres Seq. ID no. 12328126
  misc_feature: MA Experiment ID: 108435 Result: Down-regulated in Transcription
  misc_feature: MA Experiment 108435 PARAMETER Experiment Name: At_stm_Mutants_cDNA_P Parameter: Plant Line Value: wt Landsburg vs stm
  misc_feature: MA Experiment 108435 PARAMETER Experiment Name: At_stm_Mutants_cDNA_P Parameter: Tissue Value: Shoot Apical Meristem Region
  misc_feature: MA Experiment ID: 108462 Result: Up-regulated in Transcription
  misc_feature: MA Experiment 108462 PARAMETER Experiment Name: At_Germinating_Seeds_cDNA_P Parameter: Age (day) Value: 2 vs. 0
  misc_feature: MA Experiment 108462 PARAMETER Experiment Name: At_Germinating_Seeds_cDNA_P Parameter: Tissue Value: Germinating Seeds
  misc_feature: MA Experiment ID: 108501 Result: Down-regulated in Transcription
  misc_feature: MA Experiment 108501 PARAMETER Experiment Name: At_ap2_floral_buds_cDNA_P Parameter: Plant Line Value: ap2 (Ler.)
  misc_feature: MA Experiment 108501 PARAMETER Experiment Name: At_ap2_floral_buds_cDNA_P Parameter: Tissue Value: Closed Flower
  misc_feature: MA Experiment ID: 108668 Result: Down-regulated in Transcription
  misc_feature: MA Experiment 108668 PARAMETER Experiment Name: At_2mM_SA_cDNA_P Parameter: Plant Line Value: WS
  misc_feature: MA Experiment 108668 PARAMETER Experiment Name: At_2mM_SA_cDNA_P Parameter: Timepoint (hr) Value: 6
  misc_feature: MA Experiment 108668 PARAMETER Experiment Name: At_2mM_SA_cDNA_P Parameter: Treatment Value: 2mM SA vs. No Treatment
  misc_feature: MA Experiment ID: 20000113 Result: Down-regulated in Transcription
  misc_feature: MA Experiment 20000113 PARAMETER Experiment Name: At_42deg_Heat_cDNA_P Parameter: Temperature (deg C) Value: 42 vs. 22
  misc_feature: MA Experiment 20000113 PARAMETER Experiment Name: At_42deg_Heat_cDNA_P Parameter: Timepoint (hr) Value: 8
  misc_feature: MA Experiment 20000113 PARAMETER Experiment Name: At_42deg_Heat_cDNA_P Parameter: Tissue Value: Aerial
  misc_feature: MA Experiment ID: 20000182 Result: Down-regulated in Transcription
  misc_feature: MA Experiment 20000182 PARAMETER Experiment Name: At_2mM_SA_P Parameter: Age (day) Value: 14
  misc_feature: MA Experiment 20000182 PARAMETER Experiment Name: At_2mM_SA_P Parameter: Organism Value: A. thaliana
  misc_feature: MA Experiment 20000182 PARAMETER Experiment Name: At_2mM_SA_P Parameter: Plant Line Value: WS
  misc_feature: MA Experiment 20000182 PARAMETER Experiment Name: At_2mM_SA_P Parameter: Timepoint (hr) Value: 6
  misc_feature: MA Experiment 20000182 PARAMETER Experiment Name: At_2mM_SA_P Parameter: Tissue Value: Aerial
  misc_feature: MA Experiment 20000182 PARAMETER Experiment Name: At_2mM_SA_P Parameter: Treatment Value: 2mM SA vs. No Treatment
  misc_feature: MA Experiment ID: 20000265 Result: Up-regulated in Transcription
  misc_feature: MA Experiment 20000265 PARAMETER Experiment Name: At_Open_Flower_P Parameter: Age (day) Value: 21
  misc_feature: MA Experiment 20000265 PARAMETER Experiment Name: At_Open_Flower_P Parameter: Plant Line Value: WS
  misc_feature: MA Experiment 20000265 PARAMETER Experiment Name: At_Open_Flower_P Parameter: Tissue Value: Closed Flower vs. Whole Plant
  misc_feature: MA Experiment ID: 20001911 Result: Down-regulated in Transcription
  misc_feature: MA Experiment 20001911 PARAMETER Experiment Name: At_Drought_Reproduction_P Parameter: Age (day) Value: 40
  misc_feature: MA Experiment 20001911 PARAMETER Experiment Name: At_Drought_Reproduction_P Parameter: Organism Value: A. thaliana
  misc_feature: MA Experiment 20001911 PARAMETER Experiment Name: At_Drought_Reproduction_P Parameter: Plant Line Value: WS
  misc_feature: MA Experiment 20001911 PARAMETER Experiment Name: At_Drought_Reproduction_P Parameter: Timepoint (day) Value: 10
  misc_feature: MA Experiment 20001911 PARAMETER Experiment Name: At_Drought_Reproduction_P Parameter: Tissue Value: Flowers
  misc_feature: MA Experiment 20001911 PARAMETER Experiment Name: At_Drought_Reproduction_P Parameter: Treatment Value: Drought vs. No Drought
aaatcacaatctcaatatcacattcgttgcagagacaaagatgtctgagtatttggtaactggaggaacaggtttcattgcttcttacatcatcaaatcacttctcgaactcggacacaccgttcgaacaactgtccgaaacccacgtgatgaagaaaaggttggatttttatgggaatttcaaggagcaaaacagaggctaaagattctccaagctgatctaacggtagaaggaagttttgatgaagcagtgaatggtgttgatggagtattccacactgcttctcctgttcttgttccacaggatcataacattcaggagactttggttgatcctattataaagggtacaacaaatgtgatgagctcttgtgccaagtctaaagccacattgaaaaggattgttcttacgtcttcttgctcttcgatacgctaccgtttcgatgcaactgaagcttctcctctcaatgagtctcattggagtgatcctgaatattgcaaacgtttcaatctttggtatggatatgcaaagactttaggagaaagagaggcttggaggatagctgaagagaaaggattagacttggttgttgtgaatccttcgtttgtggttggtccattgcttggaccaaaaccaacaagtactctgcttatgattcttgctattgctaaaggtcttgctggagagtatccaaatttcactgtcgggtttgtgcatatagatgatgttgttgctgcacatgtattggctatggaagagcctaaagcatcagggagaatcatatgttcgagttctgttgctcattggtctgagatcattgagttgatgagaaataagtatcctaattacccatttgagaacaagtgtagtaacaaagaaggagacaatagtccacatagtatggatacaaggaagatacatgagttgggatttggatccttcaagtcactacctgagatgtttgatgattgcatcatcagttttcagaagaagggtctgctctaaatatatacattttcatacatcgacaatgatttcaatgtattggactcttgccaagtagtaactggtttttaatttctgcctctagtataaattcaataagctggtgttg

SEQ ID NO: 41200 - protein, 334 aa, Arabidopsis thaliana
  peptide (1)..(334): Ceres Seq. ID no. 12328127
  misc_feature (18)..(280): Pfam Name: NAD dependent epimerase/dehydratase family Pfam Description: NAD dependent epimerase/dehydratase family
  misc_feature (19)..(334): Homolog of NCBI NO: 2960364 NR Description: cinnamoyl CoA reductase [Populus balsamifera
  misc_feature (3)..(334): Homolog of NCBI NO: 25405464 NR Description: hypothetical protein F5D21.12 [imported] -
  misc_feature (19)..(334): Homolog of NCBI NO: 25140434 NR Description: cinnamoyl CoA reductase [Solanum tuberosum]
  misc_feature (12)..(334): Homolog of NCBI NO: 34905082 NR Description: putative dihydroflavonol 4-reductase
  misc_feature (19)..(334): Homolog of NCBI NO: 4581047 NR Description: putative dihydroflavonol reductase [Oryza sativa]
  misc_feature (19)..(334): Homolog of NCBI NO: 14030554 NR Description: dihydro-flavanoid reductase-like protein [Zea
  misc_feature (19)..(334): Homolog of NCBI NO: 30690351 NR Description: dihydroflavonol 4-reductase (dihydrokaempferol
  misc_feature (14)..(334): Homolog of NCBI NO: 34895494 NR Description: putative reductase [Oryza sativa (japonica
  misc_feature (14)..(334): Homolog of NCBI NO: 15222595 NR Description: dihydroflavonol 4-reductase, putative; protein
  misc_feature (14)..(334): Homolog of NCBI NO: 15221433 NR Description: putative reductase; protein id: At1g68540.1
NHNLNITFVAETKMSEYLVTGGTGFIASYIIKSLLELGHTVRTTVRNPRDEEKVGFLWEFQGAKQRLKILQADLTVEGSFDEAVNGVDGVFHTASPVLVPQDHNIQETLVDPIIKGTTNVMSSCAKSKATLKRIVLTSSCSSIRYRFDATEASPLNESHWSDPEYCKRFNLWYGYAKTLGEREAWRIAEEKGLDLVVVNPSFVVGPLLGPKPTSTLLMILAIAKGLAGEYPNFTVGFVHIDDVVAAHVLAMEEPKASGRIICSSSVAHWSEIIELMRNKYPNYPFENKCSNKEGDNSPHSMDTRKIHELGFGSFKSLPEMFDDCIISFQKKGLL

SEQ ID NO: 41201 - protein, 321 aa, Arabidopsis thaliana
  peptide (1)..(321): Ceres Seq. ID no. 12328128
  misc_feature (5)..(267): Pfam Name: NAD dependent epimerase/dehydratase family Pfam Description: NAD dependent epimerase/dehydratase family
  misc_feature (6)..(321): Homolog of NCBI NO: 2960364 NR Description: cinnamoyl CoA reductase [Populus balsamifera
  misc_feature (1)..(321): Homolog of NCBI NO: 25405464 NR Description: hypothetical protein F5D21.12 [imported] -
  misc_feature (6)..(321): Homolog of NCBI NO: 25140434 NR Description: cinnamoyl CoA reductase [Solanum tuberosum]
  misc_feature (1)..(321): Homolog of NCBI NO: 34905082 NR Description: putative dihydroflavonol 4-reductase
  misc_feature (6)..(321): Homolog of NCBI NO: 4581047 NR Description: putative dihydroflavonol reductase [Oryza sativa]
  misc_feature (6)..(321): Homolog of NCBI NO: 14030554 NR Description: dihydro-flavanoid reductase-like protein [Zea
  misc_feature (6)..(321): Homolog of NCBI NO: 30690351 NR Description: dihydroflavonol 4-reductase (dihydrokaempferol
  misc_feature (1)..(321): Homolog of NCBI NO: 34895494 NR Description: putative reductase [Oryza sativa (japonica
  misc_feature (1)..(321): Homolog of NCBI NO: 15222595 NR Description: dihydroflavonol 4-reductase, putative; protein
  misc_feature (1)..(321): Homolog of NCBI NO: 15221433 NR Description: putative reductase; protein id: At1g68540.1
MSEYLVTGGTGFIASYIIKSLLELGHTVRTTVRNPRDEEKVGFLWEFQGAKQRLKILQADLTVEGSFDEAVNGVDGVFHTASPVLVPQDHNIQETLVDPIIKGTTNVMSSCAKSKATLKRIVLTSSCSSIRYRFDATEASPLNESHWSDPEYCKRFNLWYGYAKTLGEREAWRIAEEKGLDLVVVNPSFVVGPLLGPKPTSTLLMILAIAKGLAGEYPNFTVGFVHIDDVVAAHVLAMEEPKASGRIICSSSVAHWSEIIELMRNKYPNYPFENKCSNKEGDNSPHSMDTRKIHELGFGSFKSLPEMFDDCIISFQKKGLL

SEQ ID NO: 41202 - protein, 214 aa, Arabidopsis thaliana
  peptide (1)..(214): Ceres Seq. ID no. 12328129
  misc_feature (1)..(160): Pfam Name: NAD dependent epimerase/dehydratase family Pfam Description: NAD dependent epimerase/dehydratase family
  misc_feature (1)..(214): Homolog of NCBI NO: 2960364 NR Description: cinnamoyl CoA reductase [Populus balsamifera
  misc_feature (1)..(214): Homolog of NCBI NO: 25405464 NR Description: hypothetical protein F5D21.12 [imported] -
  misc_feature (1)..(214): Homolog of NCBI NO: 25140434 NR Description: cinnamoyl CoA reductase [Solanum tuberosum]
  misc_feature (1)..(214): Homolog of NCBI NO: 34905082 NR Description: putative dihydroflavonol 4-reductase
  misc_feature (1)..(214): Homolog of NCBI NO: 4581047 NR Description: putative dihydroflavonol reductase [Oryza sativa]
  misc_feature (1)..(214): Homolog of NCBI NO: 14030554 NR Description: dihydro-flavanoid reductase-like protein [Zea
  misc_feature (1)..(214): Homolog of NCBI NO: 30690351 NR Description: dihydroflavonol 4-reductase (dihydrokaempferol
  misc_feature (1)..(214): Homolog of NCBI NO: 34895494 NR Description: putative reductase [Oryza sativa (japonica
  misc_feature (1)..(214): Homolog of NCBI NO: 15222595 NR Description: dihydroflavonol 4-reductase, putative; protein
  misc_feature (1)..(214): Homolog of NCBI NO: 15221433 NR Description: putative reductase; protein id: At1g68540.1
MSSCAKSKATLKRIVLTSSCSSIRYRFDATEASPLNESHWSDPEYCKRFNLWYGYAKTLGEREAWRIAEEKGLDLVVVNPSFVVGPLLGPKPTSTLLMILAIAKGLAGEYPNFTVGFVHIDDVVAAHVLAMEEPKASGRIICSSSVAHWSEIIELMRNKYPNYPFENKCSNKEGDNSPHSMDTRKIHELGFGSFKSLPEMFDDCIISFQKKGLL

SEQ ID NO: 41203 - DNA, 1669 bp, Arabidopsis thaliana
  misc_feature (1)..(1669): Ceres Seq. ID no. 12367017
  misc_feature: MA Experiment ID: 108461 Result: Up-regulated in Transcription
  misc_feature: MA Experiment 108461 PARAMETER Experiment Name: At_Germinating_Seeds_cDNA_P Parameter: Age (day) Value: 1 vs. 0
  misc_feature: MA Experiment 108461 PARAMETER Experiment Name: At_Germinating_Seeds_cDNA_P Parameter: Tissue Value: Germinating Seeds
  misc_feature: MA Experiment ID: 108577 Result: Down-regulated in Transcription
  misc_feature: MA Experiment 108577 PARAMETER Experiment Name: At_42deg_Heat_cDNA_P Parameter: Temperature (deg C) Value: 42 vs. 22
  misc_feature: MA Experiment 108577 PARAMETER Experiment Name: At_42deg_Heat_cDNA_P Parameter: Timepoint (hr) Value: 6
  misc_feature: MA Experiment 108577 PARAMETER Experiment Name: At_42deg_Heat_cDNA_P Parameter: Tissue Value: Aerial
  misc_feature: MA Experiment ID: 108585 Result: Down-regulated in Transcription
  misc_feature: MA Experiment 108585 PARAMETER Experiment Name: At_5mM_NaNP_cDNA_P Parameter: Timepoint (hr) Value: 6
  misc_feature: MA Experiment 108585 PARAMETER Experiment Name: At_5mM_NaNP_cDNA_P Parameter: Tissue Value: Aerial
  misc_feature: MA Experiment 108585 PARAMETER Experiment Name: At_5mM_NaNP_cDNA_P Parameter: Treatment Value: null
  misc_feature: MA Experiment ID: 20000093 Result: Down-regulated in Transcription
  misc_feature: MA Experiment 20000093 PARAMETER Experiment Name: At_42deg_Heat_cDNA_P Parameter: Temperature (deg C) Value: 42 vs. 22
  misc_feature: MA Experiment 20000093 PARAMETER Experiment Name: At_42deg_Heat_cDNA_P Parameter: Timepoint (hr) Value: 0.5
  misc_feature: MA Experiment 20000093 PARAMETER Experiment Name: At_42deg_Heat_cDNA_P Parameter: Tissue Value: Aerial
  misc_feature: MA Experiment ID: 20000111 Result: Down-regulated in Transcription
  misc_feature: MA Experiment 20000111 PARAMETER Experiment Name: At_42deg_Heat_cDNA_P Parameter: Temperature (deg C) Value: 42 vs. 22
  misc_feature: MA Experiment 20000111 PARAMETER Experiment Name: At_42deg_Heat_cDNA_P Parameter: Timepoint (hr) Value: 6
  misc_feature: MA Experiment 20000111 PARAMETER Experiment Name: At_42deg_Heat_cDNA_P Parameter: Tissue Value: Aerial
  misc_feature: MA Experiment ID: 20000112 Result: Down-regulated in Transcription
  misc_feature: MA Experiment 20000112 PARAMETER Experiment Name: At_42deg_Heat_cDNA_P Parameter: Temperature (deg C) Value: 42 vs. 22
  misc_feature: MA Experiment 20000112 PARAMETER Experiment Name: At_42deg_Heat_cDNA_P Parameter: Timepoint (hr) Value: 2
  misc_feature: MA Experiment 20000112 PARAMETER Experiment Name: At_42deg_Heat_cDNA_P Parameter: Tissue Value: Aerial
  misc_feature: MA Experiment ID: 20000113 Result: Down-regulated in Transcription
  misc_feature: MA Experiment 20000113 PARAMETER Experiment Name: At_42deg_Heat_cDNA_P Parameter: Temperature (deg C) Value: 42 vs. 22
  misc_feature: MA Experiment 20000113 PARAMETER Experiment Name: At_42deg_Heat_cDNA_P Parameter: Timepoint (hr) Value: 8
  misc_feature: MA Experiment 20000113 PARAMETER Experiment Name: At_42deg_Heat_cDNA_P Parameter: Tissue Value: Aerial
  misc_feature: MA Experiment ID: 20000144 Result: Down-regulated in Transcription
  misc_feature: MA Experiment 20000144 PARAMETER Experiment Name: At_42deg_Heat_cDNA_P Parameter: Temperature (deg C) Value: 42 vs. 22
  misc_feature: MA Experiment 20000144 PARAMETER Experiment Name: At_42deg_Heat_cDNA_P Parameter: Timepoint (hr) Value: 1
  misc_feature: MA Experiment 20000144 PARAMETER Experiment Name: At_42deg_Heat_cDNA_P Parameter: Tissue Value: Aerial
  misc_feature: MA Experiment ID: 20000171 Result: Down-regulated in Transcription
  misc_feature: MA Experiment 20000171 PARAMETER Experiment Name: At_42deg_Heat_P Parameter: Age (day) Value: 14
  misc_feature: MA Experiment 20000171 PARAMETER Experiment Name: At_42deg_Heat_P Parameter: Organism Value: A. thaliana
  misc_feature: MA Experiment 20000171 PARAMETER Experiment Name: At_42deg_Heat_P Parameter: Plant Line Value: WS
  misc_feature: MA Experiment 20000171 PARAMETER Experiment Name: At_42deg_Heat_P Parameter: Temperature (deg C) Value: 42 vs. 22
  misc_feature: MA Experiment 20000171 PARAMETER Experiment Name: At_42deg_Heat_P Parameter: Timepoint (hr) Value: 1
  misc_feature: MA Experiment 20000171 PARAMETER Experiment Name: At_42deg_Heat_P Parameter: Tissue Value: Aerial
  misc_feature: MA Experiment ID: 20000173 Result: Down-regulated in Transcription
  misc_feature: MA Experiment 20000173 PARAMETER Experiment Name: At_42deg_Heat_P Parameter: Age (day) Value: 14
  misc_feature: MA Experiment 20000173 PARAMETER Experiment Name: At_42deg_Heat_P Parameter: Organism Value: A. thaliana
  misc_feature: MA Experiment 20000173 PARAMETER Experiment Name: At_42deg_Heat_P Parameter: Plant Line Value: WS
  misc_feature: MA Experiment 20000173 PARAMETER Experiment Name: At_42deg_Heat_P Parameter: Temperature (deg C) Value: 42 vs. 22
  misc_feature: MA Experiment 20000173 PARAMETER Experiment Name: At_42deg_Heat_P Parameter: Timepoint (hr) Value: 6
  misc_feature: MA Experiment 20000173 PARAMETER Experiment Name: At_42deg_Heat_P Parameter: Tissue Value: Aerial
  misc_feature: MA Experiment ID: 20000234 Result: Up-regulated in Transcription
  misc_feature: MA Experiment 20000234 PARAMETER Experiment Name: At_Siliques_P Parameter: Age (day) Value: 21
  misc_feature: MA Experiment 20000234 PARAMETER Experiment Name: At_Siliques_P Parameter: Organism Value: A. thaliana
  misc_feature: MA Experiment 20000234 PARAMETER Experiment Name: At_Siliques_P Parameter: Plant Line Value: WS
  misc_feature: MA Experiment 20000234 PARAMETER Experiment Name: At_Siliques_P Parameter: Tissue Value: Less Than 5mm Siliques vs. Whole Plant
  misc_feature: MA Experiment ID: 20000265 Result: Up-regulated in Transcription
  misc_feature: MA Experiment 20000265 PARAMETER Experiment Name: At_Open_Flower_P Parameter: Age (day) Value: 21
  misc_feature: MA Experiment 20000265 PARAMETER Experiment Name: At_Open_Flower_P Parameter: Plant Line Value: WS
  misc_feature: MA Experiment 20000265 PARAMETER Experiment Name: At_Open_Flower_P Parameter: Tissue Value: Closed Flower vs. Whole Plant
  misc_feature: MA Experiment ID: 20000286 Result: Up-regulated in Transcription
  misc_feature: MA Experiment 20000286 PARAMETER Experiment Name: At_Open_Flower_P Parameter: Age (day) Value: 21
  misc_feature: MA Experiment 20000286 PARAMETER Experiment Name: At_Open_Flower_P Parameter: Plant Line Value: WS
  misc_feature: MA Experiment 20000286 PARAMETER Experiment Name: At_Open_Flower_P Parameter: Tissue Value: Half Open vs. Whole Plant
  misc_feature: MA Experiment ID: 20000438 Result: Up-regulated in Transcription
  misc_feature: MA Experiment 20000438 PARAMETER Experiment Name: At_Shoots__P Parameter: Age (day) Value: 14
  misc_feature: MA Experiment 20000438 PARAMETER Experiment Name: At_Shoots__P Parameter: Tissue Value: Shoots vs. Whole Plant
  misc_feature: MA Experiment ID: 20000794 Result: Up-regulated in Transcription
  misc_feature: MA Experiment 20000794 PARAMETER Experiment Name: At_Petals_P Parameter: Age (day) Value: 23-25 days
  misc_feature: MA Experiment 20000794 PARAMETER Experiment Name: At_Petals_P Parameter: Plant Line Value: WS
  misc_feature: MA Experiment 20000794 PARAMETER Experiment Name: At_Petals_P Parameter: Tissue Value: Petals vs. Whole plant
  misc_feature: MA Experiment ID: 20001248 Result: Down-regulated in Transcription
  misc_feature: MA Experiment 20001248 PARAMETER Experiment Name: At_Far-red-induction_P Parameter: Age (day) Value: 7
  misc_feature: MA Experiment 20001248 PARAMETER Experiment Name: At_Far-red-induction_P Parameter: Light Value: Far-red vs. White
  misc_feature: MA Experiment 20001248 PARAMETER Experiment Name: At_Far-red-induction_P Parameter: Organism Value: A. thaliana
  misc_feature: MA Experiment 20001248 PARAMETER Experiment Name: At_Far-red-induction_P Parameter: Plant Line Value: Columbia
  misc_feature: MA Experiment 20001248 PARAMETER Experiment Name: At_Far-red-induction_P Parameter: Timepoint (hr) Value: 4
  misc_feature: MA Experiment 20001248 PARAMETER Experiment Name: At_Far-red-induction_P Parameter: Tissue Value: Whole Plant
  misc_feature: MA Experiment ID: 20001450 Result: Down-regulated in Transcription
  misc_feature: MA Experiment 20001450 PARAMETER Experiment Name: At_Far-red-induction_P Parameter: Age (day) Value: 7
  misc_feature: MA Experiment 20001450 PARAMETER Experiment Name: At_Far-red-induction_P Parameter: Light Value: Far-red vs. White
  misc_feature: MA Experiment 20001450 PARAMETER Experiment Name: At_Far-red-induction_P Parameter: Organism Value: A. thaliana
  misc_feature: MA Experiment 20001450 PARAMETER Experiment Name: At_Far-red-induction_P Parameter: Plant Line Value: Columbia
  misc_feature: MA Experiment 20001450 PARAMETER Experiment Name: At_Far-red-induction_P Parameter: Timepoint (hr) Value: 8
  misc_feature: MA Experiment 20001450 PARAMETER Experiment Name: At_Far-red-induction_P Parameter: Tissue Value: Whole Plant
  misc_feature: MA Experiment ID: 20001558 Result: Up-regulated in Transcription
  misc_feature: MA Experiment 20001558 PARAMETER Experiment Name: At_Drought_Soil_Dry_P Parameter: Age (day) Value: 27
  misc_feature: MA Experiment 20001558 PARAMETER Experiment Name: At_Drought_Soil_Dry_P Parameter: Organism Value: A. thaliana
  misc_feature: MA Experiment 20001558 PARAMETER Experiment Name: At_Drought_Soil_Dry_P Parameter: Plant Line Value: WS
  misc_feature: MA Experiment 20001558 PARAMETER Experiment Name: At_Drought_Soil_Dry_P Parameter: Post Timepoint (hr) Value: 6
  misc_feature: MA Experiment 20001558 PARAMETER Experiment Name: At_Drought_Soil_Dry_P Parameter: Post-Treatment Value: Re-Water vs. No Drought
  misc_feature: MA Experiment 20001558 PARAMETER Experiment Name: At_Drought_Soil_Dry_P Parameter: Timepoint (day) Value: 13
  misc_feature: MA Experiment 20001558 PARAMETER Experiment Name: At_Drought_Soil_Dry_P Parameter: Treatment Value: Drought vs. No Drought
  misc_feature: MA Experiment ID: 20001560 Result: Up-regulated in Transcription
  misc_feature: MA Experiment 20001560 PARAMETER Experiment Name: At_Drought_Soil_Dry_P Parameter: Age (day) Value: 28
  misc_feature: MA Experiment 20001560 PARAMETER Experiment Name: At_Drought_Soil_Dry_P Parameter: Organism Value: A. thaliana
  misc_feature: MA Experiment 20001560 PARAMETER Experiment Name: At_Drought_Soil_Dry_P Parameter: Plant Line Value: WS
  misc_feature: MA Experiment 20001560 PARAMETER Experiment Name: At_Drought_Soil_Dry_P Parameter: Post Timepoint (hr) Value: None
  misc_feature: MA Experiment 20001560 PARAMETER Experiment Name: At_Drought_Soil_Dry_P Parameter: Post-Treatment Value: None
  misc_feature: MA Experiment 20001560 PARAMETER Experiment Name: At_Drought_Soil_Dry_P Parameter: Timepoint (day) Value: 14
  misc_feature: MA Experiment 20001560 PARAMETER Experiment Name: At_Drought_Soil_Dry_P Parameter: Treatment Value: Drought vs. No Drought
  misc_feature: Phenotype: WHOLE PLANT Color-Dark Green
  misc_feature: Phenotype: WHOLE PLANT Size-Small
  misc_feature: Phenotype: INFLORESCENCE Flowering Time-Late Flowering
  misc_feature: Phenotype: ROSETTE LEAVES Shape-Serrate
  misc_feature: Phenotype: FERTILITY Fertility-Reduced
  misc_feature: Phenotype: FERTILITY Fertility-Reduced
  misc_feature: Phenotype: FERTILITY Fertility-Reduced
  misc_feature: Phenotype: FERTILITY Fertility-Reduced
atttctaatatctctttccatttcttgaaatggtcctcctctcaccttaactttataagaatctgaccacctctcaggtttccagtttcttcactttctcgttctctggacactgaatgtgatacatatatagaagaagaaagctataagagattgatcgatggaggtgaatgttcttgcatccaagagaagtcttctcctttttcttcttattgtaagtctctctttgagccagaaggtcagacatatctctgcctttaacgacaccaaaccatacagacaagtcagtagcttgagacttgcgaggatccaaaagcacttgaacaagatcaacaagtctcctgtcttcaccattcagagtccagatggtgatgtaatagattgtgtacccaaaagaaagcagccagctttggatcatccactcttaaagcatcacaagattcagaaagcaccgaagaaaatgccgaagatgaagggaaaagatgatgatgttaaagaagcagagaatgtattggaaggtgcatggcaaatgtggcacgtgaacggcacgaggtgccctaaggggaccgttcccatacgacgcaacacaatgaacgatgtgctcagagccaagtctttgtttgactttggcaaaaagcgacggagtatttaccttgatcaacggacagaaaagcctgatgcccttggtaccaatggacatgagcatgcgatcgcttatacagaatcatcgtcggagatatatggagcaaaggcgactataaacgtttgggatccaaagatagaagaagtgaatgagtttagtctctctcagatttggattctttctggatctttcgtaggtcctgatctcaatagtattgaagctggctggcaggtcagtccggagctgtatggtgacaacagaccaagattgttcacttattggacgagtgattcatatcaagcaacaggatgttacaatcttctatgttcgggatttatccaaacaaataacaagattgccattggagcagccatatctcctctttctactttcaaaggaaaccagtttgatatcacaatactcatttggaaggatccgaaaatggggaattggtggatgggtttaggggatagcacactagtcgggtattggccagccgagctattcacgcacttggccgaccacgcgactaccgtggaatggggcggtgaagtcgtcaacacacgtgcttcaggcaggcacacgacgacccaaatgggctctggtcattttccagacgaagggtttgggaaagcaagttattttcggaatttggaagttgtggattcggacaacagtctcgtaccggtgcatgatgtcaagatactagccgagaacaccgaatgttacgacattaagagttcgtatagtaatgaatggggaacttatttttactatggtgggccggggtttaatcctaggtgtaattgaaattaaagtgtacatagttcgggttggaggagtggaggaaaaaaaagagggggtcgaaatatgtaatttttttcaagtatgggtagtgaaagattgaatattggcttattgtttttgatttgtcatattgttggttgaaatctagtaatttattgccctcataggaaaaagaagtgtgtatgcaataatgaaagtatgagacaattttttctttgc

SEQ ID NO: 41204 - protein, 430 aa, Arabidopsis thaliana
  peptide (1)..(430): Ceres Seq. ID no. 12367018
  misc_feature (193)..(388): Pfam Name: Arabidopsis proteins of unknown function Pfam Description: Arabidopsis proteins of unknown function
  misc_feature (8)..(117): Homolog of NCBI NO: 6573746 NR Description: F20B24.18 [Arabidopsis thaliana]
  misc_feature (129)..(429): Homolog of NCBI NO: 6573746 NR Description: F20B24.18 [Arabidopsis thaliana]
  misc_feature (48)..(429): Homolog of NCBI NO: 34393299 NR Description: putative DD1A protein [Oryza sativa (japonica
  misc_feature (12)..(429): Homolog of NCBI NO: 21389708 NR Description: putative carboxyl-terminal proteinase [Gossypium
  misc_feature (50)..(429): Homolog of NCBI NO: 15222707 NR Description: unknown protein; protein id: At1g55360.1
  misc_feature (50)..(429): Homolog of NCBI NO: 15241244 NR Description: putative protein
  misc_feature (43)..(429): Homolog of NCBI NO: 21593294 NR Description: putative carboxyl-terminal peptidase [Arabidopsis
  misc_feature (43)..(429): Homolog of NCBI NO: 18400044 NR Description: expressed protein
  misc_feature (7)..(429): Homolog of NCBI NO: 34393554 NR Description: putative carboxyl-terminal proteinase
  misc_feature (1)..(430): Homolog of NCBI NO: 15238835 NR Description: putative protein
MEVNVLASKRSLLLFLLIVSLSLSQKVRHISAFNDTKPYRQVSSLRLARIQKHLNKINKSPVFTIQSPDGDVIDCVPKRKQPALDHPLLKHHKIQKAPKKMPKMKGKDDDVKEAENVLEGAWQMWHVNGTRCPKGTVPIRRNTMNDVLRAKSLFDFGKKRRSIYLDQRTEKPDALGTNGHEHAIAYTESSSEIYGAKATINVWDPKIEEVNEFSLSQIWILSGSFVGPDLNSIEAGWQVSPELYGDNRPRLFTYWTSDSYQATGCYNLLCSGFIQTNNKIAIGAAISPLSTFKGNQFDITILIWKDPKMGNWWMGLGDSTLVGYWPAELFTHLADHATTVEWGGEVVNTRASGRHTTTQMGSGHFPDEGFGKASYFRNLEVVDSDNSLVPVHDVKILAENTECYDIKSSYSNEWGTYFYYGGPGFNPRCN

SEQ ID NO: 41205 - protein, 330 aa, Arabidopsis thaliana
  peptide (1)..(330): Ceres Seq. ID no. 12367019
  misc_feature (93)..(288): Pfam Name: Arabidopsis proteins of unknown function Pfam Description: Arabidopsis proteins of unknown function
  misc_feature (1)..(17): Homolog of NCBI NO: 6573746 NR Description: F20B24.18 [Arabidopsis thaliana]
  misc_feature (29)..(329): Homolog of NCBI NO: 6573746 NR Description: F20B24.18 [Arabidopsis thaliana]
  misc_feature (1)..(329): Homolog of NCBI NO: 34393299 NR Description: putative DD1A protein [Oryza sativa (japonica
  misc_feature (1)..(329): Homolog of NCBI NO: 21389708 NR Description: putative carboxyl-terminal proteinase [Gossypium
  misc_feature (1)..(329): Homolog of NCBI NO: 15222707 NR Description: unknown protein; protein id: At1g55360.1
  misc_feature (1)..(329): Homolog of NCBI NO: 15241244 NR Description: putative protein
  misc_feature (1)..(329): Homolog of NCBI NO: 21593294 NR Description: putative carboxyl-terminal peptidase [Arabidopsis
  misc_feature (1)..(329): Homolog of NCBI NO: 18400044 NR Description: expressed protein
  misc_feature (1)..(329): Homolog of NCBI NO: 34393554 NR Description: putative carboxyl-terminal proteinase
  misc_feature (1)..(330): Homolog of NCBI NO: 15238835 NR Description: putative protein
MPKMKGKDDDVKEAENVLEGAWQMWHVNGTRCPKGTVPIRRNTMNDVLRAKSLFDFGKKRRSIYLDQRTEKPDALGTNGHEHAIAYTESSSEIYGAKATINVWDPKIEEVNEFSLSQIWILSGSFVGPDLNSIEAGWQVSPELYGDNRPRLFTYWTSDSYQATGCYNLLCSGFIQTNNKIAIGAAISPLSTFKGNQFDITILIWKDPKMGNWWMGLGDSTLVGYWPAELFTHLADHATTVEWGGEVVNTRASGRHTTTQMGSGHFPDEGFGKASYFRNLEVVDSDNSLVPVHDVKILAENTECYDIKSSYSNEWGTYFYYGGPGFNPRCN

SEQ ID NO: 41206 - protein, 327 aa, Arabidopsis thaliana
  peptide (1)..(327): Ceres Seq. ID no. 12367020
  misc_feature (90)..(285): Pfam Name: Arabidopsis proteins of unknown function Pfam Description: Arabidopsis proteins of unknown function
  misc_feature (1)..(14): Homolog of NCBI NO: 6573746 NR Description: F20B24.18 [Arabidopsis thaliana]
  misc_feature (26)..(326): Homolog of NCBI NO: 6573746 NR Description: F20B24.18 [Arabidopsis thaliana]
  misc_feature (1)..(326): Homolog of NCBI NO: 34393299 NR Description: putative DD1A protein [Oryza sativa (japonica
  misc_feature (1)..(326): Homolog of NCBI NO: 21389708 NR Description: putative carboxyl-terminal proteinase [Gossypium
  misc_feature (1)..(326): Homolog of NCBI NO: 15222707 NR Description: unknown protein; protein id: At1g55360.1
  misc_feature (1)..(326): Homolog of NCBI NO: 15241244 NR Description: putative protein
  misc_feature (1)..(326): Homolog of NCBI NO: 21593294 NR Description: putative carboxyl-terminal peptidase [Arabidopsis
  misc_feature (1)..(326): Homolog of NCBI NO: 18400044 NR Description: expressed protein
  misc_feature (1)..(326): Homolog of NCBI NO: 34393554 NR Description: putative carboxyl-terminal proteinase
  misc_feature (1)..(327): Homolog of NCBI NO: 15238835 NR Description: putative protein
MKGKDDDVKEAENVLEGAWQMWHVNGTRCPKGTVPIRRNTMNDVLRAKSLFDFGKKRRSIYLDQRTEKPDALGTNGHEHAIAYTESSSEIYGAKATINVWDPKIEEVNEFSLSQIWILSGSFVGPDLNSIEAGWQVSPELYGDNRPRLFTYWTSDSYQATGCYNLLCSGFIQTNNKIAIGAAISPLSTFKGNQFDITILIWKDPKMGNWWMGLGDSTLVGYWPAELFTHLADHATTVEWGGEVVNTRASGRHTTTQMGSGHFPDEGFGKASYFRNLEVVDSDNSLVPVHDVKILAENTECYDIKSSYSNEWGTYFYYGGPGFNPRCN

SEQ ID NO: 41207 - DNA, 1484 bp, Arabidopsis thaliana
  misc_feature (1)..(1484): Ceres Seq. ID no. 13576563
  misc_feature: MA Experiment ID: 20000179 Result: Up-regulated in Transcription
  misc_feature: MA Experiment 20000179 PARAMETER Experiment Name: At_Germinating_Seeds_P Parameter: Age (hr) Value: 6 vs. 0
  misc_feature: MA Experiment 20000179 PARAMETER Experiment Name: At_Germinating_Seeds_P Parameter: Tissue Value: Germinating Seeds
  misc_feature: MA Experiment ID: 20000184 Result: Down-regulated in Transcription
  misc_feature: MA Experiment 20000184 PARAMETER Experiment Name: At_Shoots__P Parameter: Age (day) Value: 7
  misc_feature: MA Experiment 20000184 PARAMETER Experiment Name: At_Shoots__P Parameter: Tissue Value: Shoots vs. Whole Plant
  misc_feature: MA Experiment ID: 20000185 Result: Down-regulated in Transcription
  misc_feature: MA Experiment 20000185 PARAMETER Experiment Name: At_Roots__P Parameter: Age (day) Value: 7 vs. 21
  misc_feature: MA Experiment 20000185 PARAMETER Experiment Name: At_Roots__P Parameter: Organism Value: A. thaliana
  misc_feature: MA Experiment 20000185 PARAMETER Experiment Name: At_Roots__P Parameter: Tissue Value: Roots vs. Whole Plant
  misc_feature: MA Experiment ID: 20000234 Result: Down-regulated in Transcription
  misc_feature: MA Experiment 20000234 PARAMETER Experiment Name: At_Siliques_P Parameter: Age (day) Value: 21
  misc_feature: MA Experiment 20000234 PARAMETER Experiment Name: At_Siliques_P Parameter: Organism Value: A. thaliana
  misc_feature: MA Experiment 20000234 PARAMETER Experiment Name: At_Siliques_P Parameter: Plant Line Value: WS
  misc_feature: MA Experiment 20000234 PARAMETER Experiment Name: At_Siliques_P Parameter: Tissue Value: Less Than 5mm Siliques vs. Whole Plant
  misc_feature: MA Experiment ID: 20000264 Result: Down-regulated in Transcription
  misc_feature: MA Experiment 20000264 PARAMETER Experiment Name: At_Open_Flower_P Parameter: Age (day) Value: 21
  misc_feature: MA Experiment 20000264 PARAMETER Experiment Name: At_Open_Flower_P Parameter: Plant Line Value: WS
  misc_feature: MA Experiment 20000264 PARAMETER Experiment Name: At_Open_Flower_P Parameter: Tissue Value: Open Flower vs. Whole Plant
  misc_feature: MA Experiment ID: 20000286 Result: Down-regulated in Transcription
  misc_feature: MA Experiment 20000286 PARAMETER Experiment Name: At_Open_Flower_P Parameter: Age (day) Value: 21
  misc_feature: MA Experiment 20000286 PARAMETER Experiment Name: At_Open_Flower_P Parameter: Plant Line Value: WS
  misc_feature: MA Experiment 20000286 PARAMETER Experiment Name: At_Open_Flower_P Parameter: Tissue Value: Half Open vs. Whole Plant
  misc_feature: MA Experiment ID: 20000437 Result: Up-regulated in Transcription
  misc_feature: MA Experiment 20000437 PARAMETER Experiment Name: At_Drought_P Parameter: Age (day) Value: 8
  misc_feature: MA Experiment 20000437 PARAMETER Experiment Name: At_Drought_P Parameter: Organism Value: A. thaliana
  misc_feature: MA Experiment 20000437 PARAMETER Experiment Name: At_Drought_P Parameter: Plant Line Value: WS
  misc_feature: MA Experiment 20000437 PARAMETER Experiment Name: At_Drought_P Parameter: Timepoint (hr) Value: 24
  misc_feature: MA Experiment 20000437 PARAMETER Experiment Name: At_Drought_P Parameter: Tissue Value: Whole Plant
  misc_feature: MA Experiment 20000437 PARAMETER Experiment Name: At_Drought_P Parameter: Treatment Value: Drought vs. No Drought
  misc_feature: MA Experiment ID: 20000439 Result: Down-regulated in Transcription
  misc_feature: MA Experiment 20000439 PARAMETER Experiment Name: At_Roots__P Parameter: Age (day) Value: 14 vs. 21
  misc_feature: MA Experiment 20000439 PARAMETER Experiment Name: At_Roots__P Parameter: Organism Value: A. thaliana
  misc_feature: MA Experiment 20000439 PARAMETER Experiment Name: At_Roots__P Parameter: Tissue Value: Roots vs. Whole Plant
  misc_feature: MA Experiment ID: 20001450 Result: Up-regulated in Transcription
  misc_feature: MA Experiment 20001450 PARAMETER Experiment Name: At_Far-red-induction_P Parameter: Age (day) Value: 7
  misc_feature: MA Experiment 20001450 PARAMETER Experiment Name: At_Far-red-induction_P Parameter: Light Value: Far-red vs. White
  misc_feature: MA Experiment 20001450 PARAMETER Experiment Name: At_Far-red-induction_P Parameter: Organism Value: A. thaliana
  misc_feature: MA Experiment 20001450 PARAMETER Experiment Name: At_Far-red-induction_P Parameter: Plant Line Value: Columbia
  misc_feature: MA Experiment 20001450 PARAMETER Experiment Name: At_Far-red-induction_P Parameter: Timepoint (hr) Value: 8
  misc_feature: MA Experiment 20001450 PARAMETER Experiment Name: At_Far-red-induction_P Parameter: Tissue Value: Whole Plant
  misc_feature: MA Experiment ID: 20001451 Result: Up-regulated in Transcription
  misc_feature: MA Experiment 20001451 PARAMETER Experiment Name: At_Far-red-induction_P Parameter: Age (day) Value: 7
  misc_feature: MA Experiment 20001451 PARAMETER Experiment Name: At_Far-red-induction_P Parameter: Light Value: Far-red vs. White
  misc_feature: MA Experiment 20001451 PARAMETER Experiment Name: At_Far-red-induction_P Parameter: Organism Value: A. thaliana
  misc_feature: MA Experiment 20001451 PARAMETER Experiment Name: At_Far-red-induction_P Parameter: Plant Line Value: Columbia
  misc_feature: MA Experiment 20001451 PARAMETER Experiment Name: At_Far-red-induction_P Parameter: Timepoint (hr) Value: 24
  misc_feature: MA Experiment 20001451 PARAMETER Experiment Name: At_Far-red-induction_P Parameter: Tissue Value: Whole Plant
  misc_feature: MA Experiment ID: 20001557 Result: Down-regulated in Transcription
  misc_feature: MA Experiment 20001557 PARAMETER Experiment Name: At_Drought_Soil_Dry_P Parameter: Age (day) Value: 27
  misc_feature: MA Experiment 20001557 PARAMETER Experiment Name: At_Drought_Soil_Dry_P Parameter: Organism Value: A. thaliana
  misc_feature: MA Experiment 20001557 PARAMETER Experiment Name: At_Drought_Soil_Dry_P Parameter: Plant Line Value: WS
  misc_feature: MA Experiment 20001557 PARAMETER Experiment Name: At_Drought_Soil_Dry_P Parameter: Post Timepoint (hr) Value: 3
  misc_feature: MA Experiment 20001557 PARAMETER Experiment Name: At_Drought_Soil_Dry_P Parameter: Post-Treatment Value: Re-Water vs. No Drought
  misc_feature: MA Experiment 20001557 PARAMETER Experiment Name: At_Drought_Soil_Dry_P Parameter: Timepoint (day) Value: 13
  misc_feature: MA Experiment 20001557 PARAMETER Experiment Name: At_Drought_Soil_Dry_P Parameter: Treatment Value: Drought vs. No Drought
ctctttcttcgcattcttctcctcctatcggactttgccacaccagatcggaaaatcccaatcctcttttcctttgttttttttgctatcttcaatcaaaaactctccgacagattcaatgaagcagcaaaagagataaaaccctaacaaaagtaaacaatcggagttttaatcttcttcttcttcggagccggagttttgtctgatctgtcggagaggacgtgtcggcatctattaaaatcctagctggacttccacatcactttactcaattagaagctgttttgagtaacacaagtaagtagtaagcttataaaacaatgggaacgagcgaagacaagatgccatttaagactaccaaaccaacatcttcggctcaggaagttcctcccacaccgtatccagattggcaaaattcaatgcaggcttattatggcggaggaggtactccaaatccttttttcccatccccagttggatctcctagtcctcacccctatatgtggggtgctcaacaccatatgatgccgccttatggcaccccagttccgtacccagcaatgtatcccccgggggcagtctatgctcatcctagcatgcccatgcctcctaattctggtcctaccaacaaggagcctgcgaaggaccaagcttctggcaagaagtcaaaggggaactcgaaaaaaaaggctgaaggaggtgataaagcgctctctggttcagggaacgatggtgcctctcatagtgatgaaagtgtcacagcgggttcatctgatgaaaatgatgagaatgccaatcaacaggaacagggttcaattcgaaagccaagctttggacagatgcttgctgacgcaagttctcaaagtacgactggtgaaatccaaggttcggtgcccatgaagccggtagccccggggactaatctgaatatcgggatggacttatggtcttcccaagctggtgtaccagtgaaggatgaacgagagctcaagcggcagaagaggaaacaatctaaccgtgaatccgctaggcggtctagattgcggaagcaggccgaatgcgaacaacttcaacaaagagtagagagtttgtcgaacgagaatcaaagcctgagagatgagctacagagactctcaagcgaatgtgataagctcaagtctgagaacaactcaatccaggatgagttgcagagagtacttggagcagaggctgtagctaatctagaacagaatgctgctgggtcgaaagatggtgaaggaacaaattaacacttaggaaaattggaactttacaacggattattgggatttttcaacaccggataaaaaaaactgagtccaaagtcatttgagattacgtaactatacaatcgtttgacatttttgtgtaatagagatttgacctacaagactgtagaagctgcaaaagctacgattacactttgttttattagtcttcgtgattggaatcggattctgaatccg

SEQ ID NO: 41208 - protein, 315 aa, Arabidopsis thaliana
  peptide (1)..(315): Ceres Seq. ID no. 13576564
  misc_feature (220)..(284): Pfam Name: bZIP transcription factor Pfam Description: bZIP transcription factor
  misc_feature (3)..(190): Homolog of NCBI NO: 30686443 NR Description: G-box binding bZIP transcription factor -related
  misc_feature (1)..(290): Homolog of NCBI NO: 7488675 NR Description: G-box binding factor - soybean
  misc_feature (1)..(288): Homolog of NCBI NO: 9650824 NR Description: common plant regulatory factor 5 [Petroselinum
  misc_feature (1)..(306): Homolog of NCBI NO: 7488787 NR Description: transcription repressor ROM1 - kidney bean
  misc_feature (47)..(312): Homolog of NCBI NO: 1076447 NR Description: G-box binding factor 1B - rape (fragment)
  misc_feature (1)..(315): Homolog of NCBI NO: 7488453 NR Description: G-box binding factor 1A - rape
  misc_feature (1)..(315): Homolog of NCBI NO: 30690752 NR Description: G-box-binding factor 1 [Arabidopsis thaliana]
  misc_feature (1)..(315): Homolog of NCBI NO: 15450988 NR Description: Unknown protein [Arabidopsis thaliana]
  misc_feature (1)..(315): Homolog of NCBI NO: 81615 NR Description: G-box-binding factor 1 - Arabidopsis thaliana
  misc_feature (1)..(315): Homolog of NCBI NO: 15234506 NR Description: G-box-binding factor 1 [Arabidopsis thaliana]
MGTSEDKMPFKTTKPTSSAQEVPPTPYPDWQNSMQAYYGGGGTPNPFFPSPVGSPSPHPYMWGAQHHMMPPYGTPVPYPAMYPPGAVYAHPSMPMPPNSGPTNKEPAKDQASGKKSKGNSKKKAEGGDKALSGSGNDGASHSDESVTAGSSDENDENANQQEQGSIRKPSFGQMLADASSQSTTGEIQGSVPMKPVAPGTNLNIGMDLWSSQAGVPVKDERELKRQKRKQSNRESARRSRLRKQAECEQLQQRVESLSNENQSLRDELQRLSSECDKLKSENNSIQDELQRVLGAEAVANLEQNAAGSKDGEGTN

SEQ ID NO: 41209 - protein, 308 aa, Arabidopsis thaliana
  peptide (1)..(308): Ceres Seq. ID no. 13576565
  misc_feature (213)..(277): Pfam Name: bZIP transcription factor Pfam Description: bZIP transcription factor
  misc_feature (1)..(183): Homolog of NCBI NO: 30686443 NR Description: G-box binding bZIP transcription factor -related
  misc_feature (1)..(283): Homolog of NCBI NO: 7488675 NR Description: G-box binding factor - soybean
  misc_feature (1)..(281): Homolog of NCBI NO: 9650824 NR Description: common plant regulatory factor 5 [Petroselinum
  misc_feature (1)..(299): Homolog of NCBI NO: 7488787 NR Description: transcription repressor ROM1 - kidney bean
  misc_feature (40)..(305): Homolog of NCBI NO: 1076447 NR Description: G-box binding factor 1B - rape (fragment)
  misc_feature (1)..(308): Homolog of NCBI NO: 7488453 NR Description: G-box binding factor 1A - rape
  misc_feature (1)..(308): Homolog of NCBI NO: 30690752 NR Description: G-box-binding factor 1 [Arabidopsis thaliana]
  misc_feature (1)..(308): Homolog of NCBI NO: 15450988 NR Description: Unknown protein [Arabidopsis thaliana]
  misc_feature (1)..(308): Homolog of NCBI NO: 81615 NR Description: G-box-binding factor 1 - Arabidopsis thaliana
  misc_feature (1)..(308): Homolog of NCBI NO: 15234506 NR Description: G-box-binding factor 1 [Arabidopsis thaliana]
MPFKTTKPTSSAQEVPPTPYPDWQNSMQAYYGGGGTPNPFFPSPVGSPSPHPYMWGAQHHMMPPYGTPVPYPAMYPPGAVYAHPSMPMPPNSGPTNKEPAKDQASGKKSKGNSKKKAEGGDKALSGSGNDGASHSDESVTAGSSDENDENANQQEQGSIRKPSFGQMLADASSQSTTGEIQGSVPMKPVAPGTNLNIGMDLWSSQAGVPVKDERELKRQKRKQSNRESARRSRLRKQAECEQLQQRVESLSNENQSLRDELQRLSSECDKLKSENNSIQDELQRVLGAEAVANLEQNAAGSKDGEGTN

SEQ ID NO: 41210 - protein, 282 aa, Arabidopsis thaliana
  peptide (1)..(282): Ceres Seq. ID no. 13576566
  misc_feature (187)..(251): Pfam Name: bZIP transcription factor Pfam Description: bZIP transcription factor
  misc_feature (1)..(157): Homolog of NCBI NO: 30686443 NR Description: G-box binding bZIP transcription factor -related
  misc_feature (1)..(257): Homolog of NCBI NO: 7488675 NR Description: G-box binding factor - soybean
  misc_feature (1)..(255): Homolog of NCBI NO: 9650824 NR Description: common plant regulatory factor 5 [Petroselinum
  misc_feature (1)..(273): Homolog of NCBI NO: 7488787 NR Description: transcription repressor ROM1 - kidney bean
  misc_feature (14)..(279): Homolog of NCBI NO: 1076447 NR Description: G-box binding factor 1B - rape (fragment)
  misc_feature (1)..(282): Homolog of NCBI NO: 7488453 NR Description: G-box binding factor 1A - rape
  misc_feature (1)..(282): Homolog of NCBI NO: 30690752 NR Description: G-box-binding factor 1 [Arabidopsis thaliana]
  misc_feature (1)..(282): Homolog of NCBI NO: 15450988 NR Description: Unknown protein [Arabidopsis thaliana]
  misc_feature (1)..(282): Homolog of NCBI NO: 81615 NR Description: G-box-binding factor 1 - Arabidopsis thaliana
  misc_feature (1)..(282): Homolog of NCBI NO: 15234506 NR Description: G-box-binding factor 1 [Arabidopsis thaliana]
MQAYYGGGGTPNPFFPSPVGSPSPHPYMWGAQHHMMPPYGTPVPYPAMYPPGAVYAHPSMPMPPNSGPTNKEPAKDQASGKKSKGNSKKKAEGGDKALSGSGNDGASHSDESVTAGSSDENDENANQQEQGSIRKPSFGQMLADASSQSTTGEIQGSVPMKPVAPGTNLNIGMDLWSSQAGVPVKDERELKRQKRKQSNRESARRSRLRKQAECEQLQQRVESLSNENQSLRDELQRLSSECDKLKSENNSIQDELQRVLGAEAVANLEQNAAGSKDGEGTN

SEQ ID NO: 41211 - DNA, 1134 bp, Arabidopsis thaliana
  misc_feature (1)..(1134): Ceres Seq. ID no. 13488413
  misc_feature: MA Experiment ID: 108488 Result: Down-regulated in Transcription
  misc_feature: MA Experiment ID: 20000087 Result: Up-regulated in Transcription
  misc_feature: MA Experiment 20000087 PARAMETER Experiment Name: At_100uM_ABA_Mutants_cDNA_P Parameter: Plant Line Value: WS
  misc_feature: MA Experiment 20000087 PARAMETER Experiment Name: At_100uM_ABA_Mutants_cDNA_P Parameter: Timepoint (hr) Value: 6
  misc_feature: MA Experiment 20000087 PARAMETER Experiment Name: At_100uM_ABA_Mutants_cDNA_P Parameter: Tissue Value: Aerial
  misc_feature: MA Experiment 20000087 PARAMETER Experiment Name: At_100uM_ABA_Mutants_cDNA_P Parameter: Treatment Value: 100uM ABA vs. No Treatment
  misc_feature: MA Experiment ID: 20000224 Result: Down-regulated in Transcription
  misc_feature: MA Experiment ID: 20000307 Result: Up-regulated in Transcription
  misc_feature: MA Experiment 20000307 PARAMETER Experiment Name: At_Germinating_Seeds_Sub_P Parameter: Age (hr) Value: 24 vs. 0
  misc_feature: MA Experiment 20000307 PARAMETER Experiment Name: At_Germinating_Seeds_Sub_P Parameter: Organism Value: A. thaliana
  misc_feature: MA Experiment 20000307 PARAMETER Experiment Name: At_Germinating_Seeds_Sub_P Parameter: Plant Line Value: WS
  misc_feature: MA Experiment 20000307 PARAMETER Experiment Name: At_Germinating_Seeds_Sub_P Parameter: Tissue Value: Germinating Seeds
  misc_feature: MA Experiment ID: 20000355 Result: Up-regulated in Transcription
  misc_feature: MA Experiment 20000355 PARAMETER Experiment Name: At_Siliques_Sub_P Parameter: Age (day) Value: 21
  misc_feature: MA Experiment 20000355 PARAMETER Experiment Name: At_Siliques_Sub_P Parameter: Organism Value: A. thaliana
  misc_feature: MA Experiment 20000355 PARAMETER Experiment Name: At_Siliques_Sub_P Parameter: Plant Line Value: WS
  misc_feature: MA Experiment 20000355 PARAMETER Experiment Name: At_Siliques_Sub_P Parameter: Tissue Value: Less Than 5mm Siliques vs. Whole Plant
ctatctttcgagcattgaaatgataaaaaaaaaattagtggtgttttcaacatagatcatgacaggcaaaccctagattttacttcacctacttgaggttaaaaaacttaattgcaagtaggccagacatcggatcttctctcttaagggctaagcaaaacccatctctcctctttcttatatcttctttctcttccttctctcttctcttgtataaactccactgagctctgtttttgtttttaccgtagatcgtttcgagtctctttaatctttggcgggttccgtaaaaaaaaaaatggcctcttctagattccaatctgggttttgtcctatctcttcgtgtccctctcttgagaatttcatcgaaaggattaaagacgcatgtcgtttcaccctctccgctgttctagggacaattctctcggcggtcttgactttcttcttcgctttagtgggcacattgcttggagcacttactggagctttgataggccaagaaaccgaaagtgggtttatccgaggagcggcggttggagccatttcgggagctgttttctctatcgaagtctttgagtcatctcttgttctttggaaatctaatgagtcacgttttggatgtctcctctacttgattgatgtcattgttagtctgataagtggtagacttgtgcgggaacgaataggtccagcaatgctaagtgcggttcaaagtcagatgggagctgtggattcaactttcgaagagctctcgagtattttcgataccggtggctcaaaggggttaacaggagatttggttgataaaatacctaaaatcaaaatcactggcaaaaacaacttagatgcttctggcaacaaagactcatgttctgtttgtcttcaggattttcaacttggtgaaacggtgagaagcttgccacattgtcatcacatgtttcacttgccttgcatagacaattggctcttcaggcacggatcttgtccaatgtgtagacgcgatctgtaatctcttttcttaccatttgcacagcctcttccctctctctccttcttcttgtatggtcgtaaattcgtaatcatgtggttagagtctctatatatgtacaaagaaatgaaaaaaaaaaagttttg

SEQ ID NO: 41212 - protein, 236 aa, Arabidopsis thaliana
  peptide (1)..(236): Ceres Seq. ID no. 13488414
  misc_feature (191)..(232): Pfam Name: Zinc finger, C3HC4 type (RING finger) Pfam Description: Zinc finger, C3HC4 type (RING finger)
  misc_feature (14)..(236): Homolog of NCBI NO: 37536572 NR Description: hypothetical protein [Oryza sativa (japonica
  misc_feature (23)..(236): Homolog of NCBI NO: 15239242 NR Description: zinc finger (C3HC4-type RING finger) protein
  misc_feature (195)..(236): Homolog of NCBI NO: 15233363 NR Description: expressed protein [Arabidopsis thaliana]
  misc_feature (1)..(206): Homolog of NCBI NO: 15233363 NR Description: expressed protein [Arabidopsis thaliana]
  misc_feature (2)..(236): Homolog of NCBI NO: 7485279 NR Description: hypothetical protein A_TM017A05.9 - Arabidopsis
  misc_feature (2)..(236): Homolog of NCBI NO: 25411815 NR Description: hypothetical protein At2g17730 [imported] -
  misc_feature (2)..(236): Homolog of NCBI NO: 26452210 NR Description: unknown protein [Arabidopsis thaliana]
  misc_feature (2)..(236): Homolog of NCBI NO: 30680091 NR Description: expressed protein [Arabidopsis thaliana]
  misc_feature (1)..(236): Homolog of NCBI NO: 27524902 NR Description: NEP1-interacting protein [Arabidopsis thaliana]
  misc_feature (1)..(236): Homolog of NCBI NO: 26451101 NR Description: unknown protein [Arabidopsis thaliana]
MASSRFQSGFCPISSCPSLENFIERIKDACRFTLSAVLGTILSAVLTFFFALVGTLLGALTGALIGQETESGFIRGAAVGAISGAVFSIEVFESSLVLWKSNESRFGCLLYLIDVIVSLISGRLVRERIGPAMLSAVQSQMGAVDSTFEELSSIFDTGGSKGLTGDLVDKIPKIKITGKNNLDASGNKDSCSVCLQDFQLGETVRSLPHCHHMFHLPCIDNWLFRHGSCPMCRRDL

SEQ ID NO: 41213 - DNA, 1349 bp, Arabidopsis thaliana
  misc_feature (1)..(1349): Ceres Seq. ID no. 12329597
  misc_feature: MA Experiment ID: 108434 Result: Up-regulated in Transcription
  misc_feature: MA Experiment 108434 PARAMETER Experiment Name: At_Root_Tips_cDNA_P Parameter: Tissue Value: Root Tips
  misc_feature: MA Experiment ID: 108435 Result: Down-regulated in Transcription
  misc_feature: MA Experiment 108435 PARAMETER Experiment Name: At_stm_Mutants_cDNA_P Parameter: Plant Line Value: wt Landsburg vs stm
  misc_feature: MA Experiment 108435 PARAMETER Experiment Name: At_stm_Mutants_cDNA_P Parameter: Tissue Value: Shoot Apical Meristem Region
  misc_feature: MA Experiment ID: 108462 Result: Down-regulated in Transcription
  misc_feature: MA Experiment 108462 PARAMETER Experiment Name: At_Germinating_Seeds_cDNA_P Parameter: Age (day) Value: 2 vs. 0
  misc_feature: MA Experiment 108462 PARAMETER Experiment Name: At_Germinating_Seeds_cDNA_P Parameter: Tissue Value: Germinating Seeds
  misc_feature: MA Experiment ID: 108464 Result: Down-regulated in Transcription
  misc_feature: MA Experiment 108464 PARAMETER Experiment Name: At_Germinating_Seeds_cDNA_P Parameter: Age (day) Value: 4 vs. 0
  misc_feature: MA Experiment 108464 PARAMETER Experiment Name: At_Germinating_Seeds_cDNA_P Parameter: Tissue Value: Germinating Seeds
  misc_feature: MA Experiment ID: 108574 Result: Down-regulated in Transcription
  misc_feature: MA Experiment 108574 PARAMETER Experiment Name: At_Wounding__cDNA_P Parameter: Timepoint (hr) Value: 1
  misc_feature: MA Experiment 108574 PARAMETER Experiment Name: At_Wounding__cDNA_P Parameter: Tissue Value: Aerial
  misc_feature: MA Experiment 108574 PARAMETER Experiment Name: At_Wounding__cDNA_P Parameter: Treatment Value: Wounding vs. No Wounding
  misc_feature: MA Experiment ID: 108577 Result: Down-regulated in Transcription
  misc_feature: MA Experiment 108577 PARAMETER Experiment Name: At_42deg_Heat_cDNA_P Parameter: Temperature (deg C) Value: 42 vs. 22
  misc_feature: MA Experiment 108577 PARAMETER Experiment Name: At_42deg_Heat_cDNA_P Parameter: Timepoint (hr) Value: 6
  misc_feature: MA Experiment 108577 PARAMETER Experiment Name: At_42deg_Heat_cDNA_P Parameter: Tissue Value: Aerial
  misc_feature: MA Experiment ID: 108585 Result: Up-regulated in Transcription
  misc_feature: MA Experiment 108585 PARAMETER Experiment Name: At_5mM_NaNP_cDNA_P Parameter: Timepoint (hr) Value: 6
  misc_feature: MA Experiment 108585 PARAMETER Experiment Name: At_5mM_NaNP_cDNA_P Parameter: Tissue Value: Aerial
  misc_feature: MA Experiment 108585 PARAMETER Experiment Name: At_5mM_NaNP_cDNA_P Parameter: Treatment Value: null
  misc_feature: MA Experiment ID: 108607 Result: Down-regulated in Transcription
  misc_feature: MA Experiment 108607 PARAMETER Experiment Name: At_100uM_ABA_cDNA_P Parameter: Timepoint (hr) Value: 4
  misc_feature: MA Experiment 108607 PARAMETER Experiment Name: At_100uM_ABA_cDNA_P Parameter: Tissue Value: Aerial
  misc_feature: MA Experiment 108607 PARAMETER Experiment Name: At_100uM_ABA_cDNA_P Parameter: Treatment Value: 100uM ABA vs. No Treatment
  misc_feature: MA Experiment ID: 20000069 Result: Up-regulated in Transcription
  misc_feature: MA Experiment 20000069 PARAMETER Experiment Name: At_100uM_ABA_Mutants_cDNA_P Parameter: Plant Line Value: CS23
  misc_feature: MA Experiment 20000069 PARAMETER Experiment Name: At_100uM_ABA_Mutants_cDNA_P Parameter: Timepoint (hr) Value: 6
  misc_feature: MA Experiment 20000069 PARAMETER Experiment Name: At_100uM_ABA_Mutants_cDNA_P Parameter: Tissue Value: Aerial
  misc_feature: MA Experiment 20000069 PARAMETER Experiment Name: At_100uM_ABA_Mutants_cDNA_P Parameter: Treatment Value: 100uM ABA vs. No Treatment
  misc_feature: MA Experiment ID: 20000070 Result: Up-regulated in Transcription
  misc_feature: MA Experiment 20000070 PARAMETER Experiment Name: At_100uM_ABA_Mutants_cDNA_P Parameter: Plant Line Value: CS24
  misc_feature: MA Experiment 20000070 PARAMETER Experiment Name: At_100uM_ABA_Mutants_cDNA_P Parameter: Timepoint (hr) Value: 6
  misc_feature: MA Experiment 20000070 PARAMETER Experiment Name: At_100uM_ABA_Mutants_cDNA_P Parameter: Tissue Value: Aerial
  misc_feature: MA Experiment 20000070 PARAMETER Experiment Name: At_100uM_ABA_Mutants_cDNA_P Parameter: Treatment Value: 100uM ABA vs. No Treatment
  misc_feature: MA Experiment ID: 20000071 Result: Up-regulated in Transcription
  misc_feature: MA Experiment 20000071 PARAMETER Experiment Name: At_100uM_ABA_Mutants_cDNA_P Parameter: Plant Line Value: CS8104
  misc_feature: MA Experiment 20000071 PARAMETER Experiment Name: At_100uM_ABA_Mutants_cDNA_P Parameter: Timepoint (hr) Value: 6
  misc_feature: MA Experiment 20000071 PARAMETER Experiment Name: At_100uM_ABA_Mutants_cDNA_P Parameter: Tissue Value: Aerial
  misc_feature: MA Experiment 20000071 PARAMETER Experiment Name: At_100uM_ABA_Mutants_cDNA_P Parameter: Treatment Value: 100uM ABA vs. No Treatment
  misc_feature: MA Experiment ID: 20000072 Result: Up-regulated in Transcription
  misc_feature: MA Experiment 20000072 PARAMETER Experiment Name: At_100uM_ABA_Mutants_cDNA_P Parameter: Plant Line Value: CS8105
  misc_feature: MA Experiment 20000072 PARAMETER Experiment Name: At_100uM_ABA_Mutants_cDNA_P Parameter: Timepoint (hr) Value: 6
  misc_feature: MA Experiment 20000072 PARAMETER Experiment Name: At_100uM_ABA_Mutants_cDNA_P Parameter: Tissue Value: Aerial
  misc_feature: MA Experiment 20000072 PARAMETER Experiment Name: At_100uM_ABA_Mutants_cDNA_P Parameter: Treatment Value: 100uM ABA vs. No Treatment
  misc_feature: MA Experiment ID: 20000087 Result: Up-regulated in Transcription
  misc_feature: MA Experiment 20000087 PARAMETER Experiment Name: At_100uM_ABA_Mutants_cDNA_P Parameter: Plant Line Value: WS
  misc_feature: MA Experiment 20000087 PARAMETER Experiment Name: At_100uM_ABA_Mutants_cDNA_P Parameter: Timepoint (hr) Value: 6
  misc_feature: MA Experiment 20000087 PARAMETER Experiment Name: At_100uM_ABA_Mutants_cDNA_P Parameter: Tissue Value: Aerial
  misc_feature: MA Experiment 20000087 PARAMETER Experiment Name: At_100uM_ABA_Mutants_cDNA_P Parameter: Treatment Value: 100uM ABA vs. No Treatment
  misc_feature: MA Experiment ID: 20000088 Result: Up-regulated in Transcription
  misc_feature: MA Experiment 20000088 PARAMETER Experiment Name: At_100uM_ABA_Mutants_cDNA_P Parameter: Plant Line Value: Landsberg
  misc_feature: MA Experiment 20000088 PARAMETER Experiment Name: At_100uM_ABA_Mutants_cDNA_P Parameter: Timepoint (hr) Value: 6
  misc_feature: MA Experiment 20000088 PARAMETER Experiment Name: At_100uM_ABA_Mutants_cDNA_P Parameter: Tissue Value: Aerial
  misc_feature: MA Experiment 20000088 PARAMETER Experiment Name: At_100uM_ABA_Mutants_cDNA_P Parameter: Treatment Value: 100uM ABA vs. No Treatment
  misc_feature: MA Experiment ID: 20000089 Result: Up-regulated in Transcription
  misc_feature: MA Experiment ID: 20000090 Result: Up-regulated in Transcription
  misc_feature: MA Experiment ID: 20000111 Result: Down-regulated in Transcription
  misc_feature: MA Experiment 20000111 PARAMETER Experiment Name: At_42deg_Heat_cDNA_P Parameter: Temperature (deg C) Value: 42 vs. 22
  misc_feature: MA Experiment 20000111 PARAMETER Experiment Name: At_42deg_Heat_cDNA_P Parameter: Timepoint (hr) Value: 6
  misc_feature: MA Experiment 20000111 PARAMETER Experiment Name: At_42deg_Heat_cDNA_P Parameter: Tissue Value: Aerial
  misc_feature: MA Experiment ID: 20000113 Result: Down-regulated in Transcription
  misc_feature: MA Experiment 20000113 PARAMETER Experiment Name: At_42deg_Heat_cDNA_P Parameter: Temperature (deg C) Value: 42 vs. 22
  misc_feature: MA Experiment 20000113 PARAMETER Experiment Name: At_42deg_Heat_cDNA_P Parameter: Timepoint (hr) Value: 8
  misc_feature: MA Experiment 20000113 PARAMETER Experiment Name: At_42deg_Heat_cDNA_P Parameter: Tissue Value: Aerial
  misc_feature: MA Experiment ID: 20000117 Result: Up-regulated in Transcription
  misc_feature: MA Experiment 20000117 PARAMETER Experiment Name: At_100uM_ABA_Mutants_cDNA_P Parameter: Plant Line Value: Columbia
  misc_feature: MA Experiment 20000117 PARAMETER Experiment Name: At_100uM_ABA_Mutants_cDNA_P Parameter: Timepoint (hr) Value: 6
  misc_feature: MA Experiment 20000117 PARAMETER Experiment Name: At_100uM_ABA_Mutants_cDNA_P Parameter: Tissue Value: Aerial
  misc_feature: MA Experiment 20000117 PARAMETER Experiment Name: At_100uM_ABA_Mutants_cDNA_P Parameter: Treatment Value: 100uM ABA vs. No Treatment
  misc_feature: MA Experiment ID: 20000173 Result: Down-regulated in Transcription
  misc_feature: MA Experiment 20000173 PARAMETER Experiment Name: At_42deg_Heat_P Parameter: Age (day) Value: 14
  misc_feature: MA Experiment 20000173 PARAMETER Experiment Name: At_42deg_Heat_P Parameter: Organism Value: A. thaliana
  misc_feature: MA Experiment 20000173 PARAMETER Experiment Name: At_42deg_Heat_P Parameter: Plant Line Value: WS
  misc_feature: MA Experiment 20000173 PARAMETER Experiment Name: At_42deg_Heat_P Parameter: Temperature (deg C) Value: 42 vs. 22
  misc_feature: MA Experiment 20000173 PARAMETER Experiment Name: At_42deg_Heat_P Parameter: Timepoint (hr) Value: 6
  misc_feature: MA Experiment 20000173 PARAMETER Experiment Name: At_42deg_Heat_P Parameter: Tissue Value: Aerial
  misc_feature: MA Experiment ID: 20000184 Result: Down-regulated in Transcription
  misc_feature: MA Experiment 20000184 PARAMETER Experiment Name: At_Shoots__P Parameter: Age (day) Value: 7
  misc_feature: MA Experiment 20000184 PARAMETER Experiment Name: At_Shoots__P Parameter: Tissue Value: Shoots vs. Whole Plant
  misc_feature: MA Experiment ID: 20000185 Result: Down-regulated in Transcription
  misc_feature: MA Experiment 20000185 PARAMETER Experiment Name: At_Roots__P Parameter: Age (day) Value: 7 vs. 21
  misc_feature: MA Experiment 20000185 PARAMETER Experiment Name: At_Roots__P Parameter: Organism Value: A. thaliana
  misc_feature: MA Experiment 20000185 PARAMETER Experiment Name: At_Roots__P Parameter: Tissue Value: Roots vs. Whole Plant
  misc_feature: MA Experiment ID: 20000234 Result: Down-regulated in Transcription
  misc_feature: MA Experiment 20000234 PARAMETER Experiment Name: At_Siliques_P Parameter: Age (day) Value: 21
  misc_feature: MA Experiment 20000234 PARAMETER Experiment Name: At_Siliques_P Parameter: Organism Value: A. thaliana
  misc_feature: MA Experiment 20000234 PARAMETER Experiment Name: At_Siliques_P Parameter: Plant Line Value: WS
  misc_feature: MA Experiment 20000234 PARAMETER Experiment Name: At_Siliques_P Parameter: Tissue Value: Less Than 5mm Siliques vs. Whole Plant
  misc_feature: MA Experiment ID: 20000235 Result: Down-regulated in Transcription
  misc_feature: MA Experiment 20000235 PARAMETER Experiment Name: At_Siliques_P Parameter: Age (day) Value: 21
  misc_feature: MA Experiment 20000235 PARAMETER Experiment Name: At_Siliques_P Parameter: Organism Value: A. thaliana
  misc_feature: MA Experiment 20000235 PARAMETER Experiment Name: At_Siliques_P Parameter: Plant Line Value: WS
  misc_feature: MA Experiment 20000235 PARAMETER Experiment Name: At_Siliques_P Parameter: Tissue Value: 5-10mm Siliques vs. Whole Plant
  misc_feature: MA Experiment ID: 20000264 Result: Down-regulated in Transcription
  misc_feature: MA Experiment 20000264 PARAMETER Experiment Name: At_Open_Flower_P Parameter: Age (day) Value: 21
  misc_feature: MA Experiment 20000264 PARAMETER Experiment Name: At_Open_Flower_P Parameter: Plant Line Value: WS
  misc_feature: MA Experiment 20000264 PARAMETER Experiment Name: At_Open_Flower_P Parameter: Tissue Value: Open Flower vs. Whole Plant
  misc_feature: MA Experiment ID: 20000265 Result: Down-regulated in Transcription
  misc_feature: MA Experiment 20000265 PARAMETER Experiment Name: At_Open_Flower_P Parameter: Age (day) Value: 21
  misc_feature: MA Experiment 20000265 PARAMETER Experiment Name: At_Open_Flower_P Parameter: Plant Line Value: WS
  misc_feature: MA Experiment 20000265 PARAMETER Experiment Name: At_Open_Flower_P Parameter: Tissue Value: Closed Flower vs. Whole Plant
  misc_feature: MA Experiment ID: 20000286 Result: Down-regulated in Transcription
  misc_feature: MA Experiment 20000286 PARAMETER Experiment Name: At_Open_Flower_P Parameter: Age (day) Value: 21
  misc_feature: MA Experiment 20000286 PARAMETER Experiment Name: At_Open_Flower_P Parameter: Plant Line Value: WS
  misc_feature: MA Experiment 20000286 PARAMETER Experiment Name: At_Open_Flower_P Parameter: Tissue Value: Half Open vs. Whole Plant
  misc_feature: MA Experiment ID: 20000438 Result: Down-regulated in Transcription
  misc_feature: MA Experiment 20000438 PARAMETER Experiment Name: At_Shoots__P Parameter: Age (day) Value: 14
  misc_feature: MA Experiment 20000438 PARAMETER Experiment Name: At_Shoots__P Parameter: Tissue Value: Shoots vs. Whole Plant
  misc_feature: MA Experiment ID: 20000439 Result: Down-regulated in Transcription
  misc_feature: MA Experiment 20000439 PARAMETER Experiment Name: At_Roots__P Parameter: Age (day) Value: 14 vs. 21
  misc_feature: MA Experiment 20000439 PARAMETER Experiment Name: At_Roots__P Parameter: Organism Value: A. thaliana
  misc_feature: MA Experiment 20000439 PARAMETER Experiment Name: At_Roots__P Parameter: Tissue Value: Roots vs. Whole Plant
  misc_feature: MA Experiment ID: 20000573 Result: Up-regulated in Transcription
  misc_feature: MA Experiment 20000573 PARAMETER Experiment Name: At_100uM_ABA_Mutants__P Parameter: Organism Value: A. thaliana
  misc_feature: MA Experiment 20000573 PARAMETER Experiment Name: At_100uM_ABA_Mutants__P Parameter: Plant Line Value: CS22 vs. Ler wt
  misc_feature: MA Experiment 20000573 PARAMETER Experiment Name: At_100uM_ABA_Mutants__P Parameter: Timepoint (hr) Value: N/A
  misc_feature: MA Experiment 20000573 PARAMETER Experiment Name: At_100uM_ABA_Mutants__P Parameter: Tissue Value: Whole Plant
  misc_feature: MA Experiment 20000573 PARAMETER Experiment Name: At_100uM_ABA_Mutants__P Parameter: Treatment Value: None
  misc_feature: MA Experiment ID: 20000794 Result: Down-regulated in Transcription
  misc_feature: MA Experiment 20000794 PARAMETER Experiment Name: At_Petals_P Parameter: Age (day) Value: 23-25 days
  misc_feature: MA Experiment 20000794 PARAMETER Experiment Name: At_Petals_P Parameter: Plant Line Value: WS
  misc_feature: MA Experiment 20000794 PARAMETER Experiment Name: At_Petals_P Parameter: Tissue Value: Petals vs. Whole plant
  misc_feature: MA Experiment ID: 20001248 Result: Up-regulated in Transcription
  misc_feature: MA Experiment 20001248 PARAMETER Experiment Name: At_Far-red-induction_P Parameter: Age (day) Value: 7
  misc_feature: MA Experiment 20001248 PARAMETER Experiment Name: At_Far-red-induction_P Parameter: Light Value: Far-red vs. White
  misc_feature: MA Experiment 20001248 PARAMETER Experiment Name: At_Far-red-induction_P Parameter: Organism Value: A. thaliana
  misc_feature: MA Experiment 20001248 PARAMETER Experiment Name: At_Far-red-induction_P Parameter: Plant Line Value: Columbia
  misc_feature: MA Experiment 20001248 PARAMETER Experiment Name: At_Far-red-induction_P Parameter: Timepoint (hr) Value: 4
  misc_feature: MA Experiment 20001248 PARAMETER Experiment Name: At_Far-red-induction_P Parameter: Tissue Value: Whole Plant
  misc_feature: MA Experiment ID: 20001757 Result: Up-regulated in Transcription
  misc_feature: MA Experiment 20001757 PARAMETER Experiment Name: At_50mM_NH4NO3_L-to-H_P Parameter: Timepoint (hr) Value: 6
  misc_feature: MA Experiment 20001757 PARAMETER Experiment Name: At_50mM_NH4NO3_L-to-H_P Parameter: Tissue Value: Leaf
  misc_feature: MA Experiment 20001757 PARAMETER Experiment Name: At_50mM_NH4NO3_L-to-H_P Parameter: Treatment Value: 50mM NH4NO3 vs 100mM Mannitol
  misc_feature: MA Experiment ID: 20001905 Result: Down-regulated in Transcription
  misc_feature: MA Experiment 20001905 PARAMETER Experiment Name: At_Drought_Reproduction_P Parameter: Age (day) Value: 40
  misc_feature: MA Experiment 20001905 PARAMETER Experiment Name: At_Drought_Reproduction_P Parameter: Organism Value: A. thaliana
  misc_feature: MA Experiment 20001905 PARAMETER Experiment Name: At_Drought_Reproduction_P Parameter: Plant Line Value: WS
  misc_feature: MA Experiment 20001905 PARAMETER Experiment Name: At_Drought_Reproduction_P Parameter: Timepoint (day) Value: 10
  misc_feature: MA Experiment 20001905 PARAMETER Experiment Name: At_Drought_Reproduction_P Parameter: Tissue Value: Rosettes
  misc_feature: MA Experiment 20001905 PARAMETER Experiment Name: At_Drought_Reproduction_P Parameter: Treatment Value: Drought vs. No Drought
aatcaaagtttgggataatagtcttatctctttcatccacactaatataaataggatacatacacaacacattacaagaagataaatccaaacttttctttctctctctttcgtttcccattttttctcttatcactcatagatcctgattgatctgaaaaaatggtgaagaagcaatcgccattacacgttgtcggtgtgtctgttttgatggtgttgttatgcagtgttaattacagtctgtgtgaaaagatcaaaacgtataagctcacaagaggaagcttaagtgttactttcactaactatggtgctgtcatgacgtctcttctcctccctgacagacatggaaaacaagacgatgttgttcttggatttgatactgttgatggttacaagaatgatacaacatattttggagcaattgtgggaagagtggctaatagaataggaggtgctaaattcaagttaaatggtcatctctacaaaaccgatcccaacgaaggccataacactctccatggtggttcaaagggatttagtgatgtgatttggtcagtccaaaagtatgttcccactagtcacattactttcacatacgatagcttcgacggtgaagaaggttttccggggaatgtgacggtgaaagtgacgtacatgttgatcggagaaaacaaactcggtgtaaaaatggaagcaaagccactcaacaaacctacaccaatcaacttagctctccacacttactggaacctccacagccacaactccgggaacatcctctcccacaaaattcaactcctcgccggaaaaatcactcccgtcgacgacaaactcatccccaccggcgaaatcacctccattgccggaactccttacgattttctcgagcctcgcgagatcggaagccggatccacgaattacccggaggttacgacatcaattacgtgatcgatggaccgatcgggaaacatctgaggaaaactgcggttgtgacggaggaagtcaccggaaggaagatggagctgtggacgaatcagcctggtgttcagttttacacgagtaatatgatgaaacgtgtcgtcggtaaaggtaaagccgtttatgagaaatacggtggcttgtgtttggagactcaaggcttcccagattccgtcaatcacaagaactttccgtcgcagattgttaatcccggcgagagttatttgcatgttatgctcttcagattcactgctcactaatcgggtcgggtcgggtcgggtcgggtttttagggtttaatttttccgaatactcgccaacgtcgttgtaatgcaaaattgcaaatgccaataaaaatattcgacttttgc

SEQ ID NO: 41214 - protein, 358 aa, Arabidopsis thaliana
  peptide (1)..(358): Ceres Seq. ID no. 12329598
  misc_feature (32)..(354): Pfam Name: Aldose 1-epimerase Pfam Description: Aldose 1-epimerase
  misc_feature (35)..(357): Homolog of NCBI NO: 37531218 NR Description: putative aldose 1-epimerase - like protein
  misc_feature (34)..(357): Homolog of NCBI NO: 30684727 NR Description: aldose 1-epimerase family [Arabidopsis thaliana]
  misc_feature (65)..(356): Homolog of NCBI NO: 26452398 NR Description: putative aldose 1-epimerase [Arabidopsis thaliana]
  misc_feature (29)..(356): Homolog of NCBI NO: 40882679 NR Description: putative aldose 1-epimerase
  misc_feature (30)..(356): Homolog of NCBI NO: 7430313 NR Description: probable aldose 1-epimerase (EC 5.1.3.3) - common
  misc_feature (16)..(356): Homolog of NCBI NO: 15824565 NR Description: non-cell-autonomous protein pathway1;
  misc_feature (6)..(356): Homolog of NCBI NO: 15824567 NR Description: non-cell-autonomous protein pathway2;
  misc_feature (29)..(356): Homolog of NCBI NO: 15242223 NR Description: putative aldose 1-epimerase - like protein
  misc_feature (1)..(358): Homolog of NCBI NO: 15228261 NR Description: aldose 1-epimerase - like protein
  misc_feature (1)..(358): Homolog of NCBI NO: 21537069 NR Description: aldose 1-epimerase-like protein [Arabidopsis
MVKKQSPLHVVGVSVLMVLLCSVNYSLCEKIKTYKLTRGSLSVTFTNYGAVMTSLLLPDRHGKQDDVVLGFDTVDGYKNDTTYFGAIVGRVANRIGGAKFKLNGHLYKTDPNEGHNTLHGGSKGFSDVIWSVQKYVPTSHITFTYDSFDGEEGFPGNVTVKVTYMLIGENKLGVKMEAKPLNKPTPINLALHTYWNLHSHNSGNILSHKIQLLAGKITPVDDKLIPTGEITSIAGTPYDFLEPREIGSRIHELPGGYDINYVIDGPIGKHLRKTAVVTEEVTGRKMELWTNQPGVQFYTSNMMKRVVGKGKAVYEKYGGLCLETQGFPDSVNHKNFPSQIVNPGESYLHVMLFRFTAH

SEQ ID NO: 41215 - protein, 342 aa, Arabidopsis thaliana
  peptide (1)..(342): Ceres Seq. ID no. 12329599
  misc_feature (16)..(338): Pfam Name: Aldose 1-epimerase Pfam Description: Aldose 1-epimerase
  misc_feature (19)..(341): Homolog of NCBI NO: 37531218 NR Description: putative aldose 1-epimerase - like protein
  misc_feature (18)..(341): Homolog of NCBI NO: 30684727 NR Description: aldose 1-epimerase family [Arabidopsis thaliana]
  misc_feature (49)..(340): Homolog of NCBI NO: 26452398 NR Description: putative aldose 1-epimerase [Arabidopsis thaliana]
  misc_feature (13)..(340): Homolog of NCBI NO: 40882679 NR Description: putative aldose 1-epimerase
  misc_feature (14)..(340): Homolog of NCBI NO: 7430313 NR Description: probable aldose 1-epimerase (EC 5.1.3.3) - common
  misc_feature (1)..(340): Homolog of NCBI NO: 15824565 NR Description: non-cell-autonomous protein pathway1;
  misc_feature (1)..(340): Homolog of NCBI NO: 15824567 NR Description: non-cell-autonomous protein pathway2;
  misc_feature (13)..(340): Homolog of NCBI NO: 15242223 NR Description: putative aldose 1-epimerase - like protein
  misc_feature (1)..(342): Homolog of NCBI NO: 15228261 NR Description: aldose 1-epimerase - like protein
  misc_feature (1)..(342): Homolog of NCBI NO: 21537069 NR Description: aldose 1-epimerase-like protein [Arabidopsis
MVLLCSVNYSLCEKIKTYKLTRGSLSVTFTNYGAVMTSLLLPDRHGKQDDVVLGFDTVDGYKNDTTYFGAIVGRVANRIGGAKFKLNGHLYKTDPNEGHNTLHGGSKGFSDVIWSVQKYVPTSHITFTYDSFDGEEGFPGNVTVKVTYMLIGENKLGVKMEAKPLNKPTPINLALHTYWNLHSHNSGNILSHKIQLLAGKITPVDDKLIPTGEITSIAGTPYDFLEPREIGSRIHELPGGYDINYVIDGPIGKHLRKTAVVTEEVTGRKMELWTNQPGVQFYTSNMMKRVVGKGKAVYEKYGGLCLETQGFPDSVNHKNFPSQIVNPGESYLHVMLFRFTAH

SEQ ID NO: 41216 - protein, 307 aa, Arabidopsis thaliana
  peptide (1)..(307): Ceres Seq. ID no. 12329600
  misc_feature (1)..(303): Pfam Name: Aldose 1-epimerase Pfam Description: Aldose 1-epimerase
  misc_feature (1)..(306): Homolog of NCBI NO: 37531218 NR Description: putative aldose 1-epimerase - like protein
  misc_feature (1)..(306): Homolog of NCBI NO: 30684727 NR Description: aldose 1-epimerase family [Arabidopsis thaliana]
  misc_feature (14)..(305): Homolog of NCBI NO: 26452398 NR Description: putative aldose 1-epimerase [Arabidopsis thaliana]
  misc_feature (1)..(305): Homolog of NCBI NO: 40882679 NR Description: putative aldose 1-epimerase
  misc_feature (1)..(305): Homolog of NCBI NO: 7430313 NR Description: probable aldose 1-epimerase (EC 5.1.3.3) - common
  misc_feature (1)..(305): Homolog of NCBI NO: 15824565 NR Description: non-cell-autonomous protein pathway1;
  misc_feature (1)..(305): Homolog of NCBI NO: 15824567 NR Description: non-cell-autonomous protein pathway2;
  misc_feature (1)..(305): Homolog of NCBI NO: 15242223 NR Description: putative aldose 1-epimerase - like protein
  misc_feature (1)..(307): Homolog of NCBI NO: 15228261 NR Description: aldose 1-epimerase - like protein
  misc_feature (1)..(307): Homolog of NCBI NO: 21537069 NR Description: aldose 1-epimerase-like protein [Arabidopsis
MTSLLLPDRHGKQDDVVLGFDTVDGYKNDTTYFGAIVGRVANRIGGAKFKLNGHLYKTDPNEGHNTLHGGSKGFSDVIWSVQKYVPTSHITFTYDSFDGEEGFPGNVTVKVTYMLIGENKLGVKMEAKPLNKPTPINLALHTYWNLHSHNSGNILSHKIQLLAGKITPVDDKLIPTGEITSIAGTPYDFLEPREIGSRIHELPGGYDINYVIDGPIGKHLRKTAVVTEEVTGRKMELWTNQPGVQFYTSNMMKRVVGKGKAVYEKYGGLCLETQGFPDSVNHKNFPSQIVNPGESYLHVMLFRFTAH

SEQ ID NO: 41217 - DNA, 1211 bp, Arabidopsis thaliana
  misc_feature (1)..(1211): Ceres Seq. ID no. 12395390
  misc_feature: MA Experiment ID: 20001451 Result: Up-regulated in Transcription
  misc_feature: MA Experiment 20001451 PARAMETER Experiment Name: At_Far-red-induction_P Parameter: Age (day) Value: 7
  misc_feature: MA Experiment 20001451 PARAMETER Experiment Name: At_Far-red-induction_P Parameter: Light Value: Far-red vs. White
  misc_feature: MA Experiment 20001451 PARAMETER Experiment Name: At_Far-red-induction_P Parameter: Organism Value: A. thaliana
  misc_feature: MA Experiment 20001451 PARAMETER Experiment Name: At_Far-red-induction_P Parameter: Plant Line Value: Columbia
  misc_feature: MA Experiment 20001451 PARAMETER Experiment Name: At_Far-red-induction_P Parameter: Timepoint (hr) Value: 24
  misc_feature: MA Experiment 20001451 PARAMETER Experiment Name: At_Far-red-induction_P Parameter: Tissue Value: Whole Plant
  misc_feature: MA Experiment ID: 20001910 Result: Up-regulated in Transcription
  misc_feature: MA Experiment 20001910 PARAMETER Experiment Name: At_Drought_Reproduction_P Parameter: Age (day) Value: 37
  misc_feature: MA Experiment 20001910 PARAMETER Experiment Name: At_Drought_Reproduction_P Parameter: Organism Value: A. thaliana
  misc_feature: MA Experiment 20001910 PARAMETER Experiment Name: At_Drought_Reproduction_P Parameter: Plant Line Value: WS
  misc_feature: MA Experiment 20001910 PARAMETER Experiment Name: At_Drought_Reproduction_P Parameter: Timepoint (day) Value: 7
  misc_feature: MA Experiment 20001910 PARAMETER Experiment Name: At_Drought_Reproduction_P Parameter: Tissue Value: Flowers
  misc_feature: MA Experiment 20001910 PARAMETER Experiment Name: At_Drought_Reproduction_P Parameter: Treatment Value: Drought vs. No Drought
  misc_feature: MA Experiment ID: 20001911 Result: Up-regulated in Transcription
  misc_feature: MA Experiment 20001911 PARAMETER Experiment Name: At_Drought_Reproduction_P Parameter: Age (day) Value: 40
  misc_feature: MA Experiment 20001911 PARAMETER Experiment Name: At_Drought_Reproduction_P Parameter: Organism Value: A. thaliana
  misc_feature: MA Experiment 20001911 PARAMETER Experiment Name: At_Drought_Reproduction_P Parameter: Plant Line Value: WS
  misc_feature: MA Experiment 20001911 PARAMETER Experiment Name: At_Drought_Reproduction_P Parameter: Timepoint (day) Value: 10
  misc_feature: MA Experiment 20001911 PARAMETER Experiment Name: At_Drought_Reproduction_P Parameter: Tissue Value: Flowers
  misc_feature: MA Experiment 20001911 PARAMETER Experiment Name: At_Drought_Reproduction_P Parameter: Treatment Value: Drought vs. No Drought
aaatctcatttttgtctccttaaaattttctcagaaacatttccgtcatttgttccttagttttgtaatcaatcttcacgattcctcaggtaccatcctccaaggtcatatgagaacaggatcggtgttctctatcgaacgagcggtgttgtgtcttaagtggggatggcttcaacaccttgtgcagcatgtaagctcttgaggcgtaaatgcactcaagaatgtgtgtttgcgccgtattttccaccaactaatcctcaaaagtttatctttgttcaccgagtttttggagcaagcaatgtaaccaagatcctcaacgatcttccacctgatcaacgcgaagacactgttaattccctcttttatgaagcggaagcgcgtatccgtgacccaatctatggatgtgttggtctcatttcttttttacaacaatacctcaagaaaattcaacaagatcttctcactgctaaagaagagcttgttggttacatgggacccgatgctgtgattccgccgccttatcttcctcctataggtaacaatcctcctcccaatttcatgatgtctatggaaggaatgccaccaggagtgatccctcaaggagaacctttgatgatacgcgaaccaaacatgtctcagcaacatcatcatcaacaaccgcaagatgagcagttgcaattcatagcttctgatgcacagagaatggctgcaatgatgttggagagaggagatcaacaagggatgttcaatggttacggaatagacaacaatggttcggttacagccacgggttttaaccaaatggatgtgaatgatcaaggtgctggtggttcgttgtctggaccatctcttgctttaggaagctttggtgatgcttatcagatgggtcaagagacagagcatggtcatatcaaccatgatcagcttcagacacagcttatgcttcagcctccattacaagaaggtcaagaacaaacagaggaaggacagttcttgatgcaaccaatgggacaagagaatcttcatgacgaagaggaggaggaagagcttgagccaccggttaaatggaggaagcctgagaacaaggaagctagtttttaagacctaaatgcatttaggagaacaaaaaaaattcttattttcttggatagtttacttaactcttgaggatctatttggtttttttttttaataatcaaatggtattattc

SEQ ID NO: 41218 - protein, 311 aa, Arabidopsis thaliana
  peptide (1)..(311): Ceres Seq. ID no. 12395391
  misc_feature (5)..(105): Pfam Name: Protein of unknown function DUF260 Pfam Description: Protein of unknown function DUF260
  misc_feature (3)..(110): Homolog of NCBI NO: 18405472 NR Description: expressed protein
  misc_feature (3)..(110): Homolog of NCBI NO: 29427827 NR Description: LOB domain protein 25
  misc_feature (3)..(110): Homolog of NCBI NO: 9294470 NR Description: gb|AAB60912.1~gene_id:MGF10.6~similar to unknown
  misc_feature (3)..(146): Homolog of NCBI NO: 15242624 NR Description: putative protein
  misc_feature (3)..(110): Homolog of NCBI NO: 21618134 NR Description: unknown [Arabidopsis thaliana]
  misc_feature (2)..(116): Homolog of NCBI NO: 34896184 NR Description: contains ESTs C98868(E3203),C98869(E3203)~similar
  misc_feature (3)..(108): Homolog of NCBI NO: 15218746 NR Description: unknown protein
  misc_feature (4)..(146): Homolog of NCBI NO: 34907508 NR Description: B1099D03.24 [Oryza sativa (japonica
  misc_feature (2)..(290): Homolog of NCBI NO: 15240110 NR Description: putative protein; protein id: At5g66870.1
  misc_feature (1)..(311): Homolog of NCBI NO: 15227870 NR Description: hypothetical protein; protein id: At2g23660.1
MASTPCAACKLLRRKCTQECVFAPYFPPTNPQKFIFVHRVFGASNVTKILNDLPPDQREDTVNSLFYEAEARIRDPIYGCVGLISFLQQYLKKIQQDLLTAKEELVGYMGPDAVIPPPYLPPIGNNPPPNFMMSMEGMPPGVIPQGEPLMIREPNMSQQHHHQQPQDEQLQFIASDAQRMAAMMLERGDQQGMFNGYGIDNNGSVTATGFNQMDVNDQGAGGSLSGPSLALGSFGDAYQMGQETEHGHINHDQLQTQLMLQPPLQEGQEQTEEGQFLMQPMGQENLHDEEEEEELEPPVKWRKPENKEASF

SEQ ID NO: 41219 - protein, 203 aa, Arabidopsis thaliana
  peptide (1)..(203): Ceres Seq. ID no. 12395392
  misc_feature (1)..(81): Homolog of NCBI NO: 34914280 NR Description: B1151A10.6 [Oryza sativa (japonica
  misc_feature (1)..(50): Homolog of NCBI NO: 15231388 NR Description: hypothetical protein; protein id: At3g13850.1
  misc_feature (1)..(26): Homolog of NCBI NO: 15235755 NR Description: similar to ASYMMETRIC LEAVES2-like protein 26
  misc_feature (1)..(36): Homolog of NCBI NO: 25354729 NR Description: hypothetical protein At2g45420 [imported] -
  misc_feature (1)..(36): Homolog of NCBI NO: 30690020 NR Description: lateral organ boundaries (LOB) domain protein 18
  misc_feature (1)..(11): Homolog of NCBI NO: 15239220 NR Description: putative protein; protein id: At5g35900.1
  misc_feature (1)..(38): Homolog of NCBI NO: 15242624 NR Description: putative protein
  misc_feature (1)..(38): Homolog of NCBI NO: 34907508 NR Description: B1099D03.24 [Oryza sativa (japonica
  misc_feature (1)..(182): Homolog of NCBI NO: 15240110 NR Description: putative protein; protein id: At5g66870.1
  misc_feature (1)..(203): Homolog of NCBI NO: 15227870 NR Description: hypothetical protein; protein id: At2g23660.1
MGPDAVIPPPYLPPIGNNPPPNFMMSMEGMPPGVIPQGEPLMIREPNMSQQHHHQQPQDEQLQFIASDAQRMAAMMLERGDQQGMFNGYGIDNNGSVTATGFNQMDVNDQGAGGSLSGPSLALGSFGDAYQMGQETEHGHINHDQLQTQLMLQPPLQEGQEQTEEGQFLMQPMGQENLHDEEEEEELEPPVKWRKPENKEASF

SEQ ID NO: 41220 - protein, 180 aa, Arabidopsis thaliana
  peptide (1)..(180): Ceres Seq. ID no. 12395393
  misc_feature (1)..(16): Homolog of NCBI NO: 34905124 NR Description: P0686C03.45 [Oryza sativa (japonica
  misc_feature (1)..(58): Homolog of NCBI NO: 34914280 NR Description: B1151A10.6 [Oryza sativa (japonica
  misc_feature (1)..(27): Homolog of NCBI NO: 15231388 NR Description: hypothetical protein; protein id: At3g13850.1
  misc_feature (1)..(13): Homolog of NCBI NO: 25354729 NR Description: hypothetical protein At2g45420 [imported] -
  misc_feature (1)..(13): Homolog of NCBI NO: 30690020 NR Description: lateral organ boundaries (LOB) domain protein 18
  misc_feature (1)..(15): Homolog of NCBI NO: 15242624 NR Description: putative protein
  misc_feature (1)..(15): Homolog of NCBI NO: 34907508 NR Description: B1099D03.24 [Oryza sativa (japonica
  misc_feature (1)..(159): Homolog of NCBI NO: 15240110 NR Description: putative protein; protein id: At5g66870.1
  misc_feature (1)..(180): Homolog of NCBI NO: 15227870 NR Description: hypothetical protein; protein id: At2g23660.1
MMSMEGMPPGVIPQGEPLMIREPNMSQQHHHQQPQDEQLQFIASDAQRMAAMMLERGDQQGMFNGYGIDNNGSVTATGFNQMDVNDQGAGGSLSGPSLALGSFGDAYQMGQETEHGHINHDQLQTQLMLQPPLQEGQEQTEEGQFLMQPMGQENLHDEEEEEELEPPVKWRKPENKEASF

SEQ ID NO: 41221 - DNA, 1244 bp, Arabidopsis thaliana
  misc_feature (1)..(1244): Ceres Seq. ID no. 13494070
  misc_feature: MA Experiment ID: 108434 Result: Down-regulated in Transcription
  misc_feature: MA Experiment 108434 PARAMETER Experiment Name: At_Root_Tips_cDNA_P Parameter: Tissue Value: Root Tips
  misc_feature: MA Experiment ID: 108461 Result: Down-regulated in Transcription
  misc_feature: MA Experiment 108461 PARAMETER Experiment Name: At_Germinating_Seeds_cDNA_P Parameter: Age (day) Value: 1 vs. 0
  misc_feature: MA Experiment 108461 PARAMETER Experiment Name: At_Germinating_Seeds_cDNA_P Parameter: Tissue Value: Germinating Seeds
  misc_feature: MA Experiment ID: 108462 Result: Down-regulated in Transcription
  misc_feature: MA Experiment 108462 PARAMETER Experiment Name: At_Germinating_Seeds_cDNA_P Parameter: Age (day) Value: 2 vs. 0
  misc_feature: MA Experiment 108462 PARAMETER Experiment Name: At_Germinating_Seeds_cDNA_P Parameter: Tissue Value: Germinating Seeds
  misc_feature: MA Experiment ID: 108463 Result: Down-regulated in Transcription
  misc_feature: MA Experiment 108463 PARAMETER Experiment Name: At_Germinating_Seeds_cDNA_P Parameter: Age (day) Value: 3 vs. 0
  misc_feature: MA Experiment 108463 PARAMETER Experiment Name: At_Germinating_Seeds_cDNA_P Parameter: Tissue Value: Germinating Seeds
  misc_feature: MA Experiment ID: 108473 Result: Up-regulated in Transcription
  misc_feature: MA Experiment 108473 PARAMETER Experiment Name: At_Drought_Flowers_cDNA_P Parameter: Timepoint (hr) Value: 7 d
  misc_feature: MA Experiment 108473 PARAMETER Experiment Name: At_Drought_Flowers_cDNA_P Parameter: Tissue Value: Flower
  misc_feature: MA Experiment 108473 PARAMETER Experiment Name: At_Drought_Flowers_cDNA_P Parameter: Treatment Value: Drought vs. No Drought
  misc_feature: MA Experiment ID: 108501 Result: Down-regulated in Transcription
  misc_feature: MA Experiment 108501 PARAMETER Experiment Name: At_ap2_floral_buds_cDNA_P Parameter: Plant Line Value: ap2 (Ler.)
  misc_feature: MA Experiment 108501 PARAMETER Experiment Name: At_ap2_floral_buds_cDNA_P Parameter: Tissue Value: Closed Flower
  misc_feature: MA Experiment ID: 108561 Result: Up-regulated in Transcription
  misc_feature: MA Experiment 108561 PARAMETER Experiment Name: At_100uM_ABA_cDNA_P Parameter: Timepoint (hr) Value: 6
  misc_feature: MA Experiment 108561 PARAMETER Experiment Name: At_100uM_ABA_cDNA_P Parameter: Tissue Value: Aerial
  misc_feature: MA Experiment 108561 PARAMETER Experiment Name: At_100uM_ABA_cDNA_P Parameter: Treatment Value: 100uM ABA vs. No Treatment
  misc_feature: MA Experiment ID: 108572 Result: Up-regulated in Transcription
  misc_feature: MA Experiment 108572 PARAMETER Experiment Name: At_Drought_cDNA_P Parameter: Timepoint (hr) Value: 1
  misc_feature: MA Experiment 108572 PARAMETER Experiment Name: At_Drought_cDNA_P Parameter: Tissue Value: Aerial
  misc_feature: MA Experiment 108572 PARAMETER Experiment Name: At_Drought_cDNA_P Parameter: Treatment Value: Drought vs. No Drought
  misc_feature: MA Experiment ID: 108573 Result: Up-regulated in Transcription
  misc_feature: MA Experiment 108573 PARAMETER Experiment Name: At_Drought_cDNA_P Parameter: Timepoint (hr) Value: 6
  misc_feature: MA Experiment 108573 PARAMETER Experiment Name: At_Drought_cDNA_P Parameter: Tissue Value: Aerial
  misc_feature: MA Experiment 108573 PARAMETER Experiment Name: At_Drought_cDNA_P Parameter: Treatment Value: Drought vs. No Drought
  misc_feature: MA Experiment ID: 108576 Result: Up-regulated in Transcription
  misc_feature: MA Experiment 108576 PARAMETER Experiment Name: At_42deg_Heat_cDNA_P Parameter: Temperature (deg C) Value: 42 vs. 22
  misc_feature: MA Experiment 108576 PARAMETER Experiment Name: At_42deg_Heat_cDNA_P Parameter: Timepoint (hr) Value: 1
  misc_feature: MA Experiment 108576 PARAMETER Experiment Name: At_42deg_Heat_cDNA_P Parameter: Tissue Value: Aerial
  misc_feature: MA Experiment ID: 108577 Result: Up-regulated in Transcription
  misc_feature: MA Experiment 108577 PARAMETER Experiment Name: At_42deg_Heat_cDNA_P Parameter: Temperature (deg C) Value: 42 vs. 22
  misc_feature: MA Experiment 108577 PARAMETER Experiment Name: At_42deg_Heat_cDNA_P Parameter: Timepoint (hr) Value: 6
  misc_feature: MA Experiment 108577 PARAMETER Experiment Name: At_42deg_Heat_cDNA_P Parameter: Tissue Value: Aerial
  misc_feature: MA Experiment ID: 108585 Result: Up-regulated in Transcription
  misc_feature: MA Experiment 108585 PARAMETER Experiment Name: At_5mM_NaNP_cDNA_P Parameter: Timepoint (hr) Value: 6
  misc_feature: MA Experiment 108585 PARAMETER Experiment Name: At_5mM_NaNP_cDNA_P Parameter: Tissue Value: Aerial
  misc_feature: MA Experiment 108585 PARAMETER Experiment Name: At_5mM_NaNP_cDNA_P Parameter: Treatment Value: null
  misc_feature: MA Experiment ID: 108605 Result: Up-regulated in Transcription
  misc_feature: MA Experiment 108605 PARAMETER Experiment Name: At_100uM_ABA_cDNA_P Parameter: Timepoint (hr) Value: 6
  misc_feature: MA Experiment 108605 PARAMETER Experiment Name: At_100uM_ABA_cDNA_P Parameter: Tissue Value: Aerial
  misc_feature: MA Experiment 108605 PARAMETER Experiment Name: At_100uM_ABA_cDNA_P Parameter: Treatment Value: 100uM ABA vs. No Treatment
  misc_feature: MA Experiment ID: 108607 Result: Up-regulated in Transcription
  misc_feature: MA Experiment 108607 PARAMETER Experiment Name: At_100uM_ABA_cDNA_P Parameter: Timepoint (hr) Value: 4
  misc_feature: MA Experiment 108607 PARAMETER Experiment Name: At_100uM_ABA_cDNA_P Parameter: Tissue Value: Aerial
  misc_feature: MA Experiment 108607 PARAMETER Experiment Name: At_100uM_ABA_cDNA_P Parameter: Treatment Value: 100uM ABA vs. No Treatment
  misc_feature: MA Experiment ID: 20000069 Result: Up-regulated in Transcription
  misc_feature: MA Experiment 20000069 PARAMETER Experiment Name: At_100uM_ABA_Mutants_cDNA_P Parameter: Plant Line Value: CS23
  misc_feature: MA Experiment 20000069 PARAMETER Experiment Name: At_100uM_ABA_Mutants_cDNA_P Parameter: Timepoint (hr) Value: 6
  misc_feature: MA Experiment 20000069 PARAMETER Experiment Name: At_100uM_ABA_Mutants_cDNA_P Parameter: Tissue Value: Aerial
  misc_feature: MA Experiment 20000069 PARAMETER Experiment Name: At_100uM_ABA_Mutants_cDNA_P Parameter: Treatment Value: 100uM ABA vs. No Treatment
  misc_feature: MA Experiment ID: 20000111 Result: Up-regulated in Transcription
  misc_feature: MA Experiment 20000111 PARAMETER Experiment Name: At_42deg_Heat_cDNA_P Parameter: Temperature (deg C) Value: 42 vs. 22
  misc_feature: MA Experiment 20000111 PARAMETER Experiment Name: At_42deg_Heat_cDNA_P Parameter: Timepoint (hr) Value: 6
  misc_feature: MA Experiment 20000111 PARAMETER Experiment Name: At_42deg_Heat_cDNA_P Parameter: Tissue Value: Aerial
  misc_feature: MA Experiment ID: 20000112 Result: Up-regulated in Transcription
  misc_feature: MA Experiment 20000112 PARAMETER Experiment Name: At_42deg_Heat_cDNA_P Parameter: Temperature (deg C) Value: 42 vs. 22
  misc_feature: MA Experiment 20000112 PARAMETER Experiment Name: At_42deg_Heat_cDNA_P Parameter: Timepoint (hr) Value: 2
  misc_feature: MA Experiment 20000112 PARAMETER Experiment Name: At_42deg_Heat_cDNA_P Parameter: Tissue Value: Aerial
  misc_feature: MA Experiment ID: 20000113 Result: Up-regulated in Transcription
  misc_feature: MA Experiment 20000113 PARAMETER Experiment Name: At_42deg_Heat_cDNA_P Parameter: Temperature (deg C) Value: 42 vs. 22
  misc_feature: MA Experiment 20000113 PARAMETER Experiment Name: At_42deg_Heat_cDNA_P Parameter: Timepoint (hr) Value: 8
  misc_feature: MA Experiment 20000113 PARAMETER Experiment Name: At_42deg_Heat_cDNA_P Parameter: Tissue Value: Aerial
  misc_feature: MA Experiment ID: 20000117 Result: Up-regulated in Transcription
  misc_feature: MA Experiment 20000117 PARAMETER Experiment Name: At_100uM_ABA_Mutants_cDNA_P Parameter: Plant Line Value: Columbia
  misc_feature: MA Experiment 20000117 PARAMETER Experiment Name: At_100uM_ABA_Mutants_cDNA_P Parameter: Timepoint (hr) Value: 6
  misc_feature: MA Experiment 20000117 PARAMETER Experiment Name: At_100uM_ABA_Mutants_cDNA_P Parameter: Tissue Value: Aerial
  misc_feature: MA Experiment 20000117 PARAMETER Experiment Name: At_100uM_ABA_Mutants_cDNA_P Parameter: Treatment Value: 100uM ABA vs. No Treatment
  misc_feature: MA Experiment ID: 20000144 Result: Up-regulated in Transcription
  misc_feature: MA Experiment 20000144 PARAMETER Experiment Name: At_42deg_Heat_cDNA_P Parameter: Temperature (deg C) Value: 42 vs. 22
  misc_feature: MA Experiment 20000144 PARAMETER Experiment Name: At_42deg_Heat_cDNA_P Parameter: Timepoint (hr) Value: 1
  misc_feature: MA Experiment 20000144 PARAMETER Experiment Name: At_42deg_Heat_cDNA_P Parameter: Tissue Value: Aerial
  misc_feature: MA Experiment ID: 20000169 Result: Up-regulated in Transcription
  misc_feature: MA Experiment 20000169 PARAMETER Experiment Name: At_100uM_ABA_P Parameter: Age (day) Value: 14
  misc_feature: MA Experiment 20000169 PARAMETER Experiment Name: At_100uM_ABA_P Parameter: Organism Value: A. thaliana
  misc_feature: MA Experiment 20000169 PARAMETER Experiment Name: At_100uM_ABA_P Parameter: Plant Line Value: WS
  misc_feature: MA Experiment 20000169 PARAMETER Experiment Name: At_100uM_ABA_P Parameter: Timepoint (hr) Value: 6
  misc_feature: MA Experiment 20000169 PARAMETER Experiment Name: At_100uM_ABA_P Parameter: Tissue Value: Aerial
  misc_feature: MA Experiment 20000169 PARAMETER Experiment Name: At_100uM_ABA_P Parameter: Treatment Value: 100uM ABA vs. No Treatment
  misc_feature: MA Experiment ID: 20000173 Result: Up-regulated in Transcription
  misc_feature: MA Experiment 20000173 PARAMETER Experiment Name: At_42deg_Heat_P Parameter: Age (day) Value: 14
  misc_feature: MA Experiment 20000173 PARAMETER Experiment Name: At_42deg_Heat_P Parameter: Organism Value: A. thaliana
  misc_feature: MA Experiment 20000173 PARAMETER Experiment Name: At_42deg_Heat_P Parameter: Plant Line Value: WS
  misc_feature: MA Experiment 20000173 PARAMETER Experiment Name: At_42deg_Heat_P Parameter: Temperature (deg C) Value: 42 vs. 22
  misc_feature: MA Experiment 20000173 PARAMETER Experiment Name: At_42deg_Heat_P Parameter: Timepoint (hr) Value: 6
  misc_feature: MA Experiment 20000173 PARAMETER Experiment Name: At_42deg_Heat_P Parameter: Tissue Value: Aerial
  misc_feature: MA Experiment ID: 20000180 Result: Down-regulated in Transcription
  misc_feature: MA Experiment 20000180 PARAMETER Experiment Name: At_Germinating_Seeds_P Parameter: Age (hr) Value: 24 vs. 0
  misc_feature: MA Experiment 20000180 PARAMETER Experiment Name: At_Germinating_Seeds_P Parameter: Tissue Value: Germinating Seeds
  misc_feature: MA Experiment ID: 20000182 Result: Up-regulated in Transcription
  misc_feature: MA Experiment 20000182 PARAMETER Experiment Name: At_2mM_SA_P Parameter: Age (day) Value: 14
  misc_feature: MA Experiment 20000182 PARAMETER Experiment Name: At_2mM_SA_P Parameter: Organism Value: A. thaliana
  misc_feature: MA Experiment 20000182 PARAMETER Experiment Name: At_2mM_SA_P Parameter: Plant Line Value: WS
  misc_feature: MA Experiment 20000182 PARAMETER Experiment Name: At_2mM_SA_P Parameter: Timepoint (hr) Value: 6
  misc_feature: MA Experiment 20000182 PARAMETER Experiment Name: At_2mM_SA_P Parameter: Tissue Value: Aerial
  misc_feature: MA Experiment 20000182 PARAMETER Experiment Name: At_2mM_SA_P Parameter: Treatment Value: 2mM SA vs. No Treatment
  misc_feature: MA Experiment ID: 20000184 Result: Down-regulated in Transcription
  misc_feature: MA Experiment 20000184 PARAMETER Experiment Name: At_Shoots__P Parameter: Age (day) Value: 7
  misc_feature: MA Experiment 20000184 PARAMETER Experiment Name: At_Shoots__P Parameter: Tissue Value: Shoots vs. Whole Plant
  misc_feature: MA Experiment ID: 20000224 Result: Down-regulated in Transcription
  misc_feature: MA Experiment ID: 20000227 Result: Down-regulated in Transcription
  misc_feature: MA Experiment 20000227 PARAMETER Experiment Name: At_Root-Tips-vs-Tops_P Parameter: Tissue Value: Root Tips vs. Root Tops
  misc_feature: MA Experiment ID: 20000234 Result: Down-regulated in Transcription
  misc_feature: MA Experiment 20000234 PARAMETER Experiment Name: At_Siliques_P Parameter: Age (day) Value: 21
  misc_feature: MA Experiment 20000234 PARAMETER Experiment Name: At_Siliques_P Parameter: Organism Value: A. thaliana
  misc_feature: MA Experiment 20000234 PARAMETER Experiment Name: At_Siliques_P Parameter: Plant Line Value: WS
  misc_feature: MA Experiment 20000234 PARAMETER Experiment Name: At_Siliques_P Parameter: Tissue Value: Less Than 5mm Siliques vs. Whole Plant
  misc_feature: MA Experiment ID: 20000235 Result: Down-regulated in Transcription
  misc_feature: MA Experiment 20000235 PARAMETER Experiment Name: At_Siliques_P Parameter: Age (day) Value: 21
  misc_feature: MA Experiment 20000235 PARAMETER Experiment Name: At_Siliques_P Parameter: Organism Value: A. thaliana
  misc_feature: MA Experiment 20000235 PARAMETER Experiment Name: At_Siliques_P Parameter: Plant Line Value: WS
  misc_feature: MA Experiment 20000235 PARAMETER Experiment Name: At_Siliques_P Parameter: Tissue Value: 5-10mm Siliques vs. Whole Plant
  misc_feature: MA Experiment ID: 20000265 Result: Down-regulated in Transcription
  misc_feature: MA Experiment 20000265 PARAMETER Experiment Name: At_Open_Flower_P Parameter: Age (day) Value: 21
  misc_feature: MA Experiment 20000265 PARAMETER Experiment Name: At_Open_Flower_P Parameter: Plant Line Value: WS
  misc_feature: MA Experiment 20000265 PARAMETER Experiment Name: At_Open_Flower_P Parameter: Tissue Value: Closed Flower vs. Whole Plant
  misc_feature: MA Experiment ID: 20000286 Result: Down-regulated in Transcription
  misc_feature: MA Experiment 20000286 PARAMETER Experiment Name: At_Open_Flower_P Parameter: Age (day) Value: 21
  misc_feature: MA Experiment 20000286 PARAMETER Experiment Name: At_Open_Flower_P Parameter: Plant Line Value: WS
  misc_feature: MA Experiment 20000286 PARAMETER Experiment Name: At_Open_Flower_P Parameter: Tissue Value: Half Open vs. Whole Plant
  misc_feature: MA Experiment ID: 20000436 Result: Up-regulated in Transcription
  misc_feature: MA Experiment 20000436 PARAMETER Experiment Name: At_Drought_P Parameter: Age (day) Value: 7
  misc_feature: MA Experiment 20000436 PARAMETER Experiment Name: At_Drought_P Parameter: Organism Value: A. thaliana
  misc_feature: MA Experiment 20000436 PARAMETER Experiment Name: At_Drought_P Parameter: Plant Line Value: WS
  misc_feature: MA Experiment 20000436 PARAMETER Experiment Name: At_Drought_P Parameter: Timepoint (hr) Value: 12
  misc_feature: MA Experiment 20000436 PARAMETER Experiment Name: At_Drought_P Parameter: Tissue Value: Whole Plant
  misc_feature: MA Experiment 20000436 PARAMETER Experiment Name: At_Drought_P Parameter: Treatment Value: Drought vs. No Drought
  misc_feature: MA Experiment ID: 20000437 Result: Up-regulated in Transcription
  misc_feature: MA Experiment 20000437 PARAMETER Experiment Name: At_Drought_P Parameter: Age (day) Value: 8
  misc_feature: MA Experiment 20000437 PARAMETER Experiment Name: At_Drought_P Parameter: Organism Value: A. thaliana
  misc_feature: MA Experiment 20000437 PARAMETER Experiment Name: At_Drought_P Parameter: Plant Line Value: WS
  misc_feature: MA Experiment 20000437 PARAMETER Experiment Name: At_Drought_P Parameter: Timepoint (hr) Value: 24
  misc_feature: MA Experiment 20000437 PARAMETER Experiment Name: At_Drought_P Parameter: Tissue Value: Whole Plant
  misc_feature: MA Experiment 20000437 PARAMETER Experiment Name: At_Drought_P Parameter: Treatment Value: Drought vs. No Drought
  misc_feature: MA Experiment ID: 20000438 Result: Down-regulated in Transcription
  misc_feature: MA Experiment 20000438 PARAMETER Experiment Name: At_Shoots__P Parameter: Age (day) Value: 14
  misc_feature: MA Experiment 20000438 PARAMETER Experiment Name: At_Shoots__P Parameter: Tissue Value: Shoots vs. Whole Plant
  misc_feature: MA Experiment ID: 20000495 Result: Down-regulated in Transcription
  misc_feature: MA Experiment 20000495 PARAMETER Experiment Name: At_Guard_Cells_P Parameter: Harvest Date Value: 8/2/2002
  misc_feature: MA Experiment 20000495 PARAMETER Experiment Name: At_Guard_Cells_P Parameter: Organism Value: A. thaliana
  misc_feature: MA Experiment 20000495 PARAMETER Experiment Name: At_Guard_Cells_P Parameter: Tissue Value: Guard Cells vs. Leaves
  misc_feature: MA Experiment ID: 20001248 Result: Up-regulated in Transcription
  misc_feature: MA Experiment 20001248 PARAMETER Experiment Name: At_Far-red-induction_P Parameter: Age (day) Value: 7
  misc_feature: MA Experiment 20001248 PARAMETER Experiment Name: At_Far-red-induction_P Parameter: Light Value: Far-red vs. White
  misc_feature: MA Experiment 20001248 PARAMETER Experiment Name: At_Far-red-induction_P Parameter: Organism Value: A. thaliana
  misc_feature: MA Experiment 20001248 PARAMETER Experiment Name: At_Far-red-induction_P Parameter: Plant Line Value: Columbia
  misc_feature: MA Experiment 20001248 PARAMETER Experiment Name: At_Far-red-induction_P Parameter: Timepoint (hr) Value: 4
  misc_feature: MA Experiment 20001248 PARAMETER Experiment Name: At_Far-red-induction_P Parameter: Tissue Value: Whole Plant
  misc_feature: MA Experiment ID: 20001450 Result: Up-regulated in Transcription
  misc_feature: MA Experiment 20001450 PARAMETER Experiment Name: At_Far-red-induction_P Parameter: Age (day) Value: 7
  misc_feature: MA Experiment 20001450 PARAMETER Experiment Name: At_Far-red-induction_P Parameter: Light Value: Far-red vs. White
  misc_feature: MA Experiment 20001450 PARAMETER Experiment Name: At_Far-red-induction_P Parameter: Organism Value: A. thaliana
  misc_feature: MA Experiment 20001450 PARAMETER Experiment Name: At_Far-red-induction_P Parameter: Plant Line Value: Columbia
  misc_feature: MA Experiment 20001450 PARAMETER Experiment Name: At_Far-red-induction_P Parameter: Timepoint (hr) Value: 8
  misc_feature: MA Experiment 20001450 PARAMETER Experiment Name: At_Far-red-induction_P Parameter: Tissue Value: Whole Plant
  misc_feature: MA Experiment ID: 20001554 Result: Up-regulated in Transcription
  misc_feature: MA Experiment 20001554 PARAMETER Experiment Name: At_Drought_Soil_Dry_P Parameter: Age (day) Value: 21
  misc_feature: MA Experiment 20001554 PARAMETER Experiment Name: At_Drought_Soil_Dry_P Parameter: Organism Value: A. thaliana
  misc_feature: MA Experiment 20001554 PARAMETER Experiment Name: At_Drought_Soil_Dry_P Parameter: Plant Line Value: WS
  misc_feature: MA Experiment 20001554 PARAMETER Experiment Name: At_Drought_Soil_Dry_P Parameter: Post Timepoint (hr) Value: None
  misc_feature: MA Experiment 20001554 PARAMETER Experiment Name: At_Drought_Soil_Dry_P Parameter: Post-Treatment Value: None
  misc_feature: MA Experiment 20001554 PARAMETER Experiment Name: At_Drought_Soil_Dry_P Parameter: Timepoint (day) Value: 7
  misc_feature: MA Experiment 20001554 PARAMETER Experiment Name: At_Drought_Soil_Dry_P Parameter: Treatment Value: Drought vs. No Drought
  misc_feature: MA Experiment ID: 20001557 Result: Down-regulated in Transcription
  misc_feature: MA Experiment 20001557 PARAMETER Experiment Name: At_Drought_Soil_Dry_P Parameter: Age (day) Value: 27
  misc_feature: MA Experiment 20001557 PARAMETER Experiment Name: At_Drought_Soil_Dry_P Parameter: Organism Value: A. thaliana
  misc_feature: MA Experiment 20001557 PARAMETER Experiment Name: At_Drought_Soil_Dry_P Parameter: Plant Line Value: WS
  misc_feature: MA Experiment 20001557 PARAMETER Experiment Name: At_Drought_Soil_Dry_P Parameter: Post Timepoint (hr) Value: 3
  misc_feature: MA Experiment 20001557 PARAMETER Experiment Name: At_Drought_Soil_Dry_P Parameter: Post-Treatment Value: Re-Water vs. No Drought
  misc_feature: MA Experiment 20001557 PARAMETER Experiment Name: At_Drought_Soil_Dry_P Parameter: Timepoint (day) Value: 13
  misc_feature: MA Experiment 20001557 PARAMETER Experiment Name: At_Drought_Soil_Dry_P Parameter: Treatment Value: Drought vs. No Drought
  misc_feature: MA Experiment ID: 20001558 Result: Down-regulated in Transcription
  misc_feature: MA Experiment 20001558 PARAMETER Experiment Name: At_Drought_Soil_Dry_P Parameter: Age (day) Value: 27
  misc_feature: MA Experiment 20001558 PARAMETER Experiment Name: At_Drought_Soil_Dry_P Parameter: Organism Value: A. thaliana
  misc_feature: MA Experiment 20001558 PARAMETER Experiment Name: At_Drought_Soil_Dry_P Parameter: Plant Line Value: WS
  misc_feature: MA Experiment 20001558 PARAMETER Experiment Name: At_Drought_Soil_Dry_P Parameter: Post Timepoint (hr) Value: 6
  misc_feature: MA Experiment 20001558 PARAMETER Experiment Name: At_Drought_Soil_Dry_P Parameter: Post-Treatment Value: Re-Water vs. No Drought
  misc_feature: MA Experiment 20001558 PARAMETER Experiment Name: At_Drought_Soil_Dry_P Parameter: Timepoint (day) Value: 13
  misc_feature: MA Experiment 20001558 PARAMETER Experiment Name: At_Drought_Soil_Dry_P Parameter: Treatment Value: Drought vs. No Drought
  misc_feature: MA Experiment ID: 20001560 Result: Down-regulated in Transcription
  misc_feature: MA Experiment 20001560 PARAMETER Experiment Name: At_Drought_Soil_Dry_P Parameter: Age (day) Value: 28
  misc_feature: MA Experiment 20001560 PARAMETER Experiment Name: At_Drought_Soil_Dry_P Parameter: Organism Value: A. thaliana
  misc_feature: MA Experiment 20001560 PARAMETER Experiment Name: At_Drought_Soil_Dry_P Parameter: Plant Line Value: WS
  misc_feature: MA Experiment 20001560 PARAMETER Experiment Name: At_Drought_Soil_Dry_P Parameter: Post Timepoint (hr) Value: None
  misc_feature: MA Experiment 20001560 PARAMETER Experiment Name: At_Drought_Soil_Dry_P Parameter: Post-Treatment Value: None
  misc_feature: MA Experiment 20001560 PARAMETER Experiment Name: At_Drought_Soil_Dry_P Parameter: Timepoint (day) Value: 14
  misc_feature: MA Experiment 20001560 PARAMETER Experiment Name: At_Drought_Soil_Dry_P Parameter: Treatment Value: Drought vs. No Drought
  misc_feature: MA Experiment ID: 20001906 Result: Up-regulated in Transcription
  misc_feature: MA Experiment 20001906 PARAMETER Experiment Name: At_Drought_Reproduction_P Parameter: Age (day) Value: 35
  misc_feature: MA Experiment 20001906 PARAMETER Experiment Name: At_Drought_Reproduction_P Parameter: Organism Value: A. thaliana
  misc_feature: MA Experiment 20001906 PARAMETER Experiment Name: At_Drought_Reproduction_P Parameter: Plant Line Value: WS
  misc_feature: MA Experiment 20001906 PARAMETER Experiment Name: At_Drought_Reproduction_P Parameter: Timepoint (day) Value: 5
  misc_feature: MA Experiment 20001906 PARAMETER Experiment Name: At_Drought_Reproduction_P Parameter: Tissue Value: Siliques
  misc_feature: MA Experiment 20001906 PARAMETER Experiment Name: At_Drought_Reproduction_P Parameter: Treatment Value: Drought vs. No Drought
  misc_feature: MA Experiment ID: 20001908 Result: Up-regulated in Transcription
  misc_feature: MA Experiment 20001908 PARAMETER Experiment Name: At_Drought_Reproduction_P Parameter: Age (day) Value: 40
  misc_feature: MA Experiment 20001908 PARAMETER Experiment Name: At_Drought_Reproduction_P Parameter: Organism Value: A. thaliana
  misc_feature: MA Experiment 20001908 PARAMETER Experiment Name: At_Drought_Reproduction_P Parameter: Plant Line Value: WS
  misc_feature: MA Experiment 20001908 PARAMETER Experiment Name: At_Drought_Reproduction_P Parameter: Timepoint (day) Value: 10
  misc_feature: MA Experiment 20001908 PARAMETER Experiment Name: At_Drought_Reproduction_P Parameter: Tissue Value: Siliques
  misc_feature: MA Experiment 20001908 PARAMETER Experiment Name: At_Drought_Reproduction_P Parameter: Treatment Value: Drought vs. No Drought
  misc_feature: MA Experiment ID: 20001911 Result: Up-regulated in Transcription
  misc_feature: MA Experiment 20001911 PARAMETER Experiment Name: At_Drought_Reproduction_P Parameter: Age (day) Value: 40
  misc_feature: MA Experiment 20001911 PARAMETER Experiment Name: At_Drought_Reproduction_P Parameter: Organism Value: A. thaliana
  misc_feature: MA Experiment 20001911 PARAMETER Experiment Name: At_Drought_Reproduction_P Parameter: Plant Line Value: WS
  misc_feature: MA Experiment 20001911 PARAMETER Experiment Name: At_Drought_Reproduction_P Parameter: Timepoint (day) Value: 10
  misc_feature: MA Experiment 20001911 PARAMETER Experiment Name: At_Drought_Reproduction_P Parameter: Tissue Value: Flowers
  misc_feature: MA Experiment 20001911 PARAMETER Experiment Name: At_Drought_Reproduction_P Parameter: Treatment Value: Drought vs. No Drought
agccgccgctttcacttacctcttcctcttccttcttcttcttctaccttcttctcgtaaaggttttgctacacactggagctcgcaaatctggctatcgaaaaccacaatcacaaactcaacttcggggccttcaaggccaatcacaagaaagtcatgggaccaatgataagaacagaggaagaagaagactatacaagtccaccgtggctaatgccaatgctacgagggagttacttcgtcccttgttccatccatgtcgattcaaacaaaaacgaatgcaatttgttctgtcttgattgtgctggaaatgccttttgctcttactgtttagtcaaacataaagaccatcgtgttgttcagatacgaagatcttcgtaccataacgttgtgagagtgaatgagatacagaagttcatagacatcgcttgtgttcagacatatattatcaacagcgcaaagatcgtgttcctcaatgaaagacctcagcctagaatcggtaaaggtgttacaaacacttgtgaaatctgttgcagaagtctccttgattctttcaggttctgctctctcggctgcaagcttggaggaatgaggagaggagatttatctctaaccttctctttgaaaggaaagcatgggagagagtaccttggtgggtcggaatcagatgaagctactacaccgactaagatgcgtaagaccaatgctttcaaccgtctgatgagtggtctctcgatctcaaccgttagattcgatgactacggtcccaatggtgatcaaaggtcttcaagctctggtgatgaaggtggttttagtttctctccgggaacacctccgatctataatcaccggaattcaagcagacgaaagggtgtccctcaccgtgctccgttctaagaaaagataattactaaatttccaaccccatagtaattaattatatatatatatatatagataatggtataatacaatgtataacttggggtgaaatttaggatgtagtcataatgttgtaaatgtgtattatttctttttatagtttttctaaaagataaaggtgaaataattagaacacatacataaatacattttttataagtatagaagaattaggttttatagtggaagtgtttgatgtttagtttgtttaaaaggcatggctttgtcttgtgttgtaatgtaatgtgtacattaaatttttgttcatacaataataatatcaaggtgaatgatatattatg

SEQ ID NO: 41222 - protein, 246 aa, Arabidopsis thaliana
  peptide (1)..(246): Ceres Seq. ID no. 13494071
  misc_feature (13)..(240): Pfam Name: Protein of unknown function, DUF597 Pfam Description: Protein of unknown function, DUF597
  misc_feature (210)..(246): Homolog of NCBI NO: 37537092 NR Description: unknown protein [Oryza sativa (japonica
  misc_feature (1)..(178): Homolog of NCBI NO: 37537092 NR Description: unknown protein [Oryza sativa (japonica
  misc_feature (1)..(147): Homolog of NCBI NO: 6714272 NR Description: F6N18.8 [Arabidopsis thaliana]
  misc_feature (9)..(195): Homolog of NCBI NO: 15217560 NR Description: hypothetical protein [Arabidopsis thaliana]
  misc_feature (4)..(246): Homolog of NCBI NO: 25337904 NR Description: unknown protein F14G6.19 [imported] - Arabidopsis
  misc_feature (4)..(246): Homolog of NCBI NO: 21536890 NR Description: unknown [Arabidopsis thaliana]
  misc_feature (1)..(246): Homolog of NCBI NO: 18411153 NR Description: expressed protein [Arabidopsis thaliana]
  misc_feature (4)..(246): Homolog of NCBI NO: 25337907 NR Description: hypothetical protein F9H16.1 - Arabidopsis
  misc_feature (1)..(246): Homolog of NCBI NO: 21537073 NR Description: unknown [Arabidopsis thaliana]
  misc_feature (1)..(246): Homolog of NCBI NO: 18394936 NR Description: expressed protein [Arabidopsis thaliana]
MGPMIRTEEEEDYTSPPWLMPMLRGSYFVPCSIHVDSNKNECNLFCLDCAGNAFCSYCLVKHKDHRVVQIRRSSYHNVVRVNEIQKFIDIACVQTYIINSAKIVFLNERPQPRIGKGVTNTCEICCRSLLDSFRFCSLGCKLGGMRRGDLSLTFSLKGKHGREYLGGSESDEATTPTKMRKTNAFNRLMSGLSISTVRFDDYGPNGDQRSSSSGDEGGFSFSPGTPPIYNHRNSSRRKGVPHRAPF

SEQ ID NO: 41223 - protein, 243 aa, Arabidopsis thaliana
  peptide (1)..(243): Ceres Seq. ID no. 13494072
  misc_feature (10)..(237): Pfam Name: Protein of unknown function, DUF597 Pfam Description: Protein of unknown function, DUF597
  misc_feature (207)..(243): Homolog of NCBI NO: 37537092 NR Description: unknown protein [Oryza sativa (japonica
  misc_feature (1)..(175): Homolog of NCBI NO: 37537092 NR Description: unknown protein [Oryza sativa (japonica
  misc_feature (1)..(144): Homolog of NCBI NO: 6714272 NR Description: F6N18.8 [Arabidopsis thaliana]
  misc_feature (6)..(192): Homolog of NCBI NO: 15217560 NR Description: hypothetical protein [Arabidopsis thaliana]
  misc_feature (1)..(243): Homolog of NCBI NO: 25337904 NR Description: unknown protein F14G6.19 [imported] - Arabidopsis
  misc_feature (1)..(243): Homolog of NCBI NO: 21536890 NR Description: unknown [Arabidopsis thaliana]
  misc_feature (1)..(243): Homolog of NCBI NO: 18411153 NR Description: expressed protein [Arabidopsis thaliana]
  misc_feature (1)..(243): Homolog of NCBI NO: 25337907 NR Description: hypothetical protein F9H16.1 - Arabidopsis
  misc_feature (1)..(243): Homolog of NCBI NO: 21537073 NR Description: unknown [Arabidopsis thaliana]
  misc_feature (1)..(243): Homolog of NCBI NO: 18394936 NR Description: expressed protein [Arabidopsis thaliana]
MIRTEEEEDYTSPPWLMPMLRGSYFVPCSIHVDSNKNECNLFCLDCAGNAFCSYCLVKHKDHRVVQIRRSSYHNVVRVNEIQKFIDIACVQTYIINSAKIVFLNERPQPRIGKGVTNTCEICCRSLLDSFRFCSLGCKLGGMRRGDLSLTFSLKGKHGREYLGGSESDEATTPTKMRKTNAFNRLMSGLSISTVRFDDYGPNGDQRSSSSGDEGGFSFSPGTPPIYNHRNSSRRKGVPHRAPF

SEQ ID NO: 41224 - protein, 227 aa, Arabidopsis thaliana
  peptide (1)..(227): Ceres Seq. ID no. 13494073
  misc_feature (1)..(221): Pfam Name: Protein of unknown function, DUF597 Pfam Description: Protein of unknown function, DUF597
  misc_feature (191)..(227): Homolog of NCBI NO: 37537092 NR Description: unknown protein [Oryza sativa (japonica
  misc_feature (1)..(159): Homolog of NCBI NO: 37537092 NR Description: unknown protein [Oryza sativa (japonica
  misc_feature (1)..(128): Homolog of NCBI NO: 6714272 NR Description: F6N18.8 [Arabidopsis thaliana]
  misc_feature (1)..(176): Homolog of NCBI NO: 15217560 NR Description: hypothetical protein [Arabidopsis thaliana]
  misc_feature (1)..(227): Homolog of NCBI NO: 25337904 NR Description: unknown protein F14G6.19 [imported] - Arabidopsis
  misc_feature (1)..(227): Homolog of NCBI NO: 21536890 NR Description: unknown [Arabidopsis thaliana]
  misc_feature (1)..(227): Homolog of NCBI NO: 18411153 NR Description: expressed protein [Arabidopsis thaliana]
  misc_feature (1)..(227): Homolog of NCBI NO: 25337907 NR Description: hypothetical protein F9H16.1 - Arabidopsis
  misc_feature (1)..(227): Homolog of NCBI NO: 21537073 NR Description: unknown [Arabidopsis thaliana]
  misc_feature (1)..(227): Homolog of NCBI NO: 18394936 NR Description: expressed protein [Arabidopsis thaliana]
MPMLRGSYFVPCSIHVDSNKNECNLFCLDCAGNAFCSYCLVKHKDHRVVQIRRSSYHNVVRVNEIQKFIDIACVQTYIINSAKIVFLNERPQPRIGKGVTNTCEICCRSLLDSFRFCSLGCKLGGMRRGDLSLTFSLKGKHGREYLGGSESDEATTPTKMRKTNAFNRLMSGLSISTVRFDDYGPNGDQRSSSSGDEGGFSFSPGTPPIYNHRNSSRRKGVPHRAPF

SEQ ID NO: 41225 - DNA, 1145 bp, Arabidopsis thaliana
  misc_feature (1)..(1145): Ceres Seq. ID no. 13492480
  misc_feature: MA Experiment ID: 108433 Result: Up-regulated in Transcription
  misc_feature: MA Experiment 108433 PARAMETER Experiment Name: At_rhl_Mutant2_cDNA_P Parameter: Age (day) Value: 7
  misc_feature: MA Experiment 108433 PARAMETER Experiment Name: At_rhl_Mutant2_cDNA_P Parameter: Organism Value: A. thaliana
  misc_feature: MA Experiment 108433 PARAMETER Experiment Name: At_rhl_Mutant2_cDNA_P Parameter: Plant Line Value: rhl Mutant vs. wt landsburg
  misc_feature: MA Experiment 108433 PARAMETER Experiment Name: At_rhl_Mutant2_cDNA_P Parameter: Tissue Value: Roots
  misc_feature: MA Experiment ID: 108434 Result: Up-regulated in Transcription
  misc_feature: MA Experiment 108434 PARAMETER Experiment Name: At_Root_Tips_cDNA_P Parameter: Tissue Value: Root Tips
  misc_feature: MA Experiment ID: 108463 Result: Up-regulated in Transcription
  misc_feature: MA Experiment 108463 PARAMETER Experiment Name: At_Germinating_Seeds_cDNA_P Parameter: Age (day) Value: 3 vs. 0
  misc_feature: MA Experiment 108463 PARAMETER Experiment Name: At_Germinating_Seeds_cDNA_P Parameter: Tissue Value: Germinating Seeds
  misc_feature: MA Experiment ID: 108464 Result: Up-regulated in Transcription
  misc_feature: MA Experiment 108464 PARAMETER Experiment Name: At_Germinating_Seeds_cDNA_P Parameter: Age (day) Value: 4 vs. 0
  misc_feature: MA Experiment 108464 PARAMETER Experiment Name: At_Germinating_Seeds_cDNA_P Parameter: Tissue Value: Germinating Seeds
  misc_feature: MA Experiment ID: 108489 Result: Down-regulated in Transcription
  misc_feature: MA Experiment ID: 108573 Result: Down-regulated in Transcription
  misc_feature: MA Experiment 108573 PARAMETER Experiment Name: At_Drought_cDNA_P Parameter: Timepoint (hr) Value: 6
  misc_feature: MA Experiment 108573 PARAMETER Experiment Name: At_Drought_cDNA_P Parameter: Tissue Value: Aerial
  misc_feature: MA Experiment 108573 PARAMETER Experiment Name: At_Drought_cDNA_P Parameter: Treatment Value: Drought vs. No Drought
  misc_feature: MA Experiment ID: 108595 Result: Down-regulated in Transcription
  misc_feature: MA Experiment 108595 PARAMETER Experiment Name: At_Ler-pi_Ovule_cDNA_P Parameter: Plant Line Value: null
  misc_feature: MA Experiment ID: 20000070 Result: Down-regulated in Transcription
  misc_feature: MA Experiment 20000070 PARAMETER Experiment Name: At_100uM_ABA_Mutants_cDNA_P Parameter: Plant Line Value: CS24
  misc_feature: MA Experiment 20000070 PARAMETER Experiment Name: At_100uM_ABA_Mutants_cDNA_P Parameter: Timepoint (hr) Value: 6
  misc_feature: MA Experiment 20000070 PARAMETER Experiment Name: At_100uM_ABA_Mutants_cDNA_P Parameter: Tissue Value: Aerial
  misc_feature: MA Experiment 20000070 PARAMETER Experiment Name: At_100uM_ABA_Mutants_cDNA_P Parameter: Treatment Value: 100uM ABA vs. No Treatment
  misc_feature: MA Experiment ID: 20000087 Result: Down-regulated in Transcription
  misc_feature: MA Experiment 20000087 PARAMETER Experiment Name: At_100uM_ABA_Mutants_cDNA_P Parameter: Plant Line Value: WS
  misc_feature: MA Experiment 20000087 PARAMETER Experiment Name: At_100uM_ABA_Mutants_cDNA_P Parameter: Timepoint (hr) Value: 6
  misc_feature: MA Experiment 20000087 PARAMETER Experiment Name: At_100uM_ABA_Mutants_cDNA_P Parameter: Tissue Value: Aerial
  misc_feature: MA Experiment 20000087 PARAMETER Experiment Name: At_100uM_ABA_Mutants_cDNA_P Parameter: Treatment Value: 100uM ABA vs. No Treatment
  misc_feature: MA Experiment ID: 20000088 Result: Down-regulated in Transcription
  misc_feature: MA Experiment 20000088 PARAMETER Experiment Name: At_100uM_ABA_Mutants_cDNA_P Parameter: Plant Line Value: Landsberg
  misc_feature: MA Experiment 20000088 PARAMETER Experiment Name: At_100uM_ABA_Mutants_cDNA_P Parameter: Timepoint (hr) Value: 6
  misc_feature: MA Experiment 20000088 PARAMETER Experiment Name: At_100uM_ABA_Mutants_cDNA_P Parameter: Tissue Value: Aerial
  misc_feature: MA Experiment 20000088 PARAMETER Experiment Name: At_100uM_ABA_Mutants_cDNA_P Parameter: Treatment Value: 100uM ABA vs. No Treatment
  misc_feature: MA Experiment ID: 20000090 Result: Down-regulated in Transcription
  misc_feature: MA Experiment ID: 20000111 Result: Down-regulated in Transcription
  misc_feature: MA Experiment 20000111 PARAMETER Experiment Name: At_42deg_Heat_cDNA_P Parameter: Temperature (deg C) Value: 42 vs. 22
  misc_feature: MA Experiment 20000111 PARAMETER Experiment Name: At_42deg_Heat_cDNA_P Parameter: Timepoint (hr) Value: 6
  misc_feature: MA Experiment 20000111 PARAMETER Experiment Name: At_42deg_Heat_cDNA_P Parameter: Tissue Value: Aerial
  misc_feature: MA Experiment ID: 20000113 Result: Down-regulated in Transcription
  misc_feature: MA Experiment 20000113 PARAMETER Experiment Name: At_42deg_Heat_cDNA_P Parameter: Temperature (deg C) Value: 42 vs. 22
  misc_feature: MA Experiment 20000113 PARAMETER Experiment Name: At_42deg_Heat_cDNA_P Parameter: Timepoint (hr) Value: 8
  misc_feature: MA Experiment 20000113 PARAMETER Experiment Name: At_42deg_Heat_cDNA_P Parameter: Tissue Value: Aerial
  misc_feature: MA Experiment ID: 20000185 Result: Up-regulated in Transcription
  misc_feature: MA Experiment 20000185 PARAMETER Experiment Name: At_Roots__P Parameter: Age (day) Value: 7 vs. 21
  misc_feature: MA Experiment 20000185 PARAMETER Experiment Name: At_Roots__P Parameter: Organism Value: A. thaliana
  misc_feature: MA Experiment 20000185 PARAMETER Experiment Name: At_Roots__P Parameter: Tissue Value: Roots vs. Whole Plant
  misc_feature: MA Experiment ID: 20000437 Result: Down-regulated in Transcription
  misc_feature: MA Experiment 20000437 PARAMETER Experiment Name: At_Drought_P Parameter: Age (day) Value: 8
  misc_feature: MA Experiment 20000437 PARAMETER Experiment Name: At_Drought_P Parameter: Organism Value: A. thaliana
  misc_feature: MA Experiment 20000437 PARAMETER Experiment Name: At_Drought_P Parameter: Plant Line Value: WS
  misc_feature: MA Experiment 20000437 PARAMETER Experiment Name: At_Drought_P Parameter: Timepoint (hr) Value: 24
  misc_feature: MA Experiment 20000437 PARAMETER Experiment Name: At_Drought_P Parameter: Tissue Value: Whole Plant
  misc_feature: MA Experiment 20000437 PARAMETER Experiment Name: At_Drought_P Parameter: Treatment Value: Drought vs. No Drought
  misc_feature: MA Experiment ID: 20000438 Result: Up-regulated in Transcription
  misc_feature: MA Experiment 20000438 PARAMETER Experiment Name: At_Shoots__P Parameter: Age (day) Value: 14
  misc_feature: MA Experiment 20000438 PARAMETER Experiment Name: At_Shoots__P Parameter: Tissue Value: Shoots vs. Whole Plant
  misc_feature: MA Experiment ID: 20000527 Result: Down-regulated in Transcription
  misc_feature: MA Experiment 20000527 PARAMETER Experiment Name: At_10percent_PEG_P Parameter: Age (day) Value: 20
  misc_feature: MA Experiment 20000527 PARAMETER Experiment Name: At_10percent_PEG_P Parameter: Organism Value: A. thaliana
  misc_feature: MA Experiment 20000527 PARAMETER Experiment Name: At_10percent_PEG_P Parameter: Plant Line Value: WS
  misc_feature: MA Experiment 20000527 PARAMETER Experiment Name: At_10percent_PEG_P Parameter: Timepoint (day) Value: 20
  misc_feature: MA Experiment 20000527 PARAMETER Experiment Name: At_10percent_PEG_P Parameter: Tissue Value: Whole Plant
  misc_feature: MA Experiment 20000527 PARAMETER Experiment Name: At_10percent_PEG_P Parameter: Treatment Value: 10percent PEG vs. No Treatment
  misc_feature: MA Experiment ID: 20000573 Result: Down-regulated in Transcription
  misc_feature: MA Experiment 20000573 PARAMETER Experiment Name: At_100uM_ABA_Mutants__P Parameter: Organism Value: A. thaliana
  misc_feature: MA Experiment 20000573 PARAMETER Experiment Name: At_100uM_ABA_Mutants__P Parameter: Plant Line Value: CS22 vs. Ler wt
  misc_feature: MA Experiment 20000573 PARAMETER Experiment Name: At_100uM_ABA_Mutants__P Parameter: Timepoint (hr) Value: N/A
  misc_feature: MA Experiment 20000573 PARAMETER Experiment Name: At_100uM_ABA_Mutants__P Parameter: Tissue Value: Whole Plant
  misc_feature: MA Experiment 20000573 PARAMETER Experiment Name: At_100uM_ABA_Mutants__P Parameter: Treatment Value: None
  misc_feature: MA Experiment ID: 20000574 Result: Down-regulated in Transcription
  misc_feature: MA Experiment 20000574 PARAMETER Experiment Name: At_100uM_ABA_Mutants__P Parameter: Organism Value: A. thaliana
  misc_feature: MA Experiment 20000574 PARAMETER Experiment Name: At_100uM_ABA_Mutants__P Parameter: Plant Line Value: CS23 vs. Ler wt
  misc_feature: MA Experiment 20000574 PARAMETER Experiment Name: At_100uM_ABA_Mutants__P Parameter: Timepoint (hr) Value: N/A
  misc_feature: MA Experiment 20000574 PARAMETER Experiment Name: At_100uM_ABA_Mutants__P Parameter: Tissue Value: Whole Plant
  misc_feature: MA Experiment 20000574 PARAMETER Experiment Name: At_100uM_ABA_Mutants__P Parameter: Treatment Value: None
  misc_feature: MA Experiment ID: 20000794 Result: Down-regulated in Transcription
  misc_feature: MA Experiment 20000794 PARAMETER Experiment Name: At_Petals_P Parameter: Age (day) Value: 23-25 days
  misc_feature: MA Experiment 20000794 PARAMETER Experiment Name: At_Petals_P Parameter: Plant Line Value: WS
  misc_feature: MA Experiment 20000794 PARAMETER Experiment Name: At_Petals_P Parameter: Tissue Value: Petals vs. Whole plant
  misc_feature: MA Experiment ID: 20001450 Result: Up-regulated in Transcription
  misc_feature: MA Experiment 20001450 PARAMETER Experiment Name: At_Far-red-induction_P Parameter: Age (day) Value: 7
  misc_feature: MA Experiment 20001450 PARAMETER Experiment Name: At_Far-red-induction_P Parameter: Light Value: Far-red vs. White
  misc_feature: MA Experiment 20001450 PARAMETER Experiment Name: At_Far-red-induction_P Parameter: Organism Value: A. thaliana
  misc_feature: MA Experiment 20001450 PARAMETER Experiment Name: At_Far-red-induction_P Parameter: Plant Line Value: Columbia
  misc_feature: MA Experiment 20001450 PARAMETER Experiment Name: At_Far-red-induction_P Parameter: Timepoint (hr) Value: 8
  misc_feature: MA Experiment 20001450 PARAMETER Experiment Name: At_Far-red-induction_P Parameter: Tissue Value: Whole Plant
  misc_feature: MA Experiment ID: 20001555 Result: Down-regulated in Transcription
  misc_feature: MA Experiment 20001555 PARAMETER Experiment Name: At_Drought_Soil_Dry_P Parameter: Age (day) Value: 24
  misc_feature: MA Experiment 20001555 PARAMETER Experiment Name: At_Drought_Soil_Dry_P Parameter: Organism Value: A. thaliana
  misc_feature: MA Experiment 20001555 PARAMETER Experiment Name: At_Drought_Soil_Dry_P Parameter: Plant Line Value: WS
  misc_feature: MA Experiment 20001555 PARAMETER Experiment Name: At_Drought_Soil_Dry_P Parameter: Post Timepoint (hr) Value: None
  misc_feature: MA Experiment 20001555 PARAMETER Experiment Name: At_Drought_Soil_Dry_P Parameter: Post-Treatment Value: None
  misc_feature: MA Experiment 20001555 PARAMETER Experiment Name: At_Drought_Soil_Dry_P Parameter: Timepoint (day) Value: 10
  misc_feature: MA Experiment 20001555 PARAMETER Experiment Name: At_Drought_Soil_Dry_P Parameter: Treatment Value: Drought vs. No Drought
  misc_feature: MA Experiment ID: 20001556 Result: Down-regulated in Transcription
  misc_feature: MA Experiment 20001556 PARAMETER Experiment Name: At_Drought_Soil_Dry_P Parameter: Age (day) Value: 26
  misc_feature: MA Experiment 20001556 PARAMETER Experiment Name: At_Drought_Soil_Dry_P Parameter: Organism Value: A. thaliana
  misc_feature: MA Experiment 20001556 PARAMETER Experiment Name: At_Drought_Soil_Dry_P Parameter: Plant Line Value: WS
  misc_feature: MA Experiment 20001556 PARAMETER Experiment Name: At_Drought_Soil_Dry_P Parameter: Post Timepoint (hr) Value: None
  misc_feature: MA Experiment 20001556 PARAMETER Experiment Name: At_Drought_Soil_Dry_P Parameter: Post-Treatment Value: None
  misc_feature: MA Experiment 20001556 PARAMETER Experiment Name: At_Drought_Soil_Dry_P Parameter: Timepoint (day) Value: 12
  misc_feature: MA Experiment 20001556 PARAMETER Experiment Name: At_Drought_Soil_Dry_P Parameter: Treatment Value: Drought vs. No Drought
  misc_feature: MA Experiment ID: 20001557 Result: Down-regulated in Transcription
  misc_feature: MA Experiment 20001557 PARAMETER Experiment Name: At_Drought_Soil_Dry_P Parameter: Age (day) Value: 27
  misc_feature: MA Experiment 20001557 PARAMETER Experiment Name: At_Drought_Soil_Dry_P Parameter: Organism Value: A. thaliana
  misc_feature: MA Experiment 20001557 PARAMETER Experiment Name: At_Drought_Soil_Dry_P Parameter: Plant Line Value: WS
  misc_feature: MA Experiment 20001557 PARAMETER Experiment Name: At_Drought_Soil_Dry_P Parameter: Post Timepoint (hr) Value: 3
  misc_feature: MA Experiment 20001557 PARAMETER Experiment Name: At_Drought_Soil_Dry_P Parameter: Post-Treatment Value: Re-Water vs. No Drought
  misc_feature: MA Experiment 20001557 PARAMETER Experiment Name: At_Drought_Soil_Dry_P Parameter: Timepoint (day) Value: 13
  misc_feature: MA Experiment 20001557 PARAMETER Experiment Name: At_Drought_Soil_Dry_P Parameter: Treatment Value: Drought vs. No Drought
  misc_feature: MA Experiment ID: 20001558 Result: Down-regulated in Transcription
  misc_feature: MA Experiment 20001558 PARAMETER Experiment Name: At_Drought_Soil_Dry_P Parameter: Age (day) Value: 27
  misc_feature: MA Experiment 20001558 PARAMETER Experiment Name: At_Drought_Soil_Dry_P Parameter: Organism Value: A. thaliana
  misc_feature: MA Experiment 20001558 PARAMETER Experiment Name: At_Drought_Soil_Dry_P Parameter: Plant Line Value: WS
  misc_feature: MA Experiment 20001558 PARAMETER Experiment Name: At_Drought_Soil_Dry_P Parameter: Post Timepoint (hr) Value: 6
  misc_feature: MA Experiment 20001558 PARAMETER Experiment Name: At_Drought_Soil_Dry_P Parameter: Post-Treatment Value: Re-Water vs. No Drought
  misc_feature: MA Experiment 20001558 PARAMETER Experiment Name: At_Drought_Soil_Dry_P Parameter: Timepoint (day) Value: 13
  misc_feature: MA Experiment 20001558 PARAMETER Experiment Name: At_Drought_Soil_Dry_P Parameter: Treatment Value: Drought vs. No Drought
  misc_feature: MA Experiment ID: 20001559 Result: Down-regulated in Transcription
  misc_feature: MA Experiment 20001559 PARAMETER Experiment Name: At_Drought_Soil_Dry_P Parameter: Age (day) Value: 28
  misc_feature: MA Experiment 20001559 PARAMETER Experiment Name: At_Drought_Soil_Dry_P Parameter: Organism Value: A. thaliana
  misc_feature: MA Experiment 20001559 PARAMETER Experiment Name: At_Drought_Soil_Dry_P Parameter: Plant Line Value: WS
  misc_feature: MA Experiment 20001559 PARAMETER Experiment Name: At_Drought_Soil_Dry_P Parameter: Post Timepoint (hr) Value: 29
  misc_feature: MA Experiment 20001559 PARAMETER Experiment Name: At_Drought_Soil_Dry_P Parameter: Post-Treatment Value: Re-Water vs. No Drought
  misc_feature: MA Experiment 20001559 PARAMETER Experiment Name: At_Drought_Soil_Dry_P Parameter: Timepoint (day) Value: 14
  misc_feature: MA Experiment 20001559 PARAMETER Experiment Name: At_Drought_Soil_Dry_P Parameter: Treatment Value: Drought vs. No Drought
  misc_feature: MA Experiment ID: 20001560 Result: Down-regulated in Transcription
  misc_feature: MA Experiment 20001560 PARAMETER Experiment Name: At_Drought_Soil_Dry_P Parameter: Age (day) Value: 28
  misc_feature: MA Experiment 20001560 PARAMETER Experiment Name: At_Drought_Soil_Dry_P Parameter: Organism Value: A. thaliana
  misc_feature: MA Experiment 20001560 PARAMETER Experiment Name: At_Drought_Soil_Dry_P Parameter: Plant Line Value: WS
  misc_feature: MA Experiment 20001560 PARAMETER Experiment Name: At_Drought_Soil_Dry_P Parameter: Post Timepoint (hr) Value: None
  misc_feature: MA Experiment 20001560 PARAMETER Experiment Name: At_Drought_Soil_Dry_P Parameter: Post-Treatment Value: None
  misc_feature: MA Experiment 20001560 PARAMETER Experiment Name: At_Drought_Soil_Dry_P Parameter: Timepoint (day) Value: 14
  misc_feature: MA Experiment 20001560 PARAMETER Experiment Name: At_Drought_Soil_Dry_P Parameter: Treatment Value: Drought vs. No Drought
  misc_feature: MA Experiment ID: 20001905 Result: Down-regulated in Transcription
  misc_feature: MA Experiment 20001905 PARAMETER Experiment Name: At_Drought_Reproduction_P Parameter: Age (day) Value: 40
  misc_feature: MA Experiment 20001905 PARAMETER Experiment Name: At_Drought_Reproduction_P Parameter: Organism Value: A. thaliana
  misc_feature: MA Experiment 20001905 PARAMETER Experiment Name: At_Drought_Reproduction_P Parameter: Plant Line Value: WS
  misc_feature: MA Experiment 20001905 PARAMETER Experiment Name: At_Drought_Reproduction_P Parameter: Timepoint (day) Value: 10
  misc_feature: MA Experiment 20001905 PARAMETER Experiment Name: At_Drought_Reproduction_P Parameter: Tissue Value: Rosettes
  misc_feature: MA Experiment 20001905 PARAMETER Experiment Name: At_Drought_Reproduction_P Parameter: Treatment Value: Drought vs. No Drought
actaataattcgtttaaacgcaaagaccaacatggaagatcggtgcttgatcaagaacgatgtcactgaattgattggtaacacaccaatggtgtatctgaacaatgttgttgatggttgcgtggctcgtatcgctgcaaagcttgagatgatggagccttgttctagcgtcaaagacagaatcgcgtatagtatgatcaaagatgcagaagaaaaaggattgattactcccggaaagagtacattgatagagccaactgctggtaacaccgggattggtttagcttgcatgggagctgcaagaggctataaagtgatccttgtgatgccttcaactatgagcttagagagaagaatcattctgagggcactaggtgcagagcttcatctctcggaccagcgcataggccttaaaggaatgttggagaaaactgaagcgattttaagcaaaactcctggtggttacattccacaacaatttgaaaatcctgcaaaccccgagattcattaccgaaccacgggaccggaaatatggagagattcagccgggaaagtagatatattggtcgctggcgtagggactggtggaactgctactggagtagggaagttcctcaaggagcagaacaaagacatcaaggtttgtgtggtggaaccagtagaaagtccggtacttagcggaggtcaaccaggtccacatttgattcagggaattggctctggtatcgtcccattcaatttggacttaaccattgttgatgaaattattcaagtggcaggtgaagaggctattgaaacagccaagcttcttgccctcaaagaaggattactggtgggaatatcctctggagccgcagcagcggctgcgttaaaggttgcaaagcggccagaaaacgcggggaaactcattgtggtggtttttcctagtggaggagaacgttatttatcgactaaactgttcgattcgattagatatgaagcagagaatttgcctattgaatgaatgttggacgtgtgccggtttcgtgtgtaataagagacgttcgttccaagagtccaagatttcaatttgcttattactggtcaatgtgaaatgtataaaaagttgcatattcgattatgaataattttagttgactacttcc

SEQ ID NO: 41226 - protein, 333 aa, Arabidopsis thaliana
  peptide (1)..(333): Ceres Seq. ID no. 13492481
  misc_feature (21)..(310): Pfam Name: Pyridoxal-phosphate dependent enzyme Pfam Description: Pyridoxal-phosphate dependent enzyme
  misc_feature (11)..(333): Homolog of NCBI NO: 2493895 NR Description: Cysteine synthase (O-acetylserine sulfhydrylase)
  misc_feature (17)..(333): Homolog of NCBI NO: 38350579 NR Description: cysteine synthase [Nicotiana plumbaginifolia]
  misc_feature (12)..(333): Homolog of NCBI NO: 18397061 NR Description: cysteine synthase (O-acetylserine
  misc_feature (12)..(333): Homolog of NCBI NO: 12322845 NR Description: putative cysteine synthase; 39489-37437
  misc_feature (12)..(333): Homolog of NCBI NO: 21593263 NR Description: putative cysteine synthase [Arabidopsis thaliana]
  misc_feature (11)..(333): Homolog of NCBI NO: 15241112 NR Description: cysteine synthase (O-acetylserine
  misc_feature (3)..(333): Homolog of NCBI NO: 2245144 NR Description: O-acetylserine(thiol) lyase [Brassica juncea]
  misc_feature (11)..(333): Homolog of NCBI NO: 21553635 NR Description: cysteine synthase [Arabidopsis thaliana]
  misc_feature (11)..(333): Homolog of NCBI NO: 15241111 NR Description: cysteine synthase (O-acetylserine
LIIRLNAKTNMEDRCLIKNDVTELIGNTPMVYLNNVVDGCVARIAAKLEMMEPCSSVKDRIAYSMIKDAEEKGLITPGKSTLIEPTAGNTGIGLACMGAARGYKVILVMPSTMSLERRIILRALGAELHLSDQRIGLKGMLEKTEAILSKTPGGYIPQQFENPANPEIHYRTTGPEIWRDSAGKVDILVAGVGTGGTATGVGKFLKEQNKDIKVCVVEPVESPVLSGGQPGPHLIQGIGSGIVPFNLDLTIVDEIIQVAGEEAIETAKLLALKEGLLVGISSGAAAAAALKVAKRPENAGKLIVVVFPSGGERYLSTKLFDSIRYEAENLPIE

SEQ ID NO: 41227 - protein, 323 aa, Arabidopsis thaliana
  peptide (1)..(323): Ceres Seq. ID no. 13492482
  misc_feature (11)..(300): Pfam Name: Pyridoxal-phosphate dependent enzyme Pfam Description: Pyridoxal-phosphate dependent enzyme
  misc_feature (1)..(323): Homolog of NCBI NO: 2493895 NR Description: Cysteine synthase (O-acetylserine sulfhydrylase)
  misc_feature (7)..(323): Homolog of NCBI NO: 38350579 NR Description: cysteine synthase [Nicotiana plumbaginifolia]
  misc_feature (2)..(323): Homolog of NCBI NO: 18397061 NR Description: cysteine synthase (O-acetylserine
  misc_feature (2)..(323): Homolog of NCBI NO: 12322845 NR Description: putative cysteine synthase; 39489-37437
  misc_feature (2)..(323): Homolog of NCBI NO: 21593263 NR Description: putative cysteine synthase [Arabidopsis thaliana]
  misc_feature (1)..(323): Homolog of NCBI NO: 15241112 NR Description: cysteine synthase (O-acetylserine
  misc_feature (1)..(323): Homolog of NCBI NO: 2245144 NR Description: O-acetylserine(thiol) lyase [Brassica juncea]
  misc_feature (1)..(323): Homolog of NCBI NO: 21553635 NR Description: cysteine synthase [Arabidopsis thaliana]
  misc_feature (1)..(323): Homolog of NCBI NO: 15241111 NR Description: cysteine synthase (O-acetylserine
MEDRCLIKNDVTELIGNTPMVYLNNVVDGCVARIAAKLEMMEPCSSVKDRIAYSMIKDAEEKGLITPGKSTLIEPTAGNTGIGLACMGAARGYKVILVMPSTMSLERRIILRALGAELHLSDQRIGLKGMLEKTEAILSKTPGGYIPQQFENPANPEIHYRTTGPEIWRDSAGKVDILVAGVGTGGTATGVGKFLKEQNKDIKVCVVEPVESPVLSGGQPGPHLIQGIGSGIVPFNLDLTIVDEIIQVAGEEAIETAKLLALKEGLLVGISSGAAAAAALKVAKRPENAGKLIVVVFPSGGERYLSTKLFDSIRYEAENLPIE

SEQ ID NO: 41228 - protein, 304 aa, Arabidopsis thaliana
  peptide (1)..(304): Ceres Seq. ID no. 13492483
  misc_feature (1)..(281): Pfam Name: Pyridoxal-phosphate dependent enzyme Pfam Description: Pyridoxal-phosphate dependent enzyme
  misc_feature (1)..(304): Homolog of NCBI NO: 2493895 NR Description: Cysteine synthase (O-acetylserine sulfhydrylase)
  misc_feature (1)..(304): Homolog of NCBI NO: 38350579 NR Description: cysteine synthase [Nicotiana plumbaginifolia]
  misc_feature (1)..(304): Homolog of NCBI NO: 18397061 NR Description: cysteine synthase (O-acetylserine
  misc_feature (1)..(304): Homolog of NCBI NO: 12322845 NR Description: putative cysteine synthase; 39489-37437
  misc_feature (1)..(304): Homolog of NCBI NO: 21593263 NR Description: putative cysteine synthase [Arabidopsis thaliana]
  misc_feature (1)..(304): Homolog of NCBI NO: 15241112 NR Description: cysteine synthase (O-acetylserine
  misc_feature (1)..(304): Homolog of NCBI NO: 2245144 NR Description: O-acetylserine(thiol) lyase [Brassica juncea]
  misc_feature (1)..(304): Homolog of NCBI NO: 21553635 NR Description: cysteine synthase [Arabidopsis thaliana]
  misc_feature (1)..(304): Homolog of NCBI NO: 15241111 NR Description: cysteine synthase (O-acetylserine
MVYLNNVVDGCVARIAAKLEMMEPCSSVKDRIAYSMIKDAEEKGLITPGKSTLIEPTAGNTGIGLACMGAARGYKVILVMPSTMSLERRIILRALGAELHLSDQRIGLKGMLEKTEAILSKTPGGYIPQQFENPANPEIHYRTTGPEIWRDSAGKVDILVAGVGTGGTATGVGKFLKEQNKDIKVCVVEPVESPVLSGGQPGPHLIQGIGSGIVPFNLDLTIVDEIIQVAGEEAIETAKLLALKEGLLVGISSGAAAAAALKVAKRPENAGKLIVVVFPSGGERYLSTKLFDSIRYEAENLPIE

SEQ ID NO: 41229 - DNA, 1428 bp, Arabidopsis thaliana
  misc_feature (1)..(1428): Ceres Seq. ID no. 12384806
  misc_feature: MA Experiment ID: 20000173 Result: Down-regulated in Transcription
  misc_feature: MA Experiment 20000173 PARAMETER Experiment Name: At_42deg_Heat_P Parameter: Age (day) Value: 14
  misc_feature: MA Experiment 20000173 PARAMETER Experiment Name: At_42deg_Heat_P Parameter: Organism Value: A. thaliana
  misc_feature: MA Experiment 20000173 PARAMETER Experiment Name: At_42deg_Heat_P Parameter: Plant Line Value: WS
  misc_feature: MA Experiment 20000173 PARAMETER Experiment Name: At_42deg_Heat_P Parameter: Temperature (deg C) Value: 42 vs. 22
  misc_feature: MA Experiment 20000173 PARAMETER Experiment Name: At_42deg_Heat_P Parameter: Timepoint (hr) Value: 6
  misc_feature: MA Experiment 20000173 PARAMETER Experiment Name: At_42deg_Heat_P Parameter: Tissue Value: Aerial
  misc_feature: MA Experiment ID: 20000179 Result: Up-regulated in Transcription
  misc_feature: MA Experiment 20000179 PARAMETER Experiment Name: At_Germinating_Seeds_P Parameter: Age (hr) Value: 6 vs. 0
  misc_feature: MA Experiment 20000179 PARAMETER Experiment Name: At_Germinating_Seeds_P Parameter: Tissue Value: Germinating Seeds
  misc_feature: MA Experiment ID: 20000180 Result: Up-regulated in Transcription
  misc_feature: MA Experiment 20000180 PARAMETER Experiment Name: At_Germinating_Seeds_P Parameter: Age (hr) Value: 24 vs. 0
  misc_feature: MA Experiment 20000180 PARAMETER Experiment Name: At_Germinating_Seeds_P Parameter: Tissue Value: Germinating Seeds
  misc_feature: MA Experiment ID: 20000227 Result: Up-regulated in Transcription
  misc_feature: MA Experiment 20000227 PARAMETER Experiment Name: At_Root-Tips-vs-Tops_P Parameter: Tissue Value: Root Tips vs. Root Tops
  misc_feature: MA Experiment ID: 20000437 Result: Up-regulated in Transcription
  misc_feature: MA Experiment 20000437 PARAMETER Experiment Name: At_Drought_P Parameter: Age (day) Value: 8
  misc_feature: MA Experiment 20000437 PARAMETER Experiment Name: At_Drought_P Parameter: Organism Value: A. thaliana
  misc_feature: MA Experiment 20000437 PARAMETER Experiment Name: At_Drought_P Parameter: Plant Line Value: WS
  misc_feature: MA Experiment 20000437 PARAMETER Experiment Name: At_Drought_P Parameter: Timepoint (hr) Value: 24
  misc_feature: MA Experiment 20000437 PARAMETER Experiment Name: At_Drought_P Parameter: Tissue Value: Whole Plant
  misc_feature: MA Experiment 20000437 PARAMETER Experiment Name: At_Drought_P Parameter: Treatment Value: Drought vs. No Drought
  misc_feature: MA Experiment ID: 20001248 Result: Up-regulated in Transcription
  misc_feature: MA Experiment 20001248 PARAMETER Experiment Name: At_Far-red-induction_P Parameter: Age (day) Value: 7
  misc_feature: MA Experiment 20001248 PARAMETER Experiment Name: At_Far-red-induction_P Parameter: Light Value: Far-red vs. White
  misc_feature: MA Experiment 20001248 PARAMETER Experiment Name: At_Far-red-induction_P Parameter: Organism Value: A. thaliana
  misc_feature: MA Experiment 20001248 PARAMETER Experiment Name: At_Far-red-induction_P Parameter: Plant Line Value: Columbia
  misc_feature: MA Experiment 20001248 PARAMETER Experiment Name: At_Far-red-induction_P Parameter: Timepoint (hr) Value: 4
  misc_feature: MA Experiment 20001248 PARAMETER Experiment Name: At_Far-red-induction_P Parameter: Tissue Value: Whole Plant
  misc_feature: MA Experiment ID: 20001558 Result: Down-regulated in Transcription
  misc_feature: MA Experiment 20001558 PARAMETER Experiment Name: At_Drought_Soil_Dry_P Parameter: Age (day) Value: 27
  misc_feature: MA Experiment 20001558 PARAMETER Experiment Name: At_Drought_Soil_Dry_P Parameter: Organism Value: A. thaliana
  misc_feature: MA Experiment 20001558 PARAMETER Experiment Name: At_Drought_Soil_Dry_P Parameter: Plant Line Value: WS
  misc_feature: MA Experiment 20001558 PARAMETER Experiment Name: At_Drought_Soil_Dry_P Parameter: Post Timepoint (hr) Value: 6
  misc_feature: MA Experiment 20001558 PARAMETER Experiment Name: At_Drought_Soil_Dry_P Parameter: Post-Treatment Value: Re-Water vs. No Drought
  misc_feature: MA Experiment 20001558 PARAMETER Experiment Name: At_Drought_Soil_Dry_P Parameter: Timepoint (day) Value: 13
  misc_feature: MA Experiment 20001558 PARAMETER Experiment Name: At_Drought_Soil_Dry_P Parameter: Treatment Value: Drought vs. No Drought
aaagaaaccaaaagagtaaaacaaacacagagaagcttcttcttaaacgatgccgtactataccagagatgacaacgacgtcgacgatttcgatgagtttgatccaacgccgtacagtggtggttacgacatcacggtgatctacggccgtccgattccaccttccgatgagacttgttatcctctctcatctggtgtcgatgatgatttcgaatacgagagacctgaatttactcagatccatgagccttctgcttacggtgatgaagctcttaacacagagtacagtagctattctcgacccaagccacgacccgcatttcgacccgatcctggttatggatctgaatccggttatgggaggaaaccggaatctgagtacggatctggctatggtggacaaacggaggtggagtatggtcggagacctgagcagagttatggatctggttatggtggaaggacggagactgaatcggagtatggatctggtggtggtggaagaactgaggttgagtatggtaggagacctgaatcagggcttggatctggttatggtgggagatcggagtctgagtatgagcgtaagcctagctatggaaggtctgaggaacaagaagaaggttataggaagcctagctatggaagatctgaagaacaggaggaaggttacaggaagccaagttatggaagatctgaggagcaggaagaaggatatagaaagcctagctatggaagatctgaggaggaacaagaggaaggttataggaagcctagctatggaagatctgaggaacaagaggaaggaagttacaggaaacctagttatgggaggtctgatgatcaggtggagagttacattaagcctagctatggaagatctgaggaacaggaggagggaagttacaggaagcctagttatgggaggtctgaggaacaggaagaggggagttacaggaagcagcctagctatggccgtggcaatgacgatgatgatgatgagcagcgtaggaaccgttctggttctggtgatgatgaggaagggagctatggccgcaagaaatatggtggcaatgactctgatgaggatgaggagaagaagaagcaccgtcacaagcatcaccaccagaagcgtcgtgacgaagacgatgagtaaactaaaccctctctgtgctagagagtgtaatgagaatgtgtgtttgcttagcctcaaaaatctactaaataaagagctaagtcacatacctttctacataatatcttccgacgttggtgttgtgtttgtttgaatctctgtattattactacagagtcttcgtactggttcataataagacctttaagtggtattgggtcaccatgtaactgttgctactctgtttcgttttctatctatcgttttgtgttatgatttacttttctatcctt

SEQ ID NO: 41230 - protein, 373 aa, Arabidopsis thaliana; identical to SEQ ID NO: 30758
  peptide (1)..(373): Ceres Seq. ID no. 12384807
  misc_feature (1)..(373): Homolog of NCBI NO: 18421880 NR Description: putative protein

SEQ ID NO: 41231 - protein, 368 aa, Arabidopsis thaliana; identical to SEQ ID NO: 30759
  peptide (1)..(368): Ceres Seq. ID no. 12384808
  misc_feature (44)..(349): Pfam Name: High molecular weight glutenin subunit Pfam Description: High molecular weight glutenin subunit
  misc_feature (96)..(368): Homolog of NCBI NO: 15228587 NR Description: hypothetical protein; protein id: At3g29075.1
  misc_feature (150)..(365): Homolog of NCBI NO: 12580871 NR Description: hypothetical protein [Picea abies]
  misc_feature (51)..(343): Homolog of NCBI NO: 15228587 NR Description: hypothetical protein; protein id: At3g29075.1
  misc_feature (68)..(346): Homolog of NCBI NO: 6323826 NR Description: DNA damage inducible
  misc_feature (68)..(346): Homolog of NCBI NO: 171388 NR Description: DDR48 stress protein
  misc_feature (92)..(314): Homolog of NCBI NO: 12580871 NR Description: hypothetical protein [Picea abies]
  misc_feature (1)..(249): Homolog of NCBI NO: 21928162 NR Description: AT3g29075/MXE2_1 [Arabidopsis thaliana]
  misc_feature (1)..(283): Homolog of NCBI NO: 15228587 NR Description: hypothetical protein; protein id: At3g29075.1
  misc_feature (1)..(368): Homolog of NCBI NO: 24417262 NR Description: unknown [Arabidopsis thaliana]
  misc_feature (1)..(368): Homolog of NCBI NO: 9758332 NR Description: gene_id:MIJ24.6~ref|NP_013897.1~similar to

SEQ ID NO: 41232 - protein, 362 aa, Arabidopsis thaliana; identical to SEQ ID NO: 30760
  peptide (1)..(362): Ceres Seq. ID no. 12384809
  misc_feature (1)..(362): Homolog of NCBI NO: 18421880 NR Description: putative protein

SEQ ID NO: 41233 - DNA, 1487 bp, Arabidopsis thaliana
  misc_feature (1)..(1487): Ceres Seq. ID no. 12395245
  misc_feature: MA Experiment ID: 108434 Result: Down-regulated in Transcription
  misc_feature: MA Experiment 108434 PARAMETER Experiment Name: At_Root_Tips_cDNA_P Parameter: Tissue Value: Root Tips
  misc_feature: MA Experiment ID: 108461 Result: Up-regulated in Transcription
  misc_feature: MA Experiment 108461 PARAMETER Experiment Name: At_Germinating_Seeds_cDNA_P Parameter: Age (day) Value: 1 vs. 0
  misc_feature: MA Experiment 108461 PARAMETER Experiment Name: At_Germinating_Seeds_cDNA_P Parameter: Tissue Value: Germinating Seeds
  misc_feature: MA Experiment ID: 108488 Result: Down-regulated in Transcription
  misc_feature: MA Experiment ID: 108561 Result: Up-regulated in Transcription
  misc_feature: MA Experiment 108561 PARAMETER Experiment Name: At_100uM_ABA_cDNA_P Parameter: Timepoint (hr) Value: 6
  misc_feature: MA Experiment 108561 PARAMETER Experiment Name: At_100uM_ABA_cDNA_P Parameter: Tissue Value: Aerial
  misc_feature: MA Experiment 108561 PARAMETER Experiment Name: At_100uM_ABA_cDNA_P Parameter: Treatment Value: 100uM ABA vs. No Treatment
  misc_feature: MA Experiment ID: 108572 Result: Up-regulated in Transcription
  misc_feature: MA Experiment 108572 PARAMETER Experiment Name: At_Drought_cDNA_P Parameter: Timepoint (hr) Value: 1
  misc_feature: MA Experiment 108572 PARAMETER Experiment Name: At_Drought_cDNA_P Parameter: Tissue Value: Aerial
  misc_feature: MA Experiment 108572 PARAMETER Experiment Name: At_Drought_cDNA_P Parameter: Treatment Value: Drought vs. No Drought
  misc_feature: MA Experiment ID: 108585 Result: Up-regulated in Transcription
  misc_feature: MA Experiment 108585 PARAMETER Experiment Name: At_5mM_NaNP_cDNA_P Parameter: Timepoint (hr) Value: 6
  misc_feature: MA Experiment 108585 PARAMETER Experiment Name: At_5mM_NaNP_cDNA_P Parameter: Tissue Value: Aerial
  misc_feature: MA Experiment 108585 PARAMETER Experiment Name: At_5mM_NaNP_cDNA_P Parameter: Treatment Value: null
  misc_feature: MA Experiment ID: 20000069 Result: Up-regulated in Transcription
  misc_feature: MA Experiment 20000069 PARAMETER Experiment Name: At_100uM_ABA_Mutants_cDNA_P Parameter: Plant Line Value: CS23
  misc_feature: MA Experiment 20000069 PARAMETER Experiment Name: At_100uM_ABA_Mutants_cDNA_P Parameter: Timepoint (hr) Value: 6
  misc_feature: MA Experiment 20000069 PARAMETER Experiment Name: At_100uM_ABA_Mutants_cDNA_P Parameter: Tissue Value: Aerial
  misc_feature: MA Experiment 20000069 PARAMETER Experiment Name: At_100uM_ABA_Mutants_cDNA_P Parameter: Treatment Value: 100uM ABA vs. No Treatment
  misc_feature: MA Experiment ID: 20000070 Result: Up-regulated in Transcription
  misc_feature: MA Experiment 20000070 PARAMETER Experiment Name: At_100uM_ABA_Mutants_cDNA_P Parameter: Plant Line Value: CS24
  misc_feature: MA Experiment 20000070 PARAMETER Experiment Name: At_100uM_ABA_Mutants_cDNA_P Parameter: Timepoint (hr) Value: 6
  misc_feature: MA Experiment 20000070 PARAMETER Experiment Name: At_100uM_ABA_Mutants_cDNA_P Parameter: Tissue Value: Aerial
  misc_feature: MA Experiment 20000070 PARAMETER Experiment Name: At_100uM_ABA_Mutants_cDNA_P Parameter: Treatment Value: 100uM ABA vs. No Treatment
  misc_feature: MA Experiment ID: 20000071 Result: Up-regulated in Transcription
  misc_feature: MA Experiment 20000071 PARAMETER Experiment Name: At_100uM_ABA_Mutants_cDNA_P Parameter: Plant Line Value: CS8104
  misc_feature: MA Experiment 20000071 PARAMETER Experiment Name: At_100uM_ABA_Mutants_cDNA_P Parameter: Timepoint (hr) Value: 6
  misc_feature: MA Experiment 20000071 PARAMETER Experiment Name: At_100uM_ABA_Mutants_cDNA_P Parameter: Tissue Value: Aerial
  misc_feature: MA Experiment 20000071 PARAMETER Experiment Name: At_100uM_ABA_Mutants_cDNA_P Parameter: Treatment Value: 100uM ABA vs. No Treatment
  misc_feature: MA Experiment ID: 20000086 Result: Up-regulated in Transcription
  misc_feature: MA Experiment 20000086 PARAMETER Experiment Name: At_100uM_ABA_Mutants_cDNA_P Parameter: Plant Line Value: CS22
  misc_feature: MA Experiment 20000086 PARAMETER Experiment Name: At_100uM_ABA_Mutants_cDNA_P Parameter: Timepoint (hr) Value: 6
  misc_feature: MA Experiment 20000086 PARAMETER Experiment Name: At_100uM_ABA_Mutants_cDNA_P Parameter: Tissue Value: Aerial
  misc_feature: MA Experiment 20000086 PARAMETER Experiment Name: At_100uM_ABA_Mutants_cDNA_P Parameter: Treatment Value: 100uM ABA vs. No Treatment
  misc_feature: MA Experiment ID: 20000087 Result: Up-regulated in Transcription
  misc_feature: MA Experiment 20000087 PARAMETER Experiment Name: At_100uM_ABA_Mutants_cDNA_P Parameter: Plant Line Value: WS
  misc_feature: MA Experiment 20000087 PARAMETER Experiment Name: At_100uM_ABA_Mutants_cDNA_P Parameter: Timepoint (hr) Value: 6
  misc_feature: MA Experiment 20000087 PARAMETER Experiment Name: At_100uM_ABA_Mutants_cDNA_P Parameter: Tissue Value: Aerial
  misc_feature: MA Experiment 20000087 PARAMETER Experiment Name: At_100uM_ABA_Mutants_cDNA_P Parameter: Treatment Value: 100uM ABA vs. No Treatment
  misc_feature: MA Experiment ID: 20000117 Result: Up-regulated in Transcription
  misc_feature: MA Experiment 20000117 PARAMETER Experiment Name: At_100uM_ABA_Mutants_cDNA_P Parameter: Plant Line Value: Columbia
  misc_feature: MA Experiment 20000117 PARAMETER Experiment Name: At_100uM_ABA_Mutants_cDNA_P Parameter: Timepoint (hr) Value: 6
  misc_feature: MA Experiment 20000117 PARAMETER Experiment Name: At_100uM_ABA_Mutants_cDNA_P Parameter: Tissue Value: Aerial
  misc_feature: MA Experiment 20000117 PARAMETER Experiment Name: At_100uM_ABA_Mutants_cDNA_P Parameter: Treatment Value: 100uM ABA vs. No Treatment
  misc_feature: MA Experiment ID: 20000180 Result: Up-regulated in Transcription
  misc_feature: MA Experiment 20000180 PARAMETER Experiment Name: At_Germinating_Seeds_P Parameter: Age (hr) Value: 24 vs. 0
  misc_feature: MA Experiment 20000180 PARAMETER Experiment Name: At_Germinating_Seeds_P Parameter: Tissue Value: Germinating Seeds
  misc_feature: MA Experiment ID: 20000182 Result: Up-regulated in Transcription
  misc_feature: MA Experiment 20000182 PARAMETER Experiment Name: At_2mM_SA_P Parameter: Age (day) Value: 14
  misc_feature: MA Experiment 20000182 PARAMETER Experiment Name: At_2mM_SA_P Parameter: Organism Value: A. thaliana
  misc_feature: MA Experiment 20000182 PARAMETER Experiment Name: At_2mM_SA_P Parameter: Plant Line Value: WS
  misc_feature: MA Experiment 20000182 PARAMETER Experiment Name: At_2mM_SA_P Parameter: Timepoint (hr) Value: 6
  misc_feature: MA Experiment 20000182 PARAMETER Experiment Name: At_2mM_SA_P Parameter: Tissue Value: Aerial
  misc_feature: MA Experiment 20000182 PARAMETER Experiment Name: At_2mM_SA_P Parameter: Treatment Value: 2mM SA vs. No Treatment
  misc_feature: MA Experiment ID: 20000185 Result: Up-regulated in Transcription
  misc_feature: MA Experiment 20000185 PARAMETER Experiment Name: At_Roots__P Parameter: Age (day) Value: 7 vs. 21
  misc_feature: MA Experiment 20000185 PARAMETER Experiment Name: At_Roots__P Parameter: Organism Value: A. thaliana
  misc_feature: MA Experiment 20000185 PARAMETER Experiment Name: At_Roots__P Parameter: Tissue Value: Roots vs. Whole Plant
  misc_feature: MA Experiment ID: 20000224 Result: Down-regulated in Transcription
  misc_feature: MA Experiment ID: 20000234 Result: Down-regulated in Transcription
  misc_feature: MA Experiment 20000234 PARAMETER Experiment Name: At_Siliques_P Parameter: Age (day) Value: 21
  misc_feature: MA Experiment 20000234 PARAMETER Experiment Name: At_Siliques_P Parameter: Organism Value: A. thaliana
  misc_feature: MA Experiment 20000234 PARAMETER Experiment Name: At_Siliques_P Parameter: Plant Line Value: WS
  misc_feature: MA Experiment 20000234 PARAMETER Experiment Name: At_Siliques_P Parameter: Tissue Value: Less Than 5mm Siliques vs. Whole Plant
  misc_feature: MA Experiment ID: 20000235 Result: Down-regulated in Transcription
  misc_feature: MA Experiment 20000235 PARAMETER Experiment Name: At_Siliques_P Parameter: Age (day) Value: 21
  misc_feature: MA Experiment 20000235 PARAMETER Experiment Name: At_Siliques_P Parameter: Organism Value: A. thaliana
  misc_feature: MA Experiment 20000235 PARAMETER Experiment Name: At_Siliques_P Parameter: Plant Line Value: WS
  misc_feature: MA Experiment 20000235 PARAMETER Experiment Name: At_Siliques_P Parameter: Tissue Value: 5-10mm Siliques vs. Whole Plant
  misc_feature: MA Experiment ID: 20000265 Result: Down-regulated in Transcription
  misc_feature: MA Experiment 20000265 PARAMETER Experiment Name: At_Open_Flower_P Parameter: Age (day) Value: 21
  misc_feature: MA Experiment 20000265 PARAMETER Experiment Name: At_Open_Flower_P Parameter: Plant Line Value: WS
  misc_feature: MA Experiment 20000265 PARAMETER Experiment Name: At_Open_Flower_P Parameter: Tissue Value: Closed Flower vs. Whole Plant
  misc_feature: MA Experiment ID: 20000286 Result: Down-regulated in Transcription
  misc_feature: MA Experiment 20000286 PARAMETER Experiment Name: At_Open_Flower_P Parameter: Age (day) Value: 21
  misc_feature: MA Experiment 20000286 PARAMETER Experiment Name: At_Open_Flower_P Parameter: Plant Line Value: WS
  misc_feature: MA Experiment 20000286 PARAMETER Experiment Name: At_Open_Flower_P Parameter: Tissue Value: Half Open vs. Whole Plant
  misc_feature: MA Experiment ID: 20000438 Result: Down-regulated in Transcription
  misc_feature: MA Experiment 20000438 PARAMETER Experiment Name: At_Shoots__P Parameter: Age (day) Value: 14
  misc_feature: MA Experiment 20000438 PARAMETER Experiment Name: At_Shoots__P Parameter: Tissue Value: Shoots vs. Whole Plant
  misc_feature: MA Experiment ID: 20000439 Result: Up-regulated in Transcription
  misc_feature: MA Experiment 20000439 PARAMETER Experiment Name: At_Roots__P Parameter: Age (day) Value: 14 vs. 21
  misc_feature: MA Experiment 20000439 PARAMETER Experiment Name: At_Roots__P Parameter: Organism Value: A. thaliana
  misc_feature: MA Experiment 20000439 PARAMETER Experiment Name: At_Roots__P Parameter: Tissue Value: Roots vs. Whole Plant
  misc_feature: MA Experiment ID: 20000495 Result: Down-regulated in Transcription
  misc_feature: MA Experiment 20000495 PARAMETER Experiment Name: At_Guard_Cells_P Parameter: Harvest Date Value: 8/2/2002
  misc_feature: MA Experiment 20000495 PARAMETER Experiment Name: At_Guard_Cells_P Parameter: Organism Value: A. thaliana
  misc_feature: MA Experiment 20000495 PARAMETER Experiment Name: At_Guard_Cells_P Parameter: Tissue Value: Guard Cells vs. Leaves
  misc_feature: MA Experiment ID: 20001558 Result: Down-regulated in Transcription
  misc_feature: MA Experiment 20001558 PARAMETER Experiment Name: At_Drought_Soil_Dry_P Parameter: Age (day) Value: 27
  misc_feature: MA Experiment 20001558 PARAMETER Experiment Name: At_Drought_Soil_Dry_P Parameter: Organism Value: A. thaliana
  misc_feature: MA Experiment 20001558 PARAMETER Experiment Name: At_Drought_Soil_Dry_P Parameter: Plant Line Value: WS
  misc_feature: MA Experiment 20001558 PARAMETER Experiment Name: At_Drought_Soil_Dry_P Parameter: Post Timepoint (hr) Value: 6
  misc_feature: MA Experiment 20001558 PARAMETER Experiment Name: At_Drought_Soil_Dry_P Parameter: Post-Treatment Value: Re-Water vs. No Drought
  misc_feature: MA Experiment 20001558 PARAMETER Experiment Name: At_Drought_Soil_Dry_P Parameter: Timepoint (day) Value: 13
  misc_feature: MA Experiment 20001558 PARAMETER Experiment Name: At_Drought_Soil_Dry_P Parameter: Treatment Value: Drought vs. No Drought
  misc_feature: MA Experiment ID: 20001560 Result: Down-regulated in Transcription
  misc_feature: MA Experiment 20001560 PARAMETER Experiment Name: At_Drought_Soil_Dry_P Parameter: Age (day) Value: 28
  misc_feature: MA Experiment 20001560 PARAMETER Experiment Name: At_Drought_Soil_Dry_P Parameter: Organism Value: A. thaliana
  misc_feature: MA Experiment 20001560 PARAMETER Experiment Name: At_Drought_Soil_Dry_P Parameter: Plant Line Value: WS
  misc_feature: MA Experiment 20001560 PARAMETER Experiment Name: At_Drought_Soil_Dry_P Parameter: Post Timepoint (hr) Value: None
  misc_feature: MA Experiment 20001560 PARAMETER Experiment Name: At_Drought_Soil_Dry_P Parameter: Post-Treatment Value: None
  misc_feature: MA Experiment 20001560 PARAMETER Experiment Name: At_Drought_Soil_Dry_P Parameter: Timepoint (day) Value: 14
  misc_feature: MA Experiment 20001560 PARAMETER Experiment Name: At_Drought_Soil_Dry_P Parameter: Treatment Value: Drought vs. No Drought
  misc_feature: MA Experiment ID: 20001905 Result: Up-regulated in Transcription
  misc_feature: MA Experiment 20001905 PARAMETER Experiment Name: At_Drought_Reproduction_P Parameter: Age (day) Value: 40
  misc_feature: MA Experiment 20001905 PARAMETER Experiment Name: At_Drought_Reproduction_P Parameter: Organism Value: A. thaliana
  misc_feature: MA Experiment 20001905 PARAMETER Experiment Name: At_Drought_Reproduction_P Parameter: Plant Line Value: WS
  misc_feature: MA Experiment 20001905 PARAMETER Experiment Name: At_Drought_Reproduction_P Parameter: Timepoint (day) Value: 10
  misc_feature: MA Experiment 20001905 PARAMETER Experiment Name: At_Drought_Reproduction_P Parameter: Tissue Value: Rosettes
  misc_feature: MA Experiment 20001905 PARAMETER Experiment Name: At_Drought_Reproduction_P Parameter: Treatment Value: Drought vs. No Drought
  misc_feature: MA Experiment ID: 20001906 Result: Up-regulated in Transcription
  misc_feature: MA Experiment 20001906 PARAMETER Experiment Name: At_Drought_Reproduction_P Parameter: Age (day) Value: 35
  misc_feature: MA Experiment 20001906 PARAMETER Experiment Name: At_Drought_Reproduction_P Parameter: Organism Value: A. thaliana
  misc_feature: MA Experiment 20001906 PARAMETER Experiment Name: At_Drought_Reproduction_P Parameter: Plant Line Value: WS
  misc_feature: MA Experiment 20001906 PARAMETER Experiment Name: At_Drought_Reproduction_P Parameter: Timepoint (day) Value: 5
  misc_feature: MA Experiment 20001906 PARAMETER Experiment Name: At_Drought_Reproduction_P Parameter: Tissue Value: Siliques
  misc_feature: MA Experiment 20001906 PARAMETER Experiment Name: At_Drought_Reproduction_P Parameter: Treatment Value: Drought vs. No Drought
atacttttattttcatttcctttaactgcatagttcttcctcaaattgctcatacctttgcttctctttctttctttattcaacctcttatttcttcttcagcaccaacgtgtatctgcagtaaacacatatccatcgatcgatctcctcaaaaagttattgttttcttgaaggatttttcttgttcttgatcaagcatacatatatatagatggtggaagaaggcggcgtagttgtgaatcaaggaggagatcaggaggtggtggatttgcctccggggtttcggtttcaccctactgatgaagagataataactcactacctcaaagagaaggtcttcaacatccgatttaccgcggcagcgattggtcaagccgacctcaacaagaacgagccatgggatctaccaaagattgcaaagatgggggagaaggagttttactttttctgccagagggatcggaagtatccgaccgggatgaggacgaaccgtgcgaccgtgtctggttattggaaggcgaccgggaaggacaaggagatctttagaggcaaaggttgtcttgttgggatgaagaaaacacttgttttctatacaggaagagctccaaaaggtgaaaagaccaattgggttatgcatgaatatcgtcttgatggaaaatattcttatcataacctccccaaaaccgcaagggatgaatgggtggtgtgtagggtttttcacaagaacgctcctagtactacaatcactactacaaaacaactctcaaggattgattctcttgataacattgatcatctcttagacttctcatctctccctcctctcatagatccgggtttcttgggtcaacccggcccaagcttctccggtgcccgtcaacaacacgatctcaaacctgttctccaccatcctacaaccgcaccagtcgacaacacttaccttcctacccaagctctcaatttcccttaccactcggtccataattccggatctgatttcggctacggggcaggttcaggcaataataacaaaggtatgatcaagttggagcattctcttgtgagtgtgtctcaagaaaccggtttgagttccgatgtgaacacaaccgcaacgccagagatatcttcttatccaatgatgatgaatccggcaatgatggatggtagcaagtcagcgtgtgatggtcttgatgacttgatcttctgggaagatttatatactagctaaatttgggaaaaggttatttgttaattgtgattgaagagtggcatattgattactcgtctagtgtttttaatcgtgtaattagttcgtatataatatacatgtacataagatcattaggtttattaggcattggactttagttcggtgattgcttacctagtttttagcttgagaaaaaaggctgtcattggggttatgtttctttgtgattaacttgtacatatatacatttaaattattcgtatggtttatttcgttt

SEQ ID NO: 41234 - protein, 338 aa, Arabidopsis thaliana
  peptide (1)..(338): Ceres Seq. ID no. 12395246
  misc_feature (20)..(147): Pfam Name: No apical meristem (NAM) protein Pfam Description: No apical meristem (NAM) protein
  misc_feature (14)..(298): Homolog of NCBI NO: 15240252 NR Description: NAM, no apical meristem, - like protein
  misc_feature (14)..(299): Homolog of NCBI NO: 30682048 NR Description: NAM (no apical meristem)-related protein
  misc_feature (1)..(333): Homolog of NCBI NO: 30686737 NR Description: NAM (no apical meristem)-related protein
  misc_feature (1)..(333): Homolog of NCBI NO: 9758909 NR Description: NAM (no apical meristem)-like protein
  misc_feature (1)..(338): Homolog of NCBI NO: 15229219 NR Description: NAM-like protein (no apical meristem)
MVEEGGVVVNQGGDQEVVDLPPGFRFHPTDEEIITHYLKEKVFNIRFTAAAIGQADLNKNEPWDLPKIAKMGEKEFYFFCQRDRKYPTGMRTNRATVSGYWKATGKDKEIFRGKGCLVGMKKTLVFYTGRAPKGEKTNWVMHEYRLDGKYSYHNLPKTARDEWVVCRVFHKNAPSTTITTTKQLSRIDSLDNIDHLLDFSSLPPLIDPGFLGQPGPSFSGARQQHDLKPVLHHPTTAPVDNTYLPTQALNFPYHSVHNSGSDFGYGAGSGNNNKGMIKLEHSLVSVSQETGLSSDVNTTATPEISSYPMMMNPAMMDGSKSACDGLDDLIFWEDLYTS

SEQ ID NO: 41235 - protein, 268 aa, Arabidopsis thaliana
  peptide (1)..(268): Ceres Seq. ID no. 12395247
  misc_feature (1)..(77): Pfam Name: No apical meristem (NAM) protein Pfam Description: No apical meristem (NAM) protein
  misc_feature (1)..(228): Homolog of NCBI NO: 15240252 NR Description: NAM, no apical meristem, - like protein
  misc_feature (1)..(229): Homolog of NCBI NO: 30682048 NR Description: NAM (no apical meristem)-related protein
  misc_feature (1)..(263): Homolog of NCBI NO: 30686737 NR Description: NAM (no apical meristem)-related protein
  misc_feature (1)..(263): Homolog of NCBI NO: 9758909 NR Description: NAM (no apical meristem)-like protein
  misc_feature (1)..(268): Homolog of NCBI NO: 15229219 NR Description: NAM-like protein (no apical meristem)
MGEKEFYFFCQRDRKYPTGMRTNRATVSGYWKATGKDKEIFRGKGCLVGMKKTLVFYTGRAPKGEKTNWVMHEYRLDGKYSYHNLPKTARDEWVVCRVFHKNAPSTTITTTKQLSRIDSLDNIDHLLDFSSLPPLIDPGFLGQPGPSFSGARQQHDLKPVLHHPTTAPVDNTYLPTQALNFPYHSVHNSGSDFGYGAGSGNNNKGMIKLEHSLVSVSQETGLSSDVNTTATPEISSYPMMMNPAMMDGSKSACDGLDDLIFWEDLYTS

SEQ ID NO: 41236 - protein, 249 aa, Arabidopsis thaliana
  peptide (1)..(249): Ceres Seq. ID no. 12395248
  misc_feature (1)..(58): Pfam Name: No apical meristem (NAM) protein Pfam Description: No apical meristem (NAM) protein
  misc_feature (1)..(209): Homolog of NCBI NO: 15240252 NR Description: NAM, no apical meristem, - like protein
  misc_feature (1)..(210): Homolog of NCBI NO: 30682048 NR Description: NAM (no apical meristem)-related protein
  misc_feature (1)..(244): Homolog of NCBI NO: 30686737 NR Description: NAM (no apical meristem)-related protein
  misc_feature (1)..(244): Homolog of NCBI NO: 9758909 NR Description: NAM (no apical meristem)-like protein
  misc_feature (1)..(249): Homolog of NCBI NO: 15229219 NR Description: NAM-like protein (no apical meristem)
MRTNRATVSGYWKATGKDKEIFRGKGCLVGMKKTLVFYTGRAPKGEKTNWVMHEYRLDGKYSYHNLPKTARDEWVVCRVFHKNAPSTTITTTKQLSRIDSLDNIDHLLDFSSLPPLIDPGFLGQPGPSFSGARQQHDLKPVLHHPTTAPVDNTYLPTQALNFPYHSVHNSGSDFGYGAGSGNNNKGMIKLEHSLVSVSQETGLSSDVNTTATPEISSYPMMMNPAMMDGSKSACDGLDDLIFWEDLYTS

SEQ ID NO: 41237 - DNA, 5087 bp, Arabidopsis thaliana
  misc_feature (1)..(5087): Ceres Seq. ID no. 12395233
  misc_feature: MA Experiment ID: 108573 Result: Up-regulated in Transcription
  misc_feature: MA Experiment 108573 PARAMETER Experiment Name: At_Drought_cDNA_P Parameter: Timepoint (hr) Value: 6
  misc_feature: MA Experiment 108573 PARAMETER Experiment Name: At_Drought_cDNA_P Parameter: Tissue Value: Aerial
  misc_feature: MA Experiment 108573 PARAMETER Experiment Name: At_Drought_cDNA_P Parameter: Treatment Value: Drought vs. No Drought
  misc_feature: MA Experiment ID: 108579 Result: Down-regulated in Transcription
  misc_feature: MA Experiment 108579 PARAMETER Experiment Name: At_4deg_Cold_cDNA_P Parameter: Temperature (deg C) Value: 4 vs. 22
  misc_feature: MA Experiment 108579 PARAMETER Experiment Name: At_4deg_Cold_cDNA_P Parameter: Timepoint (hr) Value: 6
  misc_feature: MA Experiment 108579 PARAMETER Experiment Name: At_4deg_Cold_cDNA_P Parameter: Tissue Value: Aerial
  misc_feature: MA Experiment ID: 20000184 Result: Down-regulated in Transcription
  misc_feature: MA Experiment 20000184 PARAMETER Experiment Name: At_Shoots__P Parameter: Age (day) Value: 7
  misc_feature: MA Experiment 20000184 PARAMETER Experiment Name: At_Shoots__P Parameter: Tissue Value: Shoots vs. Whole Plant
  misc_feature: MA Experiment ID: 20000265 Result: Up-regulated in Transcription
  misc_feature: MA Experiment 20000265 PARAMETER Experiment Name: At_Open_Flower_P Parameter: Age (day) Value: 21
  misc_feature: MA Experiment 20000265 PARAMETER Experiment Name: At_Open_Flower_P Parameter: Plant Line Value: WS
  misc_feature: MA Experiment 20000265 PARAMETER Experiment Name: At_Open_Flower_P Parameter: Tissue Value: Closed Flower vs. Whole Plant
  misc_feature: MA Experiment ID: 20000437 Result: Up-regulated in Transcription
  misc_feature: MA Experiment 20000437 PARAMETER Experiment Name: At_Drought_P Parameter: Age (day) Value: 8
  misc_feature: MA Experiment 20000437 PARAMETER Experiment Name: At_Drought_P Parameter: Organism Value: A. thaliana
  misc_feature: MA Experiment 20000437 PARAMETER Experiment Name: At_Drought_P Parameter: Plant Line Value: WS
  misc_feature: MA Experiment 20000437 PARAMETER Experiment Name: At_Drought_P Parameter: Timepoint (hr) Value: 24
  misc_feature: MA Experiment 20000437 PARAMETER Experiment Name: At_Drought_P Parameter: Tissue Value: Whole Plant
  misc_feature: MA Experiment 20000437 PARAMETER Experiment Name: At_Drought_P Parameter: Treatment Value: Drought vs. No Drought
  misc_feature: MA Experiment ID: 20000495 Result: Up-regulated in Transcription
  misc_feature: MA Experiment 20000495 PARAMETER Experiment Name: At_Guard_Cells_P Parameter: Harvest Date Value: 8/2/2002
  misc_feature: MA Experiment 20000495 PARAMETER Experiment Name: At_Guard_Cells_P Parameter: Organism Value: A. thaliana
  misc_feature: MA Experiment 20000495 PARAMETER Experiment Name: At_Guard_Cells_P Parameter: Tissue Value: Guard Cells vs. Leaves
  misc_feature: MA Experiment ID: 20000794 Result: Up-regulated in Transcription
  misc_feature: MA Experiment 20000794 PARAMETER Experiment Name: At_Petals_P Parameter: Age (day) Value: 23-25 days
  misc_feature: MA Experiment 20000794 PARAMETER Experiment Name: At_Petals_P Parameter: Plant Line Value: WS
  misc_feature: MA Experiment 20000794 PARAMETER Experiment Name: At_Petals_P Parameter: Tissue Value: Petals vs. Whole plant
  misc_feature: MA Experiment ID: 20001248 Result: Up-regulated in Transcription
  misc_feature: MA Experiment 20001248 PARAMETER Experiment Name: At_Far-red-induction_P Parameter: Age (day) Value: 7
  misc_feature: MA Experiment 20001248 PARAMETER Experiment Name: At_Far-red-induction_P Parameter: Light Value: Far-red vs. White
  misc_feature: MA Experiment 20001248 PARAMETER Experiment Name: At_Far-red-induction_P Parameter: Organism Value: A. thaliana
  misc_feature: MA Experiment 20001248 PARAMETER Experiment Name: At_Far-red-induction_P Parameter: Plant Line Value: Columbia
  misc_feature: MA Experiment 20001248 PARAMETER Experiment Name: At_Far-red-induction_P Parameter: Timepoint (hr) Value: 4
  misc_feature: MA Experiment 20001248 PARAMETER Experiment Name: At_Far-red-induction_P Parameter: Tissue Value: Whole Plant
  misc_feature: MA Experiment ID: 20001450 Result: Up-regulated in Transcription
  misc_feature: MA Experiment 20001450 PARAMETER Experiment Name: At_Far-red-induction_P Parameter: Age (day) Value: 7
  misc_feature: MA Experiment 20001450 PARAMETER Experiment Name: At_Far-red-induction_P Parameter: Light Value: Far-red vs. White
  misc_feature: MA Experiment 20001450 PARAMETER Experiment Name: At_Far-red-induction_P Parameter: Organism Value: A. thaliana
  misc_feature: MA Experiment 20001450 PARAMETER Experiment Name: At_Far-red-induction_P Parameter: Plant Line Value: Columbia
  misc_feature: MA Experiment 20001450 PARAMETER Experiment Name: At_Far-red-induction_P Parameter: Timepoint (hr) Value: 8
  misc_feature: MA Experiment 20001450 PARAMETER Experiment Name: At_Far-red-induction_P Parameter: Tissue Value: Whole Plant
  misc_feature: MA Experiment ID: 20001557 Result: Down-regulated in Transcription
  misc_feature: MA Experiment 20001557 PARAMETER Experiment Name: At_Drought_Soil_Dry_P Parameter: Age (day) Value: 27
  misc_feature: MA Experiment 20001557 PARAMETER Experiment Name: At_Drought_Soil_Dry_P Parameter: Organism Value: A. thaliana
  misc_feature: MA Experiment 20001557 PARAMETER Experiment Name: At_Drought_Soil_Dry_P Parameter: Plant Line Value: WS
  misc_feature: MA Experiment 20001557 PARAMETER Experiment Name: At_Drought_Soil_Dry_P Parameter: Post Timepoint (hr) Value: 3
  misc_feature: MA Experiment 20001557 PARAMETER Experiment Name: At_Drought_Soil_Dry_P Parameter: Post-Treatment Value: Re-Water vs. No Drought
  misc_feature: MA Experiment 20001557 PARAMETER Experiment Name: At_Drought_Soil_Dry_P Parameter: Timepoint (day) Value: 13
  misc_feature: MA Experiment 20001557 PARAMETER Experiment Name: At_Drought_Soil_Dry_P Parameter: Treatment Value: Drought vs. No Drought
  misc_feature: MA Experiment ID: 20001558 Result: Down-regulated in Transcription
  misc_feature: MA Experiment 20001558 PARAMETER Experiment Name: At_Drought_Soil_Dry_P Parameter: Age (day) Value: 27
  misc_feature: MA Experiment 20001558 PARAMETER Experiment Name: At_Drought_Soil_Dry_P Parameter: Organism Value: A. thaliana
  misc_feature: MA Experiment 20001558 PARAMETER Experiment Name: At_Drought_Soil_Dry_P Parameter: Plant Line Value: WS
  misc_feature: MA Experiment 20001558 PARAMETER Experiment Name: At_Drought_Soil_Dry_P Parameter: Post Timepoint (hr) Value: 6
  misc_feature: MA Experiment 20001558 PARAMETER Experiment Name: At_Drought_Soil_Dry_P Parameter: Post-Treatment Value: Re-Water vs. No Drought
  misc_feature: MA Experiment 20001558 PARAMETER Experiment Name: At_Drought_Soil_Dry_P Parameter: Timepoint (day) Value: 13
  misc_feature: MA Experiment 20001558 PARAMETER Experiment Name: At_Drought_Soil_Dry_P Parameter: Treatment Value: Drought vs. No Drought
  misc_feature: MA Experiment ID: 20001757 Result: Down-regulated in Transcription
  misc_feature: MA Experiment 20001757 PARAMETER Experiment Name: At_50mM_NH4NO3_L-to-H_P Parameter: Timepoint (hr) Value: 6
  misc_feature: MA Experiment 20001757 PARAMETER Experiment Name: At_50mM_NH4NO3_L-to-H_P Parameter: Tissue Value: Leaf
  misc_feature: MA Experiment 20001757 PARAMETER Experiment Name: At_50mM_NH4NO3_L-to-H_P Parameter: Treatment Value: 50mM NH4NO3 vs 100mM Mannitol
  misc_feature: MA Experiment ID: 20001911 Result: Up-regulated in Transcription
  misc_feature: MA Experiment 20001911 PARAMETER Experiment Name: At_Drought_Reproduction_P Parameter: Age (day) Value: 40
  misc_feature: MA Experiment 20001911 PARAMETER Experiment Name: At_Drought_Reproduction_P Parameter: Organism Value: A. thaliana
  misc_feature: MA Experiment 20001911 PARAMETER Experiment Name: At_Drought_Reproduction_P Parameter: Plant Line Value: WS
  misc_feature: MA Experiment 20001911 PARAMETER Experiment Name: At_Drought_Reproduction_P Parameter: Timepoint (day) Value: 10
  misc_feature: MA Experiment 20001911 PARAMETER Experiment Name: At_Drought_Reproduction_P Parameter: Tissue Value: Flowers
  misc_feature: MA Experiment 20001911 PARAMETER Experiment Name: At_Drought_Reproduction_P Parameter: Treatment Value: Drought vs. No Drought
aaattgatctcatcttcaatcaaattcatcatcttcgatactcgtttcttctctctttggtttcatacagatcccaaatttctagggctcctagtcctttgatttcttcgactggaatcgcaattccccactacgtcaagctggacagacaccgaagggatcgccatgagagtggcggctacgaggattcctaccataaccaccgagcccatcccagaggtccatctcgtccctcagattcacgcttcgaagaggatgatgatgattttcgccgccaccgtcgtcgtcgtggaagcagccctagcaattatcgaattggaattgggggcggaggaggaggtaatggtggtcgacgctgggaagatgacactcctaaggattttgatggtcccggagatggaggtttccggcagatgaatggtcccccagatagagtagattttaagcctatgggtcctcaccatggtggaagttttcggcctatggggtttgcctacgatgatggttttcgtccaatgggtcctaacggtggtgtgggaggagaagggacacggtcaattgttggagctcggtataactatcccgcgaagtatcctccttcagagagtccagacaggaggagatttatcggtaaagcaatggagtctgattattctgtaagaccgactacaccgccggtccagcagcctctttccggtcagaaaagagggtatcctatctcagaccatggcagctttactggaactgatgtctctgatcgtagcagtacagtcaagctttttgttggatctgtaccaaggacagctacagaagaagaaatccgtccctatttcgaacagcatggaaatgttctggaggttgctctgatcaaggacaagagaactggacagcagcaaggtatgtcaatctccattttattaggaaatagtcgtgaattatactttttaaaatttcaggtctccctgaaaaggctgatgggaagcaaccccagtctcatcattggcctccaattgtttgcaacaattttcgggcttattgcttatgcttgccagcgtcttatctgtgttcgattctgtcacagaagaaggctacctgtgctaagaaagggtttatgtacttatgttgggcaaatagatttcgctacttgtgtgtattctagaactttagatgtgtttgaaaagtgtagaatttattgagggtgttttagagttggagttaatgtacagagaactgaattttgctgttgcctttatagtgggaattggttataagaacatcgctattttcctctccctattgaaattcattttctttactcttcctctagatggattgaagatgttgtgtatggtcttgacaggatgaatgtatttttttaagttggtagtttgataaggacatgaggttcaaaagatggtttcttgatttgccactcctgctggtcaaagatttggccgtctttctaattttatcatgttggaggtttggcgtcttcattttctttcatatcaatttatgggtgtgctgtctattggttaatgatggcattccttttacctttttggatgagtgatgctggaatgaatgcgtttctccttttcttttgttgatggcctgaggaactatgatggctatatttctttccactctctttgaatggcctgaaatgtgtgctttctgtatggtcgtccctctcaatttcttggatggcttgtgatgtgatataccatctctcgtcataggtgaatgaatgatttgtttagtagttcttatgtatgtattttgtatgttcccacgtctctattccttggatggcttgtgatgtgatataccatctctcgtcatagatgaatgaatattttgttgagtagctcttatgtctgtatggtggcccttgcagtgctgatcgatatttatgtggaagaaatgtttgatgatagattttttttgtatgctcccttttcgctaatcaagcctttgtgcttgcaaggtgcaactgttattttattattgaatttcctgttctactactccatttagttctgtctctattttgtcagtgtgaagaaatactagacgatgaatggtgtgtttgtacgtgcatagttatttataaattcttgactttccaagaagttattatttctataactgctacacctttgtggatggcagaacaaatgcatctgattgtggtgacataaacacttttgatcgcggttgaatgtactagattccatacaactctttcttcagccttgtgaaatattattatgttaggtggtgcaaacatatggaaggaacctgattgttttagtttcttagaatagtttctgatgttaatacagcatgttgacttcactctcttgcccttgatcaatcagcatcaggcaggggcctaattatgtattacatgaagcaatcgtattcttttctgaattagatttttttccaatgagttatcttgcccataactgtagttctttatttgaagtcttcaaatgcttgatgtatggtgacgaaaatgtgtatatgttttggttttgattatccgctactcatcaattattgagattcttacatactgaatccgttactttggacctatagttatgttttatgttgctaattaacttgtacatgtttctagattttctttcaaatggatcctgcttggacaaatgcagccaccctttgtctgaaaggccctcttgtagatatgttatctgcagatactgactgtgttcaattttttaatatttgtttttgccatattctccatttgaagacattaatttattctctccaacaactttacatcaatatttaagtggaggctgtcagacatgtcttatgattttcctactgaacttatgtgctttgagtagtacatcttgttactagtacaatttgatggtagaaggaaaagttgaaccctgaaacagatagcttaagtatcagtctttaatgcaggctgttgttttgtaaaatatgcaacttcgaaagatgcggatagagccatcagagcactgcacaatcagatcactcttcctgggggaactggtcctgttcaagttcgatatgctgacggggagagagaacgcataggcaccctagagtttaagctttttgttggttcactaaacaagcaagccactgaaaaagaagttgaggagatctttttacaatttggtcatgtggaagatgtctatctcatgcgggatgaatatagacagagtcgtggatgtgggtttgttaaatattcaagcaaagagacggcaatggcagctatcgatggtctcaacggaacttataccatgagaggttgcaatcagccattgattgttcggtttgctgagccaaagaggcctaaacctggcgagtcaagggaaatggcacctcctgttggacttggttcagggcctcgttttcaagcttcaggaccaaggcctacctctaactttggtgactctagtggggatgtaagccacacaaatccttggcgtccagctacttcacgaaacgtaggcccacctagtaacactgggatccgtggtgccggtagtgactttccccctaaaccaggtcaagcaacattgccttcaaatcagggtggcccgttaggtggttatggtgttcctccccttaaccctctcccagtccctggagtttcatcttctgccacattgcaacagcaaaatcgggcagctggccagcatataacaccattaaaaaaacctcttcacagtccacagggtctccctctccccctccgtccgcaaactaatttccctggggcccaggcacccttgcagaatccttatgcttatagcagccagttgcctacctctcagctgccaccacagcaaaacatcagtcgtgcaactgctcctcaaactcctttgaacattaatctacggccaacaactgtgtcttctgcaactgttcaatttccccctcgttcccagcagcaaccgctacaaaagatgcaacatcctccttctgagctagctcagctcttgtcgcagcaaactcagagtctacaagcaacattccaatcgtctcagcaagcaatttctcagctgcagcagcaggtgcagtctatgcagcaaccaaaccaaaatttaccactctcacagaatggccgagctggtaaacaacagtgggctggatctgcaattccaagagtggctagcaccactggttcgacaccagtgagctatgtgcaaacagctgcacctgcagtaagtcagagcgtaggttctgtcaaatgtacctggaccgagcatacctcgcctgatggatttaaatattattacaatggtctaacgggtgaaagcaagtgggaaaaacctgaggaaatgatagtgttcgaacgagagcaacagaaacagcaacaacatcaagagaagccaactatacagcagtcccagacccaattacagccgttgcagcaacaaccacaacaagttcagcagcaatatcagggccagcaattacagcagccgttttattcttcactgtatccaactccaggggccagccataatactcagtatccatcattgccagtaggtcaaaatagccagtttcctatgtcaggaattggtcagaatgctcaggattatgctcggacacatatacccgtgggagctgcttcaatgaatgatatatcaagaactcaacagagccgtcaatctccccaagaactcatgtggaagaataaagcttgaggtacatgagacgaggagctaaactatctcagtagctagatagaaatttctggaactaattagtcaaggagaggaaaagcagcaatggtagtgtccttagtctctgatttttttagttaaccccttcagttataatagataggcgatcgtagaccatctgcattctatcttttctctaatcagatatctcctcctttttcattttaagagctgccaaacaatggcctgttgtaacataactagcgcaagttatgtctcatgttgtgttactagtagtaacttagctgggtaaaccaaactttgatccagattaggagtcatatataattatataaatagaatatgtacattcat

SEQ ID NO: 41238 - protein, 505 aa, Arabidopsis thaliana
  peptide (1)..(505): Ceres Seq. ID no. 12395234
  misc_feature (351)..(380): Pfam Name: WW domain Pfam Description: WW domain
  misc_feature (1)..(79): Homolog of NCBI NO: 30690648 NR Description: Flowering time control protein-related
  misc_feature (355)..(382): Homolog of NCBI NO: 23479626 NR Description: FCA gamma-related [Plasmodium yoelii yoelii]
  misc_feature (1)..(95): Homolog of NCBI NO: 23479626 NR Description: FCA gamma-related [Plasmodium yoelii yoelii]
  misc_feature (1)..(503): Homolog of NCBI NO: 33390912 NR Description: gamma flowering time control protein
  misc_feature (1)..(160): Homolog of NCBI NO: 11045077 NR Description: putative FCA orthologue [Brassica napus]
  misc_feature (1)..(505): Homolog of NCBI NO: 2204100 NR Description: FCA alpha 2 [Arabidopsis thaliana]
  misc_feature (1)..(505): Homolog of NCBI NO: 30683595 NR Description: Flowering time control protein (FCA) [Arabidopsis
  misc_feature (1)..(491): Homolog of NCBI NO: 18150431 NR Description: FCA gamma [Brassica napus]
  misc_feature (1)..(291): Homolog of NCBI NO: 2204091 NR Description: FCA delta [Arabidopsis thaliana]
  misc_feature (1)..(291): Homolog of NCBI NO: 30683603 NR Description: Flowering time control protein (FCA) [Arabidopsis
MRDEYRQSRGCGFVKYSSKETAMAAIDGLNGTYTMRGCNQPLIVRFAEPKRPKPGESREMAPPVGLGSGPRFQASGPRPTSNFGDSSGDVSHTNPWRPATSRNVGPPSNTGIRGAGSDFPPKPGQATLPSNQGGPLGGYGVPPLNPLPVPGVSSSATLQQQNRAAGQHITPLKKPLHSPQGLPLPLRPQTNFPGAQAPLQNPYAYSSQLPTSQLPPQQNISRATAPQTPLNINLRPTTVSSATVQFPPRSQQQPLQKMQHPPSELAQLLSQQTQSLQATFQSSQQAISQLQQQVQSMQQPNQNLPLSQNGRAGKQQWAGSAIPRVASTTGSTPVSYVQTAAPAVSQSVGSVKCTWTEHTSPDGFKYYYNGLTGESKWEKPEEMIVFEREQQKQQQHQEKPTIQQSQTQLQPLQQQPQQVQQQYQGQQLQQPFYSSLYPTPGASHNTQYPSLPVGQNSQFPMSGIGQNAQDYARTHIPVGAASMNDISRTQQSRQSPQELMWKNKA

SEQ ID NO: 41239 - protein, 483 aa, Arabidopsis thaliana
  peptide (1)..(483): Ceres Seq. ID no. 12395235
  misc_feature (329)..(358): Pfam Name: WW domain Pfam Description: WW domain
  misc_feature (1)..(57): Homolog of NCBI NO: 30690648 NR Description: Flowering time control protein-related
  misc_feature (333)..(360): Homolog of NCBI NO: 23479626 NR Description: FCA gamma-related [Plasmodium yoelii yoelii]
  misc_feature (1)..(73): Homolog of NCBI NO: 23479626 NR Description: FCA gamma-related [Plasmodium yoelii yoelii]
  misc_feature (1)..(481): Homolog of NCBI NO: 33390912 NR Description: gamma flowering time control protein
  misc_feature (1)..(138): Homolog of NCBI NO: 11045077 NR Description: putative FCA orthologue [Brassica napus]
  misc_feature (1)..(483): Homolog of NCBI NO: 2204100 NR Description: FCA alpha 2 [Arabidopsis thaliana]
  misc_feature (1)..(483): Homolog of NCBI NO: 30683595 NR Description: Flowering time control protein (FCA) [Arabidopsis
  misc_feature (1)..(469): Homolog of NCBI NO: 18150431 NR Description: FCA gamma [Brassica napus]
  misc_feature (1)..(269): Homolog of NCBI NO: 2204091 NR Description: FCA delta [Arabidopsis thaliana]
  misc_feature (1)..(269): Homolog of NCBI NO: 30683603 NR Description: Flowering time control protein (FCA) [Arabidopsis
MAAIDGLNGTYTMRGCNQPLIVRFAEPKRPKPGESREMAPPVGLGSGPRFQASGPRPTSNFGDSSGDVSHTNPWRPATSRNVGPPSNTGIRGAGSDFPPKPGQATLPSNQGGPLGGYGVPPLNPLPVPGVSSSATLQQQNRAAGQHITPLKKPLHSPQGLPLPLRPQTNFPGAQAPLQNPYAYSSQLPTSQLPPQQNISRATAPQTPLNINLRPTTVSSATVQFPPRSQQQPLQKMQHPPSELAQLLSQQTQSLQATFQSSQQAISQLQQQVQSMQQPNQNLPLSQNGRAGKQQWAGSAIPRVASTTGSTPVSYVQTAAPAVSQSVGSVKCTWTEHTSPDGFKYYYNGLTGESKWEKPEEMIVFEREQQKQQQHQEKPTIQQSQTQLQPLQQQPQQVQQQYQGQQLQQPFYSSLYPTPGASHNTQYPSLPVGQNSQFPMSGIGQNAQDYARTHIPVGAASMNDISRTQQSRQSPQELMWKNKA

SEQ ID NO: 41240 - protein, 471 aa, Arabidopsis thaliana
  peptide (1)..(471): Ceres Seq. ID no. 12395236
  misc_feature (317)..(346): Pfam Name: WW domain Pfam Description: WW domain
  misc_feature (1)..(45): Homolog of NCBI NO: 30690648 NR Description: Flowering time control protein-related
  misc_feature (321)..(348): Homolog of NCBI NO: 23479626 NR Description: FCA gamma-related [Plasmodium yoelii yoelii]
  misc_feature (1)..(61): Homolog of NCBI NO: 23479626 NR Description: FCA gamma-related [Plasmodium yoelii yoelii]
  misc_feature (1)..(469): Homolog of NCBI NO: 33390912 NR Description: gamma flowering time control protein
  misc_feature (1)..(126): Homolog of NCBI NO: 11045077 NR Description: putative FCA orthologue [Brassica napus]
  misc_feature (1)..(471): Homolog of NCBI NO: 2204100 NR Description: FCA alpha 2 [Arabidopsis thaliana]
  misc_feature (1)..(471): Homolog of NCBI NO: 30683595 NR Description: Flowering time control protein (FCA) [Arabidopsis
  misc_feature (1)..(457): Homolog of NCBI NO: 18150431 NR Description: FCA gamma [Brassica napus]
  misc_feature (1)..(257): Homolog of NCBI NO: 2204091 NR Description: FCA delta [Arabidopsis thaliana]
  misc_feature (1)..(257): Homolog of NCBI NO: 30683603 NR Description: Flowering time control protein (FCA) [Arabidopsis
MRGCNQPLIVRFAEPKRPKPGESREMAPPVGLGSGPRFQASGPRPTSNFGDSSGDVSHTNPWRPATSRNVGPPSNTGIRGAGSDFPPKPGQATLPSNQGGPLGGYGVPPLNPLPVPGVSSSATLQQQNRAAGQHITPLKKPLHSPQGLPLPLRPQTNFPGAQAPLQNPYAYSSQLPTSQLPPQQNISRATAPQTPLNINLRPTTVSSATVQFPPRSQQQPLQKMQHPPSELAQLLSQQTQSLQATFQSSQQAISQLQQQVQSMQQPNQNLPLSQNGRAGKQQWAGSAIPRVASTTGSTPVSYVQTAAPAVSQSVGSVKCTWTEHTSPDGFKYYYNGLTGESKWEKPEEMIVFEREQQKQQQHQEKPTIQQSQTQLQPLQQQPQQVQQQYQGQQLQQPFYSSLYPTPGASHNTQYPSLPVGQNSQFPMSGIGQNAQDYARTHIPVGAASMNDISRTQQSRQSPQELMWKNKA

SEQ ID NO: 41241 - DNA, 1180 bp, Arabidopsis thaliana
  misc_feature (1)..(1180): Ceres Seq. ID no. 12395532
  misc_feature: MA Experiment ID: 108434 Result: Down-regulated in Transcription
  misc_feature: MA Experiment 108434 PARAMETER Experiment Name: At_Root_Tips_cDNA_P Parameter: Tissue Value: Root Tips
  misc_feature: MA Experiment ID: 108462 Result: Down-regulated in Transcription
  misc_feature: MA Experiment 108462 PARAMETER Experiment Name: At_Germinating_Seeds_cDNA_P Parameter: Age (day) Value: 2 vs. 0
  misc_feature: MA Experiment 108462 PARAMETER Experiment Name: At_Germinating_Seeds_cDNA_P Parameter: Tissue Value: Germinating Seeds
  misc_feature: MA Experiment ID: 108469 Result: Up-regulated in Transcription
  misc_feature: MA Experiment ID: 108561 Result: Down-regulated in Transcription
  misc_feature: MA Experiment 108561 PARAMETER Experiment Name: At_100uM_ABA_cDNA_P Parameter: Timepoint (hr) Value: 6
  misc_feature: MA Experiment 108561 PARAMETER Experiment Name: At_100uM_ABA_cDNA_P Parameter: Tissue Value: Aerial
  misc_feature: MA Experiment 108561 PARAMETER Experiment Name: At_100uM_ABA_cDNA_P Parameter: Treatment Value: 100uM ABA vs. No Treatment
  misc_feature: MA Experiment ID: 108574 Result: Up-regulated in Transcription
  misc_feature: MA Experiment 108574 PARAMETER Experiment Name: At_Wounding__cDNA_P Parameter: Timepoint (hr) Value: 1
  misc_feature: MA Experiment 108574 PARAMETER Experiment Name: At_Wounding__cDNA_P Parameter: Tissue Value: Aerial
  misc_feature: MA Experiment 108574 PARAMETER Experiment Name: At_Wounding__cDNA_P Parameter: Treatment Value: Wounding vs. No Wounding
  misc_feature: MA Experiment ID: 108577 Result: Down-regulated in Transcription
  misc_feature: MA Experiment 108577 PARAMETER Experiment Name: At_42deg_Heat_cDNA_P Parameter: Temperature (deg C) Value: 42 vs. 22
  misc_feature: MA Experiment 108577 PARAMETER Experiment Name: At_42deg_Heat_cDNA_P Parameter: Timepoint (hr) Value: 6
  misc_feature: MA Experiment 108577 PARAMETER Experiment Name: At_42deg_Heat_cDNA_P Parameter: Tissue Value: Aerial
  misc_feature: MA Experiment ID: 108579 Result: Up-regulated in Transcription
  misc_feature: MA Experiment 108579 PARAMETER Experiment Name: At_4deg_Cold_cDNA_P Parameter: Temperature (deg C) Value: 4 vs. 22
  misc_feature: MA Experiment 108579 PARAMETER Experiment Name: At_4deg_Cold_cDNA_P Parameter: Timepoint (hr) Value: 6
  misc_feature: MA Experiment 108579 PARAMETER Experiment Name: At_4deg_Cold_cDNA_P Parameter: Tissue Value: Aerial
  misc_feature: MA Experiment ID: 108585 Result: Up-regulated in Transcription
  misc_feature: MA Experiment 108585 PARAMETER Experiment Name: At_5mM_NaNP_cDNA_P Parameter: Timepoint (hr) Value: 6
  misc_feature: MA Experiment 108585 PARAMETER Experiment Name: At_5mM_NaNP_cDNA_P Parameter: Tissue Value: Aerial
  misc_feature: MA Experiment 108585 PARAMETER Experiment Name: At_5mM_NaNP_cDNA_P Parameter: Treatment Value: null
  misc_feature: MA Experiment ID: 108595 Result: Up-regulated in Transcription
  misc_feature: MA Experiment 108595 PARAMETER Experiment Name: At_Ler-pi_Ovule_cDNA_P Parameter: Plant Line Value: null
  misc_feature: MA Experiment ID: 108667 Result: Up-regulated in Transcription
  misc_feature: MA Experiment 108667 PARAMETER Experiment Name: At_2mM_SA_cDNA_P Parameter: Plant Line Value: WS
  misc_feature: MA Experiment 108667 PARAMETER Experiment Name: At_2mM_SA_cDNA_P Parameter: Timepoint (hr) Value: 1
  misc_feature: MA Experiment 108667 PARAMETER Experiment Name: At_2mM_SA_cDNA_P Parameter: Treatment Value: 2mM SA vs. No Treatment
  misc_feature: MA Experiment ID: 20000070 Result: Down-regulated in Transcription
  misc_feature: MA Experiment 20000070 PARAMETER Experiment Name: At_100uM_ABA_Mutants_cDNA_P Parameter: Plant Line Value: CS24
  misc_feature: MA Experiment 20000070 PARAMETER Experiment Name: At_100uM_ABA_Mutants_cDNA_P Parameter: Timepoint (hr) Value: 6
  misc_feature: MA Experiment 20000070 PARAMETER Experiment Name: At_100uM_ABA_Mutants_cDNA_P Parameter: Tissue Value: Aerial
  misc_feature: MA Experiment 20000070 PARAMETER Experiment Name: At_100uM_ABA_Mutants_cDNA_P Parameter: Treatment Value: 100uM ABA vs. No Treatment
  misc_feature: MA Experiment ID: 20000089 Result: Down-regulated in Transcription
  misc_feature: MA Experiment ID: 20000144 Result: Down-regulated in Transcription
  misc_feature: MA Experiment 20000144 PARAMETER Experiment Name: At_42deg_Heat_cDNA_P Parameter: Temperature (deg C) Value: 42 vs. 22
  misc_feature: MA Experiment 20000144 PARAMETER Experiment Name: At_42deg_Heat_cDNA_P Parameter: Timepoint (hr) Value: 1
  misc_feature: MA Experiment 20000144 PARAMETER Experiment Name: At_42deg_Heat_cDNA_P Parameter: Tissue Value: Aerial
  misc_feature: MA Experiment ID: 20000171 Result: Down-regulated in Transcription
  misc_feature: MA Experiment 20000171 PARAMETER Experiment Name: At_42deg_Heat_P Parameter: Age (day) Value: 14
  misc_feature: MA Experiment 20000171 PARAMETER Experiment Name: At_42deg_Heat_P Parameter: Organism Value: A. thaliana
  misc_feature: MA Experiment 20000171 PARAMETER Experiment Name: At_42deg_Heat_P Parameter: Plant Line Value: WS
  misc_feature: MA Experiment 20000171 PARAMETER Experiment Name: At_42deg_Heat_P Parameter: Temperature (deg C) Value: 42 vs. 22
  misc_feature: MA Experiment 20000171 PARAMETER Experiment Name: At_42deg_Heat_P Parameter: Timepoint (hr) Value: 1
  misc_feature: MA Experiment 20000171 PARAMETER Experiment Name: At_42deg_Heat_P Parameter: Tissue Value: Aerial
  misc_feature: MA Experiment ID: 20000184 Result: Down-regulated in Transcription
  misc_feature: MA Experiment 20000184 PARAMETER Experiment Name: At_Shoots__P Parameter: Age (day) Value: 7
  misc_feature: MA Experiment 20000184 PARAMETER Experiment Name: At_Shoots__P Parameter: Tissue Value: Shoots vs. Whole Plant
  misc_feature: MA Experiment ID: 20000185 Result: Down-regulated in Transcription
  misc_feature: MA Experiment 20000185 PARAMETER Experiment Name: At_Roots__P Parameter: Age (day) Value: 7 vs. 21
  misc_feature: MA Experiment 20000185 PARAMETER Experiment Name: At_Roots__P Parameter: Organism Value: A. thaliana
  misc_feature: MA Experiment 20000185 PARAMETER Experiment Name: At_Roots__P Parameter: Tissue Value: Roots vs. Whole Plant
  misc_feature: MA Experiment ID: 20000213 Result: Up-regulated in Transcription
  misc_feature: MA Experiment 20000213 PARAMETER Experiment Name: At_4deg_Cold_P Parameter: Timepoint (hr) Value: 2
  misc_feature: MA Experiment ID: 20000214 Result: Up-regulated in Transcription
  misc_feature: MA Experiment 20000214 PARAMETER Experiment Name: At_4deg_Cold_P Parameter: Timepoint (hr) Value: 6
  misc_feature: MA Experiment ID: 20000234 Result: Down-regulated in Transcription
  misc_feature: MA Experiment 20000234 PARAMETER Experiment Name: At_Siliques_P Parameter: Age (day) Value: 21
  misc_feature: MA Experiment 20000234 PARAMETER Experiment Name: At_Siliques_P Parameter: Organism Value: A. thaliana
  misc_feature: MA Experiment 20000234 PARAMETER Experiment Name: At_Siliques_P Parameter: Plant Line Value: WS
  misc_feature: MA Experiment 20000234 PARAMETER Experiment Name: At_Siliques_P Parameter: Tissue Value: Less Than 5mm Siliques vs. Whole Plant
  misc_feature: MA Experiment ID: 20000264 Result: Down-regulated in Transcription
  misc_feature: MA Experiment 20000264 PARAMETER Experiment Name: At_Open_Flower_P Parameter: Age (day) Value: 21
  misc_feature: MA Experiment 20000264 PARAMETER Experiment Name: At_Open_Flower_P Parameter: Plant Line Value: WS
  misc_feature: MA Experiment 20000264 PARAMETER Experiment Name: At_Open_Flower_P Parameter: Tissue Value: Open Flower vs. Whole Plant
  misc_feature: MA Experiment ID: 20000265 Result: Down-regulated in Transcription
  misc_feature: MA Experiment 20000265 PARAMETER Experiment Name: At_Open_Flower_P Parameter: Age (day) Value: 21
  misc_feature: MA Experiment 20000265 PARAMETER Experiment Name: At_Open_Flower_P Parameter: Plant Line Value: WS
  misc_feature: MA Experiment 20000265 PARAMETER Experiment Name: At_Open_Flower_P Parameter: Tissue Value: Closed Flower vs. Whole Plant
  misc_feature: MA Experiment ID: 20000268 Result: Down-regulated in Transcription
  misc_feature: MA Experiment 20000268 PARAMETER Experiment Name: At_100mM_NaCl__P Parameter: Age (day) Value: 14
  misc_feature: MA Experiment 20000268 PARAMETER Experiment Name: At_100mM_NaCl__P Parameter: Organism Value: A. thaliana
  misc_feature: MA Experiment 20000268 PARAMETER Experiment Name: At_100mM_NaCl__P Parameter: Plant Line Value: WS
  misc_feature: MA Experiment 20000268 PARAMETER Experiment Name: At_100mM_NaCl__P Parameter: Timepoint (hr) Value: 6
  misc_feature: MA Experiment 20000268 PARAMETER Experiment Name: At_100mM_NaCl__P Parameter: Tissue Value: Whole Plant
  misc_feature: MA Experiment 20000268 PARAMETER Experiment Name: At_100mM_NaCl__P Parameter: Treatment Value: 100mM NaCl vs. No Treatment
  misc_feature: MA Experiment ID: 20000286 Result: Down-regulated in Transcription
  misc_feature: MA Experiment 20000286 PARAMETER Experiment Name: At_Open_Flower_P Parameter: Age (day) Value: 21
  misc_feature: MA Experiment 20000286 PARAMETER Experiment Name: At_Open_Flower_P Parameter: Plant Line Value: WS
  misc_feature: MA Experiment 20000286 PARAMETER Experiment Name: At_Open_Flower_P Parameter: Tissue Value: Half Open vs. Whole Plant
  misc_feature: MA Experiment ID: 20000437 Result: Down-regulated in Transcription
  misc_feature: MA Experiment 20000437 PARAMETER Experiment Name: At_Drought_P Parameter: Age (day) Value: 8
  misc_feature: MA Experiment 20000437 PARAMETER Experiment Name: At_Drought_P Parameter: Organism Value: A. thaliana
  misc_feature: MA Experiment 20000437 PARAMETER Experiment Name: At_Drought_P Parameter: Plant Line Value: WS
  misc_feature: MA Experiment 20000437 PARAMETER Experiment Name: At_Drought_P Parameter: Timepoint (hr) Value: 24
  misc_feature: MA Experiment 20000437 PARAMETER Experiment Name: At_Drought_P Parameter: Tissue Value: Whole Plant
  misc_feature: MA Experiment 20000437 PARAMETER Experiment Name: At_Drought_P Parameter: Treatment Value: Drought vs. No Drought
  misc_feature: MA Experiment ID: 20000438 Result: Down-regulated in Transcription
  misc_feature: MA Experiment 20000438 PARAMETER Experiment Name: At_Shoots__P Parameter: Age (day) Value: 14
  misc_feature: MA Experiment 20000438 PARAMETER Experiment Name: At_Shoots__P Parameter: Tissue Value: Shoots vs. Whole Plant
  misc_feature: MA Experiment ID: 20000439 Result: Down-regulated in Transcription
  misc_feature: MA Experiment 20000439 PARAMETER Experiment Name: At_Roots__P Parameter: Age (day) Value: 14 vs. 21
  misc_feature: MA Experiment 20000439 PARAMETER Experiment Name: At_Roots__P Parameter: Organism Value: A. thaliana
  misc_feature: MA Experiment 20000439 PARAMETER Experiment Name: At_Roots__P Parameter: Tissue Value: Roots vs. Whole Plant
  misc_feature: MA Experiment ID: 20000441 Result: Up-regulated in Transcription
  misc_feature: MA Experiment 20000441 PARAMETER Experiment Name: At_1uM_BR-BRZ__P Parameter: Tissue Value: Shoot Apices
  misc_feature: MA Experiment 20000441 PARAMETER Experiment Name: At_1uM_BR-BRZ__P Parameter: Treatment Value: 1uM BR vs. No Treatment
  misc_feature: MA Experiment ID: 20000443 Result: Up-regulated in Transcription
  misc_feature: MA Experiment 20000443 PARAMETER Experiment Name: At_1uM_BR-BRZ__P Parameter: Tissue Value: Shoot Apices
  misc_feature: MA Experiment 20000443 PARAMETER Experiment Name: At_1uM_BR-BRZ__P Parameter: Treatment Value: 1uM BRZ vs. No Treatment
  misc_feature: MA Experiment ID: 20000456 Result: Down-regulated in Transcription
  misc_feature: MA Experiment 20000456 PARAMETER Experiment Name: At_100uM_BA_P Parameter: Age (day) Value: 14
  misc_feature: MA Experiment 20000456 PARAMETER Experiment Name: At_100uM_BA_P Parameter: Organism Value: A. thaliana
  misc_feature: MA Experiment 20000456 PARAMETER Experiment Name: At_100uM_BA_P Parameter: Plant Line Value: WS
  misc_feature: MA Experiment 20000456 PARAMETER Experiment Name: At_100uM_BA_P Parameter: Timepoint (hr) Value: 6
  misc_feature: MA Experiment 20000456 PARAMETER Experiment Name: At_100uM_BA_P Parameter: Tissue Value: Aerial
  misc_feature: MA Experiment 20000456 PARAMETER Experiment Name: At_100uM_BA_P Parameter: Treatment Value: 100uM BA vs. No Treatment
  misc_feature: MA Experiment ID: 20000460 Result: Up-regulated in Transcription
  misc_feature: MA Experiment 20000460 PARAMETER Experiment Name: At_10percent_PEG_P Parameter: Age (day) Value: 12
  misc_feature: MA Experiment 20000460 PARAMETER Experiment Name: At_10percent_PEG_P Parameter: Organism Value: A. thaliana
  misc_feature: MA Experiment 20000460 PARAMETER Experiment Name: At_10percent_PEG_P Parameter: Plant Line Value: WS
  misc_feature: MA Experiment 20000460 PARAMETER Experiment Name: At_10percent_PEG_P Parameter: Timepoint (day) Value: 12
  misc_feature: MA Experiment 20000460 PARAMETER Experiment Name: At_10percent_PEG_P Parameter: Tissue Value: Whole Plant
  misc_feature: MA Experiment 20000460 PARAMETER Experiment Name: At_10percent_PEG_P Parameter: Treatment Value: 10percent PEG vs. No Treatment
  misc_feature: MA Experiment ID: 20000495 Result: Down-regulated in Transcription
  misc_feature: MA Experiment 20000495 PARAMETER Experiment Name: At_Guard_Cells_P Parameter: Harvest Date Value: 8/2/2002
  misc_feature: MA Experiment 20000495 PARAMETER Experiment Name: At_Guard_Cells_P Parameter: Organism Value: A. thaliana
  misc_feature: MA Experiment 20000495 PARAMETER Experiment Name: At_Guard_Cells_P Parameter: Tissue Value: Guard Cells vs. Leaves
  misc_feature: MA Experiment ID: 20000506 Result: Down-regulated in Transcription
  misc_feature: MA Experiment 20000506 PARAMETER Experiment Name: At_Wounding_P Parameter: Organism Value: A. thaliana
  misc_feature: MA Experiment 20000506 PARAMETER Experiment Name: At_Wounding_P Parameter: Plant Line Value: WS
  misc_feature: MA Experiment 20000506 PARAMETER Experiment Name: At_Wounding_P Parameter: Timepoint (hr) Value: 6
  misc_feature: MA Experiment 20000506 PARAMETER Experiment Name: At_Wounding_P Parameter: Tissue Value: Aerial
  misc_feature: MA Experiment 20000506 PARAMETER Experiment Name: At_Wounding_P Parameter: Treatment Value: Wounding vs. No Wounding
  misc_feature: MA Experiment ID: 20000527 Result: Up-regulated in Transcription
  misc_feature: MA Experiment 20000527 PARAMETER Experiment Name: At_10percent_PEG_P Parameter: Age (day) Value: 20
  misc_feature: MA Experiment 20000527 PARAMETER Experiment Name: At_10percent_PEG_P Parameter: Organism Value: A. thaliana
  misc_feature: MA Experiment 20000527 PARAMETER Experiment Name: At_10percent_PEG_P Parameter: Plant Line Value: WS
  misc_feature: MA Experiment 20000527 PARAMETER Experiment Name: At_10percent_PEG_P Parameter: Timepoint (day) Value: 20
  misc_feature: MA Experiment 20000527 PARAMETER Experiment Name: At_10percent_PEG_P Parameter: Tissue Value: Whole Plant
  misc_feature: MA Experiment 20000527 PARAMETER Experiment Name: At_10percent_PEG_P Parameter: Treatment Value: 10percent PEG vs. No Treatment
  misc_feature: MA Experiment ID: 20000573 Result: Down-regulated in Transcription
  misc_feature: MA Experiment 20000573 PARAMETER Experiment Name: At_100uM_ABA_Mutants__P Parameter: Organism Value: A. thaliana
  misc_feature: MA Experiment 20000573 PARAMETER Experiment Name: At_100uM_ABA_Mutants__P Parameter: Plant Line Value: CS22 vs. Ler wt
  misc_feature: MA Experiment 20000573 PARAMETER Experiment Name: At_100uM_ABA_Mutants__P Parameter: Timepoint (hr) Value: N/A
  misc_feature: MA Experiment 20000573 PARAMETER Experiment Name: At_100uM_ABA_Mutants__P Parameter: Tissue Value: Whole Plant
  misc_feature: MA Experiment 20000573 PARAMETER Experiment Name: At_100uM_ABA_Mutants__P Parameter: Treatment Value: None
  misc_feature: MA Experiment ID: 20000574 Result: Down-regulated in Transcription
  misc_feature: MA Experiment 20000574 PARAMETER Experiment Name: At_100uM_ABA_Mutants__P Parameter: Organism Value: A. thaliana
  misc_feature: MA Experiment 20000574 PARAMETER Experiment Name: At_100uM_ABA_Mutants__P Parameter: Plant Line Value: CS23 vs. Ler wt
  misc_feature: MA Experiment 20000574 PARAMETER Experiment Name: At_100uM_ABA_Mutants__P Parameter: Timepoint (hr) Value: N/A
  misc_feature: MA Experiment 20000574 PARAMETER Experiment Name: At_100uM_ABA_Mutants__P Parameter: Tissue Value: Whole Plant
  misc_feature: MA Experiment 20000574 PARAMETER Experiment Name: At_100uM_ABA_Mutants__P Parameter: Treatment Value: None
  misc_feature: MA Experiment ID: 20000709 Result: Up-regulated in Transcription
  misc_feature: MA Experiment 20000709 PARAMETER Experiment Name: At_15mM_NH4NO3_L-to-H_P Parameter: Age (hr) Value: 14
  misc_feature: MA Experiment 20000709 PARAMETER Experiment Name: At_15mM_NH4NO3_L-to-H_P Parameter: Organism Value: A. thaliana
  misc_feature: MA Experiment 20000709 PARAMETER Experiment Name: At_15mM_NH4NO3_L-to-H_P Parameter: Plant Line Value: WS
  misc_feature: MA Experiment 20000709 PARAMETER Experiment Name: At_15mM_NH4NO3_L-to-H_P Parameter: Timepoint (hr) Value: 4
  misc_feature: MA Experiment 20000709 PARAMETER Experiment Name: At_15mM_NH4NO3_L-to-H_P Parameter: Tissue Value: Aerial
  misc_feature: MA Experiment 20000709 PARAMETER Experiment Name: At_15mM_NH4NO3_L-to-H_P Parameter: Treatment Value: 15mM NH4NO3 vs. 30mM Mannitol
  misc_feature: MA Experiment ID: 20000794 Result: Down-regulated in Transcription
  misc_feature: MA Experiment 20000794 PARAMETER Experiment Name: At_Petals_P Parameter: Age (day) Value: 23-25 days
  misc_feature: MA Experiment 20000794 PARAMETER Experiment Name: At_Petals_P Parameter: Plant Line Value: WS
  misc_feature: MA Experiment 20000794 PARAMETER Experiment Name: At_Petals_P Parameter: Tissue Value: Petals vs. Whole plant
  misc_feature: MA Experiment ID: 20001247 Result: Up-regulated in Transcription
  misc_feature: MA Experiment 20001247 PARAMETER Experiment Name: At_Far-red-induction_P Parameter: Age (day) Value: 7
  misc_feature: MA Experiment 20001247 PARAMETER Experiment Name: At_Far-red-induction_P Parameter: Light Value: Far-red vs. White
  misc_feature: MA Experiment 20001247 PARAMETER Experiment Name: At_Far-red-induction_P Parameter: Organism Value: A. thaliana
  misc_feature: MA Experiment 20001247 PARAMETER Experiment Name: At_Far-red-induction_P Parameter: Plant Line Value: Columbia
  misc_feature: MA Experiment 20001247 PARAMETER Experiment Name: At_Far-red-induction_P Parameter: Timepoint (hr) Value: 1
  misc_feature: MA Experiment 20001247 PARAMETER Experiment Name: At_Far-red-induction_P Parameter: Tissue Value: Whole Plant
  misc_feature: MA Experiment ID: 20001458 Result: Up-regulated in Transcription
  misc_feature: MA Experiment 20001458 PARAMETER Experiment Name: At_50mM_NH4NO3_L-to-H_P Parameter: Age (day) Value: Undefined
  misc_feature: MA Experiment 20001458 PARAMETER Experiment Name: At_50mM_NH4NO3_L-to-H_P Parameter: Organism Value: Undefined
  misc_feature: MA Experiment 20001458 PARAMETER Experiment Name: At_50mM_NH4NO3_L-to-H_P Parameter: Plant Line Value: Undefined
  misc_feature: MA Experiment 20001458 PARAMETER Experiment Name: At_50mM_NH4NO3_L-to-H_P Parameter: Timepoint (hr) Value: 2
  misc_feature: MA Experiment 20001458 PARAMETER Experiment Name: At_50mM_NH4NO3_L-to-H_P Parameter: Tissue Value: Siliques
  misc_feature: MA Experiment 20001458 PARAMETER Experiment Name: At_50mM_NH4NO3_L-to-H_P Parameter: Treatment Value: 50mM NH4NO3 vs. 100mM Manitol
  misc_feature: MA Experiment ID: 20001554 Result: Down-regulated in Transcription
  misc_feature: MA Experiment 20001554 PARAMETER Experiment Name: At_Drought_Soil_Dry_P Parameter: Age (day) Value: 21
  misc_feature: MA Experiment 20001554 PARAMETER Experiment Name: At_Drought_Soil_Dry_P Parameter: Organism Value: A. thaliana
  misc_feature: MA Experiment 20001554 PARAMETER Experiment Name: At_Drought_Soil_Dry_P Parameter: Plant Line Value: WS
  misc_feature: MA Experiment 20001554 PARAMETER Experiment Name: At_Drought_Soil_Dry_P Parameter: Post Timepoint (hr) Value: None
  misc_feature: MA Experiment 20001554 PARAMETER Experiment Name: At_Drought_Soil_Dry_P Parameter: Post-Treatment Value: None
  misc_feature: MA Experiment 20001554 PARAMETER Experiment Name: At_Drought_Soil_Dry_P Parameter: Timepoint (day) Value: 7
  misc_feature: MA Experiment 20001554 PARAMETER Experiment Name: At_Drought_Soil_Dry_P Parameter: Treatment Value: Drought vs. No Drought
  misc_feature: MA Experiment ID: 20001557 Result: Up-regulated in Transcription
  misc_feature: MA Experiment 20001557 PARAMETER Experiment Name: At_Drought_Soil_Dry_P Parameter: Age (day) Value: 27
  misc_feature: MA Experiment 20001557 PARAMETER Experiment Name: At_Drought_Soil_Dry_P Parameter: Organism Value: A. thaliana
  misc_feature: MA Experiment 20001557 PARAMETER Experiment Name: At_Drought_Soil_Dry_P Parameter: Plant Line Value: WS
  misc_feature: MA Experiment 20001557 PARAMETER Experiment Name: At_Drought_Soil_Dry_P Parameter: Post Timepoint (hr) Value: 3
  misc_feature: MA Experiment 20001557 PARAMETER Experiment Name: At_Drought_Soil_Dry_P Parameter: Post-Treatment Value: Re-Water vs. No Drought
  misc_feature: MA Experiment 20001557 PARAMETER Experiment Name: At_Drought_Soil_Dry_P Parameter: Timepoint (day) Value: 13
  misc_feature: MA Experiment 20001557 PARAMETER Experiment Name: At_Drought_Soil_Dry_P Parameter: Treatment Value: Drought vs. No Drought
  misc_feature: MA Experiment ID: 20001558 Result: Up-regulated in Transcription
  misc_feature: MA Experiment 20001558 PARAMETER Experiment Name: At_Drought_Soil_Dry_P Parameter: Age (day) Value: 27
  misc_feature: MA Experiment 20001558 PARAMETER Experiment Name: At_Drought_Soil_Dry_P Parameter: Organism Value: A. thaliana
  misc_feature: MA Experiment 20001558 PARAMETER Experiment Name: At_Drought_Soil_Dry_P Parameter: Plant Line Value: WS
  misc_feature: MA Experiment 20001558 PARAMETER Experiment Name: At_Drought_Soil_Dry_P Parameter: Post Timepoint (hr) Value: 6
  misc_feature: MA Experiment 20001558 PARAMETER Experiment Name: At_Drought_Soil_Dry_P Parameter: Post-Treatment Value: Re-Water vs. No Drought
  misc_feature: MA Experiment 20001558 PARAMETER Experiment Name: At_Drought_Soil_Dry_P Parameter: Timepoint (day) Value: 13
  misc_feature: MA Experiment 20001558 PARAMETER Experiment Name: At_Drought_Soil_Dry_P Parameter: Treatment Value: Drought vs. No Drought
  misc_feature: MA Experiment ID: 20001560 Result: Up-regulated in Transcription
  misc_feature: MA Experiment 20001560 PARAMETER Experiment Name: At_Drought_Soil_Dry_P Parameter: Age (day) Value: 28
  misc_feature: MA Experiment 20001560 PARAMETER Experiment Name: At_Drought_Soil_Dry_P Parameter: Organism Value: A. thaliana
  misc_feature: MA Experiment 20001560 PARAMETER Experiment Name: At_Drought_Soil_Dry_P Parameter: Plant Line Value: WS
  misc_feature: MA Experiment 20001560 PARAMETER Experiment Name: At_Drought_Soil_Dry_P Parameter: Post Timepoint (hr) Value: None
  misc_feature: MA Experiment 20001560 PARAMETER Experiment Name: At_Drought_Soil_Dry_P Parameter: Post-Treatment Value: None
  misc_feature: MA Experiment 20001560 PARAMETER Experiment Name: At_Drought_Soil_Dry_P Parameter: Timepoint (day) Value: 14
  misc_feature: MA Experiment 20001560 PARAMETER Experiment Name: At_Drought_Soil_Dry_P Parameter: Treatment Value: Drought vs. No Drought
  misc_feature: MA Experiment ID: 20001757 Result: Down-regulated in Transcription
  misc_feature: MA Experiment 20001757 PARAMETER Experiment Name: At_50mM_NH4NO3_L-to-H_P Parameter: Timepoint (hr) Value: 6
  misc_feature: MA Experiment 20001757 PARAMETER Experiment Name: At_50mM_NH4NO3_L-to-H_P Parameter: Tissue Value: Leaf
  misc_feature: MA Experiment 20001757 PARAMETER Experiment Name: At_50mM_NH4NO3_L-to-H_P Parameter: Treatment Value: 50mM NH4NO3 vs 100mM Mannitol
  misc_feature: MA Experiment ID: 20001760 Result: Down-regulated in Transcription
  misc_feature: MA Experiment 20001760 PARAMETER Experiment Name: At_50mM_NH4NO3_L-to-H_P Parameter: Timepoint (hr) Value: 2
  misc_feature: MA Experiment 20001760 PARAMETER Experiment Name: At_50mM_NH4NO3_L-to-H_P Parameter: Tissue Value: Siliques
  misc_feature: MA Experiment 20001760 PARAMETER Experiment Name: At_50mM_NH4NO3_L-to-H_P Parameter: Treatment Value: 50mM NH4NO3 vs 100mM Mannitol
  misc_feature: MA Experiment ID: 20001774 Result: Down-regulated in Transcription
  misc_feature: MA Experiment 20001774 PARAMETER Experiment Name: At_Far-red-enriched-adult_P Parameter: Age (day) Value: 31
  misc_feature: MA Experiment 20001774 PARAMETER Experiment Name: At_Far-red-enriched-adult_P Parameter: Light Value: Far-red enriched vs. White
  misc_feature: MA Experiment 20001774 PARAMETER Experiment Name: At_Far-red-enriched-adult_P Parameter: Organism Value: A. thaliana
  misc_feature: MA Experiment 20001774 PARAMETER Experiment Name: At_Far-red-enriched-adult_P Parameter: Plant Line Value: Columbia
  misc_feature: MA Experiment 20001774 PARAMETER Experiment Name: At_Far-red-enriched-adult_P Parameter: Timepoint (hr) Value: 72
  misc_feature: MA Experiment 20001774 PARAMETER Experiment Name: At_Far-red-enriched-adult_P Parameter: Tissue Value: Aerial
  misc_feature: MA Experiment ID: 20001904 Result: Down-regulated in Transcription
  misc_feature: MA Experiment 20001904 PARAMETER Experiment Name: At_Drought_Reproduction_P Parameter: Age (day) Value: 37
  misc_feature: MA Experiment 20001904 PARAMETER Experiment Name: At_Drought_Reproduction_P Parameter: Organism Value: A. thaliana
  misc_feature: MA Experiment 20001904 PARAMETER Experiment Name: At_Drought_Reproduction_P Parameter: Plant Line Value: WS
  misc_feature: MA Experiment 20001904 PARAMETER Experiment Name: At_Drought_Reproduction_P Parameter: Timepoint (day) Value: 7
  misc_feature: MA Experiment 20001904 PARAMETER Experiment Name: At_Drought_Reproduction_P Parameter: Tissue Value: Rosettes
  misc_feature: MA Experiment 20001904 PARAMETER Experiment Name: At_Drought_Reproduction_P Parameter: Treatment Value: Drought vs. No Drought
  misc_feature: MA Experiment ID: 20001907 Result: Down-regulated in Transcription
  misc_feature: MA Experiment 20001907 PARAMETER Experiment Name: At_Drought_Reproduction_P Parameter: Age (day) Value: 37
  misc_feature: MA Experiment 20001907 PARAMETER Experiment Name: At_Drought_Reproduction_P Parameter: Organism Value: A. thaliana
  misc_feature: MA Experiment 20001907 PARAMETER Experiment Name: At_Drought_Reproduction_P Parameter: Plant Line Value: WS
  misc_feature: MA Experiment 20001907 PARAMETER Experiment Name: At_Drought_Reproduction_P Parameter: Timepoint (day) Value: 7
  misc_feature: MA Experiment 20001907 PARAMETER Experiment Name: At_Drought_Reproduction_P Parameter: Tissue Value: Siliques
  misc_feature: MA Experiment 20001907 PARAMETER Experiment Name: At_Drought_Reproduction_P Parameter: Treatment Value: Drought vs. No Drought
  misc_feature: MA Experiment ID: 20001910 Result: Down-regulated in Transcription
  misc_feature: MA Experiment 20001910 PARAMETER Experiment Name: At_Drought_Reproduction_P Parameter: Age (day) Value: 37
  misc_feature: MA Experiment 20001910 PARAMETER Experiment Name: At_Drought_Reproduction_P Parameter: Organism Value: A. thaliana
  misc_feature: MA Experiment 20001910 PARAMETER Experiment Name: At_Drought_Reproduction_P Parameter: Plant Line Value: WS
  misc_feature: MA Experiment 20001910 PARAMETER Experiment Name: At_Drought_Reproduction_P Parameter: Timepoint (day) Value: 7
  misc_feature: MA Experiment 20001910 PARAMETER Experiment Name: At_Drought_Reproduction_P Parameter: Tissue Value: Flowers
  misc_feature: MA Experiment 20001910 PARAMETER Experiment Name: At_Drought_Reproduction_P Parameter: Treatment Value: Drought vs. No Drought
acaaataaatacctttgtttccctcttcttctccttcactcacaacatctcaatttcattctctcttctctctccaatttcacaacaatgggagtcaaaagtttcgttgaaggtgggattgcctctgtaatcgccggttgctctactcaccctctcgatctaatcaaggttcgtcttcagcttcacggtgaagcaccttccaccaccaccgtcactctcctccgtccagctctcgctttccccaattcttctcctgcagctttcctggaaacgacttcttcagtccccaaagtaggaccgatctcactcggaatcaacatagtcaaatcggaaggcgccgccgcgttattctcaggagtctccgctacacttctccgtcagacgttatattccaccaccaggatgggtctatacgaagtgcttaagaacaaatggactgatcctgagtcagggaagttgaatctgagtaggaagatcggtgcagggctagtcgctggtggaatcggagccgccgttggaaatccagctgacgtggcgatggttaggatgcaagctgacgggaggttacctttagcgcaacgtcgtaactacgccggagtaggagacgcaatcaggagcatggttaagggagaaggcgtaacgagcttgtggcgaggctcggcgttgacgattaaccgagcgatgattgtgacggcggctcagctagcgtcttacgatcagttcaaggaagggatattggagaatggtgtgatgaatgatgggctagggactcacgtggtagcgagttttgcggcggggtttgttgcttcggttgcgtctaatccggtggatgtgataaagacgagagtgatgaatatgaaggtgggagcgtacgacggcgcgtgggattgtgcggtgaagacggttaaagcggaaggagccatggctctttataaaggctttgttcctacagtttgtaggcaaggtcctttcactgttgttctcttcgttacgttggagcaagttaggaagctgcttcgagatttttgataccattcttttattgatgatgatgatggcgactatttatattgatttattcatttttgaaatagtgaacacaagaaggaactaggaagagggggattcaatatattttttgttcaagcattgttgttaaatacaattcaattttagtttc

SEQ ID NO: 41242 - protein, 342 aa, Arabidopsis thaliana
  peptide (1)..(342): Ceres Seq. ID no. 12395533
  misc_feature (105)..(342): Homolog of NCBI NO: 24657945 NR Description: CG7514-PA [Drosophila melanogaster]
  misc_feature (89)..(337): Homolog of NCBI NO: 6179584 NR Description: dicarboxylate carrier protein [Homo sapiens]
  misc_feature (35)..(68): Homolog of NCBI NO: 27807211 NR Description: solute carrier family 25 (mitochondrial carrier
  misc_feature (105)..(337): Homolog of NCBI NO: 27807211 NR Description: solute carrier family 25 (mitochondrial carrier
  misc_feature (30)..(64): Homolog of NCBI NO: 15242423 NR Description: mitochondrial carrier protein family; protein id:
  misc_feature (91)..(341): Homolog of NCBI NO: 15242423 NR Description: mitochondrial carrier protein family; protein id:
  misc_feature (30)..(342): Homolog of NCBI NO: 13878155 NR Description: putative mitochondrial dicarboxylate carrier
  misc_feature (30)..(342): Homolog of NCBI NO: 21554157 NR Description: putative mitochondrial dicarboxylate carrier
  misc_feature (30)..(342): Homolog of NCBI NO: 15227225 NR Description: mitochondrial carrier protein family
  misc_feature (30)..(342): Homolog of NCBI NO: 15233884 NR Description: mitochondrial carrier protein family
TNKYLCFPLLLLHSQHLNFILSSLSNFTTMGVKSFVEGGIASVIAGCSTHPLDLIKVRLQLHGEAPSTTTVTLLRPALAFPNSSPAAFLETTSSVPKVGPISLGINIVKSEGAAALFSGVSATLLRQTLYSTTRMGLYEVLKNKWTDPESGKLNLSRKIGAGLVAGGIGAAVGNPADVAMVRMQADGRLPLAQRRNYAGVGDAIRSMVKGEGVTSLWRGSALTINRAMIVTAAQLASYDQFKEGILENGVMNDGLGTHVVASFAAGFVASVASNPVDVIKTRVMNMKVGAYDGAWDCAVKTVKAEGAMALYKGFVPTVCRQGPFTVVLFVTLEQVRKLLRDF

SEQ ID NO: 41243 - protein, 313 aa, Arabidopsis thaliana
  peptide (1)..(313): Ceres Seq. ID no. 12395534
  misc_feature (76)..(313): Homolog of NCBI NO: 24657945 NR Description: CG7514-PA [Drosophila melanogaster]
  misc_feature (60)..(308): Homolog of NCBI NO: 6179584 NR Description: dicarboxylate carrier protein [Homo sapiens]
  misc_feature (6)..(39): Homolog of NCBI NO: 27807211 NR Description: solute carrier family 25 (mitochondrial carrier
  misc_feature (76)..(308): Homolog of NCBI NO: 27807211 NR Description: solute carrier family 25 (mitochondrial carrier
  misc_feature (1)..(35): Homolog of NCBI NO: 15242423 NR Description: mitochondrial carrier protein family; protein id:
  misc_feature (62)..(312): Homolog of NCBI NO: 15242423 NR Description: mitochondrial carrier protein family; protein id:
  misc_feature (1)..(313): Homolog of NCBI NO: 13878155 NR Description: putative mitochondrial dicarboxylate carrier
  misc_feature (1)..(313): Homolog of NCBI NO: 21554157 NR Description: putative mitochondrial dicarboxylate carrier
  misc_feature (1)..(313): Homolog of NCBI NO: 15227225 NR Description: mitochondrial carrier protein family
  misc_feature (1)..(313): Homolog of NCBI NO: 15233884 NR Description: mitochondrial carrier protein family
MGVKSFVEGGIASVIAGCSTHPLDLIKVRLQLHGEAPSTTTVTLLRPALAFPNSSPAAFLETTSSVPKVGPISLGINIVKSEGAAALFSGVSATLLRQTLYSTTRMGLYEVLKNKWTDPESGKLNLSRKIGAGLVAGGIGAAVGNPADVAMVRMQADGRLPLAQRRNYAGVGDAIRSMVKGEGVTSLWRGSALTINRAMIVTAAQLASYDQFKEGILENGVMNDGLGTHVVASFAAGFVASVASNPVDVIKTRVMNMKVGAYDGAWDCAVKTVKAEGAMALYKGFVPTVCRQGPFTVVLFVTLEQVRKLLRDF

SEQ ID NO: 41244 - protein, 208 aa, Arabidopsis thaliana
  peptide (1)..(208): Ceres Seq. ID no. 12395535
  misc_feature (1)..(203): Homolog of NCBI NO: 21358457 NR Description: CG1907-PA [Drosophila melanogaster]
  misc_feature (1)..(203): Homolog of NCBI NO: 1580888 NR Description: 2-oxoglutarate carrier protein
  misc_feature (1)..(208): Homolog of NCBI NO: 24657945 NR Description: CG7514-PA [Drosophila melanogaster]
  misc_feature (1)..(203): Homolog of NCBI NO: 6179584 NR Description: dicarboxylate carrier protein [Homo sapiens]
  misc_feature (1)..(203): Homolog of NCBI NO: 27807211 NR Description: solute carrier family 25 (mitochondrial carrier
  misc_feature (1)..(207): Homolog of NCBI NO: 15242423 NR Description: mitochondrial carrier protein family; protein id:
  misc_feature (1)..(208): Homolog of NCBI NO: 13878155 NR Description: putative mitochondrial dicarboxylate carrier
  misc_feature (1)..(208): Homolog of NCBI NO: 21554157 NR Description: putative mitochondrial dicarboxylate carrier
  misc_feature (1)..(208): Homolog of NCBI NO: 15227225 NR Description: mitochondrial carrier protein family
  misc_feature (1)..(208): Homolog of NCBI NO: 15233884 NR Description: mitochondrial carrier protein family
MGLYEVLKNKWTDPESGKLNLSRKIGAGLVAGGIGAAVGNPADVAMVRMQADGRLPLAQRRNYAGVGDAIRSMVKGEGVTSLWRGSALTINRAMIVTAAQLASYDQFKEGILENGVMNDGLGTHVVASFAAGFVASVASNPVDVIKTRVMNMKVGAYDGAWDCAVKTVKAEGAMALYKGFVPTVCRQGPFTVVLFVTLEQVRKLLRDF

SEQ ID NO: 41245 - DNA, 1349 bp, Arabidopsis thaliana
  misc_feature (1)..(1349): Ceres Seq. ID no. 12481973
  misc_feature: MA Experiment ID: 108569 Result: Up-regulated in Transcription
  misc_feature: MA Experiment 108569 PARAMETER Experiment Name: At_0.001%_MeJA__cDNA_P Parameter: Timepoint (hr) Value: 6
  misc_feature: MA Experiment 108569 PARAMETER Experiment Name: At_0.001%_MeJA__cDNA_P Parameter: Tissue Value: Aerial
  misc_feature: MA Experiment 108569 PARAMETER Experiment Name: At_0.001%_MeJA__cDNA_P Parameter: Treatment Value: 0.001% MeJA vs. No Treatment
  misc_feature: MA Experiment ID: 108573 Result: Up-regulated in Transcription
  misc_feature: MA Experiment 108573 PARAMETER Experiment Name: At_Drought_cDNA_P Parameter: Timepoint (hr) Value: 6
  misc_feature: MA Experiment 108573 PARAMETER Experiment Name: At_Drought_cDNA_P Parameter: Tissue Value: Aerial
  misc_feature: MA Experiment 108573 PARAMETER Experiment Name: At_Drought_cDNA_P Parameter: Treatment Value: Drought vs. No Drought
  misc_feature: MA Experiment ID: 108579 Result: Down-regulated in Transcription
  misc_feature: MA Experiment 108579 PARAMETER Experiment Name: At_4deg_Cold_cDNA_P Parameter: Temperature (deg C) Value: 4 vs. 22
  misc_feature: MA Experiment 108579 PARAMETER Experiment Name: At_4deg_Cold_cDNA_P Parameter: Timepoint (hr) Value: 6
  misc_feature: MA Experiment 108579 PARAMETER Experiment Name: At_4deg_Cold_cDNA_P Parameter: Tissue Value: Aerial
  misc_feature: MA Experiment ID: 108595 Result: Down-regulated in Transcription
  misc_feature: MA Experiment 108595 PARAMETER Experiment Name: At_Ler-pi_Ovule_cDNA_P Parameter: Plant Line Value: null
  misc_feature: MA Experiment ID: 20000113 Result: Up-regulated in Transcription
  misc_feature: MA Experiment 20000113 PARAMETER Experiment Name: At_42deg_Heat_cDNA_P Parameter: Temperature (deg C) Value: 42 vs. 22
  misc_feature: MA Experiment 20000113 PARAMETER Experiment Name: At_42deg_Heat_cDNA_P Parameter: Timepoint (hr) Value: 8
  misc_feature: MA Experiment 20000113 PARAMETER Experiment Name: At_42deg_Heat_cDNA_P Parameter: Tissue Value: Aerial
  misc_feature: MA Experiment ID: 20001450 Result: Up-regulated in Transcription
  misc_feature: MA Experiment 20001450 PARAMETER Experiment Name: At_Far-red-induction_P Parameter: Age (day) Value: 7
  misc_feature: MA Experiment 20001450 PARAMETER Experiment Name: At_Far-red-induction_P Parameter: Light Value: Far-red vs. White
  misc_feature: MA Experiment 20001450 PARAMETER Experiment Name: At_Far-red-induction_P Parameter: Organism Value: A. thaliana
  misc_feature: MA Experiment 20001450 PARAMETER Experiment Name: At_Far-red-induction_P Parameter: Plant Line Value: Columbia
  misc_feature: MA Experiment 20001450 PARAMETER Experiment Name: At_Far-red-induction_P Parameter: Timepoint (hr) Value: 8
  misc_feature: MA Experiment 20001450 PARAMETER Experiment Name: At_Far-red-induction_P Parameter: Tissue Value: Whole Plant
attctcattgaacaaaaataataaattctcagtgatccttcgagagattgattataaaatccggtcggcgacgagacttactttcgccgcaaaatttgttctccggtaccggatatttacgtatctgttctcaaattttaccattcccaccactaaaaccctagattaaaagcttcaattaccggaaaaagtctctacttaagagatttatctgtttgttgtcttaaatcacaggaagagaatggattttcttaaggcaacgattatagttgccctaatttgcaatttcgcctcactggcgtcttctgttcctttcatagttctgcatggaattggggataaatgcagtaatgcaggagtgacacaattcacagagcttttaagcgattggtctggttctcaaggatattgcttggagattgggaatggctcatgggactcatggactatgcctctccttgatcagacatcagttgtttgtgagaaggtgaaaagtatgccagagcttagtgacggttacagcattgtggggctttctcagggtaacatgattggtcgagctctcattgagttttgcgatggagcaccacctgttaagagttttgtttcggtagcgggtcctcatgctggcactgcatcgattccgttctgtggtgctacctggatttgcatcatgttggacagtatgatcaaagcagagatctatagcgactatatgcaggaacatttggctcctagcggttttctcaaaatcccaactgacatagcgggttacatggaaggctgtaggtttctcccaaagctaaacaacgaacttccagtcaaaaactcgacttataaggagaggttctcgagtttggagaatcttgtgcttattatgtttgagcatgacacaatattgatacctaaagaaacctcatggtttggatattatcctgatgggtctttcaagaccattcttccgccgcaagagaccaagctatatactgaagactggattggtttgagaaccttagatgaagctggaaaagtgaagttcgttaacgtctctggaaatcatcttcagatatctcatacagacatgaagaagcatatagtgccatacctctgtgataaatcatcgtcgtcatcatccacaacaatggcagtttccggatcatcttcctcacaccagtggcttccaagtgtagggaacattattatggatcttattggtccagaagtggatcagcttcagcttgtgctacgtcatgtgtaaatctgatgtcctgtgttgttgtttgttctcttactaaacacgatcgtctcgtgatatgtttgtaacttgaagataaaacaagaaaactgtt

SEQ ID NO: 41246 - protein, 338 aa, Arabidopsis thaliana
  peptide (1)..(338): Ceres Seq. ID no. 12481974
  misc_feature (20)..(290): Pfam Name: Palmitoyl protein thioesterase Pfam Description: Palmitoyl protein thioesterase
  misc_feature (3)..(297): Homolog of NCBI NO: 15236077 NR Description: putative protein; protein id: At4g17470.1
  misc_feature (3)..(297): Homolog of NCBI NO: 21554369 NR Description: palmitoyl-protein thioesterase precursor-like
  misc_feature (3)..(297): Homolog of NCBI NO: 15236078 NR Description: putative protein
  misc_feature (1)..(289): Homolog of NCBI NO: 15236079 NR Description: putative protein; protein id: At4g17483.1
  misc_feature (8)..(298): Homolog of NCBI NO: 28393539 NR Description: putative palmitoyl-protein thioesterase precursor
  misc_feature (8)..(298): Homolog of NCBI NO: 15238063 NR Description: palmitoyl-protein thioesterase precursor-like
  misc_feature (19)..(271): Homolog of NCBI NO: 37536884 NR Description: putative palmitoyl-protein thioesterase
  misc_feature (1)..(338): Homolog of NCBI NO: 21593393 NR Description: palmitoyl-protein thioesterase precursor-like
  misc_feature (1)..(338): Homolog of NCBI NO: 14334718 NR Description: putative palmitoyl-protein thioesterase precursor
  misc_feature (1)..(338): Homolog of NCBI NO: 15232301 NR Description: palmitoyl-protein thioesterase precursor - like
MDFLKATIIVALICNFASLASSVPFIVLHGIGDKCSNAGVTQFTELLSDWSGSQGYCLEIGNGSWDSWTMPLLDQTSVVCEKVKSMPELSDGYSIVGLSQGNMIGRALIEFCDGAPPVKSFVSVAGPHAGTASIPFCGATWICIMLDSMIKAEIYSDYMQEHLAPSGFLKIPTDIAGYMEGCRFLPKLNNELPVKNSTYKERFSSLENLVLIMFEHDTILIPKETSWFGYYPDGSFKTILPPQETKLYTEDWIGLRTLDEAGKVKFVNVSGNHLQISHTDMKKHIVPYLCDKSSSSSSTTMAVSGSSSSHQWLPSVGNIIMDLIGPEVDQLQLVLRHV

SEQ ID NO: 41247 - protein, 269 aa, Arabidopsis thaliana
  peptide (1)..(269): Ceres Seq. ID no. 12481975
  misc_feature (1)..(221): Pfam Name: Palmitoyl protein thioesterase Pfam Description: Palmitoyl protein thioesterase
  misc_feature (1)..(228): Homolog of NCBI NO: 15236077 NR Description: putative protein; protein id: At4g17470.1
  misc_feature (1)..(228): Homolog of NCBI NO: 21554369 NR Description: palmitoyl-protein thioesterase precursor-like
  misc_feature (1)..(228): Homolog of NCBI NO: 15236078 NR Description: putative protein
  misc_feature (1)..(220): Homolog of NCBI NO: 15236079 NR Description: putative protein; protein id: At4g17483.1
  misc_feature (1)..(229): Homolog of NCBI NO: 28393539 NR Description: putative palmitoyl-protein thioesterase precursor
  misc_feature (1)..(229): Homolog of NCBI NO: 15238063 NR Description: palmitoyl-protein thioesterase precursor-like
  misc_feature (1)..(202): Homolog of NCBI NO: 37536884 NR Description: putative palmitoyl-protein thioesterase
  misc_feature (1)..(269): Homolog of NCBI NO: 21593393 NR Description: palmitoyl-protein thioesterase precursor-like
  misc_feature (1)..(269): Homolog of NCBI NO: 14334718 NR Description: putative palmitoyl-protein thioesterase precursor
  misc_feature (1)..(269): Homolog of NCBI NO: 15232301 NR Description: palmitoyl-protein thioesterase precursor - like
MPLLDQTSVVCEKVKSMPELSDGYSIVGLSQGNMIGRALIEFCDGAPPVKSFVSVAGPHAGTASIPFCGATWICIMLDSMIKAEIYSDYMQEHLAPSGFLKIPTDIAGYMEGCRFLPKLNNELPVKNSTYKERFSSLENLVLIMFEHDTILIPKETSWFGYYPDGSFKTILPPQETKLYTEDWIGLRTLDEAGKVKFVNVSGNHLQISHTDMKKHIVPYLCDKSSSSSSTTMAVSGSSSSHQWLPSVGNIIMDLIGPEVDQLQLVLRHV

SEQ ID NO: 41248 - protein, 253 aa, Arabidopsis thaliana
  peptide (1)..(253): Ceres Seq. ID no. 12481976
  misc_feature (1)..(205): Pfam Name: Palmitoyl protein thioesterase Pfam Description: Palmitoyl protein thioesterase
  misc_feature (1)..(212): Homolog of NCBI NO: 15236077 NR Description: putative protein; protein id: At4g17470.1
  misc_feature (1)..(212): Homolog of NCBI NO: 21554369 NR Description: palmitoyl-protein thioesterase precursor-like
  misc_feature (1)..(212): Homolog of NCBI NO: 15236078 NR Description: putative protein
  misc_feature (1)..(204): Homolog of NCBI NO: 15236079 NR Description: putative protein; protein id: At4g17483.1
  misc_feature (1)..(213): Homolog of NCBI NO: 28393539 NR Description: putative palmitoyl-protein thioesterase precursor
  misc_feature (1)..(213): Homolog of NCBI NO: 15238063 NR Description: palmitoyl-protein thioesterase precursor-like
  misc_feature (1)..(186): Homolog of NCBI NO: 37536884 NR Description: putative palmitoyl-protein thioesterase
  misc_feature (1)..(253): Homolog of NCBI NO: 21593393 NR Description: palmitoyl-protein thioesterase precursor-like
  misc_feature (1)..(253): Homolog of NCBI NO: 14334718 NR Description: putative palmitoyl-protein thioesterase precursor
  misc_feature (1)..(253): Homolog of NCBI NO: 15232301 NR Description: palmitoyl-protein thioesterase precursor - like
MPELSDGYSIVGLSQGNMIGRALIEFCDGAPPVKSFVSVAGPHAGTASIPFCGATWICIMLDSMIKAEIYSDYMQEHLAPSGFLKIPTDIAGYMEGCRFLPKLNNELPVKNSTYKERFSSLENLVLIMFEHDTILIPKETSWFGYYPDGSFKTILPPQETKLYTEDWIGLRTLDEAGKVKFVNVSGNHLQISHTDMKKHIVPYLCDKSSSSSSTTMAVSGSSSSHQWLPSVGNIIMDLIGPEVDQLQLVLRHV

SEQ ID NO: 41249 - DNA, 1519 bp, Arabidopsis thaliana; identical to SEQ ID NO: 27756
  misc_feature (1)..(1519): Ceres Seq. ID no. 12558479
  misc_feature: MA Experiment ID: 20001451 Result: Down-regulated in Transcription
  misc_feature: MA Experiment 20001451 PARAMETER Experiment Name: At_Far-red-induction_P Parameter: Age (day) Value: 7
  misc_feature: MA Experiment 20001451 PARAMETER Experiment Name: At_Far-red-induction_P Parameter: Light Value: Far-red vs. White
  misc_feature: MA Experiment 20001451 PARAMETER Experiment Name: At_Far-red-induction_P Parameter: Organism Value: A. thaliana
  misc_feature: MA Experiment 20001451 PARAMETER Experiment Name: At_Far-red-induction_P Parameter: Plant Line Value: Columbia
  misc_feature: MA Experiment 20001451 PARAMETER Experiment Name: At_Far-red-induction_P Parameter: Timepoint (hr) Value: 24
  misc_feature: MA Experiment 20001451 PARAMETER Experiment Name: At_Far-red-induction_P Parameter: Tissue Value: Whole Plant
  misc_feature: MA Experiment ID: 20001557 Result: Up-regulated in Transcription
  misc_feature: MA Experiment 20001557 PARAMETER Experiment Name: At_Drought_Soil_Dry_P Parameter: Age (day) Value: 27
  misc_feature: MA Experiment 20001557 PARAMETER Experiment Name: At_Drought_Soil_Dry_P Parameter: Organism Value: A. thaliana
  misc_feature: MA Experiment 20001557 PARAMETER Experiment Name: At_Drought_Soil_Dry_P Parameter: Plant Line Value: WS
  misc_feature: MA Experiment 20001557 PARAMETER Experiment Name: At_Drought_Soil_Dry_P Parameter: Post Timepoint (hr) Value: 3
  misc_feature: MA Experiment 20001557 PARAMETER Experiment Name: At_Drought_Soil_Dry_P Parameter: Post-Treatment Value: Re-Water vs. No Drought
  misc_feature: MA Experiment 20001557 PARAMETER Experiment Name: At_Drought_Soil_Dry_P Parameter: Timepoint (day) Value: 13
  misc_feature: MA Experiment 20001557 PARAMETER Experiment Name: At_Drought_Soil_Dry_P Parameter: Treatment Value: Drought vs. No Drought

SEQ ID NO: 41250 - protein, 381 aa, Arabidopsis thaliana; identical to SEQ ID NO: 27757
  peptide (1)..(381): Ceres Seq. ID no. 12558480
  misc_feature (1)..(381): Homolog of NCBI NO: 100424 NR Description: ADP,ATP carrier protein precursor - potato
  misc_feature (1)..(381): Homolog of NCBI NO: 113457 NR Description: ADP,ATP carrier protein, mitochondrial precursor
  misc_feature (1)..(381): Homolog of NCBI NO: 1890116 NR Description: ADP/ATP translocator [Lycopersicon esculentum]
  misc_feature (6)..(380): Homolog of NCBI NO: 113461 NR Description: ADP,ATP carrier protein, mitochondrial precursor
  misc_feature (2)..(381): Homolog of NCBI NO: 3334115 NR Description: ADP,ATP carrier protein 1, mitochondrial (ADP/ATP translocase 1) (Adenine nucleotide translocator 1) (ANT
  misc_feature (1)..(381): Homolog of NCBI NO: 478810 NR Description: ADP,ATP carrier protein - Arabidopsis thaliana
  misc_feature (1)..(381): Homolog of NCBI NO: 15240640 NR Description: adenosine nucleotide translocator
  misc_feature (1)..(381): Homolog of NCBI NO: 444790 NR Description: nucleotide translocator
  misc_feature (4)..(381): Homolog of NCBI NO: 99658 NR Description: ADP,ATP carrier protein - Arabidopsis thaliana
  misc_feature (1)..(381): Homolog of NCBI NO: 15231937 NR Description: adenylate translocator
  misc_feature (1)..(381): Homolog of NCBI NO: 100424 NR Description: ADP,ATP carrier protein precursor - potato
  misc_feature (1)..(381): Homolog of NCBI NO: 113457 NR Description: ADP,ATP carrier protein, mitochondrial precursor
  misc_feature (1)..(381): Homolog of NCBI NO: 1890116 NR Description: ADP/ATP translocator [Lycopersicon esculentum]
  misc_feature (6)..(380): Homolog of NCBI NO: 113461 NR Description: ADP,ATP carrier protein, mitochondrial precursor
  misc_feature (2)..(381): Homolog of NCBI NO: 3334115 NR Description: ADP,ATP carrier protein 1, mitochondrial (ADP/ATP translocase 1) (Adenine nucleotide translocator 1) (ANT
  misc_feature (1)..(381): Homolog of NCBI NO: 478810 NR Description: ADP,ATP carrier protein - Arabidopsis thaliana
  misc_feature (1)..(381): Homolog of NCBI NO: 15240640 NR Description: adenosine nucleotide translocator
  misc_feature (1)..(381): Homolog of NCBI NO: 444790 NR Description: nucleotide translocator
  misc_feature (4)..(381): Homolog of NCBI NO: 99658 NR Description: ADP,ATP carrier protein - Arabidopsis thaliana
  misc_feature (1)..(381): Homolog of NCBI NO: 15231937 NR Description: adenylate translocator

SEQ ID NO: 41251 - protein, 363 aa, Arabidopsis thaliana; identical to SEQ ID NO: 27758
  peptide (1)..(363): Ceres Seq. ID no. 12558481
  misc_feature (1)..(363): Homolog of NCBI NO: 100424 NR Description: ADP,ATP carrier protein precursor - potato
  misc_feature (1)..(363): Homolog of NCBI NO: 113457 NR Description: ADP,ATP carrier protein, mitochondrial precursor
  misc_feature (1)..(363): Homolog of NCBI NO: 1890116 NR Description: ADP/ATP translocator [Lycopersicon esculentum]
  misc_feature (1)..(362): Homolog of NCBI NO: 113461 NR Description: ADP,ATP carrier protein, mitochondrial precursor
  misc_feature (1)..(363): Homolog of NCBI NO: 3334115 NR Description: ADP,ATP carrier protein 1, mitochondrial (ADP/ATP translocase 1) (Adenine nucleotide translocator 1) (ANT
  misc_feature (1)..(363): Homolog of NCBI NO: 478810 NR Description: ADP,ATP carrier protein - Arabidopsis thaliana
  misc_feature (1)..(363): Homolog of NCBI NO: 15240640 NR Description: adenosine nucleotide translocator
  misc_feature (1)..(363): Homolog of NCBI NO: 444790 NR Description: nucleotide translocator
  misc_feature (1)..(363): Homolog of NCBI NO: 99658 NR Description: ADP,ATP carrier protein - Arabidopsis thaliana
  misc_feature (1)..(363): Homolog of NCBI NO: 15231937 NR Description: adenylate translocator
  misc_feature (1)..(363): Homolog of NCBI NO: 100424 NR Description: ADP,ATP carrier protein precursor - potato
  misc_feature (1)..(363): Homolog of NCBI NO: 113457 NR Description: ADP,ATP carrier protein, mitochondrial precursor
  misc_feature (1)..(363): Homolog of NCBI NO: 1890116 NR Description: ADP/ATP translocator [Lycopersicon esculentum]
  misc_feature (1)..(362): Homolog of NCBI NO: 113461 NR Description: ADP,ATP carrier protein, mitochondrial precursor
  misc_feature (1)..(363): Homolog of NCBI NO: 3334115 NR Description: ADP,ATP carrier protein 1, mitochondrial (ADP/ATP translocase 1) (Adenine nucleotide translocator 1) (ANT
  misc_feature (1)..(363): Homolog of NCBI NO: 478810 NR Description: ADP,ATP carrier protein - Arabidopsis thaliana
  misc_feature (1)..(363): Homolog of NCBI NO: 15240640 NR Description: adenosine nucleotide translocator
  misc_feature (1)..(363): Homolog of NCBI NO: 444790 NR Description: nucleotide translocator
  misc_feature (1)..(363): Homolog of NCBI NO: 99658 NR Description: ADP,ATP carrier protein - Arabidopsis thaliana
  misc_feature (1)..(363): Homolog of NCBI NO: 15231937 NR Description: adenylate translocator

SEQ ID NO: 41252 - protein, 346 aa, Arabidopsis thaliana; identical to SEQ ID NO: 27759
  peptide (1)..(346): Ceres Seq. ID no. 12558482
  misc_feature (1)..(346): Homolog of NCBI NO: 100424 NR Description: ADP,ATP carrier protein precursor - potato
  misc_feature (1)..(346): Homolog of NCBI NO: 113457 NR Description: ADP,ATP carrier protein, mitochondrial precursor
  misc_feature (1)..(346): Homolog of NCBI NO: 1890116 NR Description: ADP/ATP translocator [Lycopersicon esculentum]
  misc_feature (1)..(345): Homolog of NCBI NO: 113461 NR Description: ADP,ATP carrier protein, mitochondrial precursor
  misc_feature (1)..(346): Homolog of NCBI NO: 3334115 NR Description: ADP,ATP carrier protein 1, mitochondrial (ADP/ATP translocase 1) (Adenine nucleotide translocator 1) (ANT
  misc_feature (1)..(346): Homolog of NCBI NO: 478810 NR Description: ADP,ATP carrier protein - Arabidopsis thaliana
  misc_feature (1)..(346): Homolog of NCBI NO: 15240640 NR Description: adenosine nucleotide translocator
  misc_feature (1)..(346): Homolog of NCBI NO: 444790 NR Description: nucleotide translocator
  misc_feature (1)..(346): Homolog of NCBI NO: 99658 NR Description: ADP,ATP carrier protein - Arabidopsis thaliana
  misc_feature (1)..(346): Homolog of NCBI NO: 15231937 NR Description: adenylate translocator
  misc_feature (1)..(346): Homolog of NCBI NO: 100424 NR Description: ADP,ATP carrier protein precursor - potato
  misc_feature (1)..(346): Homolog of NCBI NO: 113457 NR Description: ADP,ATP carrier protein, mitochondrial precursor
  misc_feature (1)..(346): Homolog of NCBI NO: 1890116 NR Description: ADP/ATP translocator [Lycopersicon esculentum]
  misc_feature (1)..(345): Homolog of NCBI NO: 113461 NR Description: ADP,ATP carrier protein, mitochondrial precursor
  misc_feature (1)..(346): Homolog of NCBI NO: 3334115 NR Description: ADP,ATP carrier protein 1, mitochondrial (ADP/ATP translocase 1) (Adenine nucleotide translocator 1) (ANT
  misc_feature (1)..(346): Homolog of NCBI NO: 478810 NR Description: ADP,ATP carrier protein - Arabidopsis thaliana
  misc_feature (1)..(346): Homolog of NCBI NO: 15240640 NR Description: adenosine nucleotide translocator
  misc_feature (1)..(346): Homolog of NCBI NO: 444790 NR Description: nucleotide translocator
  misc_feature (1)..(346): Homolog of NCBI NO: 99658 NR Description: ADP,ATP carrier protein - Arabidopsis thaliana
  misc_feature (1)..(346): Homolog of NCBI NO: 15231937 NR Description: adenylate translocator

SEQ ID NO: 41253 - DNA, 1361 bp, Arabidopsis thaliana
  misc_feature (1)..(1361): Ceres Seq. ID no. 12327945
  misc_feature: MA Experiment ID: 108434 Result: Up-regulated in Transcription
  misc_feature: MA Experiment 108434 PARAMETER Experiment Name: At_Root_Tips_cDNA_P Parameter: Tissue Value: Root Tips
  misc_feature: MA Experiment ID: 108461 Result: Up-regulated in Transcription
  misc_feature: MA Experiment 108461 PARAMETER Experiment Name: At_Germinating_Seeds_cDNA_P Parameter: Age (day) Value: 1 vs. 0
  misc_feature: MA Experiment 108461 PARAMETER Experiment Name: At_Germinating_Seeds_cDNA_P Parameter: Tissue Value: Germinating Seeds
  misc_feature: MA Experiment ID: 108462 Result: Up-regulated in Transcription
  misc_feature: MA Experiment 108462 PARAMETER Experiment Name: At_Germinating_Seeds_cDNA_P Parameter: Age (day) Value: 2 vs. 0
  misc_feature: MA Experiment 108462 PARAMETER Experiment Name: At_Germinating_Seeds_cDNA_P Parameter: Tissue Value: Germinating Seeds
  misc_feature: MA Experiment ID: 108463 Result: Up-regulated in Transcription
  misc_feature: MA Experiment 108463 PARAMETER Experiment Name: At_Germinating_Seeds_cDNA_P Parameter: Age (day) Value: 3 vs. 0
  misc_feature: MA Experiment 108463 PARAMETER Experiment Name: At_Germinating_Seeds_cDNA_P Parameter: Tissue Value: Germinating Seeds
  misc_feature: MA Experiment ID: 108464 Result: Up-regulated in Transcription
  misc_feature: MA Experiment 108464 PARAMETER Experiment Name: At_Germinating_Seeds_cDNA_P Parameter: Age (day) Value: 4 vs. 0
  misc_feature: MA Experiment 108464 PARAMETER Experiment Name: At_Germinating_Seeds_cDNA_P Parameter: Tissue Value: Germinating Seeds
  misc_feature: MA Experiment ID: 20000069 Result: Down-regulated in Transcription
  misc_feature: MA Experiment 20000069 PARAMETER Experiment Name: At_100uM_ABA_Mutants_cDNA_P Parameter: Plant Line Value: CS23
  misc_feature: MA Experiment 20000069 PARAMETER Experiment Name: At_100uM_ABA_Mutants_cDNA_P Parameter: Timepoint (hr) Value: 6
  misc_feature: MA Experiment 20000069 PARAMETER Experiment Name: At_100uM_ABA_Mutants_cDNA_P Parameter: Tissue Value: Aerial
  misc_feature: MA Experiment 20000069 PARAMETER Experiment Name: At_100uM_ABA_Mutants_cDNA_P Parameter: Treatment Value: 100uM ABA vs. No Treatment
  misc_feature: MA Experiment ID: 20000071 Result: Down-regulated in Transcription
  misc_feature: MA Experiment 20000071 PARAMETER Experiment Name: At_100uM_ABA_Mutants_cDNA_P Parameter: Plant Line Value: CS8104
  misc_feature: MA Experiment 20000071 PARAMETER Experiment Name: At_100uM_ABA_Mutants_cDNA_P Parameter: Timepoint (hr) Value: 6
  misc_feature: MA Experiment 20000071 PARAMETER Experiment Name: At_100uM_ABA_Mutants_cDNA_P Parameter: Tissue Value: Aerial
  misc_feature: MA Experiment 20000071 PARAMETER Experiment Name: At_100uM_ABA_Mutants_cDNA_P Parameter: Treatment Value: 100uM ABA vs. No Treatment
  misc_feature: MA Experiment ID: 20000072 Result: Down-regulated in Transcription
  misc_feature: MA Experiment 20000072 PARAMETER Experiment Name: At_100uM_ABA_Mutants_cDNA_P Parameter: Plant Line Value: CS8105
  misc_feature: MA Experiment 20000072 PARAMETER Experiment Name: At_100uM_ABA_Mutants_cDNA_P Parameter: Timepoint (hr) Value: 6
  misc_feature: MA Experiment 20000072 PARAMETER Experiment Name: At_100uM_ABA_Mutants_cDNA_P Parameter: Tissue Value: Aerial
  misc_feature: MA Experiment 20000072 PARAMETER Experiment Name: At_100uM_ABA_Mutants_cDNA_P Parameter: Treatment Value: 100uM ABA vs. No Treatment
  misc_feature: MA Experiment ID: 20000087 Result: Down-regulated in Transcription
  misc_feature: MA Experiment 20000087 PARAMETER Experiment Name: At_100uM_ABA_Mutants_cDNA_P Parameter: Plant Line Value: WS
  misc_feature: MA Experiment 20000087 PARAMETER Experiment Name: At_100uM_ABA_Mutants_cDNA_P Parameter: Timepoint (hr) Value: 6
  misc_feature: MA Experiment 20000087 PARAMETER Experiment Name: At_100uM_ABA_Mutants_cDNA_P Parameter: Tissue Value: Aerial
  misc_feature: MA Experiment 20000087 PARAMETER Experiment Name: At_100uM_ABA_Mutants_cDNA_P Parameter: Treatment Value: 100uM ABA vs. No Treatment
  misc_feature: MA Experiment ID: 20000089 Result: Down-regulated in Transcription
  misc_feature: MA Experiment ID: 20000090 Result: Down-regulated in Transcription
  misc_feature: MA Experiment ID: 20000117 Result: Down-regulated in Transcription
  misc_feature: MA Experiment 20000117 PARAMETER Experiment Name: At_100uM_ABA_Mutants_cDNA_P Parameter: Plant Line Value: Columbia
  misc_feature: MA Experiment 20000117 PARAMETER Experiment Name: At_100uM_ABA_Mutants_cDNA_P Parameter: Timepoint (hr) Value: 6
  misc_feature: MA Experiment 20000117 PARAMETER Experiment Name: At_100uM_ABA_Mutants_cDNA_P Parameter: Tissue Value: Aerial
  misc_feature: MA Experiment 20000117 PARAMETER Experiment Name: At_100uM_ABA_Mutants_cDNA_P Parameter: Treatment Value: 100uM ABA vs. No Treatment
  misc_feature: MA Experiment ID: 20000179 Result: Up-regulated in Transcription
  misc_feature: MA Experiment 20000179 PARAMETER Experiment Name: At_Germinating_Seeds_P Parameter: Age (hr) Value: 6 vs. 0
  misc_feature: MA Experiment 20000179 PARAMETER Experiment Name: At_Germinating_Seeds_P Parameter: Tissue Value: Germinating Seeds
  misc_feature: MA Experiment ID: 20000180 Result: Up-regulated in Transcription
  misc_feature: MA Experiment 20000180 PARAMETER Experiment Name: At_Germinating_Seeds_P Parameter: Age (hr) Value: 24 vs. 0
  misc_feature: MA Experiment 20000180 PARAMETER Experiment Name: At_Germinating_Seeds_P Parameter: Tissue Value: Germinating Seeds
  misc_feature: MA Experiment ID: 20000227 Result: Up-regulated in Transcription
  misc_feature: MA Experiment 20000227 PARAMETER Experiment Name: At_Root-Tips-vs-Tops_P Parameter: Tissue Value: Root Tips vs. Root Tops
  misc_feature: MA Experiment ID: 20000265 Result: Up-regulated in Transcription
  misc_feature: MA Experiment 20000265 PARAMETER Experiment Name: At_Open_Flower_P Parameter: Age (day) Value: 21
  misc_feature: MA Experiment 20000265 PARAMETER Experiment Name: At_Open_Flower_P Parameter: Plant Line Value: WS
  misc_feature: MA Experiment 20000265 PARAMETER Experiment Name: At_Open_Flower_P Parameter: Tissue Value: Closed Flower vs. Whole Plant
  misc_feature: MA Experiment ID: 20001911 Result: Down-regulated in Transcription
  misc_feature: MA Experiment 20001911 PARAMETER Experiment Name: At_Drought_Reproduction_P Parameter: Age (day) Value: 40
  misc_feature: MA Experiment 20001911 PARAMETER Experiment Name: At_Drought_Reproduction_P Parameter: Organism Value: A. thaliana
  misc_feature: MA Experiment 20001911 PARAMETER Experiment Name: At_Drought_Reproduction_P Parameter: Plant Line Value: WS
  misc_feature: MA Experiment 20001911 PARAMETER Experiment Name: At_Drought_Reproduction_P Parameter: Timepoint (day) Value: 10
  misc_feature: MA Experiment 20001911 PARAMETER Experiment Name: At_Drought_Reproduction_P Parameter: Tissue Value: Flowers
  misc_feature: MA Experiment 20001911 PARAMETER Experiment Name: At_Drought_Reproduction_P Parameter: Treatment Value: Drought vs. No Drought
atcagacatctctctgcttctcttcttcttcttcttcttcagctttgagatctattctatcttcaaagatggccaccgatgagccttctcaaactcgctggagctttctgtttgggaggaagaagctgcctgaagaagatgtatcaaacaaggaccaaccagaagatggatcatccaacggtaataacggtgatgtcaacaacaactcttccccagtcaccaatcaggatggtaacacagccttggccaatggcaatgtgattcgcgagaagccgaaaaagtccatgtttcccccgtttgagtctgcggaaactcgtactctcgctgagagtttgagtagggatatcatccgtgggaatccaaatatcaagtgggaaagcatcaaaggtttggagaacgctaaaaagttgctcaaagaagctgtggtgatgcctataaaataccccacgtactttaatggtctactaactccatggaaaggaattcttctttttggtcctcctggtaccggaaagactatgcttgcaaaggctgttgctacagagtgcaatacaacattcttcaacatctcagcctcatctgttgttagcaaatggagaggtgattctgagaagttgataagagttctgttcgatctagctaggcatcatgcaccttcgacaatatttcttgatgagatcgacgcgatcataagccaacgtggtggtgaaggccgcagtgaacatgaagctagcaggcgtctcaaaaccgagctgctcattcagatggatgggttacagaaaacgaatgagctcgtatttgttttagcagcaacaaatctcccctgggaactagatgcagctatgctccggcgtctagagaaacgaattcttgtacctttaccggatccagaagcaagaagaggaatgttcgagatgcttataccgtcacaaccaggtgatgagccattgcctcatgatgtgttggttgagaaatctgagggctactctggttcagacattcgaatactttgtaaggaagctgcgatgcaaccactgagacgcacattggctattttggaagacagagaagatgttgtgcctgaagacgagctgccaaaaattggtcccatcctgccagaagacattgatcgagctctgagcaacactcgaccatcggctcatctgcacgcccatctttacgacaagttcaatgatgattatggtagccaaattctcaagtaaattcgatgtaatatatacatctatgccatctagaacttgctcattatttgtatggaagcatccaaattacggatgctcaatgaacttttctgtcttaaattatgaataaatgctcctagttccttgggactcagtttc

SEQ ID NO: 41254 - protein, 406 aa, Arabidopsis thaliana
  peptide (1)..(406): Ceres Seq. ID no. 12327946
  misc_feature (160)..(346): Pfam Name: ATPase family associated with various cellular Pfam Description: ATPase family associated with various cellular
  misc_feature (58)..(402): Homolog of NCBI NO: 34911210 NR Description: putative CAD ATPase [Oryza sativa (japonica
  misc_feature (57)..(402): Homolog of NCBI NO: 31241707 NR Description: ENSANGP00000018492 [Anopheles gambiae]
  misc_feature (1)..(402): Homolog of NCBI NO: 31197587 NR Description: ENSANGP00000004090 [Anopheles gambiae]
  misc_feature (59)..(402): Homolog of NCBI NO: 11071772 NR Description: probable AAA ATPase [Leishmania major]
  misc_feature (101)..(402): Homolog of NCBI NO: 34190544 NR Description: Unknown (protein for MGC:33211) [Homo sapiens]
  misc_feature (81)..(405): Homolog of NCBI NO: 34911050 NR Description: putative katanin [Oryza sativa (japonica
  misc_feature (80)..(405): Homolog of NCBI NO: 34909678 NR Description: katanin p60 subunit A 1-like
  misc_feature (33)..(405): Homolog of NCBI NO: 32352152 NR Description: katanin [Oryza sativa (japonica cultivar-group)]
  misc_feature (23)..(406): Homolog of NCBI NO: 25408335 NR Description: probable katanin [imported] - Arabidopsis thaliana
  misc_feature (23)..(406): Homolog of NCBI NO: 18403587 NR Description: putative katanin
QTSLCFSSSSSSSALRSILSSKMATDEPSQTRWSFLFGRKKLPEEDVSNKDQPEDGSSNGNNGDVNNNSSPVTNQDGNTALANGNVIREKPKKSMFPPFESAETRTLAESLSRDIIRGNPNIKWESIKGLENAKKLLKEAVVMPIKYPTYFNGLLTPWKGILLFGPPGTGKTMLAKAVATECNTTFFNISASSVVSKWRGDSEKLIRVLFDLARHHAPSTIFLDEIDAIISQRGGEGRSEHEASRRLKTELLIQMDGLQKTNELVFVLAATNLPWELDAAMLRRLEKRILVPLPDPEARRGMFEMLIPSQPGDEPLPHDVLVEKSEGYSGSDIRILCKEAAMQPLRRTLAILEDREDVVPEDELPKIGPILPEDIDRALSNTRPSAHLHAHLYDKFNDDYGSQILK

SEQ ID NO: 41255 - protein, 384 aa, Arabidopsis thaliana
  peptide (1)..(384): Ceres Seq. ID no. 12327947
  misc_feature (138)..(324): Pfam Name: ATPase family associated with various cellular Pfam Description: ATPase family associated with various cellular
  misc_feature (36)..(380): Homolog of NCBI NO: 34911210 NR Description: putative CAD ATPase [Oryza sativa (japonica
  misc_feature (35)..(380): Homolog of NCBI NO: 31241707 NR Description: ENSANGP00000018492 [Anopheles gambiae]
  misc_feature (1)..(380): Homolog of NCBI NO: 31197587 NR Description: ENSANGP00000004090 [Anopheles gambiae]
  misc_feature (37)..(380): Homolog of NCBI NO: 11071772 NR Description: probable AAA ATPase [Leishmania major]
  misc_feature (79)..(380): Homolog of NCBI NO: 34190544 NR Description: Unknown (protein for MGC:33211) [Homo sapiens]
  misc_feature (59)..(383): Homolog of NCBI NO: 34911050 NR Description: putative katanin [Oryza sativa (japonica
  misc_feature (58)..(383): Homolog of NCBI NO: 34909678 NR Description: katanin p60 subunit A 1-like
  misc_feature (11)..(383): Homolog of NCBI NO: 32352152 NR Description: katanin [Oryza sativa (japonica cultivar-group)]
  misc_feature (1)..(384): Homolog of NCBI NO: 25408335 NR Description: probable katanin [imported] - Arabidopsis thaliana
  misc_feature (1)..(384): Homolog of NCBI NO: 18403587 NR Description: putative katanin
MATDEPSQTRWSFLFGRKKLPEEDVSNKDQPEDGSSNGNNGDVNNNSSPVTNQDGNTALANGNVIREKPKKSMFPPFESAETRTLAESLSRDIIRGNPNIKWESIKGLENAKKLLKEAVVMPIKYPTYFNGLLTPWKGILLFGPPGTGKTMLAKAVATECNTTFFNISASSVVSKWRGDSEKLIRVLFDLARHHAPSTIFLDEIDAIISQRGGEGRSEHEASRRLKTELLIQMDGLQKTNELVFVLAATNLPWELDAAMLRRLEKRILVPLPDPEARRGMFEMLIPSQPGDEPLPHDVLVEKSEGYSGSDIRILCKEAAMQPLRRTLAILEDREDVVPEDELPKIGPILPEDIDRALSNTRPSAHLHAHLYDKFNDDYGSQILK

SEQ ID NO: 41256 - protein, 312 aa, Arabidopsis thaliana
  peptide (1)..(312): Ceres Seq. ID no. 12327948
  misc_feature (66)..(252): Pfam Name: ATPase family associated with various cellular Pfam Description: ATPase family associated with various cellular
  misc_feature (1)..(308): Homolog of NCBI NO: 34911210 NR Description: putative CAD ATPase [Oryza sativa (japonica
  misc_feature (1)..(308): Homolog of NCBI NO: 31241707 NR Description: ENSANGP00000018492 [Anopheles gambiae]
  misc_feature (1)..(308): Homolog of NCBI NO: 31197587 NR Description: ENSANGP00000004090 [Anopheles gambiae]
  misc_feature (1)..(308): Homolog of NCBI NO: 11071772 NR Description: probable AAA ATPase [Leishmania major]
  misc_feature (7)..(308): Homolog of NCBI NO: 34190544 NR Description: Unknown (protein for MGC:33211) [Homo sapiens]
  misc_feature (1)..(311): Homolog of NCBI NO: 34911050 NR Description: putative katanin [Oryza sativa (japonica
  misc_feature (1)..(311): Homolog of NCBI NO: 34909678 NR Description: katanin p60 subunit A 1-like
  misc_feature (1)..(311): Homolog of NCBI NO: 32352152 NR Description: katanin [Oryza sativa (japonica cultivar-group)]
  misc_feature (1)..(312): Homolog of NCBI NO: 25408335 NR Description: probable katanin [imported] - Arabidopsis thaliana
  misc_feature (1)..(312): Homolog of NCBI NO: 18403587 NR Description: putative katanin
MFPPFESAETRTLAESLSRDIIRGNPNIKWESIKGLENAKKLLKEAVVMPIKYPTYFNGLLTPWKGILLFGPPGTGKTMLAKAVATECNTTFFNISASSVVSKWRGDSEKLIRVLFDLARHHAPSTIFLDEIDAIISQRGGEGRSEHEASRRLKTELLIQMDGLQKTNELVFVLAATNLPWELDAAMLRRLEKRILVPLPDPEARRGMFEMLIPSQPGDEPLPHDVLVEKSEGYSGSDIRILCKEAAMQPLRRTLAILEDREDVVPEDELPKIGPILPEDIDRALSNTRPSAHLHAHLYDKFNDDYGSQILK

SEQ ID NO: 41257 - DNA, 725 bp, Arabidopsis thaliana
  misc_feature (1)..(725): Ceres Seq. ID no. 12326277
  misc_feature: MA Experiment ID: 108461 Result: Down-regulated in Transcription
  misc_feature: MA Experiment 108461 PARAMETER Experiment Name: At_Germinating_Seeds_cDNA_P Parameter: Age (day) Value: 1 vs. 0
  misc_feature: MA Experiment 108461 PARAMETER Experiment Name: At_Germinating_Seeds_cDNA_P Parameter: Tissue Value: Germinating Seeds
  misc_feature: MA Experiment ID: 108488 Result: Down-regulated in Transcription
  misc_feature: MA Experiment ID: 108585 Result: Up-regulated in Transcription
  misc_feature: MA Experiment 108585 PARAMETER Experiment Name: At_5mM_NaNP_cDNA_P Parameter: Timepoint (hr) Value: 6
  misc_feature: MA Experiment 108585 PARAMETER Experiment Name: At_5mM_NaNP_cDNA_P Parameter: Tissue Value: Aerial
  misc_feature: MA Experiment 108585 PARAMETER Experiment Name: At_5mM_NaNP_cDNA_P Parameter: Treatment Value: null
  misc_feature: MA Experiment ID: 108595 Result: Up-regulated in Transcription
  misc_feature: MA Experiment 108595 PARAMETER Experiment Name: At_Ler-pi_Ovule_cDNA_P Parameter: Plant Line Value: null
  misc_feature: MA Experiment ID: 108668 Result: Up-regulated in Transcription
  misc_feature: MA Experiment 108668 PARAMETER Experiment Name: At_2mM_SA_cDNA_P Parameter: Plant Line Value: WS
  misc_feature: MA Experiment 108668 PARAMETER Experiment Name: At_2mM_SA_cDNA_P Parameter: Timepoint (hr) Value: 6
  misc_feature: MA Experiment 108668 PARAMETER Experiment Name: At_2mM_SA_cDNA_P Parameter: Treatment Value: 2mM SA vs. No Treatment
  misc_feature: MA Experiment ID: 20000087 Result: Up-regulated in Transcription
  misc_feature: MA Experiment 20000087 PARAMETER Experiment Name: At_100uM_ABA_Mutants_cDNA_P Parameter: Plant Line Value: WS
  misc_feature: MA Experiment 20000087 PARAMETER Experiment Name: At_100uM_ABA_Mutants_cDNA_P Parameter: Timepoint (hr) Value: 6
  misc_feature: MA Experiment 20000087 PARAMETER Experiment Name: At_100uM_ABA_Mutants_cDNA_P Parameter: Tissue Value: Aerial
  misc_feature: MA Experiment 20000087 PARAMETER Experiment Name: At_100uM_ABA_Mutants_cDNA_P Parameter: Treatment Value: 100uM ABA vs. No Treatment
  misc_feature: MA Experiment ID: 20000117 Result: Up-regulated in Transcription
  misc_feature: MA Experiment 20000117 PARAMETER Experiment Name: At_100uM_ABA_Mutants_cDNA_P Parameter: Plant Line Value: Columbia
  misc_feature: MA Experiment 20000117 PARAMETER Experiment Name: At_100uM_ABA_Mutants_cDNA_P Parameter: Timepoint (hr) Value: 6
  misc_feature: MA Experiment 20000117 PARAMETER Experiment Name: At_100uM_ABA_Mutants_cDNA_P Parameter: Tissue Value: Aerial
  misc_feature: MA Experiment 20000117 PARAMETER Experiment Name: At_100uM_ABA_Mutants_cDNA_P Parameter: Treatment Value: 100uM ABA vs. No Treatment
  misc_feature: MA Experiment ID: 20000180 Result: Down-regulated in Transcription
  misc_feature: MA Experiment 20000180 PARAMETER Experiment Name: At_Germinating_Seeds_P Parameter: Age (hr) Value: 24 vs. 0
  misc_feature: MA Experiment 20000180 PARAMETER Experiment Name: At_Germinating_Seeds_P Parameter: Tissue Value: Germinating Seeds
  misc_feature: MA Experiment ID: 20000182 Result: Up-regulated in Transcription
  misc_feature: MA Experiment 20000182 PARAMETER Experiment Name: At_2mM_SA_P Parameter: Age (day) Value: 14
  misc_feature: MA Experiment 20000182 PARAMETER Experiment Name: At_2mM_SA_P Parameter: Organism Value: A. thaliana
  misc_feature: MA Experiment 20000182 PARAMETER Experiment Name: At_2mM_SA_P Parameter: Plant Line Value: WS
  misc_feature: MA Experiment 20000182 PARAMETER Experiment Name: At_2mM_SA_P Parameter: Timepoint (hr) Value: 6
  misc_feature: MA Experiment 20000182 PARAMETER Experiment Name: At_2mM_SA_P Parameter: Tissue Value: Aerial
  misc_feature: MA Experiment 20000182 PARAMETER Experiment Name: At_2mM_SA_P Parameter: Treatment Value: 2mM SA vs. No Treatment
  misc_feature: MA Experiment ID: 20000184 Result: Down-regulated in Transcription
  misc_feature: MA Experiment 20000184 PARAMETER Experiment Name: At_Shoots__P Parameter: Age (day) Value: 7
  misc_feature: MA Experiment 20000184 PARAMETER Experiment Name: At_Shoots__P Parameter: Tissue Value: Shoots vs. Whole Plant
  misc_feature: MA Experiment ID: 20000224 Result: Down-regulated in Transcription
  misc_feature: MA Experiment ID: 20000794 Result: Up-regulated in Transcription
  misc_feature: MA Experiment 20000794 PARAMETER Experiment Name: At_Petals_P Parameter: Age (day) Value: 23-25 days
  misc_feature: MA Experiment 20000794 PARAMETER Experiment Name: At_Petals_P Parameter: Plant Line Value: WS
  misc_feature: MA Experiment 20000794 PARAMETER Experiment Name: At_Petals_P Parameter: Tissue Value: Petals vs. Whole plant
  misc_feature: MA Experiment ID: 20001450 Result: Up-regulated in Transcription
  misc_feature: MA Experiment 20001450 PARAMETER Experiment Name: At_Far-red-induction_P Parameter: Age (day) Value: 7
  misc_feature: MA Experiment 20001450 PARAMETER Experiment Name: At_Far-red-induction_P Parameter: Light Value: Far-red vs. White
  misc_feature: MA Experiment 20001450 PARAMETER Experiment Name: At_Far-red-induction_P Parameter: Organism Value: A. thaliana
  misc_feature: MA Experiment 20001450 PARAMETER Experiment Name: At_Far-red-induction_P Parameter: Plant Line Value: Columbia
  misc_feature: MA Experiment 20001450 PARAMETER Experiment Name: At_Far-red-induction_P Parameter: Timepoint (hr) Value: 8
  misc_feature: MA Experiment 20001450 PARAMETER Experiment Name: At_Far-red-induction_P Parameter: Tissue Value: Whole Plant
  misc_feature: MA Experiment ID: 20001451 Result: Up-regulated in Transcription
  misc_feature: MA Experiment 20001451 PARAMETER Experiment Name: At_Far-red-induction_P Parameter: Age (day) Value: 7
  misc_feature: MA Experiment 20001451 PARAMETER Experiment Name: At_Far-red-induction_P Parameter: Light Value: Far-red vs. White
  misc_feature: MA Experiment 20001451 PARAMETER Experiment Name: At_Far-red-induction_P Parameter: Organism Value: A. thaliana
  misc_feature: MA Experiment 20001451 PARAMETER Experiment Name: At_Far-red-induction_P Parameter: Plant Line Value: Columbia
  misc_feature: MA Experiment 20001451 PARAMETER Experiment Name: At_Far-red-induction_P Parameter: Timepoint (hr) Value: 24
  misc_feature: MA Experiment 20001451 PARAMETER Experiment Name: At_Far-red-induction_P Parameter: Tissue Value: Whole Plant
  misc_feature: MA Experiment ID: 20001557 Result: Down-regulated in Transcription
  misc_feature: MA Experiment 20001557 PARAMETER Experiment Name: At_Drought_Soil_Dry_P Parameter: Age (day) Value: 27
  misc_feature: MA Experiment 20001557 PARAMETER Experiment Name: At_Drought_Soil_Dry_P Parameter: Organism Value: A. thaliana
  misc_feature: MA Experiment 20001557 PARAMETER Experiment Name: At_Drought_Soil_Dry_P Parameter: Plant Line Value: WS
  misc_feature: MA Experiment 20001557 PARAMETER Experiment Name: At_Drought_Soil_Dry_P Parameter: Post Timepoint (hr) Value: 3
  misc_feature: MA Experiment 20001557 PARAMETER Experiment Name: At_Drought_Soil_Dry_P Parameter: Post-Treatment Value: Re-Water vs. No Drought
  misc_feature: MA Experiment 20001557 PARAMETER Experiment Name: At_Drought_Soil_Dry_P Parameter: Timepoint (day) Value: 13
  misc_feature: MA Experiment 20001557 PARAMETER Experiment Name: At_Drought_Soil_Dry_P Parameter: Treatment Value: Drought vs. No Drought
actaaaccctaaatccatcctctctgtttcctttatatatattctctccttttttcatttttttgatcctcttcttcttctacaatcaaaattcatttttttttcctctgatcatcatcgaaccctagtttcgtcttttggtttcgagttttgtttctcttaatcatcgtagatactaaccgaatcatcatggagaagaactccttcaagctttctaatcctctggagatgagaatggctgagtctactcgtatcagagcgaaataccctgaaagagttcccgtgattgtggaaaaagctggacagagtgatgttcctgacattgacaagaagaagtatcttgtaccagctgatctaaccattggccaatttgtgtacgttgtgaggaaaagaatcaagcttggagctgaaaaagccatctttgtctttgtcaagaacacattaccaccaactgcggcattgatgtctgcaatctacgaagaacacaaagacgaagacgggtttctctacatgacatacagtggagagaacacatttggtggatctttctactgctaattacctcagcttctacgtctgatcctcttgatgattgtacattctcgtcgaccttaataatgtcattttactttcttggtttaaccttttgagctctcttactatctcttgcatttgaagatggtatttgaaacaagattctaatttgactctctagtttctttgtt

SEQ ID NO: 41258 - protein, 122 aa, Arabidopsis thaliana; identical to SEQ ID NO: 20909
  peptide (1)..(122): Ceres Seq. ID no. 12326278
  misc_feature (14)..(117): Pfam Name: Microtubule associated protein 1A/1B, light chain 3 Pfam Description: Microtubule associated protein 1A/1B, light
  misc_feature (1)..(117): Homolog of NCBI NO: 21592920 NR Description: putative microtubule-associated protein
  misc_feature (1)..(117): Homolog of NCBI NO: 38344173 NR Description: OSJNBa0053K19.12 [Oryza sativa (japonica
  misc_feature (1)..(119): Homolog of NCBI NO: 33146967 NR Description: putative microtubule associated protein
  misc_feature (16)..(117): Homolog of NCBI NO: 11279074 NR Description: symbiosis-related like protein - Arabidopsis
  misc_feature (1)..(117): Homolog of NCBI NO: 15220686 NR Description: symbiosis-related protein, putative
  misc_feature (1)..(117): Homolog of NCBI NO: 34595981 NR Description: microtubule-associated protein 1 light chain 3
  misc_feature (1)..(117): Homolog of NCBI NO: 40253647 NR Description: putative microtubial binding protein
  misc_feature (1)..(117): Homolog of NCBI NO: 21553487 NR Description: symbiosis-related like protein [Arabidopsis
  misc_feature (1)..(117): Homolog of NCBI NO: 18415813 NR Description: symbiosis-related like protein
  misc_feature (1)..(122): Homolog of NCBI NO: 15233593 NR Description: putative symbiosis-related protein

SEQ ID NO: 41259 - protein, 109 aa, Arabidopsis thaliana; identical to SEQ ID NO: 20910
  peptide (1)..(109): Ceres Seq. ID no. 12326279
  misc_feature (1)..(104): Pfam Name: Microtubule associated protein 1A/1B, light chain 3 Pfam Description: Microtubule associated protein 1A/1B, light
  misc_feature (1)..(104): Homolog of NCBI NO: 21592920 NR Description: putative microtubule-associated protein
  misc_feature (1)..(104): Homolog of NCBI NO: 38344173 NR Description: OSJNBa0053K19.12 [Oryza sativa (japonica
  misc_feature (1)..(106): Homolog of NCBI NO: 33146967 NR Description: putative microtubule associated protein
  misc_feature (3)..(104): Homolog of NCBI NO: 11279074 NR Description: symbiosis-related like protein - Arabidopsis
  misc_feature (1)..(104): Homolog of NCBI NO: 15220686 NR Description: symbiosis-related protein, putative
  misc_feature (1)..(104): Homolog of NCBI NO: 34595981 NR Description: microtubule-associated protein 1 light chain 3
  misc_feature (1)..(104): Homolog of NCBI NO: 40253647 NR Description: putative microtubial binding protein
  misc_feature (1)..(104): Homolog of NCBI NO: 21553487 NR Description: symbiosis-related like protein [Arabidopsis
  misc_feature (1)..(104): Homolog of NCBI NO: 18415813 NR Description: symbiosis-related like protein
  misc_feature (1)..(109): Homolog of NCBI NO: 15233593 NR Description: putative symbiosis-related protein

SEQ ID NO: 41260 - protein, 107 aa, Arabidopsis thaliana; identical to SEQ ID NO: 20911
  peptide (1)..(107): Ceres Seq. ID no. 12326280
  misc_feature (1)..(102): Pfam Name: Microtubule associated protein 1A/1B, light chain 3 Pfam Description: Microtubule associated protein 1A/1B, light
  misc_feature (1)..(102): Homolog of NCBI NO: 21592920 NR Description: putative microtubule-associated protein
  misc_feature (1)..(102): Homolog of NCBI NO: 38344173 NR Description: OSJNBa0053K19.12 [Oryza sativa (japonica
  misc_feature (1)..(104): Homolog of NCBI NO: 33146967 NR Description: putative microtubule associated protein
  misc_feature (1)..(102): Homolog of NCBI NO: 11279074 NR Description: symbiosis-related like protein - Arabidopsis
  misc_feature (1)..(102): Homolog of NCBI NO: 15220686 NR Description: symbiosis-related protein, putative
  misc_feature (1)..(102): Homolog of NCBI NO: 34595981 NR Description: microtubule-associated protein 1 light chain 3
  misc_feature (1)..(102): Homolog of NCBI NO: 40253647 NR Description: putative microtubial binding protein
  misc_feature (1)..(102): Homolog of NCBI NO: 21553487 NR Description: symbiosis-related like protein [Arabidopsis
  misc_feature (1)..(102): Homolog of NCBI NO: 18415813 NR Description: symbiosis-related like protein
  misc_feature (1)..(107): Homolog of NCBI NO: 15233593 NR Description: putative symbiosis-related protein

SEQ ID NO: 41261 - DNA, 2750 bp, Arabidopsis thaliana
  misc_feature (1)..(2750): Ceres Seq. ID no. 12482170
  misc_feature: MA Experiment ID: 108577 Result: Up-regulated in Transcription
  misc_feature: MA Experiment 108577 PARAMETER Experiment Name: At_42deg_Heat_cDNA_P Parameter: Temperature (deg C) Value: 42 vs. 22
  misc_feature: MA Experiment 108577 PARAMETER Experiment Name: At_42deg_Heat_cDNA_P Parameter: Timepoint (hr) Value: 6
  misc_feature: MA Experiment 108577 PARAMETER Experiment Name: At_42deg_Heat_cDNA_P Parameter: Tissue Value: Aerial
  misc_feature: MA Experiment ID: 108579 Result: Up-regulated in Transcription
  misc_feature: MA Experiment 108579 PARAMETER Experiment Name: At_4deg_Cold_cDNA_P Parameter: Temperature (deg C) Value: 4 vs. 22
  misc_feature: MA Experiment 108579 PARAMETER Experiment Name: At_4deg_Cold_cDNA_P Parameter: Timepoint (hr) Value: 6
  misc_feature: MA Experiment 108579 PARAMETER Experiment Name: At_4deg_Cold_cDNA_P Parameter: Tissue Value: Aerial
  misc_feature: MA Experiment ID: 20000071 Result: Down-regulated in Transcription
  misc_feature: MA Experiment 20000071 PARAMETER Experiment Name: At_100uM_ABA_Mutants_cDNA_P Parameter: Plant Line Value: CS8104
  misc_feature: MA Experiment 20000071 PARAMETER Experiment Name: At_100uM_ABA_Mutants_cDNA_P Parameter: Timepoint (hr) Value: 6
  misc_feature: MA Experiment 20000071 PARAMETER Experiment Name: At_100uM_ABA_Mutants_cDNA_P Parameter: Tissue Value: Aerial
  misc_feature: MA Experiment 20000071 PARAMETER Experiment Name: At_100uM_ABA_Mutants_cDNA_P Parameter: Treatment Value: 100uM ABA vs. No Treatment
  misc_feature: MA Experiment ID: 20000089 Result: Down-regulated in Transcription
  misc_feature: MA Experiment ID: 20000090 Result: Down-regulated in Transcription
  misc_feature: MA Experiment ID: 20000224 Result: Up-regulated in Transcription
  misc_feature: MA Experiment ID: 20000438 Result: Up-regulated in Transcription
  misc_feature: MA Experiment 20000438 PARAMETER Experiment Name: At_Shoots__P Parameter: Age (day) Value: 14
  misc_feature: MA Experiment 20000438 PARAMETER Experiment Name: At_Shoots__P Parameter: Tissue Value: Shoots vs. Whole Plant
  misc_feature: MA Experiment ID: 20000445 Result: Up-regulated in Transcription
  misc_feature: MA Experiment 20000445 PARAMETER Experiment Name: At_100uM_NAA__P Parameter: Age (day) Value: 14
  misc_feature: MA Experiment 20000445 PARAMETER Experiment Name: At_100uM_NAA__P Parameter: Organism Value: A. thaliana
  misc_feature: MA Experiment 20000445 PARAMETER Experiment Name: At_100uM_NAA__P Parameter: Plant Line Value: WS
  misc_feature: MA Experiment 20000445 PARAMETER Experiment Name: At_100uM_NAA__P Parameter: Timepoint (hr) Value: 6
  misc_feature: MA Experiment 20000445 PARAMETER Experiment Name: At_100uM_NAA__P Parameter: Tissue Value: Aerial
  misc_feature: MA Experiment 20000445 PARAMETER Experiment Name: At_100uM_NAA__P Parameter: Treatment Value: 100uM NAA vs. No Treatment
  misc_feature: MA Experiment ID: 20000794 Result: Up-regulated in Transcription
  misc_feature: MA Experiment 20000794 PARAMETER Experiment Name: At_Petals_P Parameter: Age (day) Value: 23-25 days
  misc_feature: MA Experiment 20000794 PARAMETER Experiment Name: At_Petals_P Parameter: Plant Line Value: WS
  misc_feature: MA Experiment 20000794 PARAMETER Experiment Name: At_Petals_P Parameter: Tissue Value: Petals vs. Whole plant
  misc_feature: MA Experiment ID: 20001248 Result: Down-regulated in Transcription
  misc_feature: MA Experiment 20001248 PARAMETER Experiment Name: At_Far-red-induction_P Parameter: Age (day) Value: 7
  misc_feature: MA Experiment 20001248 PARAMETER Experiment Name: At_Far-red-induction_P Parameter: Light Value: Far-red vs. White
  misc_feature: MA Experiment 20001248 PARAMETER Experiment Name: At_Far-red-induction_P Parameter: Organism Value: A. thaliana
  misc_feature: MA Experiment 20001248 PARAMETER Experiment Name: At_Far-red-induction_P Parameter: Plant Line Value: Columbia
  misc_feature: MA Experiment 20001248 PARAMETER Experiment Name: At_Far-red-induction_P Parameter: Timepoint (hr) Value: 4
  misc_feature: MA Experiment 20001248 PARAMETER Experiment Name: At_Far-red-induction_P Parameter: Tissue Value: Whole Plant
aaatgtgttgcaatgtcttcctttgatttcctcaatttctagggtttcgaaagaaaaaataatgacttcaatcgaattgctaagtccattgattcacgataagtttcgattctcaacttgttgtagtactagtagtttattgtatttgcatgcttcgagctttttccgagatcgatcttttggttttcgtcagaatccgaatcgattcgtctccaattcatcgattcaacttcctcaatcagttccagggtcgataaaccaggaaaggtttaatctttggcaagggttttcgaggaagaagagtactagtagtagtagaacgattgtgaattgtcaagaaggtgatcagaaagctagctcaagtgaaggagaaggaaagaccaataaggataaaggacggaagcaaggtaagaatgagttatggtggtctaaagggaagaaatggcaatggaaaccgataattcaagcgcaggagattggtgtaatgttactacaattgggtattgttatgtttgttgtgcgattgctccgacccggaatcccgttaccgggttcggagcctcggacacagacgacgtttatgagtgtaccgtatagtgatttcttgagtaaagttaataatgatgaggttcagaaagtggaggtggatggttttcatgttttgtttaagttgaaagatgatgggaatttgcaagagagtgaaactagtagtagtagtattaagctctctgagtcgtctgagactatgcttagaagtgtggctccgactaaaagagttgtgtattccactactaggccgagggatatcaaaacaccgtatgagaaaatgcttgagaataatgtggaattcgggtcgcctgataagcgctctggtggctttttcaactctggattgatagttctgttctacattgcagtgcttgcagggcttctccaccgatttcctgttaacttttcccagagtacaacgggacagctgaggacccgcaagtctggtggtcctggtgggggaaaagtttctggtgatggtgaaacaatcacttttgcagatgttgctggtgttgatgaagcaaaggaagagctggaagagattgtggaatttctcaagaatcctgataggtatgttcgtctaggtgctcgtcctcctcgtggtgtcctactggtcggtcttcctggaacagggaaaacccttcttgcaaaagctgttgctggggaatctgatgttccattcataagttgctctgcaagtgagtttgtagagctgtatgttggcatgggtgcctcacgcgtaagggatctatttgcacgagccaagaaggaggctccgtcaattatatttatagatgagatagatgctgtcgcgaaaagccgtgatggtaaattcagaatggtcagcaatgatgaaagggagcaaaccttgaatcaattgctcactgagatggatggttttgacagtagctctgcagttattgttcttggagctaccaatcgagctgatgtcttagaccctgccctgcgtcggcctgggagatttgatcgtgttgttacggtggaatcacctgacaaagttggaagagaatccattttgaaagtgcatgtttcaaagaaagagcttcctttgggagatgatgtcaacctagctagcattgcctcaatgacaaccggttttactggggcagaccttgcaaacctggttaatgaggctgctttgctagcgggaaggaagagcaagatgactgttgataagattgacttcattcatgctgtcgagcgatctatagcgggcatagagaagaaaacagctaggttaaaaggtagtgagaaagctgtggttgcaaggcatgaagctgggcatgctgttgttggtacagctgttgcaagtcttctttctggacagtcccgtgttgagaaattaagcatattaccaagatcaggaggggcattgggctttacatacattcccccaacgcatgaagacagatatttgctctttattgatgaactacatggccgcttggtaactcttcttggaggtcgtgcagctgaagaggttgtttactcggggcgtatatcaacaggtgcacttgatgatatcaggagagcaaccgacatggcctataaggcagtagctgaatatggtctcaacgagaaaatcggacccgtctctgtggctacgctttctgctggtgggattgatgactctgggggatcaccatggggaagagatcaggggcatctggttgaccttgttcaaagagaggtgacaaatttgttgcaatctgctctggatgttgcgttgactgttgttcgcgctaatccagatgtattagaagggctcggtgctcaactggaagatgaagagaaagtagaaggtgaagagttgcagaaatggttaaatagagtagtaccctcagaggaacttgcagtgttcatcaaaggaaaacaaactgctttacttccagcacaagctagctccagttaacatctacaaagcctataaaatggaaagatgtatgcatcgatgatgattctgcctcacttagaagaatcaaaaagctaaaaggagctgcgaatcctgggcaacgatgacttagtatgtatagaagaaaaaaaaagcttttacttggtatcaaacagagcatgtgttgttgtatttgctacctttttctgcaaagttattggcaattgtattgttgttccacttgtatatatacagagaccatttatgttaatatacaacttcgtatggg

SEQ ID NO: 41262 - protein, 826 aa, Arabidopsis thaliana
  peptide (1)..(826): Ceres Seq. ID no. 12482171
  misc_feature (580)..(797): Pfam Name: Peptidase family M41 Pfam Description: Peptidase family M41
  misc_feature (237)..(796): Homolog of NCBI NO: 15792441 NR Description: membrane bound zinc metallopeptidase
  misc_feature (297)..(803): Homolog of NCBI NO: 22969877 NR Description: hypothetical protein [Chloroflexus aurantiacus]
  misc_feature (333)..(806): Homolog of NCBI NO: 30248910 NR Description: ftsH; cell division protein [Nitrosomonas
  misc_feature (275)..(801): Homolog of NCBI NO: 23043520 NR Description: hypothetical protein [Trichodesmium erythraeum
  misc_feature (260)..(809): Homolog of NCBI NO: 16330069 NR Description: cell division protein; FtsH [Synechocystis sp.
  misc_feature (207)..(802): Homolog of NCBI NO: 33240787 NR Description: Cell division protein FtsH
  misc_feature (201)..(798): Homolog of NCBI NO: 33861820 NR Description: cell division protein FtsH3
  misc_feature (260)..(801): Homolog of NCBI NO: 22298071 NR Description: cell division protein [Thermosynechococcus
  misc_feature (260)..(803): Homolog of NCBI NO: 23124397 NR Description: hypothetical protein [Nostoc punctiforme]
  misc_feature (260)..(814): Homolog of NCBI NO: 17232428 NR Description: cell division protein [Nostoc sp. PCC 7120]
NVLQCLPLISSISRVSKEKIMTSIELLSPLIHDKFRFSTCCSTSSLLYLHASSFFRDRSFGFRQNPNRFVSNSSIQLPQSVPGSINQERFNLWQGFSRKKSTSSSRTIVNCQEGDQKASSSEGEGKTNKDKGRKQGKNELWWSKGKKWQWKPIIQAQEIGVMLLQLGIVMFVVRLLRPGIPLPGSEPRTQTTFMSVPYSDFLSKVNNDEVQKVEVDGFHVLFKLKDDGNLQESETSSSSIKLSESSETMLRSVAPTKRVVYSTTRPRDIKTPYEKMLENNVEFGSPDKRSGGFFNSGLIVLFYIAVLAGLLHRFPVNFSQSTTGQLRTRKSGGPGGGKVSGDGETITFADVAGVDEAKEELEEIVEFLKNPDRYVRLGARPPRGVLLVGLPGTGKTLLAKAVAGESDVPFISCSASEFVELYVGMGASRVRDLFARAKKEAPSIIFIDEIDAVAKSRDGKFRMVSNDEREQTLNQLLTEMDGFDSSSAVIVLGATNRADVLDPALRRPGRFDRVVTVESPDKVGRESILKVHVSKKELPLGDDVNLASIASMTTGFTGADLANLVNEAALLAGRKSKMTVDKIDFIHAVERSIAGIEKKTARLKGSEKAVVARHEAGHAVVGTAVASLLSGQSRVEKLSILPRSGGALGFTYIPPTHEDRYLLFIDELHGRLVTLLGGRAAEEVVYSGRISTGALDDIRRATDMAYKAVAEYGLNEKIGPVSVATLSAGGIDDSGGSPWGRDQGHLVDLVQREVTNLLQSALDVALTVVRANPDVLEGLGAQLEDEEKVEGEELQKWLNRVVPSEELAVFIKGKQTALLPAQASSS

SEQ ID NO: 41263 - protein, 806 aa, Arabidopsis thaliana
  peptide (1)..(806): Ceres Seq. ID no. 12482172
  misc_feature (560)..(777): Pfam Name: Peptidase family M41 Pfam Description: Peptidase family M41
  misc_feature (217)..(776): Homolog of NCBI NO: 15792441 NR Description: membrane bound zinc metallopeptidase
  misc_feature (277)..(783): Homolog of NCBI NO: 22969877 NR Description: hypothetical protein [Chloroflexus aurantiacus]
  misc_feature (313)..(786): Homolog of NCBI NO: 30248910 NR Description: ftsH; cell division protein [Nitrosomonas
  misc_feature (255)..(781): Homolog of NCBI NO: 23043520 NR Description: hypothetical protein [Trichodesmium erythraeum
  misc_feature (240)..(789): Homolog of NCBI NO: 16330069 NR Description: cell division protein; FtsH [Synechocystis sp.
  misc_feature (187)..(782): Homolog of NCBI NO: 33240787 NR Description: Cell division protein FtsH
  misc_feature (181)..(778): Homolog of NCBI NO: 33861820 NR Description: cell division protein FtsH3
  misc_feature (240)..(781): Homolog of NCBI NO: 22298071 NR Description: cell division protein [Thermosynechococcus
  misc_feature (240)..(783): Homolog of NCBI NO: 23124397 NR Description: hypothetical protein [Nostoc punctiforme]
  misc_feature (240)..(794): Homolog of NCBI NO: 17232428 NR Description: cell division protein [Nostoc sp. PCC 7120]
MTSIELLSPLIHDKFRFSTCCSTSSLLYLHASSFFRDRSFGFRQNPNRFVSNSSIQLPQSVPGSINQERFNLWQGFSRKKSTSSSRTIVNCQEGDQKASSSEGEGKTNKDKGRKQGKNELWWSKGKKWQWKPIIQAQEIGVMLLQLGIVMFVVRLLRPGIPLPGSEPRTQTTFMSVPYSDFLSKVNNDEVQKVEVDGFHVLFKLKDDGNLQESETSSSSIKLSESSETMLRSVAPTKRVVYSTTRPRDIKTPYEKMLENNVEFGSPDKRSGGFFNSGLIVLFYIAVLAGLLHRFPVNFSQSTTGQLRTRKSGGPGGGKVSGDGETITFADVAGVDEAKEELEEIVEFLKNPDRYVRLGARPPRGVLLVGLPGTGKTLLAKAVAGESDVPFISCSASEFVELYVGMGASRVRDLFARAKKEAPSIIFIDEIDAVAKSRDGKFRMVSNDEREQTLNQLLTEMDGFDSSSAVIVLGATNRADVLDPALRRPGRFDRVVTVESPDKVGRESILKVHVSKKELPLGDDVNLASIASMTTGFTGADLANLVNEAALLAGRKSKMTVDKIDFIHAVERSIAGIEKKTARLKGSEKAVVARHEAGHAVVGTAVASLLSGQSRVEKLSILPRSGGALGFTYIPPTHEDRYLLFIDELHGRLVTLLGGRAAEEVVYSGRISTGALDDIRRATDMAYKAVAEYGLNEKIGPVSVATLSAGGIDDSGGSPWGRDQGHLVDLVQREVTNLLQSALDVALTVVRANPDVLEGLGAQLEDEEKVEGEELQKWLNRVVPSEELAVFIKGKQTALLPAQASSS

SEQ ID NO: 41264 - protein, 665 aa, Arabidopsis thaliana
  peptide (1)..(665): Ceres Seq. ID no. 12482173
  misc_feature (419)..(636): Pfam Name: Peptidase family M41 Pfam Description: Peptidase family M41
  misc_feature (76)..(635): Homolog of NCBI NO: 15792441 NR Description: membrane bound zinc metallopeptidase
  misc_feature (136)..(642): Homolog of NCBI NO: 22969877 NR Description: hypothetical protein [Chloroflexus aurantiacus]
  misc_feature (172)..(645): Homolog of NCBI NO: 30248910 NR Description: ftsH; cell division protein [Nitrosomonas
  misc_feature (114)..(640): Homolog of NCBI NO: 23043520 NR Description: hypothetical protein [Trichodesmium erythraeum
  misc_feature (99)..(648): Homolog of NCBI NO: 16330069 NR Description: cell division protein; FtsH [Synechocystis sp.
  misc_feature (46)..(641): Homolog of NCBI NO: 33240787 NR Description: Cell division protein FtsH
  misc_feature (40)..(637): Homolog of NCBI NO: 33861820 NR Description: cell division protein FtsH3
  misc_feature (99)..(640): Homolog of NCBI NO: 22298071 NR Description: cell division protein [Thermosynechococcus
  misc_feature (99)..(642): Homolog of NCBI NO: 23124397 NR Description: hypothetical protein [Nostoc punctiforme]
  misc_feature (99)..(653): Homolog of NCBI NO: 17232428 NR Description: cell division protein [Nostoc sp. PCC 7120]
MLLQLGIVMFVVRLLRPGIPLPGSEPRTQTTFMSVPYSDFLSKVNNDEVQKVEVDGFHVLFKLKDDGNLQESETSSSSIKLSESSETMLRSVAPTKRVVYSTTRPRDIKTPYEKMLENNVEFGSPDKRSGGFFNSGLIVLFYIAVLAGLLHRFPVNFSQSTTGQLRTRKSGGPGGGKVSGDGETITFADVAGVDEAKEELEEIVEFLKNPDRYVRLGARPPRGVLLVGLPGTGKTLLAKAVAGESDVPFISCSASEFVELYVGMGASRVRDLFARAKKEAPSIIFIDEIDAVAKSRDGKFRMVSNDEREQTLNQLLTEMDGFDSSSAVIVLGATNRADVLDPALRRPGRFDRVVTVESPDKVGRESILKVHVSKKELPLGDDVNLASIASMTTGFTGADLANLVNEAALLAGRKSKMTVDKIDFIHAVERSIAGIEKKTARLKGSEKAVVARHEAGHAVVGTAVASLLSGQSRVEKLSILPRSGGALGFTYIPPTHEDRYLLFIDELHGRLVTLLGGRAAEEVVYSGRISTGALDDIRRATDMAYKAVAEYGLNEKIGPVSVATLSAGGIDDSGGSPWGRDQGHLVDLVQREVTNLLQSALDVALTVVRANPDVLEGLGAQLEDEEKVEGEELQKWLNRVVPSEELAVFIKGKQTALLPAQASSS

SEQ ID NO: 41265 - DNA, 1206 bp, Arabidopsis thaliana
  misc_feature (1)..(1206): Ceres Seq. ID no. 12330896
  misc_feature: MA Experiment ID: 108573 Result: Up-regulated in Transcription
  misc_feature: MA Experiment 108573 PARAMETER Experiment Name: At_Drought_cDNA_P Parameter: Timepoint (hr) Value: 6
  misc_feature: MA Experiment 108573 PARAMETER Experiment Name: At_Drought_cDNA_P Parameter: Tissue Value: Aerial
  misc_feature: MA Experiment 108573 PARAMETER Experiment Name: At_Drought_cDNA_P Parameter: Treatment Value: Drought vs. No Drought
  misc_feature: MA Experiment ID: 20000030 Result: Up-regulated in Transcription
  misc_feature: MA Experiment 20000030 PARAMETER Experiment Name: At_CS6630_Roots_cDNA_P Parameter: Plant Line Value: CS6630 vs. WS
  misc_feature: MA Experiment 20000030 PARAMETER Experiment Name: At_CS6630_Roots_cDNA_P Parameter: Tissue Value: Roots
  misc_feature: MA Experiment ID: 20000180 Result: Up-regulated in Transcription
  misc_feature: MA Experiment 20000180 PARAMETER Experiment Name: At_Germinating_Seeds_P Parameter: Age (hr) Value: 24 vs. 0
  misc_feature: MA Experiment 20000180 PARAMETER Experiment Name: At_Germinating_Seeds_P Parameter: Tissue Value: Germinating Seeds
  misc_feature: MA Experiment ID: 20000264 Result: Down-regulated in Transcription
  misc_feature: MA Experiment 20000264 PARAMETER Experiment Name: At_Open_Flower_P Parameter: Age (day) Value: 21
  misc_feature: MA Experiment 20000264 PARAMETER Experiment Name: At_Open_Flower_P Parameter: Plant Line Value: WS
  misc_feature: MA Experiment 20000264 PARAMETER Experiment Name: At_Open_Flower_P Parameter: Tissue Value: Open Flower vs. Whole Plant
gcacgattaaagagcgcctcgaaaattaacttttataggtaggaggagatagaaatcgaatcttatcgccgcgttaatatgccaccggccggagaactccgacatcaatctccatcaaaggagaaactatcttccgttacccaatccgatgaagcagaagcagcgtcagcagcgatatctgcggcagctgcagatgcggaagctgccggattatggacacagatcaaggcggaagctcgccgtgatgctgaggcggagccagctttagctagctatctatattcgacgattctttctcattcgtctcttgaacgatctatctcgtttcatctaggaaacaagctttgttcctcaacgcttttatccacacttttatacgatctgttcttaaacactttttcctccgatccttctcttcgtaacgccaccgtcgcagatctacgcgctgctcgtgttcgtgatcctgcttgtatctcgttctctcattgtctcctcaattacaaaggcttcttagctattcaggcgcatcgtgtatcacacaagctatggacacaatcacggaagccattagcattagctctacactcaagaatctccgatgtattcgctgttgatatccatccagcagcgaagatcggaaaagggatacttctagaccacgcaaccggagttgtagtcggagaaacagcggtgattgggaacaatgtttcaatccttcaccatgtgacactaggtggaacaggtaaagcttgtggagatagacatccgaagatcggtgacggttgtttgattggagctggagcgactattcttggaaatgtgaagattggtgcaggtgctaaagtaggagctggttctgttgtgctgattgacgtgccttgtcgaggtactgcggttgggaatccggcgagacttgtcggagggaaagagaagccaacgattcatgatgaggaatgtcctggagaatcgatggatcatacttcattcatctcggaatggtcagattacatcatataaagttgttgttataattgtttctgtggttttgaaagtgaaaaactttctgaccattcgcttatagagaggtgctgaggtaagtgagctttgttgtatttgtaatttacaaaacatcttacgatgttcaatacaagaaatggccttaatttgatgttattattcaatcattagttatccaagagtttatac

SEQ ID NO: 41266 - protein, 312 aa, Arabidopsis thaliana
  peptide (1)..(312): Ceres Seq. ID no. 12330897
  misc_feature (38)..(312): Homolog of NCBI NO: 6601494 NR Description: serine acetyltransferase [Allium cepa]
  misc_feature (38)..(312): Homolog of NCBI NO: 7384806 NR Description: serine acetyltransferase [Allium tuberosum]
  misc_feature (28)..(312): Homolog of NCBI NO: 7433702 NR Description: serine O-acetyltransferase (EC 2.3.1.30) -
  misc_feature (25)..(312): Homolog of NCBI NO: 28460066 NR Description: serine O-acetyltransferase [Beta vulgaris]
  misc_feature (29)..(312): Homolog of NCBI NO: 1361979 NR Description: serine O-acetyltransferase (EC 2.3.1.30) -
  misc_feature (41)..(312): Homolog of NCBI NO: 23343585 NR Description: serine acetyltransferase 7 [Nicotiana tabacum]
  misc_feature (1)..(312): Homolog of NCBI NO: 21537083 NR Description: serine O-acetyltransferase (EC 2.3.1.30) Sat-52
  misc_feature (1)..(312): Homolog of NCBI NO: 15241928 NR Description: serine O-acetyltransferase (EC 2.3.1.30) Sat-52
MPPAGELRHQSPSKEKLSSVTQSDEAEAASAAISAAAADAEAAGLWTQIKAEARRDAEAEPALASYLYSTILSHSSLERSISFHLGNKLCSSTLLSTLLYDLFLNTFSSDPSLRNATVADLRAARVRDPACISFSHCLLNYKGFLAIQAHRVSHKLWTQSRKPLALALHSRISDVFAVDIHPAAKIGKGILLDHATGVVVGETAVIGNNVSILHHVTLGGTGKACGDRHPKIGDGCLIGAGATILGNVKIGAGAKVGAGSVVLIDVPCRGTAVGNPARLVGGKEKPTIHDEECPGESMDHTSFISEWSDYII

SEQ ID NO: 41267 - DNA, 1132 bp, Arabidopsis thaliana
  misc_feature (1)..(1132): Ceres Seq. ID no. 12328592
  misc_feature: MA Experiment ID: 108434 Result: Up-regulated in Transcription
  misc_feature: MA Experiment 108434 PARAMETER Experiment Name: At_Root_Tips_cDNA_P Parameter: Tissue Value: Root Tips
  misc_feature: MA Experiment ID: 108462 Result: Up-regulated in Transcription
  misc_feature: MA Experiment 108462 PARAMETER Experiment Name: At_Germinating_Seeds_cDNA_P Parameter: Age (day) Value: 2 vs. 0
  misc_feature: MA Experiment 108462 PARAMETER Experiment Name: At_Germinating_Seeds_cDNA_P Parameter: Tissue Value: Germinating Seeds
  misc_feature: MA Experiment ID: 20000179 Result: Up-regulated in Transcription
  misc_feature: MA Experiment 20000179 PARAMETER Experiment Name: At_Germinating_Seeds_P Parameter: Age (hr) Value: 6 vs. 0
  misc_feature: MA Experiment 20000179 PARAMETER Experiment Name: At_Germinating_Seeds_P Parameter: Tissue Value: Germinating Seeds
  misc_feature: MA Experiment ID: 20000185 Result: Up-regulated in Transcription
  misc_feature: MA Experiment 20000185 PARAMETER Experiment Name: At_Roots__P Parameter: Age (day) Value: 7 vs. 21
  misc_feature: MA Experiment 20000185 PARAMETER Experiment Name: At_Roots__P Parameter: Organism Value: A. thaliana
  misc_feature: MA Experiment 20000185 PARAMETER Experiment Name: At_Roots__P Parameter: Tissue Value: Roots vs. Whole Plant
  misc_feature: MA Experiment ID: 20000227 Result: Up-regulated in Transcription
  misc_feature: MA Experiment 20000227 PARAMETER Experiment Name: At_Root-Tips-vs-Tops_P Parameter: Tissue Value: Root Tips vs. Root Tops
  misc_feature: MA Experiment ID: 20000234 Result: Up-regulated in Transcription
  misc_feature: MA Experiment 20000234 PARAMETER Experiment Name: At_Siliques_P Parameter: Age (day) Value: 21
  misc_feature: MA Experiment 20000234 PARAMETER Experiment Name: At_Siliques_P Parameter: Organism Value: A. thaliana
  misc_feature: MA Experiment 20000234 PARAMETER Experiment Name: At_Siliques_P Parameter: Plant Line Value: WS
  misc_feature: MA Experiment 20000234 PARAMETER Experiment Name: At_Siliques_P Parameter: Tissue Value: Less Than 5mm Siliques vs. Whole Plant
  misc_feature: MA Experiment ID: 20000439 Result: Up-regulated in Transcription
  misc_feature: MA Experiment 20000439 PARAMETER Experiment Name: At_Roots__P Parameter: Age (day) Value: 14 vs. 21
  misc_feature: MA Experiment 20000439 PARAMETER Experiment Name: At_Roots__P Parameter: Organism Value: A. thaliana
  misc_feature: MA Experiment 20000439 PARAMETER Experiment Name: At_Roots__P Parameter: Tissue Value: Roots vs. Whole Plant
acaaacctcctccgtctttcgtaaaaggttctcgagatctaagtctcacttctaaagctctgacaatggcggacgaaatcggattcttccaactcaacaccggagcaaagatcccatcggttggtctcgggacatggcaagctgctcctggcgtcgttggagacgccgtcgccgccgctgtgaagattggatatcagcatattgattgtgcttcaagatatggcaatgaaattgagattgggaaagttctgaagaagttgtttgatgatggcgtagtgaagcgtgagaagctgttcatcacatcaaaaatctggttgactgatcttgaccctccggatgtacaggacgcattgaacagaactcttcaggatctgcagcttgattatgttgatttgtatctcatgcactggcctgttcggttgaagaaaggtactgttgactttaagcctgagaacattatgcctatcgatattccgagcacatggaaagcaatggaagcactggttgattcaggcaaggcaagagccattggcgtaagtaatttctctacaaagaaactctcagatcttgtggaggctgctcgtgttcctcccgctgtaaaccaggtggaatgtcatccttcatggcaacaacataagctacatgagttttgcaagtccaaagggatccacctctcaggatattcgccattgggatctcctggaacaacgtgggtgaaggccgatgttttaaagagtccggttattgaaatgattgctaaagaaatcgggaagtctcccgcacaaaccgcgcttcgatggggacttcaaatgggtcatagtatacttcccaaaagcacaaatgaaggaagaatcagagagaactttgatgtcttgggatggtctattccaaaagaaatgtttgacaagttttccaagatagagcaggctaggttagtccaaggcacgtcgtttgttcatgagacgttgagtccttataaaacacttgaagagctttgggatggtgagatctgaatcaaaagatgtcttttgttgaattttaaagttgaaaaagaacaaagttccactgctttaagctttgatcgagaatgtgtaaacgattcaattttcaataaaagtagaattttgcaggc

SEQ ID NO: 41268 - protein, 336 aa, Arabidopsis thaliana
  peptide (1)..(336): Ceres Seq. ID no. 12328593
  misc_feature (22)..(336): Homolog of NCBI NO: 13160399 NR Description: aldose reductase [Digitalis purpurea]
  misc_feature (22)..(336): Homolog of NCBI NO: 13160397 NR Description: aldose reductase [Digitalis purpurea]
  misc_feature (22)..(336): Homolog of NCBI NO: 7431112 NR Description: abscisic acid activated protein - alfalfa
  misc_feature (22)..(310): Homolog of NCBI NO: 7431114 NR Description: aldehyde dehydrogenase homolog At2g37770 -
  misc_feature (308)..(336): Homolog of NCBI NO: 25283479 NR Description: probable alcohol dehydrogenase [imported] -
  misc_feature (22)..(309): Homolog of NCBI NO: 25283479 NR Description: probable alcohol dehydrogenase [imported] -
  misc_feature (22)..(336): Homolog of NCBI NO: 30687261 NR Description: aldo/keto reductase family [Arabidopsis thaliana]
  misc_feature (33)..(336): Homolog of NCBI NO: 28393400 NR Description: putative aldo/keto reductase [Arabidopsis
  misc_feature (22)..(336): Homolog of NCBI NO: 30687247 NR Description: aldo/keto reductase family [Arabidopsis thaliana]
  misc_feature (22)..(336): Homolog of NCBI NO: 15232354 NR Description: aldo/keto reductase family
KPPPSFVKGSRDLSLTSKALTMADEIGFFQLNTGAKIPSVGLGTWQAAPGVVGDAVAAAVKIGYQHIDCASRYGNEIEIGKVLKKLFDDGVVKREKLFITSKIWLTDLDPPDVQDALNRTLQDLQLDYVDLYLMHWPVRLKKGTVDFKPENIMPIDIPSTWKAMEALVDSGKARAIGVSNFSTKKLSDLVEAARVPPAVNQVECHPSWQQHKLHEFCKSKGIHLSGYSPLGSPGTTWVKADVLKSPVIEMIAKEIGKSPAQTALRWGLQMGHSILPKSTNEGRIRENFDVLGWSIPKEMFDKFSKIEQARLVQGTSFVHETLSPYKTLEELWDGEI

SEQ ID NO: 41269 - protein, 315 aa, Arabidopsis thaliana
  peptide (1)..(315): Ceres Seq. ID no. 12328594
  misc_feature (1)..(315): Homolog of NCBI NO: 13160399 NR Description: aldose reductase [Digitalis purpurea]
  misc_feature (1)..(315): Homolog of NCBI NO: 13160397 NR Description: aldose reductase [Digitalis purpurea]
  misc_feature (1)..(315): Homolog of NCBI NO: 7431112 NR Description: abscisic acid activated protein - alfalfa
  misc_feature (1)..(289): Homolog of NCBI NO: 7431114 NR Description: aldehyde dehydrogenase homolog At2g37770 -
  misc_feature (287)..(315): Homolog of NCBI NO: 25283479 NR Description: probable alcohol dehydrogenase [imported] -
  misc_feature (1)..(288): Homolog of NCBI NO: 25283479 NR Description: probable alcohol dehydrogenase [imported] -
  misc_feature (1)..(315): Homolog of NCBI NO: 30687261 NR Description: aldo/keto reductase family [Arabidopsis thaliana]
  misc_feature (12)..(315): Homolog of NCBI NO: 28393400 NR Description: putative aldo/keto reductase [Arabidopsis
  misc_feature (1)..(315): Homolog of NCBI NO: 30687247 NR Description: aldo/keto reductase family [Arabidopsis thaliana]
  misc_feature (1)..(315): Homolog of NCBI NO: 15232354 NR Description: aldo/keto reductase family
MADEIGFFQLNTGAKIPSVGLGTWQAAPGVVGDAVAAAVKIGYQHIDCASRYGNEIEIGKVLKKLFDDGVVKREKLFITSKIWLTDLDPPDVQDALNRTLQDLQLDYVDLYLMHWPVRLKKGTVDFKPENIMPIDIPSTWKAMEALVDSGKARAIGVSNFSTKKLSDLVEAARVPPAVNQVECHPSWQQHKLHEFCKSKGIHLSGYSPLGSPGTTWVKADVLKSPVIEMIAKEIGKSPAQTALRWGLQMGHSILPKSTNEGRIRENFDVLGWSIPKEMFDKFSKIEQARLVQGTSFVHETLSPYKTLEELWDGEI

SEQ ID NO: 41270 - protein, 203 aa, Arabidopsis thaliana
  peptide (1)..(203): Ceres Seq. ID no. 12328595
  misc_feature (1)..(203): Homolog of NCBI NO: 13160399 NR Description: aldose reductase [Digitalis purpurea]
  misc_feature (1)..(203): Homolog of NCBI NO: 13160397 NR Description: aldose reductase [Digitalis purpurea]
  misc_feature (1)..(203): Homolog of NCBI NO: 7431112 NR Description: abscisic acid activated protein - alfalfa
  misc_feature (1)..(177): Homolog of NCBI NO: 7431114 NR Description: aldehyde dehydrogenase homolog At2g37770 -
  misc_feature (175)..(203): Homolog of NCBI NO: 25283479 NR Description: probable alcohol dehydrogenase [imported] -
  misc_feature (1)..(176): Homolog of NCBI NO: 25283479 NR Description: probable alcohol dehydrogenase [imported] -
  misc_feature (1)..(203): Homolog of NCBI NO: 30687261 NR Description: aldo/keto reductase family [Arabidopsis thaliana]
  misc_feature (1)..(203): Homolog of NCBI NO: 28393400 NR Description: putative aldo/keto reductase [Arabidopsis
  misc_feature (1)..(203): Homolog of NCBI NO: 30687247 NR Description: aldo/keto reductase family [Arabidopsis thaliana]
  misc_feature (1)..(203): Homolog of NCBI NO: 15232354 NR Description: aldo/keto reductase family
MHWPVRLKKGTVDFKPENIMPIDIPSTWKAMEALVDSGKARAIGVSNFSTKKLSDLVEAARVPPAVNQVECHPSWQQHKLHEFCKSKGIHLSGYSPLGSPGTTWVKADVLKSPVIEMIAKEIGKSPAQTALRWGLQMGHSILPKSTNEGRIRENFDVLGWSIPKEMFDKFSKIEQARLVQGTSFVHETLSPYKTLEELWDGEI

SEQ ID NO: 41271 - DNA, 1896 bp, Arabidopsis thaliana
  misc_feature (1)..(1896): Ceres Seq. ID no. 13504759
  misc_feature: MA Experiment ID: 108434 Result: Down-regulated in Transcription
  misc_feature: MA Experiment 108434 PARAMETER Experiment Name: At_Root_Tips_cDNA_P Parameter: Tissue Value: Root Tips
  misc_feature: MA Experiment ID: 108462 Result: Down-regulated in Transcription
  misc_feature: MA Experiment 108462 PARAMETER Experiment Name: At_Germinating_Seeds_cDNA_P Parameter: Age (day) Value: 2 vs. 0
  misc_feature: MA Experiment 108462 PARAMETER Experiment Name: At_Germinating_Seeds_cDNA_P Parameter: Tissue Value: Germinating Seeds
  misc_feature: MA Experiment ID: 108463 Result: Down-regulated in Transcription
  misc_feature: MA Experiment 108463 PARAMETER Experiment Name: At_Germinating_Seeds_cDNA_P Parameter: Age (day) Value: 3 vs. 0
  misc_feature: MA Experiment 108463 PARAMETER Experiment Name: At_Germinating_Seeds_cDNA_P Parameter: Tissue Value: Germinating Seeds
  misc_feature: MA Experiment ID: 108464 Result: Down-regulated in Transcription
  misc_feature: MA Experiment 108464 PARAMETER Experiment Name: At_Germinating_Seeds_cDNA_P Parameter: Age (day) Value: 4 vs. 0
  misc_feature: MA Experiment 108464 PARAMETER Experiment Name: At_Germinating_Seeds_cDNA_P Parameter: Tissue Value: Germinating Seeds
  misc_feature: MA Experiment ID: 108501 Result: Up-regulated in Transcription
  misc_feature: MA Experiment 108501 PARAMETER Experiment Name: At_ap2_floral_buds_cDNA_P Parameter: Plant Line Value: ap2 (Ler.)
  misc_feature: MA Experiment 108501 PARAMETER Experiment Name: At_ap2_floral_buds_cDNA_P Parameter: Tissue Value: Closed Flower
  misc_feature: MA Experiment ID: 108595 Result: Down-regulated in Transcription
  misc_feature: MA Experiment 108595 PARAMETER Experiment Name: At_Ler-pi_Ovule_cDNA_P Parameter: Plant Line Value: null
  misc_feature: MA Experiment ID: 108607 Result: Down-regulated in Transcription
  misc_feature: MA Experiment 108607 PARAMETER Experiment Name: At_100uM_ABA_cDNA_P Parameter: Timepoint (hr) Value: 4
  misc_feature: MA Experiment 108607 PARAMETER Experiment Name: At_100uM_ABA_cDNA_P Parameter: Tissue Value: Aerial
  misc_feature: MA Experiment 108607 PARAMETER Experiment Name: At_100uM_ABA_cDNA_P Parameter: Treatment Value: 100uM ABA vs. No Treatment
  misc_feature: MA Experiment ID: 108668 Result: Down-regulated in Transcription
  misc_feature: MA Experiment 108668 PARAMETER Experiment Name: At_2mM_SA_cDNA_P Parameter: Plant Line Value: WS
  misc_feature: MA Experiment 108668 PARAMETER Experiment Name: At_2mM_SA_cDNA_P Parameter: Timepoint (hr) Value: 6
  misc_feature: MA Experiment 108668 PARAMETER Experiment Name: At_2mM_SA_cDNA_P Parameter: Treatment Value: 2mM SA vs. No Treatment
  misc_feature: MA Experiment ID: 20000068 Result: Down-regulated in Transcription
  misc_feature: MA Experiment ID: 20000113 Result: Down-regulated in Transcription
  misc_feature: MA Experiment 20000113 PARAMETER Experiment Name: At_42deg_Heat_cDNA_P Parameter: Temperature (deg C) Value: 42 vs. 22
  misc_feature: MA Experiment 20000113 PARAMETER Experiment Name: At_42deg_Heat_cDNA_P Parameter: Timepoint (hr) Value: 8
  misc_feature: MA Experiment 20000113 PARAMETER Experiment Name: At_42deg_Heat_cDNA_P Parameter: Tissue Value: Aerial
  misc_feature: MA Experiment ID: 20000173 Result: Down-regulated in Transcription
  misc_feature: MA Experiment 20000173 PARAMETER Experiment Name: At_42deg_Heat_P Parameter: Age (day) Value: 14
  misc_feature: MA Experiment 20000173 PARAMETER Experiment Name: At_42deg_Heat_P Parameter: Organism Value: A. thaliana
  misc_feature: MA Experiment 20000173 PARAMETER Experiment Name: At_42deg_Heat_P Parameter: Plant Line Value: WS
  misc_feature: MA Experiment 20000173 PARAMETER Experiment Name: At_42deg_Heat_P Parameter: Temperature (deg C) Value: 42 vs. 22
  misc_feature: MA Experiment 20000173 PARAMETER Experiment Name: At_42deg_Heat_P Parameter: Timepoint (hr) Value: 6
  misc_feature: MA Experiment 20000173 PARAMETER Experiment Name: At_42deg_Heat_P Parameter: Tissue Value: Aerial
  misc_feature: MA Experiment ID: 20000184 Result: Down-regulated in Transcription
  misc_feature: MA Experiment 20000184 PARAMETER Experiment Name: At_Shoots__P Parameter: Age (day) Value: 7
  misc_feature: MA Experiment 20000184 PARAMETER Experiment Name: At_Shoots__P Parameter: Tissue Value: Shoots vs. Whole Plant
  misc_feature: MA Experiment ID: 20000185 Result: Down-regulated in Transcription
  misc_feature: MA Experiment 20000185 PARAMETER Experiment Name: At_Roots__P Parameter: Age (day) Value: 7 vs. 21
  misc_feature: MA Experiment 20000185 PARAMETER Experiment Name: At_Roots__P Parameter: Organism Value: A. thaliana
  misc_feature: MA Experiment 20000185 PARAMETER Experiment Name: At_Roots__P Parameter: Tissue Value: Roots vs. Whole Plant
  misc_feature: MA Experiment ID: 20000234 Result: Down-regulated in Transcription
  misc_feature: MA Experiment 20000234 PARAMETER Experiment Name: At_Siliques_P Parameter: Age (day) Value: 21
  misc_feature: MA Experiment 20000234 PARAMETER Experiment Name: At_Siliques_P Parameter: Organism Value: A. thaliana
  misc_feature: MA Experiment 20000234 PARAMETER Experiment Name: At_Siliques_P Parameter: Plant Line Value: WS
  misc_feature: MA Experiment 20000234 PARAMETER Experiment Name: At_Siliques_P Parameter: Tissue Value: Less Than 5mm Siliques vs. Whole Plant
  misc_feature: MA Experiment ID: 20000235 Result: Down-regulated in Transcription
  misc_feature: MA Experiment 20000235 PARAMETER Experiment Name: At_Siliques_P Parameter: Age (day) Value: 21
  misc_feature: MA Experiment 20000235 PARAMETER Experiment Name: At_Siliques_P Parameter: Organism Value: A. thaliana
  misc_feature: MA Experiment 20000235 PARAMETER Experiment Name: At_Siliques_P Parameter: Plant Line Value: WS
  misc_feature: MA Experiment 20000235 PARAMETER Experiment Name: At_Siliques_P Parameter: Tissue Value: 5-10mm Siliques vs. Whole Plant
  misc_feature: MA Experiment ID: 20000264 Result: Down-regulated in Transcription
  misc_feature: MA Experiment 20000264 PARAMETER Experiment Name: At_Open_Flower_P Parameter: Age (day) Value: 21
  misc_feature: MA Experiment 20000264 PARAMETER Experiment Name: At_Open_Flower_P Parameter: Plant Line Value: WS
  misc_feature: MA Experiment 20000264 PARAMETER Experiment Name: At_Open_Flower_P Parameter: Tissue Value: Open Flower vs. Whole Plant
  misc_feature: MA Experiment ID: 20000265 Result: Down-regulated in Transcription
  misc_feature: MA Experiment 20000265 PARAMETER Experiment Name: At_Open_Flower_P Parameter: Age (day) Value: 21
  misc_feature: MA Experiment 20000265 PARAMETER Experiment Name: At_Open_Flower_P Parameter: Plant Line Value: WS
  misc_feature: MA Experiment 20000265 PARAMETER Experiment Name: At_Open_Flower_P Parameter: Tissue Value: Closed Flower vs. Whole Plant
  misc_feature: MA Experiment ID: 20000269 Result: Down-regulated in Transcription
  misc_feature: MA Experiment 20000269 PARAMETER Experiment Name: At_1mM_KNO3_L-vs-H_Roots_P Parameter: Age (day) Value: 7,10,12
  misc_feature: MA Experiment 20000269 PARAMETER Experiment Name: At_1mM_KNO3_L-vs-H_Roots_P Parameter: Organism Value: A. thaliana
  misc_feature: MA Experiment 20000269 PARAMETER Experiment Name: At_1mM_KNO3_L-vs-H_Roots_P Parameter: Plant Line Value: WS
  misc_feature: MA Experiment 20000269 PARAMETER Experiment Name: At_1mM_KNO3_L-vs-H_Roots_P Parameter: Timepoint (day) Value: 7,10,12
  misc_feature: MA Experiment 20000269 PARAMETER Experiment Name: At_1mM_KNO3_L-vs-H_Roots_P Parameter: Tissue Value: Roots
  misc_feature: MA Experiment 20000269 PARAMETER Experiment Name: At_1mM_KNO3_L-vs-H_Roots_P Parameter: Treatment Value: 1mM KNO3 vs. 50mM KNO3
  misc_feature: MA Experiment ID: 20000286 Result: Down-regulated in Transcription
  misc_feature: MA Experiment 20000286 PARAMETER Experiment Name: At_Open_Flower_P Parameter: Age (day) Value: 21
  misc_feature: MA Experiment 20000286 PARAMETER Experiment Name: At_Open_Flower_P Parameter: Plant Line Value: WS
  misc_feature: MA Experiment 20000286 PARAMETER Experiment Name: At_Open_Flower_P Parameter: Tissue Value: Half Open vs. Whole Plant
  misc_feature: MA Experiment ID: 20000308 Result: Up-regulated in Transcription
  misc_feature: MA Experiment 20000308 PARAMETER Experiment Name: At_100mM_NaCl__P Parameter: Age (day) Value: 17
  misc_feature: MA Experiment 20000308 PARAMETER Experiment Name: At_100mM_NaCl__P Parameter: Organism Value: A. thaliana
  misc_feature: MA Experiment 20000308 PARAMETER Experiment Name: At_100mM_NaCl__P Parameter: Plant Line Value: WS
  misc_feature: MA Experiment 20000308 PARAMETER Experiment Name: At_100mM_NaCl__P Parameter: Timepoint (hr) Value: 72
  misc_feature: MA Experiment 20000308 PARAMETER Experiment Name: At_100mM_NaCl__P Parameter: Tissue Value: Whole Plant
  misc_feature: MA Experiment 20000308 PARAMETER Experiment Name: At_100mM_NaCl__P Parameter: Treatment Value: 100mM NaCl vs. No Treatment
  misc_feature: MA Experiment ID: 20000436 Result: Down-regulated in Transcription
  misc_feature: MA Experiment 20000436 PARAMETER Experiment Name: At_Drought_P Parameter: Age (day) Value: 7
  misc_feature: MA Experiment 20000436 PARAMETER Experiment Name: At_Drought_P Parameter: Organism Value: A. thaliana
  misc_feature: MA Experiment 20000436 PARAMETER Experiment Name: At_Drought_P Parameter: Plant Line Value: WS
  misc_feature: MA Experiment 20000436 PARAMETER Experiment Name: At_Drought_P Parameter: Timepoint (hr) Value: 12
  misc_feature: MA Experiment 20000436 PARAMETER Experiment Name: At_Drought_P Parameter: Tissue Value: Whole Plant
  misc_feature: MA Experiment 20000436 PARAMETER Experiment Name: At_Drought_P Parameter: Treatment Value: Drought vs. No Drought
  misc_feature: MA Experiment ID: 20000438 Result: Down-regulated in Transcription
  misc_feature: MA Experiment 20000438 PARAMETER Experiment Name: At_Shoots__P Parameter: Age (day) Value: 14
  misc_feature: MA Experiment 20000438 PARAMETER Experiment Name: At_Shoots__P Parameter: Tissue Value: Shoots vs. Whole Plant
  misc_feature: MA Experiment ID: 20000439 Result: Down-regulated in Transcription
  misc_feature: MA Experiment 20000439 PARAMETER Experiment Name: At_Roots__P Parameter: Age (day) Value: 14 vs. 21
  misc_feature: MA Experiment 20000439 PARAMETER Experiment Name: At_Roots__P Parameter: Organism Value: A. thaliana
  misc_feature: MA Experiment 20000439 PARAMETER Experiment Name: At_Roots__P Parameter: Tissue Value: Roots vs. Whole Plant
  misc_feature: MA Experiment ID: 20000527 Result: Down-regulated in Transcription
  misc_feature: MA Experiment 20000527 PARAMETER Experiment Name: At_10percent_PEG_P Parameter: Age (day) Value: 20
  misc_feature: MA Experiment 20000527 PARAMETER Experiment Name: At_10percent_PEG_P Parameter: Organism Value: A. thaliana
  misc_feature: MA Experiment 20000527 PARAMETER Experiment Name: At_10percent_PEG_P Parameter: Plant Line Value: WS
  misc_feature: MA Experiment 20000527 PARAMETER Experiment Name: At_10percent_PEG_P Parameter: Timepoint (day) Value: 20
  misc_feature: MA Experiment 20000527 PARAMETER Experiment Name: At_10percent_PEG_P Parameter: Tissue Value: Whole Plant
  misc_feature: MA Experiment 20000527 PARAMETER Experiment Name: At_10percent_PEG_P Parameter: Treatment Value: 10percent PEG vs. No Treatment
  misc_feature: MA Experiment ID: 20001450 Result: Down-regulated in Transcription
  misc_feature: MA Experiment 20001450 PARAMETER Experiment Name: At_Far-red-induction_P Parameter: Age (day) Value: 7
  misc_feature: MA Experiment 20001450 PARAMETER Experiment Name: At_Far-red-induction_P Parameter: Light Value: Far-red vs. White
  misc_feature: MA Experiment 20001450 PARAMETER Experiment Name: At_Far-red-induction_P Parameter: Organism Value: A. thaliana
  misc_feature: MA Experiment 20001450 PARAMETER Experiment Name: At_Far-red-induction_P Parameter: Plant Line Value: Columbia
  misc_feature: MA Experiment 20001450 PARAMETER Experiment Name: At_Far-red-induction_P Parameter: Timepoint (hr) Value: 8
  misc_feature: MA Experiment 20001450 PARAMETER Experiment Name: At_Far-red-induction_P Parameter: Tissue Value: Whole Plant
  misc_feature: MA Experiment ID: 20001451 Result: Down-regulated in Transcription
  misc_feature: MA Experiment 20001451 PARAMETER Experiment Name: At_Far-red-induction_P Parameter: Age (day) Value: 7
  misc_feature: MA Experiment 20001451 PARAMETER Experiment Name: At_Far-red-induction_P Parameter: Light Value: Far-red vs. White
  misc_feature: MA Experiment 20001451 PARAMETER Experiment Name: At_Far-red-induction_P Parameter: Organism Value: A. thaliana
  misc_feature: MA Experiment 20001451 PARAMETER Experiment Name: At_Far-red-induction_P Parameter: Plant Line Value: Columbia
  misc_feature: MA Experiment 20001451 PARAMETER Experiment Name: At_Far-red-induction_P Parameter: Timepoint (hr) Value: 24
  misc_feature: MA Experiment 20001451 PARAMETER Experiment Name: At_Far-red-induction_P Parameter: Tissue Value: Whole Plant
  misc_feature: MA Experiment ID: 20001458 Result: Up-regulated in Transcription
  misc_feature: MA Experiment 20001458 PARAMETER Experiment Name: At_50mM_NH4NO3_L-to-H_P Parameter: Age (day) Value: Undefined
  misc_feature: MA Experiment 20001458 PARAMETER Experiment Name: At_50mM_NH4NO3_L-to-H_P Parameter: Organism Value: Undefined
  misc_feature: MA Experiment 20001458 PARAMETER Experiment Name: At_50mM_NH4NO3_L-to-H_P Parameter: Plant Line Value: Undefined
  misc_feature: MA Experiment 20001458 PARAMETER Experiment Name: At_50mM_NH4NO3_L-to-H_P Parameter: Timepoint (hr) Value: 2
  misc_feature: MA Experiment 20001458 PARAMETER Experiment Name: At_50mM_NH4NO3_L-to-H_P Parameter: Tissue Value: Siliques
  misc_feature: MA Experiment 20001458 PARAMETER Experiment Name: At_50mM_NH4NO3_L-to-H_P Parameter: Treatment Value: 50mM NH4NO3 vs. 100mM Manitol
  misc_feature: MA Experiment ID: 20001459 Result: Up-regulated in Transcription
  misc_feature: MA Experiment 20001459 PARAMETER Experiment Name: At_50mM_NH4NO3_L-to-H_P Parameter: Age (day) Value: Undefined
  misc_feature: MA Experiment 20001459 PARAMETER Experiment Name: At_50mM_NH4NO3_L-to-H_P Parameter: Organism Value: Undefined
  misc_feature: MA Experiment 20001459 PARAMETER Experiment Name: At_50mM_NH4NO3_L-to-H_P Parameter: Plant Line Value: Undefined
  misc_feature: MA Experiment 20001459 PARAMETER Experiment Name: At_50mM_NH4NO3_L-to-H_P Parameter: Timepoint (hr) Value: 4
  misc_feature: MA Experiment 20001459 PARAMETER Experiment Name: At_50mM_NH4NO3_L-to-H_P Parameter: Tissue Value: Siliques
  misc_feature: MA Experiment 20001459 PARAMETER Experiment Name: At_50mM_NH4NO3_L-to-H_P Parameter: Treatment Value: 50mM NH4NO3 vs. 100mM Manitol
  misc_feature: MA Experiment ID: 20001554 Result: Down-regulated in Transcription
  misc_feature: MA Experiment 20001554 PARAMETER Experiment Name: At_Drought_Soil_Dry_P Parameter: Age (day) Value: 21
  misc_feature: MA Experiment 20001554 PARAMETER Experiment Name: At_Drought_Soil_Dry_P Parameter: Organism Value: A. thaliana
  misc_feature: MA Experiment 20001554 PARAMETER Experiment Name: At_Drought_Soil_Dry_P Parameter: Plant Line Value: WS
  misc_feature: MA Experiment 20001554 PARAMETER Experiment Name: At_Drought_Soil_Dry_P Parameter: Post Timepoint (hr) Value: None
  misc_feature: MA Experiment 20001554 PARAMETER Experiment Name: At_Drought_Soil_Dry_P Parameter: Post-Treatment Value: None
  misc_feature: MA Experiment 20001554 PARAMETER Experiment Name: At_Drought_Soil_Dry_P Parameter: Timepoint (day) Value: 7
  misc_feature: MA Experiment 20001554 PARAMETER Experiment Name: At_Drought_Soil_Dry_P Parameter: Treatment Value: Drought vs. No Drought
  misc_feature: MA Experiment ID: 20001555 Result: Down-regulated in Transcription
  misc_feature: MA Experiment 20001555 PARAMETER Experiment Name: At_Drought_Soil_Dry_P Parameter: Age (day) Value: 24
  misc_feature: MA Experiment 20001555 PARAMETER Experiment Name: At_Drought_Soil_Dry_P Parameter: Organism Value: A. thaliana
  misc_feature: MA Experiment 20001555 PARAMETER Experiment Name: At_Drought_Soil_Dry_P Parameter: Plant Line Value: WS
  misc_feature: MA Experiment 20001555 PARAMETER Experiment Name: At_Drought_Soil_Dry_P Parameter: Post Timepoint (hr) Value: None
  misc_feature: MA Experiment 20001555 PARAMETER Experiment Name: At_Drought_Soil_Dry_P Parameter: Post-Treatment Value: None
  misc_feature: MA Experiment 20001555 PARAMETER Experiment Name: At_Drought_Soil_Dry_P Parameter: Timepoint (day) Value: 10
  misc_feature: MA Experiment 20001555 PARAMETER Experiment Name: At_Drought_Soil_Dry_P Parameter: Treatment Value: Drought vs. No Drought
  misc_feature: MA Experiment ID: 20001556 Result: Down-regulated in Transcription
  misc_feature: MA Experiment 20001556 PARAMETER Experiment Name: At_Drought_Soil_Dry_P Parameter: Age (day) Value: 26
  misc_feature: MA Experiment 20001556 PARAMETER Experiment Name: At_Drought_Soil_Dry_P Parameter: Organism Value: A. thaliana
  misc_feature: MA Experiment 20001556 PARAMETER Experiment Name: At_Drought_Soil_Dry_P Parameter: Plant Line Value: WS
  misc_feature: MA Experiment 20001556 PARAMETER Experiment Name: At_Drought_Soil_Dry_P Parameter: Post Timepoint (hr) Value: None
  misc_feature: MA Experiment 20001556 PARAMETER Experiment Name: At_Drought_Soil_Dry_P Parameter: Post-Treatment Value: None
  misc_feature: MA Experiment 20001556 PARAMETER Experiment Name: At_Drought_Soil_Dry_P Parameter: Timepoint (day) Value: 12
  misc_feature: MA Experiment 20001556 PARAMETER Experiment Name: At_Drought_Soil_Dry_P Parameter: Treatment Value: Drought vs. No Drought
  misc_feature: MA Experiment ID: 20001557 Result: Up-regulated in Transcription
  misc_feature: MA Experiment 20001557 PARAMETER Experiment Name: At_Drought_Soil_Dry_P Parameter: Age (day) Value: 27
  misc_feature: MA Experiment 20001557 PARAMETER Experiment Name: At_Drought_Soil_Dry_P Parameter: Organism Value: A. thaliana
  misc_feature: MA Experiment 20001557 PARAMETER Experiment Name: At_Drought_Soil_Dry_P Parameter: Plant Line Value: WS
  misc_feature: MA Experiment 20001557 PARAMETER Experiment Name: At_Drought_Soil_Dry_P Parameter: Post Timepoint (hr) Value: 3
  misc_feature: MA Experiment 20001557 PARAMETER Experiment Name: At_Drought_Soil_Dry_P Parameter: Post-Treatment Value: Re-Water vs. No Drought
  misc_feature: MA Experiment 20001557 PARAMETER Experiment Name: At_Drought_Soil_Dry_P Parameter: Timepoint (day) Value: 13
  misc_feature: MA Experiment 20001557 PARAMETER Experiment Name: At_Drought_Soil_Dry_P Parameter: Treatment Value: Drought vs. No Drought
  misc_feature: MA Experiment ID: 20001558 Result: Up-regulated in Transcription
  misc_feature: MA Experiment 20001558 PARAMETER Experiment Name: At_Drought_Soil_Dry_P Parameter: Age (day) Value: 27
  misc_feature: MA Experiment 20001558 PARAMETER Experiment Name: At_Drought_Soil_Dry_P Parameter: Organism Value: A. thaliana
  misc_feature: MA Experiment 20001558 PARAMETER Experiment Name: At_Drought_Soil_Dry_P Parameter: Plant Line Value: WS
  misc_feature: MA Experiment 20001558 PARAMETER Experiment Name: At_Drought_Soil_Dry_P Parameter: Post Timepoint (hr) Value: 6
  misc_feature: MA Experiment 20001558 PARAMETER Experiment Name: At_Drought_Soil_Dry_P Parameter: Post-Treatment Value: Re-Water vs. No Drought
  misc_feature: MA Experiment 20001558 PARAMETER Experiment Name: At_Drought_Soil_Dry_P Parameter: Timepoint (day) Value: 13
  misc_feature: MA Experiment 20001558 PARAMETER Experiment Name: At_Drought_Soil_Dry_P Parameter: Treatment Value: Drought vs. No Drought
  misc_feature: MA Experiment ID: 20001560 Result: Up-regulated in Transcription
  misc_feature: MA Experiment 20001560 PARAMETER Experiment Name: At_Drought_Soil_Dry_P Parameter: Age (day) Value: 28
  misc_feature: MA Experiment 20001560 PARAMETER Experiment Name: At_Drought_Soil_Dry_P Parameter: Organism Value: A. thaliana
  misc_feature: MA Experiment 20001560 PARAMETER Experiment Name: At_Drought_Soil_Dry_P Parameter: Plant Line Value: WS
  misc_feature: MA Experiment 20001560 PARAMETER Experiment Name: At_Drought_Soil_Dry_P Parameter: Post Timepoint (hr) Value: None
  misc_feature: MA Experiment 20001560 PARAMETER Experiment Name: At_Drought_Soil_Dry_P Parameter: Post-Treatment Value: None
  misc_feature: MA Experiment 20001560 PARAMETER Experiment Name: At_Drought_Soil_Dry_P Parameter: Timepoint (day) Value: 14
  misc_feature: MA Experiment 20001560 PARAMETER Experiment Name: At_Drought_Soil_Dry_P Parameter: Treatment Value: Drought vs. No Drought
gcacacacactttctcatcttctttctacaaatgggtttccaaagatctatctcttcttcttctgcattaaaatggcttggatttgtaacagcggtttgggttcaatccatctccggcaacaactacactttttcaaactactccggtgctcttaagtctctcatgaatctcaaccagctcgagctcaacaacctctctgtcgctaaagacgtcggaaaagcctttgggatcctggctggccttgcctctgaccgtcttcccactccggtcatcctccttattggttgctttgaaggtcttcttggttatggtgtacaatggctcgttgttagccgcaccatccaaccaatcccttattggcagatgtgtatattcctctgtatgggagggaacagcacaacgtggatgaacacggcggttctagtgacttgcatacgcaattttcgacgaaaccgtggtccggtctccgggatattgaaaggatatgtcggtttaagcacagctatattcactgatctctgtactgctctgttctcaaacgatccggcgtcgtttttggttttactagccgtggtgccttttgccgtatgtctcacggcggttttcttcctccgtgagatcccaccagcatcttccgcagctgaggagaacgaagagactcgttactttaccatattcaacattgtggccgttgttgtcgccgtgtatcttcagtcttacgacatcattggaatcaaaactggagtgttctctgtcgctttcgcttctatacttctcttcctcttggcttctccaatagccattcctttccactccttcatcaagagcttgaactacggtgaacaagatgacttagaaggacggattcaagaaccgttgcttagatccgagatagcggcagcggagaaagaagtaatagttgtagctgcggtggcagcggaagaggaggagaagaagaggaagaaaccggttttgggagaagaccacactataatggaagcagtgttgaccgttgacttttgggtgctttttgtgtccttcttgtgtggtgtaggaactggtttagctgtgatgaacaatatgggtcagataggtcttgcccttggatacacaaatgtctcaatctttgtctccatgactagtatttggggattcttcggtcgcattctctccggtactctctccgaatactttctcaagaaagctggaacaccaagaccactatggaatgcagcctctcaaatccttatggccgtaggatatatactaatggctttagccgtgcctaattcactctacatcggttcaatggtggttggagtatgttacggtgtccgtctagccataactgtaccaacagcttccgaactctttggtctcaaatactacggtctcatctacaacatcttagtacttaacttgccacttggctcgtttctcttctcgggtctcctcgctggcttcctctacgatgcagaggcaacaccaactcctggtgggggcaacacgtgcgtaggagctcattgctaccgtctcatcttcatagtcatggcattagcttctgttatcggagtcggtttggatcttgtgttggcttataggactaaggagatttacgctaagattcacgctagcaagaagtcaaagaaatctggtggtagccttagttaagacactgtatatctagttccggtgcactacattgttttcagatgctgattttgtatacatgatacaatatcggattcaagatattgttgaacaaaatttcaagtaccagagatcattgttgtagtagcatcgccaatgtatttttttgtctttccgagatttgttcaaaattatataaatgtatgacattttgatagtccaattccaattattttctaagattt

SEQ ID NO: 41272 - protein, 556 aa, Arabidopsis thaliana
  peptide (1)..(556): Ceres Seq. ID no. 13504760
  misc_feature (244)..(490): Pfam Name: Sugar (and other) transporter Pfam Description: Sugar (and other) transporter
  misc_feature (244)..(490): Pfam Name: Sugar (and other) transporter Pfam Description: Sugar (and other) transporter
  misc_feature (24)..(321): Homolog of NCBI NO: 15241312 NR Description: nodulin-related protein [Arabidopsis thaliana]
  misc_feature (298)..(548): Homolog of NCBI NO: 18395988 NR Description: expressed protein [Arabidopsis thaliana]
  misc_feature (24)..(294): Homolog of NCBI NO: 18395988 NR Description: expressed protein [Arabidopsis thaliana]
  misc_feature (304)..(544): Homolog of NCBI NO: 24461856 NR Description: nodulin-like protein [Poncirus trifoliata]
  misc_feature (16)..(269): Homolog of NCBI NO: 24461856 NR Description: nodulin-like protein [Poncirus trifoliata]
  misc_feature (24)..(321): Homolog of NCBI NO: 15241312 NR Description: nodulin-related protein [Arabidopsis thaliana]
  misc_feature (24)..(294): Homolog of NCBI NO: 18395988 NR Description: expressed protein [Arabidopsis thaliana]
  misc_feature (16)..(269): Homolog of NCBI NO: 24461856 NR Description: nodulin-like protein [Poncirus trifoliata]
  misc_feature (11)..(556): Homolog of NCBI NO: 15227274 NR Description: nodulin-related protein [Arabidopsis thaliana]
  misc_feature (11)..(339): Homolog of NCBI NO: 15236224 NR Description: expressed protein [Arabidopsis thaliana]
  misc_feature (286)..(555): Homolog of NCBI NO: 15236224 NR Description: expressed protein [Arabidopsis thaliana]
  misc_feature (276)..(545): Homolog of NCBI NO: 38345150 NR Description: OSJNBa0014K14.4 [Oryza sativa (japonica
  misc_feature (17)..(269): Homolog of NCBI NO: 38345150 NR Description: OSJNBa0014K14.4 [Oryza sativa (japonica
  misc_feature (304)..(544): Homolog of NCBI NO: 24461856 NR Description: nodulin-like protein [Poncirus trifoliata]
  misc_feature (298)..(548): Homolog of NCBI NO: 18395988 NR Description: expressed protein [Arabidopsis thaliana]
  misc_feature (17)..(269): Homolog of NCBI NO: 38345150 NR Description: OSJNBa0014K14.4 [Oryza sativa (japonica
  misc_feature (276)..(545): Homolog of NCBI NO: 38345150 NR Description: OSJNBa0014K14.4 [Oryza sativa (japonica
  misc_feature (286)..(555): Homolog of NCBI NO: 15236224 NR Description: expressed protein [Arabidopsis thaliana]
  misc_feature (11)..(339): Homolog of NCBI NO: 15236224 NR Description: expressed protein [Arabidopsis thaliana]
  misc_feature (11)..(556): Homolog of NCBI NO: 15227274 NR Description: nodulin-related protein [Arabidopsis thaliana]
HTHFLIFFLQMGFQRSISSSSALKWLGFVTAVWVQSISGNNYTFSNYSGALKSLMNLNQLELNNLSVAKDVGKAFGILAGLASDRLPTPVILLIGCFEGLLGYGVQWLVVSRTIQPIPYWQMCIFLCMGGNSTTWMNTAVLVTCIRNFRRNRGPVSGILKGYVGLSTAIFTDLCTALFSNDPASFLVLLAVVPFAVCLTAVFFLREIPPASSAAEENEETRYFTIFNIVAVVVAVYLQSYDIIGIKTGVFSVAFASILLFLLASPIAIPFHSFIKSLNYGEQDDLEGRIQEPLLRSEIAAAEKEVIVVAAVAAEEEEKKRKKPVLGEDHTIMEAVLTVDFWVLFVSFLCGVGTGLAVMNNMGQIGLALGYTNVSIFVSMTSIWGFFGRILSGTLSEYFLKKAGTPRPLWNAASQILMAVGYILMALAVPNSLYIGSMVVGVCYGVRLAITVPTASELFGLKYYGLIYNILVLNLPLGSFLFSGLLAGFLYDAEATPTPGGGNTCVGAHCYRLIFIVMALASVIGVGLDLVLAYRTKEIYAKIHASKKSKKSGGSLS

SEQ ID NO: 41273 - protein, 546 aa, Arabidopsis thaliana
  peptide (1)..(546): Ceres Seq. ID no. 13504761
  misc_feature (234)..(480): Pfam Name: Sugar (and other) transporter Pfam Description: Sugar (and other) transporter
  misc_feature (234)..(480): Pfam Name: Sugar (and other) transporter Pfam Description: Sugar (and other) transporter
  misc_feature (14)..(311): Homolog of NCBI NO: 15241312 NR Description: nodulin-related protein [Arabidopsis thaliana]
  misc_feature (288)..(538): Homolog of NCBI NO: 18395988 NR Description: expressed protein [Arabidopsis thaliana]
  misc_feature (14)..(284): Homolog of NCBI NO: 18395988 NR Description: expressed protein [Arabidopsis thaliana]
  misc_feature (294)..(534): Homolog of NCBI NO: 24461856 NR Description: nodulin-like protein [Poncirus trifoliata]
  misc_feature (6)..(259): Homolog of NCBI NO: 24461856 NR Description: nodulin-like protein [Poncirus trifoliata]
  misc_feature (14)..(311): Homolog of NCBI NO: 15241312 NR Description: nodulin-related protein [Arabidopsis thaliana]
  misc_feature (14)..(284): Homolog of NCBI NO: 18395988 NR Description: expressed protein [Arabidopsis thaliana]
  misc_feature (6)..(259): Homolog of NCBI NO: 24461856 NR Description: nodulin-like protein [Poncirus trifoliata]
  misc_feature (1)..(546): Homolog of NCBI NO: 15227274 NR Description: nodulin-related protein [Arabidopsis thaliana]
  misc_feature (1)..(329): Homolog of NCBI NO: 15236224 NR Description: expressed protein [Arabidopsis thaliana]
  misc_feature (276)..(545): Homolog of NCBI NO: 15236224 NR Description: expressed protein [Arabidopsis thaliana]
  misc_feature (266)..(535): Homolog of NCBI NO: 38345150 NR Description: OSJNBa0014K14.4 [Oryza sativa (japonica
  misc_feature (7)..(259): Homolog of NCBI NO: 38345150 NR Description: OSJNBa0014K14.4 [Oryza sativa (japonica
  misc_feature (294)..(534): Homolog of NCBI NO: 24461856 NR Description: nodulin-like protein [Poncirus trifoliata]
  misc_feature (288)..(538): Homolog of NCBI NO: 18395988 NR Description: expressed protein [Arabidopsis thaliana]
  misc_feature (7)..(259): Homolog of NCBI NO: 38345150 NR Description: OSJNBa0014K14.4 [Oryza sativa (japonica
  misc_feature (266)..(535): Homolog of NCBI NO: 38345150 NR Description: OSJNBa0014K14.4 [Oryza sativa (japonica
  misc_feature (276)..(545): Homolog of NCBI NO: 15236224 NR Description: expressed protein [Arabidopsis thaliana]
  misc_feature (1)..(329): Homolog of NCBI NO: 15236224 NR Description: expressed protein [Arabidopsis thaliana]
  misc_feature (1)..(546): Homolog of NCBI NO: 15227274 NR Description: nodulin-related protein [Arabidopsis thaliana]
MGFQRSISSSSALKWLGFVTAVWVQSISGNNYTFSNYSGALKSLMNLNQLELNNLSVAKDVGKAFGILAGLASDRLPTPVILLIGCFEGLLGYGVQWLVVSRTIQPIPYWQMCIFLCMGGNSTTWMNTAVLVTCIRNFRRNRGPVSGILKGYVGLSTAIFTDLCTALFSNDPASFLVLLAVVPFAVCLTAVFFLREIPPASSAAEENEETRYFTIFNIVAVVVAVYLQSYDIIGIKTGVFSVAFASILLFLLASPIAIPFHSFIKSLNYGEQDDLEGRIQEPLLRSEIAAAEKEVIVVAAVAAEEEEKKRKKPVLGEDHTIMEAVLTVDFWVLFVSFLCGVGTGLAVMNNMGQIGLALGYTNVSIFVSMTSIWGFFGRILSGTLSEYFLKKAGTPRPLWNAASQILMAVGYILMALAVPNSLYIGSMVVGVCYGVRLAITVPTASELFGLKYYGLIYNILVLNLPLGSFLFSGLLAGFLYDAEATPTPGGGNTCVGAHCYRLIFIVMALASVIGVGLDLVLAYRTKEIYAKIHASKKSKKSGGSLS

SEQ ID NO: 41274 - protein, 502 aa, Arabidopsis thaliana
  peptide (1)..(502): Ceres Seq. ID no. 13504762
  misc_feature (190)..(436): Pfam Name: Sugar (and other) transporter Pfam Description: Sugar (and other) transporter
  misc_feature (190)..(436): Pfam Name: Sugar (and other) transporter Pfam Description: Sugar (and other) transporter
  misc_feature (1)..(267): Homolog of NCBI NO: 15241312 NR Description: nodulin-related protein [Arabidopsis thaliana]
  misc_feature (244)..(494): Homolog of NCBI NO: 18395988 NR Description: expressed protein [Arabidopsis thaliana]
  misc_feature (1)..(240): Homolog of NCBI NO: 18395988 NR Description: expressed protein [Arabidopsis thaliana]
  misc_feature (250)..(490): Homolog of NCBI NO: 24461856 NR Description: nodulin-like protein [Poncirus trifoliata]
  misc_feature (1)..(215): Homolog of NCBI NO: 24461856 NR Description: nodulin-like protein [Poncirus trifoliata]
  misc_feature (1)..(267): Homolog of NCBI NO: 15241312 NR Description: nodulin-related protein [Arabidopsis thaliana]
  misc_feature (1)..(240): Homolog of NCBI NO: 18395988 NR Description: expressed protein [Arabidopsis thaliana]
  misc_feature (1)..(215): Homolog of NCBI NO: 24461856 NR Description: nodulin-like protein [Poncirus trifoliata]
  misc_feature (1)..(502): Homolog of NCBI NO: 15227274 NR Description: nodulin-related protein [Arabidopsis thaliana]
  misc_feature (1)..(285): Homolog of NCBI NO: 15236224 NR Description: expressed protein [Arabidopsis thaliana]
  misc_feature (232)..(501): Homolog of NCBI NO: 15236224 NR Description: expressed protein [Arabidopsis thaliana]
  misc_feature (222)..(491): Homolog of NCBI NO: 38345150 NR Description: OSJNBa0014K14.4 [Oryza sativa (japonica
  misc_feature (1)..(215): Homolog of NCBI NO: 38345150 NR Description: OSJNBa0014K14.4 [Oryza sativa (japonica
  misc_feature (250)..(490): Homolog of NCBI NO: 24461856 NR Description: nodulin-like protein [Poncirus trifoliata]
  misc_feature (244)..(494): Homolog of NCBI NO: 18395988 NR Description: expressed protein [Arabidopsis thaliana]
  misc_feature (1)..(215): Homolog of NCBI NO: 38345150 NR Description: OSJNBa0014K14.4 [Oryza sativa (japonica
  misc_feature (222)..(491): Homolog of NCBI NO: 38345150 NR Description: OSJNBa0014K14.4 [Oryza sativa (japonica
  misc_feature (232)..(501): Homolog of NCBI NO: 15236224 NR Description: expressed protein [Arabidopsis thaliana]
  misc_feature (1)..(285): Homolog of NCBI NO: 15236224 NR Description: expressed protein [Arabidopsis thaliana]
  misc_feature (1)..(502): Homolog of NCBI NO: 15227274 NR Description: nodulin-related protein [Arabidopsis thaliana]
MNLNQLELNNLSVAKDVGKAFGILAGLASDRLPTPVILLIGCFEGLLGYGVQWLVVSRTIQPIPYWQMCIFLCMGGNSTTWMNTAVLVTCIRNFRRNRGPVSGILKGYVGLSTAIFTDLCTALFSNDPASFLVLLAVVPFAVCLTAVFFLREIPPASSAAEENEETRYFTIFNIVAVVVAVYLQSYDIIGIKTGVFSVAFASILLFLLASPIAIPFHSFIKSLNYGEQDDLEGRIQEPLLRSEIAAAEKEVIVVAAVAAEEEEKKRKKPVLGEDHTIMEAVLTVDFWVLFVSFLCGVGTGLAVMNNMGQIGLALGYTNVSIFVSMTSIWGFFGRILSGTLSEYFLKKAGTPRPLWNAASQILMAVGYILMALAVPNSLYIGSMVVGVCYGVRLAITVPTASELFGLKYYGLIYNILVLNLPLGSFLFSGLLAGFLYDAEATPTPGGGNTCVGAHCYRLIFIVMALASVIGVGLDLVLAYRTKEIYAKIHASKKSKKSGGSLS

SEQ ID NO: 41275 - DNA, 919 bp, Arabidopsis thaliana
  misc_feature (1)..(919): Ceres Seq. ID no. 12323942
  misc_feature: MA Experiment ID: 20000437 Result: Down-regulated in Transcription
  misc_feature: MA Experiment 20000437 PARAMETER Experiment Name: At_Drought_P Parameter: Age (day) Value: 8
  misc_feature: MA Experiment 20000437 PARAMETER Experiment Name: At_Drought_P Parameter: Organism Value: A. thaliana
  misc_feature: MA Experiment 20000437 PARAMETER Experiment Name: At_Drought_P Parameter: Plant Line Value: WS
  misc_feature: MA Experiment 20000437 PARAMETER Experiment Name: At_Drought_P Parameter: Timepoint (hr) Value: 24
  misc_feature: MA Experiment 20000437 PARAMETER Experiment Name: At_Drought_P Parameter: Tissue Value: Whole Plant
  misc_feature: MA Experiment 20000437 PARAMETER Experiment Name: At_Drought_P Parameter: Treatment Value: Drought vs. No Drought
aaattttgtttgccagatcgtctctctctcaaaagcttttctctctttttctcctttgtcccctccactttaccgttcacgaagccattccgagctatcacgaaggaatctattgaagattcatagcgctcaatcacaaatgccagaagcacgagatcgaatagagaggcaagttgattacccagccgcatttctcaatagacgctcgcatggtattttacttgacgaaccagcaacacagcacaatttgtttgggtctccggttcagagagtgccatcggaagctacaggaggacttgggtcaattggtcaaggatctatgacgggaagaggtgggcttgtgaggggtaatttcggtattcggcggactggtggtggtagaagaggtcaaattcaatttagatcgccacagggacgagagaacatgagcttgggtgttacaaggcgtggaagggctcgtgcttcaaattctgtcttaccttcttggtatccaagaacgcccctccgtgatatttctgccgttgttagggctattgagagaaggagagctcgtatgggagaaggtgttggccgagatattgagaccccaactccacaacaacttggggttcttgattctctagtaccgttgtcaggtgctcatctcgagcacgactattctatggttactcccggtccatctattggattcaagcgtccttggccaccctcaactgctaaagtccatcagattttgctcgacatcacaagagaaaacacaggggaagaagatgccctcactccagagaagaagctcctcaactctattgataaagtggagaaggttgtgatggaagagattcagaaaatgaagagcactcctagtgctaaaagagcagaaagggagaaaagagttaggacgctaatgtcgatgcgatga

SEQ ID NO: 41276 - protein, 305 aa, Arabidopsis thaliana
  peptide (1)..(305): Ceres Seq. ID no. 12323943
  misc_feature (105)..(305): Homolog of NCBI NO: 38344815 NR Description: OSJNBb0022F23.8 [Oryza sativa (japonica
  misc_feature (47)..(305): Homolog of NCBI NO: 15230880 NR Description: putative protein; protein id: At3g57860.1
  misc_feature (47)..(305): Homolog of NCBI NO: 15227912 NR Description: hypothetical protein; protein id: At2g42260.1
NFVCQIVSLSKAFLSFSPLSPPLYRSRSHSELSRRNLLKIHSAQSQMPEARDRIERQVDYPAAFLNRRSHGILLDEPATQHNLFGSPVQRVPSEATGGLGSIGQGSMTGRGGLVRGNFGIRRTGGGRRGQIQFRSPQGRENMSLGVTRRGRARASNSVLPSWYPRTPLRDISAVVRAIERRRARMGEGVGRDIETPTPQQLGVLDSLVPLSGAHLEHDYSMVTPGPSIGFKRPWPPSTAKVHQILLDITRENTGEEDALTPEKKLLNSIDKVEKVVMEEIQKMKSTPSAKRAEREKRVRTLMSMR

SEQ ID NO: 41277 - protein, 259 aa, Arabidopsis thaliana
  peptide (1)..(259): Ceres Seq. ID no. 12323944
  misc_feature (59)..(259): Homolog of NCBI NO: 38344815 NR Description: OSJNBb0022F23.8 [Oryza sativa (japonica
  misc_feature (1)..(259): Homolog of NCBI NO: 15230880 NR Description: putative protein; protein id: At3g57860.1
  misc_feature (1)..(259): Homolog of NCBI NO: 15227912 NR Description: hypothetical protein; protein id: At2g42260.1
MPEARDRIERQVDYPAAFLNRRSHGILLDEPATQHNLFGSPVQRVPSEATGGLGSIGQGSMTGRGGLVRGNFGIRRTGGGRRGQIQFRSPQGRENMSLGVTRRGRARASNSVLPSWYPRTPLRDISAVVRAIERRRARMGEGVGRDIETPTPQQLGVLDSLVPLSGAHLEHDYSMVTPGPSIGFKRPWPPSTAKVHQILLDITRENTGEEDALTPEKKLLNSIDKVEKVVMEEIQKMKSTPSAKRAEREKRVRTLMSMR

SEQ ID NO: 41278 - protein, 199 aa, Arabidopsis thaliana
  peptide (1)..(199): Ceres Seq. ID no. 12323945
  misc_feature (1)..(199): Homolog of NCBI NO: 38344815 NR Description: OSJNBb0022F23.8 [Oryza sativa (japonica
  misc_feature (1)..(199): Homolog of NCBI NO: 15230880 NR Description: putative protein; protein id: At3g57860.1
  misc_feature (1)..(199): Homolog of NCBI NO: 15227912 NR Description: hypothetical protein; protein id: At2g42260.1
MTGRGGLVRGNFGIRRTGGGRRGQIQFRSPQGRENMSLGVTRRGRARASNSVLPSWYPRTPLRDISAVVRAIERRRARMGEGVGRDIETPTPQQLGVLDSLVPLSGAHLEHDYSMVTPGPSIGFKRPWPPSTAKVHQILLDITRENTGEEDALTPEKKLLNSIDKVEKVVMEEIQKMKSTPSAKRAEREKRVRTLMSMR

SEQ ID NO: 41279 - DNA, 1448 bp, Arabidopsis thaliana
  misc_feature (1)..(1448): Ceres Seq. ID no. 13492867
  misc_feature: MA Experiment ID: 108573 Result: Up-regulated in Transcription
  misc_feature: MA Experiment 108573 PARAMETER Experiment Name: At_Drought_cDNA_P Parameter: Timepoint (hr) Value: 6
  misc_feature: MA Experiment 108573 PARAMETER Experiment Name: At_Drought_cDNA_P Parameter: Tissue Value: Aerial
  misc_feature: MA Experiment 108573 PARAMETER Experiment Name: At_Drought_cDNA_P Parameter: Treatment Value: Drought vs. No Drought
  misc_feature: MA Experiment ID: 108668 Result: Up-regulated in Transcription
  misc_feature: MA Experiment 108668 PARAMETER Experiment Name: At_2mM_SA_cDNA_P Parameter: Plant Line Value: WS
  misc_feature: MA Experiment 108668 PARAMETER Experiment Name: At_2mM_SA_cDNA_P Parameter: Timepoint (hr) Value: 6
  misc_feature: MA Experiment 108668 PARAMETER Experiment Name: At_2mM_SA_cDNA_P Parameter: Treatment Value: 2mM SA vs. No Treatment
  misc_feature: MA Experiment ID: 20000182 Result: Up-regulated in Transcription
  misc_feature: MA Experiment 20000182 PARAMETER Experiment Name: At_2mM_SA_P Parameter: Age (day) Value: 14
  misc_feature: MA Experiment 20000182 PARAMETER Experiment Name: At_2mM_SA_P Parameter: Organism Value: A. thaliana
  misc_feature: MA Experiment 20000182 PARAMETER Experiment Name: At_2mM_SA_P Parameter: Plant Line Value: WS
  misc_feature: MA Experiment 20000182 PARAMETER Experiment Name: At_2mM_SA_P Parameter: Timepoint (hr) Value: 6
  misc_feature: MA Experiment 20000182 PARAMETER Experiment Name: At_2mM_SA_P Parameter: Tissue Value: Aerial
  misc_feature: MA Experiment 20000182 PARAMETER Experiment Name: At_2mM_SA_P Parameter: Treatment Value: 2mM SA vs. No Treatment
atctctatgttgtagttcttgaacagttggctctcttttcaagaatcgtcgccgttgacctccgtgcctctccgatcaacttcccattcttttaaatgacgagagattcatcaaggaacagctcattaaagccatggcctcgaaaaaaatttctttttccttctgttgtgattgtcattgttgggataatcgtggcgtttacttatcagtccaagttgaaaccacctccgccgaagctatgtggctcctccggtggtccaccgatcacagcgccgcggataaagcttcaagatgggaggtatttggcttacaaagagcatggacttccaagagagaaagctaaccgcaaaatcgtcttcatccatggatccgattgttgtagacacgatgccgttttcgccactctgctttctccggatttagtagaggaactaggtgtatatatggtttcattcgacagaccgggctattgtgagagtgatccgcatccaagtcgtacaccgcgaagcttggtttcggatattgaagagctagctgatcagttgagtctaggatcgaaattttatgtgctcgggtactcgatgggaggacaagcagcatggggatgtcttaaatacattcctcataggttagccggagtaacactagttgctccagtggttaactattattggaagaacttacctttgaacgtttccactgaaggttttaactttcaacaaaagagagatcaattggcagttcgtgttgctcactatactccttggcttatctattggtggaacacacaaaaatggttccctggttcgagtattgcaaaccgagatcacagtctcttggcacagccggataaagatatcatttcgaagcttggttcttcgaggaaaccacattgggcagaggtaaggcagcaaggaatacatgagagtattaaccgtgacatgatcgttggttttgggaactgggaatttggtcctttagacctcgagaatccgtttttgaataaggaaggctctgtgcatttgtggcaaggagatgaggacatgttagtacctgcgaagctgcagcgttaccttgctcatcagcttccatgggttcactatcatgaggttccgagaagtggccacttcttccactacactaaaggtgtagttgatgacattgtaaagtcgctcttaacctccgatgtaagagcatctagagtttgtatttgatcatttgtagcttccaaaaactctgaaaaaaaatcccaaaaaaatacacggatacaatagagttatgtactagttacatttgtcagtatcgtagtttatttttatttggttacacgtgtaatttaatcgaccaagccttcatcaattgtcttgtcaagcttatcatgttctttaatttgatcttttagcaacatgtgtttggtctttttgttttatattctatgttagtctttt

SEQ ID NO: 41280 - protein, 372 aa, Arabidopsis thaliana
  peptide (1)..(372): Ceres Seq. ID no. 13492868
  misc_feature (115)..(359): Pfam Name: alpha/beta hydrolase fold Pfam Description: alpha/beta hydrolase fold
  misc_feature (24)..(364): Homolog of NCBI NO: 34908462 NR Description: P0683F02.22 [Oryza sativa (japonica
  misc_feature (43)..(360): Homolog of NCBI NO: 37536162 NR Description: putative alpha/beta hydrolase
  misc_feature (3)..(369): Homolog of NCBI NO: 15228377 NR Description: hydrolase, alpha/beta fold family [Arabidopsis
  misc_feature (25)..(364): Homolog of NCBI NO: 18404095 NR Description: hydrolase, alpha/beta fold family [Arabidopsis
  misc_feature (1)..(364): Homolog of NCBI NO: 28416665 NR Description: At2g36290 [Arabidopsis thaliana]
  misc_feature (22)..(361): Homolog of NCBI NO: 18410582 NR Description: esterase/lipase/thioesterase family [Arabidopsis
  misc_feature (22)..(361): Homolog of NCBI NO: 21592662 NR Description: unknown [Arabidopsis thaliana]
  misc_feature (1)..(369): Homolog of NCBI NO: 15221193 NR Description: esterase/lipase/thioesterase family [Arabidopsis
  misc_feature (1)..(372): Homolog of NCBI NO: 21537089 NR Description: unknown [Arabidopsis thaliana]
  misc_feature (1)..(372): Homolog of NCBI NO: 18410575 NR Description: hydrolase, alpha/beta fold family [Arabidopsis
MTRDSSRNSSLKPWPRKKFLFPSVVIVIVGIIVAFTYQSKLKPPPPKLCGSSGGPPITAPRIKLQDGRYLAYKEHGLPREKANRKIVFIHGSDCCRHDAVFATLLSPDLVEELGVYMVSFDRPGYCESDPHPSRTPRSLVSDIEELADQLSLGSKFYVLGYSMGGQAAWGCLKYIPHRLAGVTLVAPVVNYYWKNLPLNVSTEGFNFQQKRDQLAVRVAHYTPWLIYWWNTQKWFPGSSIANRDHSLLAQPDKDIISKLGSSRKPHWAEVRQQGIHESINRDMIVGFGNWEFGPLDLENPFLNKEGSVHLWQGDEDMLVPAKLQRYLAHQLPWVHYHEVPRSGHFFHYTKGVVDDIVKSLLTSDVRASRVCI

SEQ ID NO: 41281 - protein, 256 aa, Arabidopsis thaliana
  peptide (1)..(256): Ceres Seq. ID no. 13492869
  misc_feature (1)..(243): Pfam Name: alpha/beta hydrolase fold Pfam Description: alpha/beta hydrolase fold
  misc_feature (1)..(248): Homolog of NCBI NO: 34908462 NR Description: P0683F02.22 [Oryza sativa (japonica
  misc_feature (1)..(244): Homolog of NCBI NO: 37536162 NR Description: putative alpha/beta hydrolase
  misc_feature (1)..(253): Homolog of NCBI NO: 15228377 NR Description: hydrolase, alpha/beta fold family [Arabidopsis
  misc_feature (1)..(248): Homolog of NCBI NO: 18404095 NR Description: hydrolase, alpha/beta fold family [Arabidopsis
  misc_feature (1)..(248): Homolog of NCBI NO: 28416665 NR Description: At2g36290 [Arabidopsis thaliana]
  misc_feature (1)..(245): Homolog of NCBI NO: 18410582 NR Description: esterase/lipase/thioesterase family [Arabidopsis
  misc_feature (1)..(245): Homolog of NCBI NO: 21592662 NR Description: unknown [Arabidopsis thaliana]
  misc_feature (1)..(253): Homolog of NCBI NO: 15221193 NR Description: esterase/lipase/thioesterase family [Arabidopsis
  misc_feature (1)..(256): Homolog of NCBI NO: 21537089 NR Description: unknown [Arabidopsis thaliana]
  misc_feature (1)..(256): Homolog of NCBI NO: 18410575 NR Description: hydrolase, alpha/beta fold family [Arabidopsis
MVSFDRPGYCESDPHPSRTPRSLVSDIEELADQLSLGSKFYVLGYSMGGQAAWGCLKYIPHRLAGVTLVAPVVNYYWKNLPLNVSTEGFNFQQKRDQLAVRVAHYTPWLIYWWNTQKWFPGSSIANRDHSLLAQPDKDIISKLGSSRKPHWAEVRQQGIHESINRDMIVGFGNWEFGPLDLENPFLNKEGSVHLWQGDEDMLVPAKLQRYLAHQLPWVHYHEVPRSGHFFHYTKGVVDDIVKSLLTSDVRASRVCI

SEQ ID NO: 41282 - protein, 210 aa, Arabidopsis thaliana
  peptide (1)..(210): Ceres Seq. ID no. 13492870
  misc_feature (1)..(197): Pfam Name: alpha/beta hydrolase fold Pfam Description: alpha/beta hydrolase fold
  misc_feature (1)..(202): Homolog of NCBI NO: 34908462 NR Description: P0683F02.22 [Oryza sativa (japonica
  misc_feature (1)..(198): Homolog of NCBI NO: 37536162 NR Description: putative alpha/beta hydrolase
  misc_feature (1)..(207): Homolog of NCBI NO: 15228377 NR Description: hydrolase, alpha/beta fold family [Arabidopsis
  misc_feature (1)..(202): Homolog of NCBI NO: 18404095 NR Description: hydrolase, alpha/beta fold family [Arabidopsis
  misc_feature (1)..(202): Homolog of NCBI NO: 28416665 NR Description: At2g36290 [Arabidopsis thaliana]
  misc_feature (1)..(199): Homolog of NCBI NO: 18410582 NR Description: esterase/lipase/thioesterase family [Arabidopsis
  misc_feature (1)..(199): Homolog of NCBI NO: 21592662 NR Description: unknown [Arabidopsis thaliana]
  misc_feature (1)..(207): Homolog of NCBI NO: 15221193 NR Description: esterase/lipase/thioesterase family [Arabidopsis
  misc_feature (1)..(210): Homolog of NCBI NO: 21537089 NR Description: unknown [Arabidopsis thaliana]
  misc_feature (1)..(210): Homolog of NCBI NO: 18410575 NR Description: hydrolase, alpha/beta fold family [Arabidopsis
MGGQAAWGCLKYIPHRLAGVTLVAPVVNYYWKNLPLNVSTEGFNFQQKRDQLAVRVAHYTPWLIYWWNTQKWFPGSSIANRDHSLLAQPDKDIISKLGSSRKPHWAEVRQQGIHESINRDMIVGFGNWEFGPLDLENPFLNKEGSVHLWQGDEDMLVPAKLQRYLAHQLPWVHYHEVPRSGHFFHYTKGVVDDIVKSLLTSDVRASRVCI

SEQ ID NO: 41283 - DNA, 952 bp, Arabidopsis thaliana
  misc_feature (1)..(952): Ceres Seq. ID no. 13497421
  misc_feature: MA Experiment ID: 108434 Result: Down-regulated in Transcription
  misc_feature: MA Experiment 108434 PARAMETER Experiment Name: At_Root_Tips_cDNA_P Parameter: Tissue Value: Root Tips
  misc_feature: MA Experiment ID: 108435 Result: Down-regulated in Transcription
  misc_feature: MA Experiment 108435 PARAMETER Experiment Name: At_stm_Mutants_cDNA_P Parameter: Plant Line Value: wt Landsburg vs stm
  misc_feature: MA Experiment 108435 PARAMETER Experiment Name: At_stm_Mutants_cDNA_P Parameter: Tissue Value: Shoot Apical Meristem Region
  misc_feature: MA Experiment ID: 108488 Result: Down-regulated in Transcription
  misc_feature: MA Experiment ID: 20000069 Result: Up-regulated in Transcription
  misc_feature: MA Experiment 20000069 PARAMETER Experiment Name: At_100uM_ABA_Mutants_cDNA_P Parameter: Plant Line Value: CS23
  misc_feature: MA Experiment 20000069 PARAMETER Experiment Name: At_100uM_ABA_Mutants_cDNA_P Parameter: Timepoint (hr) Value: 6
  misc_feature: MA Experiment 20000069 PARAMETER Experiment Name: At_100uM_ABA_Mutants_cDNA_P Parameter: Tissue Value: Aerial
  misc_feature: MA Experiment 20000069 PARAMETER Experiment Name: At_100uM_ABA_Mutants_cDNA_P Parameter: Treatment Value: 100uM ABA vs. No Treatment
  misc_feature: MA Experiment ID: 20000072 Result: Up-regulated in Transcription
  misc_feature: MA Experiment 20000072 PARAMETER Experiment Name: At_100uM_ABA_Mutants_cDNA_P Parameter: Plant Line Value: CS8105
  misc_feature: MA Experiment 20000072 PARAMETER Experiment Name: At_100uM_ABA_Mutants_cDNA_P Parameter: Timepoint (hr) Value: 6
  misc_feature: MA Experiment 20000072 PARAMETER Experiment Name: At_100uM_ABA_Mutants_cDNA_P Parameter: Tissue Value: Aerial
  misc_feature: MA Experiment 20000072 PARAMETER Experiment Name: At_100uM_ABA_Mutants_cDNA_P Parameter: Treatment Value: 100uM ABA vs. No Treatment
  misc_feature: MA Experiment ID: 20000184 Result: Down-regulated in Transcription
  misc_feature: MA Experiment 20000184 PARAMETER Experiment Name: At_Shoots__P Parameter: Age (day) Value: 7
  misc_feature: MA Experiment 20000184 PARAMETER Experiment Name: At_Shoots__P Parameter: Tissue Value: Shoots vs. Whole Plant
  misc_feature: MA Experiment ID: 20000224 Result: Down-regulated in Transcription
  misc_feature: MA Experiment ID: 20000227 Result: Down-regulated in Transcription
  misc_feature: MA Experiment 20000227 PARAMETER Experiment Name: At_Root-Tips-vs-Tops_P Parameter: Tissue Value: Root Tips vs. Root Tops
  misc_feature: MA Experiment ID: 20000234 Result: Down-regulated in Transcription
  misc_feature: MA Experiment 20000234 PARAMETER Experiment Name: At_Siliques_P Parameter: Age (day) Value: 21
  misc_feature: MA Experiment 20000234 PARAMETER Experiment Name: At_Siliques_P Parameter: Organism Value: A. thaliana
  misc_feature: MA Experiment 20000234 PARAMETER Experiment Name: At_Siliques_P Parameter: Plant Line Value: WS
  misc_feature: MA Experiment 20000234 PARAMETER Experiment Name: At_Siliques_P Parameter: Tissue Value: Less Than 5mm Siliques vs. Whole Plant
atcaacgcgtcgagatattttccccaaatacagagaaaccctaaagtctctgtttttgagaatttttctaccgatagatccaagcgaattgatctagaggaattgatccaacatgggtaacacagataagctgatgaatcagatattcgatttgaaatttacgtcaaagtctctgcaaaggcaatcaaggaagtgtgagaaggaagagaaagcagagaaattgaaggtgaagaaggctatcgagaagggtaatatggatggtgctcggatctacgctgagaacgccattcgtaagcgtagcgagcagatgaactatctccgtctcgcttctcgccttgacgctgttgttgctcgtcttgatactcaggctaagatgaccaccatcaccaaatccatgaccaatatcgtcaaatcccttgagtcttctcttgccacagggaatctacagaagatgtcagagacaatggattcattcgagaagcagtttgtgaacatggaggtccaagctgagttcatggagaatgctatggctggttcaacttcattgtccactccagaaggcgaagtcaacagccttatgcagcaggtggcagatgactatggtttggaagtctctgtggggcttcctcagcctgctggtcatgccattcctactaagactgaggagaaagtcgatgaggatgatttgtcgaggaggcttgcggagcttaaagccagaggataaatgcgctaaccaacattcatgcttggattacctgccactttgcatgcgatccttatcgaattgttgcttctattatccgcaaacacgggcgtatttgtgtatattgctcactttgaaatatgctttgtttataactttatataaaaaaccttcgtgtgtttttagtttttaccatttgaatgatatgctttccttttgagttgttcattaaagagtgttttgctcagc

SEQ ID NO: 41284 - protein, 203 aa, Arabidopsis thaliana
  peptide (1)..(203): Ceres Seq. ID no. 13497422
  misc_feature (9)..(179): Pfam Name: SNF7 Pfam Description: SNF7
  misc_feature (11)..(200): Homolog of NCBI NO: 30583945 NR Description: Homo sapiens procollagen (type III)
  misc_feature (11)..(200): Homolog of NCBI NO: 28277870 NR Description: Similar to RIKEN cDNA 2810405I11 gene [Danio
  misc_feature (9)..(202): Homolog of NCBI NO: 3789911 NR Description: developmental protein DG1118 [Dictyostelium
  misc_feature (1)..(203): Homolog of NCBI NO: 29367557 NR Description: development protein-like protein
  misc_feature (1)..(203): Homolog of NCBI NO: 30270581 NR Description: superal1 [Zea mays]
  misc_feature (1)..(203): Homolog of NCBI NO: 28916459 NR Description: putative developmental protein [Nicotiana
  misc_feature (1)..(202): Homolog of NCBI NO: 25518422 NR Description: hypothetical protein F11A6.7 - Arabidopsis
  misc_feature (1)..(203): Homolog of NCBI NO: 15220819 NR Description: developmental protein -related [Arabidopsis
  misc_feature (1)..(203): Homolog of NCBI NO: 21537090 NR Description: developmental protein, putative [Arabidopsis
  misc_feature (1)..(203): Homolog of NCBI NO: 18410249 NR Description: developmental protein DG1118 -related
MGNTDKLMNQIFDLKFTSKSLQRQSRKCEKEEKAEKLKVKKAIEKGNMDGARIYAENAIRKRSEQMNYLRLASRLDAVVARLDTQAKMTTITKSMTNIVKSLESSLATGNLQKMSETMDSFEKQFVNMEVQAEFMENAMAGSTSLSTPEGEVNSLMQQVADDYGLEVSVGLPQPAGHAIPTKTEEKVDEDDLSRRLAELKARG

SEQ ID NO: 41285 - protein, 196 aa, Arabidopsis thaliana
  peptide (1)..(196): Ceres Seq. ID no. 13497423
  misc_feature (2)..(172): Pfam Name: SNF7 Pfam Description: SNF7
  misc_feature (4)..(193): Homolog of NCBI NO: 30583945 NR Description: Homo sapiens procollagen (type III)
  misc_feature (4)..(193): Homolog of NCBI NO: 28277870 NR Description: Similar to RIKEN cDNA 2810405I11 gene [Danio
  misc_feature (2)..(195): Homolog of NCBI NO: 3789911 NR Description: developmental protein DG1118 [Dictyostelium
  misc_feature (1)..(196): Homolog of NCBI NO: 29367557 NR Description: development protein-like protein
  misc_feature (1)..(196): Homolog of NCBI NO: 30270581 NR Description: superal1 [Zea mays]
  misc_feature (1)..(196): Homolog of NCBI NO: 28916459 NR Description: putative developmental protein [Nicotiana
  misc_feature (1)..(195): Homolog of NCBI NO: 25518422 NR Description: hypothetical protein F11A6.7 - Arabidopsis
  misc_feature (1)..(196): Homolog of NCBI NO: 15220819 NR Description: developmental protein -related [Arabidopsis
  misc_feature (1)..(196): Homolog of NCBI NO: 21537090 NR Description: developmental protein, putative [Arabidopsis
  misc_feature (1)..(196): Homolog of NCBI NO: 18410249 NR Description: developmental protein DG1118 -related
MNQIFDLKFTSKSLQRQSRKCEKEEKAEKLKVKKAIEKGNMDGARIYAENAIRKRSEQMNYLRLASRLDAVVARLDTQAKMTTITKSMTNIVKSLESSLATGNLQKMSETMDSFEKQFVNMEVQAEFMENAMAGSTSLSTPEGEVNSLMQQVADDYGLEVSVGLPQPAGHAIPTKTEEKVDEDDLSRRLAELKARG

SEQ ID NO: 41286 - protein, 156 aa, Arabidopsis thaliana
  peptide (1)..(156): Ceres Seq. ID no. 13497424
  misc_feature (1)..(132): Pfam Name: SNF7 Pfam Description: SNF7
  misc_feature (1)..(153): Homolog of NCBI NO: 30583945 NR Description: Homo sapiens procollagen (type III)
  misc_feature (1)..(153): Homolog of NCBI NO: 28277870 NR Description: Similar to RIKEN cDNA 2810405I11 gene [Danio
  misc_feature (1)..(155): Homolog of NCBI NO: 3789911 NR Description: developmental protein DG1118 [Dictyostelium
  misc_feature (1)..(156): Homolog of NCBI NO: 29367557 NR Description: development protein-like protein
  misc_feature (1)..(156): Homolog of NCBI NO: 30270581 NR Description: superal1 [Zea mays]
  misc_feature (1)..(156): Homolog of NCBI NO: 28916459 NR Description: putative developmental protein [Nicotiana
  misc_feature (1)..(155): Homolog of NCBI NO: 25518422 NR Description: hypothetical protein F11A6.7 - Arabidopsis
  misc_feature (1)..(156): Homolog of NCBI NO: 15220819 NR Description: developmental protein -related [Arabidopsis
  misc_feature (1)..(156): Homolog of NCBI NO: 21537090 NR Description: developmental protein, putative [Arabidopsis
  misc_feature (1)..(156): Homolog of NCBI NO: 18410249 NR Description: developmental protein DG1118 -related
MDGARIYAENAIRKRSEQMNYLRLASRLDAVVARLDTQAKMTTITKSMTNIVKSLESSLATGNLQKMSETMDSFEKQFVNMEVQAEFMENAMAGSTSLSTPEGEVNSLMQQVADDYGLEVSVGLPQPAGHAIPTKTEEKVDEDDLSRRLAELKARG

SEQ ID NO: 41287 - DNA, 711 bp, Arabidopsis thaliana
  misc_feature (1)..(711): Ceres Seq. ID no. 12422392
  misc_feature: MA Experiment ID: 108434 Result: Down-regulated in Transcription
  misc_feature: MA Experiment 108434 PARAMETER Experiment Name: At_Root_Tips_cDNA_P Parameter: Tissue Value: Root Tips
  misc_feature: MA Experiment ID: 108462 Result: Up-regulated in Transcription
  misc_feature: MA Experiment 108462 PARAMETER Experiment Name: At_Germinating_Seeds_cDNA_P Parameter: Age (day) Value: 2 vs. 0
  misc_feature: MA Experiment 108462 PARAMETER Experiment Name: At_Germinating_Seeds_cDNA_P Parameter: Tissue Value: Germinating Seeds
  misc_feature: MA Experiment ID: 108463 Result: Up-regulated in Transcription
  misc_feature: MA Experiment 108463 PARAMETER Experiment Name: At_Germinating_Seeds_cDNA_P Parameter: Age (day) Value: 3 vs. 0
  misc_feature: MA Experiment 108463 PARAMETER Experiment Name: At_Germinating_Seeds_cDNA_P Parameter: Tissue Value: Germinating Seeds
  misc_feature: MA Experiment ID: 108464 Result: Up-regulated in Transcription
  misc_feature: MA Experiment 108464 PARAMETER Experiment Name: At_Germinating_Seeds_cDNA_P Parameter: Age (day) Value: 4 vs. 0
  misc_feature: MA Experiment 108464 PARAMETER Experiment Name: At_Germinating_Seeds_cDNA_P Parameter: Tissue Value: Germinating Seeds
  misc_feature: MA Experiment ID: 108561 Result: Up-regulated in Transcription
  misc_feature: MA Experiment 108561 PARAMETER Experiment Name: At_100uM_ABA_cDNA_P Parameter: Timepoint (hr) Value: 6
  misc_feature: MA Experiment 108561 PARAMETER Experiment Name: At_100uM_ABA_cDNA_P Parameter: Tissue Value: Aerial
  misc_feature: MA Experiment 108561 PARAMETER Experiment Name: At_100uM_ABA_cDNA_P Parameter: Treatment Value: 100uM ABA vs. No Treatment
  misc_feature: MA Experiment ID: 108594 Result: Down-regulated in Transcription
  misc_feature: MA Experiment 108594 PARAMETER Experiment Name: At_Ler-rhl_Root_cDNA_P Parameter: Plant Line Value: null
  misc_feature: MA Experiment ID: 20000184 Result: Up-regulated in Transcription
  misc_feature: MA Experiment 20000184 PARAMETER Experiment Name: At_Shoots__P Parameter: Age (day) Value: 7
  misc_feature: MA Experiment 20000184 PARAMETER Experiment Name: At_Shoots__P Parameter: Tissue Value: Shoots vs. Whole Plant
  misc_feature: MA Experiment ID: 20000185 Result: Up-regulated in Transcription
  misc_feature: MA Experiment 20000185 PARAMETER Experiment Name: At_Roots__P Parameter: Age (day) Value: 7 vs. 21
  misc_feature: MA Experiment 20000185 PARAMETER Experiment Name: At_Roots__P Parameter: Organism Value: A. thaliana
  misc_feature: MA Experiment 20000185 PARAMETER Experiment Name: At_Roots__P Parameter: Tissue Value: Roots vs. Whole Plant
  misc_feature: MA Experiment ID: 20000227 Result: Down-regulated in Transcription
  misc_feature: MA Experiment 20000227 PARAMETER Experiment Name: At_Root-Tips-vs-Tops_P Parameter: Tissue Value: Root Tips vs. Root Tops
  misc_feature: MA Experiment ID: 20000269 Result: Up-regulated in Transcription
  misc_feature: MA Experiment 20000269 PARAMETER Experiment Name: At_1mM_KNO3_L-vs-H_Roots_P Parameter: Age (day) Value: 7,10,12
  misc_feature: MA Experiment 20000269 PARAMETER Experiment Name: At_1mM_KNO3_L-vs-H_Roots_P Parameter: Organism Value: A. thaliana
  misc_feature: MA Experiment 20000269 PARAMETER Experiment Name: At_1mM_KNO3_L-vs-H_Roots_P Parameter: Plant Line Value: WS
  misc_feature: MA Experiment 20000269 PARAMETER Experiment Name: At_1mM_KNO3_L-vs-H_Roots_P Parameter: Timepoint (day) Value: 7,10,12
  misc_feature: MA Experiment 20000269 PARAMETER Experiment Name: At_1mM_KNO3_L-vs-H_Roots_P Parameter: Tissue Value: Roots
  misc_feature: MA Experiment 20000269 PARAMETER Experiment Name: At_1mM_KNO3_L-vs-H_Roots_P Parameter: Treatment Value: 1mM KNO3 vs. 50mM KNO3
  misc_feature: MA Experiment ID: 20000437 Result: Down-regulated in Transcription
  misc_feature: MA Experiment 20000437 PARAMETER Experiment Name: At_Drought_P Parameter: Age (day) Value: 8
  misc_feature: MA Experiment 20000437 PARAMETER Experiment Name: At_Drought_P Parameter: Organism Value: A. thaliana
  misc_feature: MA Experiment 20000437 PARAMETER Experiment Name: At_Drought_P Parameter: Plant Line Value: WS
  misc_feature: MA Experiment 20000437 PARAMETER Experiment Name: At_Drought_P Parameter: Timepoint (hr) Value: 24
  misc_feature: MA Experiment 20000437 PARAMETER Experiment Name: At_Drought_P Parameter: Tissue Value: Whole Plant
  misc_feature: MA Experiment 20000437 PARAMETER Experiment Name: At_Drought_P Parameter: Treatment Value: Drought vs. No Drought
  misc_feature: MA Experiment ID: 20000439 Result: Up-regulated in Transcription
  misc_feature: MA Experiment 20000439 PARAMETER Experiment Name: At_Roots__P Parameter: Age (day) Value: 14 vs. 21
  misc_feature: MA Experiment 20000439 PARAMETER Experiment Name: At_Roots__P Parameter: Organism Value: A. thaliana
  misc_feature: MA Experiment 20000439 PARAMETER Experiment Name: At_Roots__P Parameter: Tissue Value: Roots vs. Whole Plant
  misc_feature: MA Experiment ID: 20000460 Result: Down-regulated in Transcription
  misc_feature: MA Experiment 20000460 PARAMETER Experiment Name: At_10percent_PEG_P Parameter: Age (day) Value: 12
  misc_feature: MA Experiment 20000460 PARAMETER Experiment Name: At_10percent_PEG_P Parameter: Organism Value: A. thaliana
  misc_feature: MA Experiment 20000460 PARAMETER Experiment Name: At_10percent_PEG_P Parameter: Plant Line Value: WS
  misc_feature: MA Experiment 20000460 PARAMETER Experiment Name: At_10percent_PEG_P Parameter: Timepoint (day) Value: 12
  misc_feature: MA Experiment 20000460 PARAMETER Experiment Name: At_10percent_PEG_P Parameter: Tissue Value: Whole Plant
  misc_feature: MA Experiment 20000460 PARAMETER Experiment Name: At_10percent_PEG_P Parameter: Treatment Value: 10percent PEG vs. No Treatment
  misc_feature: MA Experiment ID: 20000527 Result: Down-regulated in Transcription
  misc_feature: MA Experiment 20000527 PARAMETER Experiment Name: At_10percent_PEG_P Parameter: Age (day) Value: 20
  misc_feature: MA Experiment 20000527 PARAMETER Experiment Name: At_10percent_PEG_P Parameter: Organism Value: A. thaliana
  misc_feature: MA Experiment 20000527 PARAMETER Experiment Name: At_10percent_PEG_P Parameter: Plant Line Value: WS
  misc_feature: MA Experiment 20000527 PARAMETER Experiment Name: At_10percent_PEG_P Parameter: Timepoint (day) Value: 20
  misc_feature: MA Experiment 20000527 PARAMETER Experiment Name: At_10percent_PEG_P Parameter: Tissue Value: Whole Plant
  misc_feature: MA Experiment 20000527 PARAMETER Experiment Name: At_10percent_PEG_P Parameter: Treatment Value: 10percent PEG vs. No Treatment
atatttctcatcaatagccatgactactctccaaatctcttcttctcttttcagatcttttcttcttgtgatctgtgtctttgtaatcccatctctctcatctgattctgatcctttacaagacttctgcgtcggcgatctcaaagcttctccttccatcaatggcttcccttgcaaatcatccgtctccgcttctgacttcttcttctccggcttaggtggtcctttaaacacctcgacccctaacggcgtagccgtttcccccgccaatgtcctaacttttccgggtctaaacactttaggactctcgatgaacaacgttgaattcgctccaggcggtgtaaatcctcctcactcgcatccgcgtgcaaccgaagcaggagttgtgatcgaaggctcggtttttgtcgggttcttgactactaacaacactctgttctcgaaggttttgaatgccggagagatgtttgttgtccctagaggattggttcatttccaatggaatgttggtaaagtgaaagcgcgtttgataacctctttcaacagtcagcttccaggatcggctgttctgcctagtactctgtttggctcaaaccctaccattccaaatgctgttttgaccaaaacgtttaggactgatgatgttactgtgaacaaactcaagtccaagtttgctgtttgaatcttttgatattatattatcatgttttc

SEQ ID NO: 41288 - protein, 226 aa, Arabidopsis thaliana
  peptide (1)..(226): Ceres Seq. ID no. 12422393
  misc_feature (70)..(218): Pfam Name: Cupin Pfam Description: Cupin
  misc_feature (21)..(225): Homolog of NCBI NO: 22138786 NR Description: oxalate oxidase [Lolium perenne]
  misc_feature (21)..(225): Homolog of NCBI NO: 21912428 NR Description: oxalate oxidase 2 [Lolium perenne]
  misc_feature (23)..(224): Homolog of NCBI NO: 34902528 NR Description: probable germin protein 4
  misc_feature (12)..(225): Homolog of NCBI NO: 1171937 NR Description: Oxalate oxidase 2 precursor (Germin)
  misc_feature (12)..(225): Homolog of NCBI NO: 11967814 NR Description: oxalate oxidase [Lolium perenne]
  misc_feature (10)..(224): Homolog of NCBI NO: 25044823 NR Description: germin-like protein [Ananas comosus]
  misc_feature (11)..(224): Homolog of NCBI NO: 15221388 NR Description: germin subunit, putative; protein id: At1g74820.1
  misc_feature (23)..(226): Homolog of NCBI NO: 18394676 NR Description: germin, putative
  misc_feature (7)..(226): Homolog of NCBI NO: 18202452 NR Description: Germin-like protein subfamily T member 1
  misc_feature (7)..(226): Homolog of NCBI NO: 15221902 NR Description: germin, putative
YFSSIAMTTLQISSSLFRSFLLVICVFVIPSLSSDSDPLQDFCVGDLKASPSINGFPCKSSVSASDFFFSGLGGPLNTSTPNGVAVSPANVLTFPGLNTLGLSMNNVEFAPGGVNPPHSHPRATEAGVVIEGSVFVGFLTTNNTLFSKVLNAGEMFVVPRGLVHFQWNVGKVKARLITSFNSQLPGSAVLPSTLFGSNPTIPNAVLTKTFRTDDVTVNKLKSKFAV

SEQ ID NO: 41289 - protein, 220 aa, Arabidopsis thaliana
  peptide (1)..(220): Ceres Seq. ID no. 12422394
  misc_feature (64)..(212): Pfam Name: Cupin Pfam Description: Cupin
  misc_feature (15)..(219): Homolog of NCBI NO: 22138786 NR Description: oxalate oxidase [Lolium perenne]
  misc_feature (15)..(219): Homolog of NCBI NO: 21912428 NR Description: oxalate oxidase 2 [Lolium perenne]
  misc_feature (17)..(218): Homolog of NCBI NO: 34902528 NR Description: probable germin protein 4
  misc_feature (6)..(219): Homolog of NCBI NO: 1171937 NR Description: Oxalate oxidase 2 precursor (Germin)
  misc_feature (6)..(219): Homolog of NCBI NO: 11967814 NR Description: oxalate oxidase [Lolium perenne]
  misc_feature (4)..(218): Homolog of NCBI NO: 25044823 NR Description: germin-like protein [Ananas comosus]
  misc_feature (5)..(218): Homolog of NCBI NO: 15221388 NR Description: germin subunit, putative; protein id: At1g74820.1
  misc_feature (17)..(220): Homolog of NCBI NO: 18394676 NR Description: germin, putative
  misc_feature (1)..(220): Homolog of NCBI NO: 18202452 NR Description: Germin-like protein subfamily T member 1
  misc_feature (1)..(220): Homolog of NCBI NO: 15221902 NR Description: germin, putative
MTTLQISSSLFRSFLLVICVFVIPSLSSDSDPLQDFCVGDLKASPSINGFPCKSSVSASDFFFSGLGGPLNTSTPNGVAVSPANVLTFPGLNTLGLSMNNVEFAPGGVNPPHSHPRATEAGVVIEGSVFVGFLTTNNTLFSKVLNAGEMFVVPRGLVHFQWNVGKVKARLITSFNSQLPGSAVLPSTLFGSNPTIPNAVLTKTFRTDDVTVNKLKSKFAV

SEQ ID NO: 41290 - protein, 123 aa, Arabidopsis thaliana
  peptide (1)..(123): Ceres Seq. ID no. 12422395
  misc_feature (1)..(115): Pfam Name: Cupin Pfam Description: Cupin
  misc_feature (1)..(122): Homolog of NCBI NO: 22138786 NR Description: oxalate oxidase [Lolium perenne]
  misc_feature (1)..(122): Homolog of NCBI NO: 21912428 NR Description: oxalate oxidase 2 [Lolium perenne]
  misc_feature (1)..(121): Homolog of NCBI NO: 34902528 NR Description: probable germin protein 4
  misc_feature (1)..(122): Homolog of NCBI NO: 1171937 NR Description: Oxalate oxidase 2 precursor (Germin)
  misc_feature (1)..(122): Homolog of NCBI NO: 11967814 NR Description: oxalate oxidase [Lolium perenne]
  misc_feature (1)..(121): Homolog of NCBI NO: 25044823 NR Description: germin-like protein [Ananas comosus]
  misc_feature (1)..(121): Homolog of NCBI NO: 15221388 NR Description: germin subunit, putative; protein id: At1g74820.1
  misc_feature (1)..(123): Homolog of NCBI NO: 18394676 NR Description: germin, putative
  misc_feature (1)..(123): Homolog of NCBI NO: 18202452 NR Description: Germin-like protein subfamily T member 1
  misc_feature (1)..(123): Homolog of NCBI NO: 15221902 NR Description: germin, putative
MNNVEFAPGGVNPPHSHPRATEAGVVIEGSVFVGFLTTNNTLFSKVLNAGEMFVVPRGLVHFQWNVGKVKARLITSFNSQLPGSAVLPSTLFGSNPTIPNAVLTKTFRTDDVTVNKLKSKFAV

SEQ ID NO: 41291 - DNA, 1231 bp, Arabidopsis thaliana
  misc_feature (1)..(1231): Ceres Seq. ID no. 12328537
  misc_feature: MA Experiment ID: 108463 Result: Up-regulated in Transcription
  misc_feature: MA Experiment 108463 PARAMETER Experiment Name: At_Germinating_Seeds_cDNA_P Parameter: Age (day) Value: 3 vs. 0
  misc_feature: MA Experiment 108463 PARAMETER Experiment Name: At_Germinating_Seeds_cDNA_P Parameter: Tissue Value: Germinating Seeds
  misc_feature: MA Experiment ID: 108469 Result: Up-regulated in Transcription
  misc_feature: MA Experiment ID: 108473 Result: Up-regulated in Transcription
  misc_feature: MA Experiment 108473 PARAMETER Experiment Name: At_Drought_Flowers_cDNA_P Parameter: Timepoint (hr) Value: 7 d
  misc_feature: MA Experiment 108473 PARAMETER Experiment Name: At_Drought_Flowers_cDNA_P Parameter: Tissue Value: Flower
  misc_feature: MA Experiment 108473 PARAMETER Experiment Name: At_Drought_Flowers_cDNA_P Parameter: Treatment Value: Drought vs. No Drought
  misc_feature: MA Experiment ID: 108474 Result: Down-regulated in Transcription
  misc_feature: MA Experiment 108474 PARAMETER Experiment Name: At_Drought_Flowers_cDNA_P Parameter: Timepoint (hr) Value: null
  misc_feature: MA Experiment 108474 PARAMETER Experiment Name: At_Drought_Flowers_cDNA_P Parameter: Treatment Value: Drought vs. No Drought
  misc_feature: MA Experiment ID: 108561 Result: Up-regulated in Transcription
  misc_feature: MA Experiment 108561 PARAMETER Experiment Name: At_100uM_ABA_cDNA_P Parameter: Timepoint (hr) Value: 6
  misc_feature: MA Experiment 108561 PARAMETER Experiment Name: At_100uM_ABA_cDNA_P Parameter: Tissue Value: Aerial
  misc_feature: MA Experiment 108561 PARAMETER Experiment Name: At_100uM_ABA_cDNA_P Parameter: Treatment Value: 100uM ABA vs. No Treatment
  misc_feature: MA Experiment ID: 108572 Result: Up-regulated in Transcription
  misc_feature: MA Experiment 108572 PARAMETER Experiment Name: At_Drought_cDNA_P Parameter: Timepoint (hr) Value: 1
  misc_feature: MA Experiment 108572 PARAMETER Experiment Name: At_Drought_cDNA_P Parameter: Tissue Value: Aerial
  misc_feature: MA Experiment 108572 PARAMETER Experiment Name: At_Drought_cDNA_P Parameter: Treatment Value: Drought vs. No Drought
  misc_feature: MA Experiment ID: 108573 Result: Up-regulated in Transcription
  misc_feature: MA Experiment 108573 PARAMETER Experiment Name: At_Drought_cDNA_P Parameter: Timepoint (hr) Value: 6
  misc_feature: MA Experiment 108573 PARAMETER Experiment Name: At_Drought_cDNA_P Parameter: Tissue Value: Aerial
  misc_feature: MA Experiment 108573 PARAMETER Experiment Name: At_Drought_cDNA_P Parameter: Treatment Value: Drought vs. No Drought
  misc_feature: MA Experiment ID: 108576 Result: Up-regulated in Transcription
  misc_feature: MA Experiment 108576 PARAMETER Experiment Name: At_42deg_Heat_cDNA_P Parameter: Temperature (deg C) Value: 42 vs. 22
  misc_feature: MA Experiment 108576 PARAMETER Experiment Name: At_42deg_Heat_cDNA_P Parameter: Timepoint (hr) Value: 1
  misc_feature: MA Experiment 108576 PARAMETER Experiment Name: At_42deg_Heat_cDNA_P Parameter: Tissue Value: Aerial
  misc_feature: MA Experiment ID: 108595 Result: Up-regulated in Transcription
  misc_feature: MA Experiment 108595 PARAMETER Experiment Name: At_Ler-pi_Ovule_cDNA_P Parameter: Plant Line Value: null
  misc_feature: MA Experiment ID: 108605 Result: Up-regulated in Transcription
  misc_feature: MA Experiment 108605 PARAMETER Experiment Name: At_100uM_ABA_cDNA_P Parameter: Timepoint (hr) Value: 6
  misc_feature: MA Experiment 108605 PARAMETER Experiment Name: At_100uM_ABA_cDNA_P Parameter: Tissue Value: Aerial
  misc_feature: MA Experiment 108605 PARAMETER Experiment Name: At_100uM_ABA_cDNA_P Parameter: Treatment Value: 100uM ABA vs. No Treatment
  misc_feature: MA Experiment ID: 108607 Result: Up-regulated in Transcription
  misc_feature: MA Experiment 108607 PARAMETER Experiment Name: At_100uM_ABA_cDNA_P Parameter: Timepoint (hr) Value: 4
  misc_feature: MA Experiment 108607 PARAMETER Experiment Name: At_100uM_ABA_cDNA_P Parameter: Tissue Value: Aerial
  misc_feature: MA Experiment 108607 PARAMETER Experiment Name: At_100uM_ABA_cDNA_P Parameter: Treatment Value: 100uM ABA vs. No Treatment
  misc_feature: MA Experiment ID: 108668 Result: Up-regulated in Transcription
  misc_feature: MA Experiment 108668 PARAMETER Experiment Name: At_2mM_SA_cDNA_P Parameter: Plant Line Value: WS
  misc_feature: MA Experiment 108668 PARAMETER Experiment Name: At_2mM_SA_cDNA_P Parameter: Timepoint (hr) Value: 6
  misc_feature: MA Experiment 108668 PARAMETER Experiment Name: At_2mM_SA_cDNA_P Parameter: Treatment Value: 2mM SA vs. No Treatment
  misc_feature: MA Experiment ID: 20000069 Result: Up-regulated in Transcription
  misc_feature: MA Experiment 20000069 PARAMETER Experiment Name: At_100uM_ABA_Mutants_cDNA_P Parameter: Plant Line Value: CS23
  misc_feature: MA Experiment 20000069 PARAMETER Experiment Name: At_100uM_ABA_Mutants_cDNA_P Parameter: Timepoint (hr) Value: 6
  misc_feature: MA Experiment 20000069 PARAMETER Experiment Name: At_100uM_ABA_Mutants_cDNA_P Parameter: Tissue Value: Aerial
  misc_feature: MA Experiment 20000069 PARAMETER Experiment Name: At_100uM_ABA_Mutants_cDNA_P Parameter: Treatment Value: 100uM ABA vs. No Treatment
  misc_feature: MA Experiment ID: 20000070 Result: Up-regulated in Transcription
  misc_feature: MA Experiment 20000070 PARAMETER Experiment Name: At_100uM_ABA_Mutants_cDNA_P Parameter: Plant Line Value: CS24
  misc_feature: MA Experiment 20000070 PARAMETER Experiment Name: At_100uM_ABA_Mutants_cDNA_P Parameter: Timepoint (hr) Value: 6
  misc_feature: MA Experiment 20000070 PARAMETER Experiment Name: At_100uM_ABA_Mutants_cDNA_P Parameter: Tissue Value: Aerial
  misc_feature: MA Experiment 20000070 PARAMETER Experiment Name: At_100uM_ABA_Mutants_cDNA_P Parameter: Treatment Value: 100uM ABA vs. No Treatment
  misc_feature: MA Experiment ID: 20000086 Result: Up-regulated in Transcription
  misc_feature: MA Experiment 20000086 PARAMETER Experiment Name: At_100uM_ABA_Mutants_cDNA_P Parameter: Plant Line Value: CS22
  misc_feature: MA Experiment 20000086 PARAMETER Experiment Name: At_100uM_ABA_Mutants_cDNA_P Parameter: Timepoint (hr) Value: 6
  misc_feature: MA Experiment 20000086 PARAMETER Experiment Name: At_100uM_ABA_Mutants_cDNA_P Parameter: Tissue Value: Aerial
  misc_feature: MA Experiment 20000086 PARAMETER Experiment Name: At_100uM_ABA_Mutants_cDNA_P Parameter: Treatment Value: 100uM ABA vs. No Treatment
  misc_feature: MA Experiment ID: 20000087 Result: Up-regulated in Transcription
  misc_feature: MA Experiment 20000087 PARAMETER Experiment Name: At_100uM_ABA_Mutants_cDNA_P Parameter: Plant Line Value: WS
  misc_feature: MA Experiment 20000087 PARAMETER Experiment Name: At_100uM_ABA_Mutants_cDNA_P Parameter: Timepoint (hr) Value: 6
  misc_feature: MA Experiment 20000087 PARAMETER Experiment Name: At_100uM_ABA_Mutants_cDNA_P Parameter: Tissue Value: Aerial
  misc_feature: MA Experiment 20000087 PARAMETER Experiment Name: At_100uM_ABA_Mutants_cDNA_P Parameter: Treatment Value: 100uM ABA vs. No Treatment
  misc_feature: MA Experiment ID: 20000088 Result: Up-regulated in Transcription
  misc_feature: MA Experiment 20000088 PARAMETER Experiment Name: At_100uM_ABA_Mutants_cDNA_P Parameter: Plant Line Value: Landsberg
  misc_feature: MA Experiment 20000088 PARAMETER Experiment Name: At_100uM_ABA_Mutants_cDNA_P Parameter: Timepoint (hr) Value: 6
  misc_feature: MA Experiment 20000088 PARAMETER Experiment Name: At_100uM_ABA_Mutants_cDNA_P Parameter: Tissue Value: Aerial
  misc_feature: MA Experiment 20000088 PARAMETER Experiment Name: At_100uM_ABA_Mutants_cDNA_P Parameter: Treatment Value: 100uM ABA vs. No Treatment
  misc_feature: MA Experiment ID: 20000090 Result: Up-regulated in Transcription
  misc_feature: MA Experiment ID: 20000117 Result: Up-regulated in Transcription
  misc_feature: MA Experiment 20000117 PARAMETER Experiment Name: At_100uM_ABA_Mutants_cDNA_P Parameter: Plant Line Value: Columbia
  misc_feature: MA Experiment 20000117 PARAMETER Experiment Name: At_100uM_ABA_Mutants_cDNA_P Parameter: Timepoint (hr) Value: 6
  misc_feature: MA Experiment 20000117 PARAMETER Experiment Name: At_100uM_ABA_Mutants_cDNA_P Parameter: Tissue Value: Aerial
  misc_feature: MA Experiment 20000117 PARAMETER Experiment Name: At_100uM_ABA_Mutants_cDNA_P Parameter: Treatment Value: 100uM ABA vs. No Treatment
  misc_feature: MA Experiment ID: 20000169 Result: Up-regulated in Transcription
  misc_feature: MA Experiment 20000169 PARAMETER Experiment Name: At_100uM_ABA_P Parameter: Age (day) Value: 14
  misc_feature: MA Experiment 20000169 PARAMETER Experiment Name: At_100uM_ABA_P Parameter: Organism Value: A. thaliana
  misc_feature: MA Experiment 20000169 PARAMETER Experiment Name: At_100uM_ABA_P Parameter: Plant Line Value: WS
  misc_feature: MA Experiment 20000169 PARAMETER Experiment Name: At_100uM_ABA_P Parameter: Timepoint (hr) Value: 6
  misc_feature: MA Experiment 20000169 PARAMETER Experiment Name: At_100uM_ABA_P Parameter: Tissue Value: Aerial
  misc_feature: MA Experiment 20000169 PARAMETER Experiment Name: At_100uM_ABA_P Parameter: Treatment Value: 100uM ABA vs. No Treatment
  misc_feature: MA Experiment ID: 20000182 Result: Up-regulated in Transcription
  misc_feature: MA Experiment 20000182 PARAMETER Experiment Name: At_2mM_SA_P Parameter: Age (day) Value: 14
  misc_feature: MA Experiment 20000182 PARAMETER Experiment Name: At_2mM_SA_P Parameter: Organism Value: A. thaliana
  misc_feature: MA Experiment 20000182 PARAMETER Experiment Name: At_2mM_SA_P Parameter: Plant Line Value: WS
  misc_feature: MA Experiment 20000182 PARAMETER Experiment Name: At_2mM_SA_P Parameter: Timepoint (hr) Value: 6
  misc_feature: MA Experiment 20000182 PARAMETER Experiment Name: At_2mM_SA_P Parameter: Tissue Value: Aerial
  misc_feature: MA Experiment 20000182 PARAMETER Experiment Name: At_2mM_SA_P Parameter: Treatment Value: 2mM SA vs. No Treatment
  misc_feature: MA Experiment ID: 20000234 Result: Up-regulated in Transcription
  misc_feature: MA Experiment 20000234 PARAMETER Experiment Name: At_Siliques_P Parameter: Age (day) Value: 21
  misc_feature: MA Experiment 20000234 PARAMETER Experiment Name: At_Siliques_P Parameter: Organism Value: A. thaliana
  misc_feature: MA Experiment 20000234 PARAMETER Experiment Name: At_Siliques_P Parameter: Plant Line Value: WS
  misc_feature: MA Experiment 20000234 PARAMETER Experiment Name: At_Siliques_P Parameter: Tissue Value: Less Than 5mm Siliques vs. Whole Plant
  misc_feature: MA Experiment ID: 20000265 Result: Up-regulated in Transcription
  misc_feature: MA Experiment 20000265 PARAMETER Experiment Name: At_Open_Flower_P Parameter: Age (day) Value: 21
  misc_feature: MA Experiment 20000265 PARAMETER Experiment Name: At_Open_Flower_P Parameter: Plant Line Value: WS
  misc_feature: MA Experiment 20000265 PARAMETER Experiment Name: At_Open_Flower_P Parameter: Tissue Value: Closed Flower vs. Whole Plant
  misc_feature: MA Experiment ID: 20000267 Result: Up-regulated in Transcription
  misc_feature: MA Experiment 20000267 PARAMETER Experiment Name: At_Drought_P Parameter: Age (day) Value: 7
  misc_feature: MA Experiment 20000267 PARAMETER Experiment Name: At_Drought_P Parameter: Organism Value: A. thaliana
  misc_feature: MA Experiment 20000267 PARAMETER Experiment Name: At_Drought_P Parameter: Plant Line Value: WS
  misc_feature: MA Experiment 20000267 PARAMETER Experiment Name: At_Drought_P Parameter: Timepoint (hr) Value: 6
  misc_feature: MA Experiment 20000267 PARAMETER Experiment Name: At_Drought_P Parameter: Tissue Value: Whole Plant
  misc_feature: MA Experiment 20000267 PARAMETER Experiment Name: At_Drought_P Parameter: Treatment Value: Drought vs. No Drought
  misc_feature: MA Experiment ID: 20000286 Result: Up-regulated in Transcription
  misc_feature: MA Experiment 20000286 PARAMETER Experiment Name: At_Open_Flower_P Parameter: Age (day) Value: 21
  misc_feature: MA Experiment 20000286 PARAMETER Experiment Name: At_Open_Flower_P Parameter: Plant Line Value: WS
  misc_feature: MA Experiment 20000286 PARAMETER Experiment Name: At_Open_Flower_P Parameter: Tissue Value: Half Open vs. Whole Plant
  misc_feature: MA Experiment ID: 20000436 Result: Up-regulated in Transcription
  misc_feature: MA Experiment 20000436 PARAMETER Experiment Name: At_Drought_P Parameter: Age (day) Value: 7
  misc_feature: MA Experiment 20000436 PARAMETER Experiment Name: At_Drought_P Parameter: Organism Value: A. thaliana
  misc_feature: MA Experiment 20000436 PARAMETER Experiment Name: At_Drought_P Parameter: Plant Line Value: WS
  misc_feature: MA Experiment 20000436 PARAMETER Experiment Name: At_Drought_P Parameter: Timepoint (hr) Value: 12
  misc_feature: MA Experiment 20000436 PARAMETER Experiment Name: At_Drought_P Parameter: Tissue Value: Whole Plant
  misc_feature: MA Experiment 20000436 PARAMETER Experiment Name: At_Drought_P Parameter: Treatment Value: Drought vs. No Drought
  misc_feature: MA Experiment ID: 20000437 Result: Up-regulated in Transcription
  misc_feature: MA Experiment 20000437 PARAMETER Experiment Name: At_Drought_P Parameter: Age (day) Value: 8
  misc_feature: MA Experiment 20000437 PARAMETER Experiment Name: At_Drought_P Parameter: Organism Value: A. thaliana
  misc_feature: MA Experiment 20000437 PARAMETER Experiment Name: At_Drought_P Parameter: Plant Line Value: WS
  misc_feature: MA Experiment 20000437 PARAMETER Experiment Name: At_Drought_P Parameter: Timepoint (hr) Value: 24
  misc_feature: MA Experiment 20000437 PARAMETER Experiment Name: At_Drought_P Parameter: Tissue Value: Whole Plant
  misc_feature: MA Experiment 20000437 PARAMETER Experiment Name: At_Drought_P Parameter: Treatment Value: Drought vs. No Drought
  misc_feature: MA Experiment ID: 20000438 Result: Down-regulated in Transcription
  misc_feature: MA Experiment 20000438 PARAMETER Experiment Name: At_Shoots__P Parameter: Age (day) Value: 14
  misc_feature: MA Experiment 20000438 PARAMETER Experiment Name: At_Shoots__P Parameter: Tissue Value: Shoots vs. Whole Plant
  misc_feature: MA Experiment ID: 20000441 Result: Down-regulated in Transcription
  misc_feature: MA Experiment 20000441 PARAMETER Experiment Name: At_1uM_BR-BRZ__P Parameter: Tissue Value: Shoot Apices
  misc_feature: MA Experiment 20000441 PARAMETER Experiment Name: At_1uM_BR-BRZ__P Parameter: Treatment Value: 1uM BR vs. No Treatment
  misc_feature: MA Experiment ID: 20000453 Result: Up-regulated in Transcription
  misc_feature: MA Experiment 20000453 PARAMETER Experiment Name: At_100uM_ABA_P Parameter: Age (day) Value: 15
  misc_feature: MA Experiment 20000453 PARAMETER Experiment Name: At_100uM_ABA_P Parameter: Organism Value: A. thaliana
  misc_feature: MA Experiment 20000453 PARAMETER Experiment Name: At_100uM_ABA_P Parameter: Plant Line Value: WS
  misc_feature: MA Experiment 20000453 PARAMETER Experiment Name: At_100uM_ABA_P Parameter: Timepoint (hr) Value: 24
  misc_feature: MA Experiment 20000453 PARAMETER Experiment Name: At_100uM_ABA_P Parameter: Tissue Value: Aerial
  misc_feature: MA Experiment 20000453 PARAMETER Experiment Name: At_100uM_ABA_P Parameter: Treatment Value: 100uM ABA vs. No Treatment
  misc_feature: MA Experiment ID: 20000794 Result: Up-regulated in Transcription
  misc_feature: MA Experiment 20000794 PARAMETER Experiment Name: At_Petals_P Parameter: Age (day) Value: 23-25 days
  misc_feature: MA Experiment 20000794 PARAMETER Experiment Name: At_Petals_P Parameter: Plant Line Value: WS
  misc_feature: MA Experiment 20000794 PARAMETER Experiment Name: At_Petals_P Parameter: Tissue Value: Petals vs. Whole plant
  misc_feature: MA Experiment ID: 20001554 Result: Up-regulated in Transcription
  misc_feature: MA Experiment 20001554 PARAMETER Experiment Name: At_Drought_Soil_Dry_P Parameter: Age (day) Value: 21
  misc_feature: MA Experiment 20001554 PARAMETER Experiment Name: At_Drought_Soil_Dry_P Parameter: Organism Value: A. thaliana
  misc_feature: MA Experiment 20001554 PARAMETER Experiment Name: At_Drought_Soil_Dry_P Parameter: Plant Line Value: WS
  misc_feature: MA Experiment 20001554 PARAMETER Experiment Name: At_Drought_Soil_Dry_P Parameter: Post Timepoint (hr) Value: None
  misc_feature: MA Experiment 20001554 PARAMETER Experiment Name: At_Drought_Soil_Dry_P Parameter: Post-Treatment Value: None
  misc_feature: MA Experiment 20001554 PARAMETER Experiment Name: At_Drought_Soil_Dry_P Parameter: Timepoint (day) Value: 7
  misc_feature: MA Experiment 20001554 PARAMETER Experiment Name: At_Drought_Soil_Dry_P Parameter: Treatment Value: Drought vs. No Drought
  misc_feature: MA Experiment ID: 20001555 Result: Up-regulated in Transcription
  misc_feature: MA Experiment 20001555 PARAMETER Experiment Name: At_Drought_Soil_Dry_P Parameter: Age (day) Value: 24
  misc_feature: MA Experiment 20001555 PARAMETER Experiment Name: At_Drought_Soil_Dry_P Parameter: Organism Value: A. thaliana
  misc_feature: MA Experiment 20001555 PARAMETER Experiment Name: At_Drought_Soil_Dry_P Parameter: Plant Line Value: WS
  misc_feature: MA Experiment 20001555 PARAMETER Experiment Name: At_Drought_Soil_Dry_P Parameter: Post Timepoint (hr) Value: None
  misc_feature: MA Experiment 20001555 PARAMETER Experiment Name: At_Drought_Soil_Dry_P Parameter: Post-Treatment Value: None
  misc_feature: MA Experiment 20001555 PARAMETER Experiment Name: At_Drought_Soil_Dry_P Parameter: Timepoint (day) Value: 10
  misc_feature: MA Experiment 20001555 PARAMETER Experiment Name: At_Drought_Soil_Dry_P Parameter: Treatment Value: Drought vs. No Drought
  misc_feature: MA Experiment ID: 20001556 Result: Up-regulated in Transcription
  misc_feature: MA Experiment 20001556 PARAMETER Experiment Name: At_Drought_Soil_Dry_P Parameter: Age (day) Value: 26
  misc_feature: MA Experiment 20001556 PARAMETER Experiment Name: At_Drought_Soil_Dry_P Parameter: Organism Value: A. thaliana
  misc_feature: MA Experiment 20001556 PARAMETER Experiment Name: At_Drought_Soil_Dry_P Parameter: Plant Line Value: WS
  misc_feature: MA Experiment 20001556 PARAMETER Experiment Name: At_Drought_Soil_Dry_P Parameter: Post Timepoint (hr) Value: None
  misc_feature: MA Experiment 20001556 PARAMETER Experiment Name: At_Drought_Soil_Dry_P Parameter: Post-Treatment Value: None
  misc_feature: MA Experiment 20001556 PARAMETER Experiment Name: At_Drought_Soil_Dry_P Parameter: Timepoint (day) Value: 12
  misc_feature: MA Experiment 20001556 PARAMETER Experiment Name: At_Drought_Soil_Dry_P Parameter: Treatment Value: Drought vs. No Drought
  misc_feature: MA Experiment ID: 20001559 Result: Up-regulated in Transcription
  misc_feature: MA Experiment 20001559 PARAMETER Experiment Name: At_Drought_Soil_Dry_P Parameter: Age (day) Value: 28
  misc_feature: MA Experiment 20001559 PARAMETER Experiment Name: At_Drought_Soil_Dry_P Parameter: Organism Value: A. thaliana
  misc_feature: MA Experiment 20001559 PARAMETER Experiment Name: At_Drought_Soil_Dry_P Parameter: Plant Line Value: WS
  misc_feature: MA Experiment 20001559 PARAMETER Experiment Name: At_Drought_Soil_Dry_P Parameter: Post Timepoint (hr) Value: 29
  misc_feature: MA Experiment 20001559 PARAMETER Experiment Name: At_Drought_Soil_Dry_P Parameter: Post-Treatment Value: Re-Water vs. No Drought
  misc_feature: MA Experiment 20001559 PARAMETER Experiment Name: At_Drought_Soil_Dry_P Parameter: Timepoint (day) Value: 14
  misc_feature: MA Experiment 20001559 PARAMETER Experiment Name: At_Drought_Soil_Dry_P Parameter: Treatment Value: Drought vs. No Drought
  misc_feature: MA Experiment ID: 20001560 Result: Up-regulated in Transcription
  misc_feature: MA Experiment 20001560 PARAMETER Experiment Name: At_Drought_Soil_Dry_P Parameter: Age (day) Value: 28
  misc_feature: MA Experiment 20001560 PARAMETER Experiment Name: At_Drought_Soil_Dry_P Parameter: Organism Value: A. thaliana
  misc_feature: MA Experiment 20001560 PARAMETER Experiment Name: At_Drought_Soil_Dry_P Parameter: Plant Line Value: WS
  misc_feature: MA Experiment 20001560 PARAMETER Experiment Name: At_Drought_Soil_Dry_P Parameter: Post Timepoint (hr) Value: None
  misc_feature: MA Experiment 20001560 PARAMETER Experiment Name: At_Drought_Soil_Dry_P Parameter: Post-Treatment Value: None
  misc_feature: MA Experiment 20001560 PARAMETER Experiment Name: At_Drought_Soil_Dry_P Parameter: Timepoint (day) Value: 14
  misc_feature: MA Experiment 20001560 PARAMETER Experiment Name: At_Drought_Soil_Dry_P Parameter: Treatment Value: Drought vs. No Drought
  misc_feature: MA Experiment ID: 20001757 Result: Down-regulated in Transcription
  misc_feature: MA Experiment 20001757 PARAMETER Experiment Name: At_50mM_NH4NO3_L-to-H_P Parameter: Timepoint (hr) Value: 6
  misc_feature: MA Experiment 20001757 PARAMETER Experiment Name: At_50mM_NH4NO3_L-to-H_P Parameter: Tissue Value: Leaf
  misc_feature: MA Experiment 20001757 PARAMETER Experiment Name: At_50mM_NH4NO3_L-to-H_P Parameter: Treatment Value: 50mM NH4NO3 vs 100mM Mannitol
  misc_feature: MA Experiment ID: 20001904 Result: Up-regulated in Transcription
  misc_feature: MA Experiment 20001904 PARAMETER Experiment Name: At_Drought_Reproduction_P Parameter: Age (day) Value: 37
  misc_feature: MA Experiment 20001904 PARAMETER Experiment Name: At_Drought_Reproduction_P Parameter: Organism Value: A. thaliana
  misc_feature: MA Experiment 20001904 PARAMETER Experiment Name: At_Drought_Reproduction_P Parameter: Plant Line Value: WS
  misc_feature: MA Experiment 20001904 PARAMETER Experiment Name: At_Drought_Reproduction_P Parameter: Timepoint (day) Value: 7
  misc_feature: MA Experiment 20001904 PARAMETER Experiment Name: At_Drought_Reproduction_P Parameter: Tissue Value: Rosettes
  misc_feature: MA Experiment 20001904 PARAMETER Experiment Name: At_Drought_Reproduction_P Parameter: Treatment Value: Drought vs. No Drought
  misc_feature: MA Experiment ID: 20001905 Result: Up-regulated in Transcription
  misc_feature: MA Experiment 20001905 PARAMETER Experiment Name: At_Drought_Reproduction_P Parameter: Age (day) Value: 40
  misc_feature: MA Experiment 20001905 PARAMETER Experiment Name: At_Drought_Reproduction_P Parameter: Organism Value: A. thaliana
  misc_feature: MA Experiment 20001905 PARAMETER Experiment Name: At_Drought_Reproduction_P Parameter: Plant Line Value: WS
  misc_feature: MA Experiment 20001905 PARAMETER Experiment Name: At_Drought_Reproduction_P Parameter: Timepoint (day) Value: 10
  misc_feature: MA Experiment 20001905 PARAMETER Experiment Name: At_Drought_Reproduction_P Parameter: Tissue Value: Rosettes
  misc_feature: MA Experiment 20001905 PARAMETER Experiment Name: At_Drought_Reproduction_P Parameter: Treatment Value: Drought vs. No Drought
  misc_feature: MA Experiment ID: 20001906 Result: Up-regulated in Transcription
  misc_feature: MA Experiment 20001906 PARAMETER Experiment Name: At_Drought_Reproduction_P Parameter: Age (day) Value: 35
  misc_feature: MA Experiment 20001906 PARAMETER Experiment Name: At_Drought_Reproduction_P Parameter: Organism Value: A. thaliana
  misc_feature: MA Experiment 20001906 PARAMETER Experiment Name: At_Drought_Reproduction_P Parameter: Plant Line Value: WS
  misc_feature: MA Experiment 20001906 PARAMETER Experiment Name: At_Drought_Reproduction_P Parameter: Timepoint (day) Value: 5
  misc_feature: MA Experiment 20001906 PARAMETER Experiment Name: At_Drought_Reproduction_P Parameter: Tissue Value: Siliques
  misc_feature: MA Experiment 20001906 PARAMETER Experiment Name: At_Drought_Reproduction_P Parameter: Treatment Value: Drought vs. No Drought
  misc_feature: MA Experiment ID: 20001907 Result: Up-regulated in Transcription
  misc_feature: MA Experiment 20001907 PARAMETER Experiment Name: At_Drought_Reproduction_P Parameter: Age (day) Value: 37
  misc_feature: MA Experiment 20001907 PARAMETER Experiment Name: At_Drought_Reproduction_P Parameter: Organism Value: A. thaliana
  misc_feature: MA Experiment 20001907 PARAMETER Experiment Name: At_Drought_Reproduction_P Parameter: Plant Line Value: WS
  misc_feature: MA Experiment 20001907 PARAMETER Experiment Name: At_Drought_Reproduction_P Parameter: Timepoint (day) Value: 7
  misc_feature: MA Experiment 20001907 PARAMETER Experiment Name: At_Drought_Reproduction_P Parameter: Tissue Value: Siliques
  misc_feature: MA Experiment 20001907 PARAMETER Experiment Name: At_Drought_Reproduction_P Parameter: Treatment Value: Drought vs. No Drought
  misc_feature: MA Experiment ID: 20001908 Result: Up-regulated in Transcription
  misc_feature: MA Experiment 20001908 PARAMETER Experiment Name: At_Drought_Reproduction_P Parameter: Age (day) Value: 40
  misc_feature: MA Experiment 20001908 PARAMETER Experiment Name: At_Drought_Reproduction_P Parameter: Organism Value: A. thaliana
  misc_feature: MA Experiment 20001908 PARAMETER Experiment Name: At_Drought_Reproduction_P Parameter: Plant Line Value: WS
  misc_feature: MA Experiment 20001908 PARAMETER Experiment Name: At_Drought_Reproduction_P Parameter: Timepoint (day) Value: 10
  misc_feature: MA Experiment 20001908 PARAMETER Experiment Name: At_Drought_Reproduction_P Parameter: Tissue Value: Siliques
  misc_feature: MA Experiment 20001908 PARAMETER Experiment Name: At_Drought_Reproduction_P Parameter: Treatment Value: Drought vs. No Drought
ataccgaattacatatatatctcgctcgctctcttctttgttcttgctccttgttctagttcggatttttcttttgaagtgaaatggttaacgctacagttgcgagaaacattgccggcatttgtggaaatgtcatctccttgttcttgttcttatctcccatacctacgttcataaccatatacaagaagaaaaaggtggaggagtacaaagctgacccatacttagccacggttctaaattgcgcactatgggtcttttatggcttaccaatggttcaaccagatagtctccttgtgatcaccataaatggtaccggtttagccattgaggtggtgtatctcgctatcttcttcttcttttctccaactagtcgcaaggtttagtaatttccattcatatctcaattcttttcacttaattttattaaatgttttttccaatcattatctaaacctaaaatcgctattaggtttggcttaaattgaaagctaaaacattatagtaataagaagtggtagactatgattgattctgttttaggatagtgataggcaaaacaaaatgtttgtagattttttttttttctgaaattattttaatcaaattggttcatggtgcaggtgaaagtggggctatggttaataggagagatggtgtttgtaggaatagtagccacatgcacattgctattgttccacacacataaccagagatcttcttttgttggaatcttttgtgtcatttttgttagtctcatgtatattgctcctctcaccatcatgagtaaggtgatcaagaccaaaagtgtgaagtacatgccattctctctctcacttgccaatttcctcaatggtgtcgtttgggttatttatgcacttattaagttcgaccttttcattttgattggaaatggacttggaacggtatcaggagcagtacaacttatactctatgcttgctattacaagacaacaccaaacgatgatgaagatgaagaagatgaggagaatctttctaaggttaactctcagttacaacttagtggcaacagtggacaagctaaacgagtttcagcttgattatatgtttggattcatgagatatgaatttagttttatgtttttttttaaagcttttggctgatttaactttaagtaactctattattttcgcgtttcctttttgtaaaatgcaaactctttttcttctatgaaagatattaactatt

SEQ ID NO: 41292 - protein, 155 aa, Arabidopsis thaliana
  peptide (1)..(155): Ceres Seq. ID no. 12328538
  misc_feature (13)..(135): Homolog of NCBI NO: 18421965 NR Description: putative protein
  misc_feature (10)..(150): Homolog of NCBI NO: 7486148 NR Description: hypothetical protein F25I24.60 - Arabidopsis
  misc_feature (13)..(130): Homolog of NCBI NO: 15219732 NR Description: hypothetical protein; protein id: At1g66770.1
  misc_feature (10)..(150): Homolog of NCBI NO: 18413388 NR Description: putative protein
  misc_feature (2)..(98): Homolog of NCBI NO: 10177463 NR Description: contains similarity to MtN3
  misc_feature (13)..(139): Homolog of NCBI NO: 34912462 NR Description: MtN3-like protein [Oryza sativa (japonica
  misc_feature (8)..(138): Homolog of NCBI NO: 34912454 NR Description: P0681B11.31 [Oryza sativa (japonica
  misc_feature (3)..(155): Homolog of NCBI NO: 18405611 NR Description: Expressed protein
  misc_feature (3)..(155): Homolog of NCBI NO: 21592355 NR Description: contains similarity to nodulin MtN3 protein
  misc_feature (3)..(155): Homolog of NCBI NO: 11994120 NR Description: contains similarity to nodulin MtN3
MVQVKVGLWLIGEMVFVGIVATCTLLLFHTHNQRSSFVGIFCVIFVSLMYIAPLTIMSKVIKTKSVKYMPFSLSLANFLNGVVWVIYALIKFDLFILIGNGLGTVSGAVQLILYACYYKTTPNDDEDEEDEENLSKVNSQLQLSGNSGQAKRVSA

SEQ ID NO: 41293 - protein, 142 aa, Arabidopsis thaliana
  peptide (1)..(142): Ceres Seq. ID no. 12328539
  misc_feature (1)..(122): Homolog of NCBI NO: 18421965 NR Description: putative protein
  misc_feature (1)..(137): Homolog of NCBI NO: 7486148 NR Description: hypothetical protein F25I24.60 - Arabidopsis
  misc_feature (1)..(117): Homolog of NCBI NO: 15219732 NR Description: hypothetical protein; protein id: At1g66770.1
  misc_feature (1)..(137): Homolog of NCBI NO: 18413388 NR Description: putative protein
  misc_feature (1)..(85): Homolog of NCBI NO: 10177463 NR Description: contains similarity to MtN3
  misc_feature (1)..(126): Homolog of NCBI NO: 34912462 NR Description: MtN3-like protein [Oryza sativa (japonica
  misc_feature (1)..(125): Homolog of NCBI NO: 34912454 NR Description: P0681B11.31 [Oryza sativa (japonica
  misc_feature (1)..(142): Homolog of NCBI NO: 18405611 NR Description: Expressed protein
  misc_feature (1)..(142): Homolog of NCBI NO: 21592355 NR Description: contains similarity to nodulin MtN3 protein
  misc_feature (1)..(142): Homolog of NCBI NO: 11994120 NR Description: contains similarity to nodulin MtN3
MVFVGIVATCTLLLFHTHNQRSSFVGIFCVIFVSLMYIAPLTIMSKVIKTKSVKYMPFSLSLANFLNGVVWVIYALIKFDLFILIGNGLGTVSGAVQLILYACYYKTTPNDDEDEEDEENLSKVNSQLQLSGNSGQAKRVSA

SEQ ID NO: 41294 - protein, 107 aa, Arabidopsis thaliana
  peptide (1)..(107): Ceres Seq. ID no. 12328540
  misc_feature (1)..(87): Homolog of NCBI NO: 18421965 NR Description: putative protein
  misc_feature (1)..(102): Homolog of NCBI NO: 7486148 NR Description: hypothetical protein F25I24.60 - Arabidopsis
  misc_feature (1)..(82): Homolog of NCBI NO: 15219732 NR Description: hypothetical protein; protein id: At1g66770.1
  misc_feature (1)..(102): Homolog of NCBI NO: 18413388 NR Description: putative protein
  misc_feature (1)..(50): Homolog of NCBI NO: 10177463 NR Description: contains similarity to MtN3
  misc_feature (1)..(91): Homolog of NCBI NO: 34912462 NR Description: MtN3-like protein [Oryza sativa (japonica
  misc_feature (1)..(90): Homolog of NCBI NO: 34912454 NR Description: P0681B11.31 [Oryza sativa (japonica
  misc_feature (1)..(107): Homolog of NCBI NO: 18405611 NR Description: Expressed protein
  misc_feature (1)..(107): Homolog of NCBI NO: 21592355 NR Description: contains similarity to nodulin MtN3 protein
  misc_feature (1)..(107): Homolog of NCBI NO: 11994120 NR Description: contains similarity to nodulin MtN3
MYIAPLTIMSKVIKTKSVKYMPFSLSLANFLNGVVWVIYALIKFDLFILIGNGLGTVSGAVQLILYACYYKTTPNDDEDEEDEENLSKVNSQLQLSGNSGQAKRVSA

SEQ ID NO: 41295 - DNA, 1466 bp, Arabidopsis thaliana
  misc_feature (1)..(1466): Ceres Seq. ID no. 12371193
  misc_feature: MA Experiment ID: 108434 Result: Down-regulated in Transcription
  misc_feature: MA Experiment 108434 PARAMETER Experiment Name: At_Root_Tips_cDNA_P Parameter: Tissue Value: Root Tips
  misc_feature: MA Experiment ID: 108463 Result: Up-regulated in Transcription
  misc_feature: MA Experiment 108463 PARAMETER Experiment Name: At_Germinating_Seeds_cDNA_P Parameter: Age (day) Value: 3 vs. 0
  misc_feature: MA Experiment 108463 PARAMETER Experiment Name: At_Germinating_Seeds_cDNA_P Parameter: Tissue Value: Germinating Seeds
  misc_feature: MA Experiment ID: 108464 Result: Up-regulated in Transcription
  misc_feature: MA Experiment 108464 PARAMETER Experiment Name: At_Germinating_Seeds_cDNA_P Parameter: Age (day) Value: 4 vs. 0
  misc_feature: MA Experiment 108464 PARAMETER Experiment Name: At_Germinating_Seeds_cDNA_P Parameter: Tissue Value: Germinating Seeds
  misc_feature: MA Experiment ID: 108488 Result: Down-regulated in Transcription
  misc_feature: MA Experiment ID: 108573 Result: Up-regulated in Transcription
  misc_feature: MA Experiment 108573 PARAMETER Experiment Name: At_Drought_cDNA_P Parameter: Timepoint (hr) Value: 6
  misc_feature: MA Experiment 108573 PARAMETER Experiment Name: At_Drought_cDNA_P Parameter: Tissue Value: Aerial
  misc_feature: MA Experiment 108573 PARAMETER Experiment Name: At_Drought_cDNA_P Parameter: Treatment Value: Drought vs. No Drought
  misc_feature: MA Experiment ID: 108577 Result: Up-regulated in Transcription
  misc_feature: MA Experiment 108577 PARAMETER Experiment Name: At_42deg_Heat_cDNA_P Parameter: Temperature (deg C) Value: 42 vs. 22
  misc_feature: MA Experiment 108577 PARAMETER Experiment Name: At_42deg_Heat_cDNA_P Parameter: Timepoint (hr) Value: 6
  misc_feature: MA Experiment 108577 PARAMETER Experiment Name: At_42deg_Heat_cDNA_P Parameter: Tissue Value: Aerial
  misc_feature: MA Experiment ID: 108668 Result: Up-regulated in Transcription
  misc_feature: MA Experiment 108668 PARAMETER Experiment Name: At_2mM_SA_cDNA_P Parameter: Plant Line Value: WS
  misc_feature: MA Experiment 108668 PARAMETER Experiment Name: At_2mM_SA_cDNA_P Parameter: Timepoint (hr) Value: 6
  misc_feature: MA Experiment 108668 PARAMETER Experiment Name: At_2mM_SA_cDNA_P Parameter: Treatment Value: 2mM SA vs. No Treatment
  misc_feature: MA Experiment ID: 20000089 Result: Down-regulated in Transcription
  misc_feature: MA Experiment ID: 20000144 Result: Up-regulated in Transcription
  misc_feature: MA Experiment 20000144 PARAMETER Experiment Name: At_42deg_Heat_cDNA_P Parameter: Temperature (deg C) Value: 42 vs. 22
  misc_feature: MA Experiment 20000144 PARAMETER Experiment Name: At_42deg_Heat_cDNA_P Parameter: Timepoint (hr) Value: 1
  misc_feature: MA Experiment 20000144 PARAMETER Experiment Name: At_42deg_Heat_cDNA_P Parameter: Tissue Value: Aerial
  misc_feature: MA Experiment ID: 20000169 Result: Up-regulated in Transcription
  misc_feature: MA Experiment 20000169 PARAMETER Experiment Name: At_100uM_ABA_P Parameter: Age (day) Value: 14
  misc_feature: MA Experiment 20000169 PARAMETER Experiment Name: At_100uM_ABA_P Parameter: Organism Value: A. thaliana
  misc_feature: MA Experiment 20000169 PARAMETER Experiment Name: At_100uM_ABA_P Parameter: Plant Line Value: WS
  misc_feature: MA Experiment 20000169 PARAMETER Experiment Name: At_100uM_ABA_P Parameter: Timepoint (hr) Value: 6
  misc_feature: MA Experiment 20000169 PARAMETER Experiment Name: At_100uM_ABA_P Parameter: Tissue Value: Aerial
  misc_feature: MA Experiment 20000169 PARAMETER Experiment Name: At_100uM_ABA_P Parameter: Treatment Value: 100uM ABA vs. No Treatment
  misc_feature: MA Experiment ID: 20000180 Result: Up-regulated in Transcription
  misc_feature: MA Experiment 20000180 PARAMETER Experiment Name: At_Germinating_Seeds_P Parameter: Age (hr) Value: 24 vs. 0
  misc_feature: MA Experiment 20000180 PARAMETER Experiment Name: At_Germinating_Seeds_P Parameter: Tissue Value: Germinating Seeds
  misc_feature: MA Experiment ID: 20000182 Result: Up-regulated in Transcription
  misc_feature: MA Experiment 20000182 PARAMETER Experiment Name: At_2mM_SA_P Parameter: Age (day) Value: 14
  misc_feature: MA Experiment 20000182 PARAMETER Experiment Name: At_2mM_SA_P Parameter: Organism Value: A. thaliana
  misc_feature: MA Experiment 20000182 PARAMETER Experiment Name: At_2mM_SA_P Parameter: Plant Line Value: WS
  misc_feature: MA Experiment 20000182 PARAMETER Experiment Name: At_2mM_SA_P Parameter: Timepoint (hr) Value: 6
  misc_feature: MA Experiment 20000182 PARAMETER Experiment Name: At_2mM_SA_P Parameter: Tissue Value: Aerial
  misc_feature: MA Experiment 20000182 PARAMETER Experiment Name: At_2mM_SA_P Parameter: Treatment Value: 2mM SA vs. No Treatment
  misc_feature: MA Experiment ID: 20000185 Result: Down-regulated in Transcription
  misc_feature: MA Experiment 20000185 PARAMETER Experiment Name: At_Roots__P Parameter: Age (day) Value: 7 vs. 21
  misc_feature: MA Experiment 20000185 PARAMETER Experiment Name: At_Roots__P Parameter: Organism Value: A. thaliana
  misc_feature: MA Experiment 20000185 PARAMETER Experiment Name: At_Roots__P Parameter: Tissue Value: Roots vs. Whole Plant
  misc_feature: MA Experiment ID: 20000437 Result: Up-regulated in Transcription
  misc_feature: MA Experiment 20000437 PARAMETER Experiment Name: At_Drought_P Parameter: Age (day) Value: 8
  misc_feature: MA Experiment 20000437 PARAMETER Experiment Name: At_Drought_P Parameter: Organism Value: A. thaliana
  misc_feature: MA Experiment 20000437 PARAMETER Experiment Name: At_Drought_P Parameter: Plant Line Value: WS
  misc_feature: MA Experiment 20000437 PARAMETER Experiment Name: At_Drought_P Parameter: Timepoint (hr) Value: 24
  misc_feature: MA Experiment 20000437 PARAMETER Experiment Name: At_Drought_P Parameter: Tissue Value: Whole Plant
  misc_feature: MA Experiment 20000437 PARAMETER Experiment Name: At_Drought_P Parameter: Treatment Value: Drought vs. No Drought
  misc_feature: MA Experiment ID: 20000451 Result: Down-regulated in Transcription
  misc_feature: MA Experiment 20000451 PARAMETER Experiment Name: At_CS6879_Shoots-Roots_P Parameter: Age (day) Value: 14
  misc_feature: MA Experiment 20000451 PARAMETER Experiment Name: At_CS6879_Shoots-Roots_P Parameter: Organism Value: A. thaliana
  misc_feature: MA Experiment 20000451 PARAMETER Experiment Name: At_CS6879_Shoots-Roots_P Parameter: Plant Line Value: CS6879 vs. WS
  misc_feature: MA Experiment 20000451 PARAMETER Experiment Name: At_CS6879_Shoots-Roots_P Parameter: Tissue Value: Roots
  misc_feature: MA Experiment ID: 20000794 Result: Up-regulated in Transcription
  misc_feature: MA Experiment 20000794 PARAMETER Experiment Name: At_Petals_P Parameter: Age (day) Value: 23-25 days
  misc_feature: MA Experiment 20000794 PARAMETER Experiment Name: At_Petals_P Parameter: Plant Line Value: WS
  misc_feature: MA Experiment 20000794 PARAMETER Experiment Name: At_Petals_P Parameter: Tissue Value: Petals vs. Whole plant
  misc_feature: MA Experiment ID: 20001248 Result: Down-regulated in Transcription
  misc_feature: MA Experiment 20001248 PARAMETER Experiment Name: At_Far-red-induction_P Parameter: Age (day) Value: 7
  misc_feature: MA Experiment 20001248 PARAMETER Experiment Name: At_Far-red-induction_P Parameter: Light Value: Far-red vs. White
  misc_feature: MA Experiment 20001248 PARAMETER Experiment Name: At_Far-red-induction_P Parameter: Organism Value: A. thaliana
  misc_feature: MA Experiment 20001248 PARAMETER Experiment Name: At_Far-red-induction_P Parameter: Plant Line Value: Columbia
  misc_feature: MA Experiment 20001248 PARAMETER Experiment Name: At_Far-red-induction_P Parameter: Timepoint (hr) Value: 4
  misc_feature: MA Experiment 20001248 PARAMETER Experiment Name: At_Far-red-induction_P Parameter: Tissue Value: Whole Plant
  misc_feature: MA Experiment ID: 20001904 Result: Up-regulated in Transcription
  misc_feature: MA Experiment 20001904 PARAMETER Experiment Name: At_Drought_Reproduction_P Parameter: Age (day) Value: 37
  misc_feature: MA Experiment 20001904 PARAMETER Experiment Name: At_Drought_Reproduction_P Parameter: Organism Value: A. thaliana
  misc_feature: MA Experiment 20001904 PARAMETER Experiment Name: At_Drought_Reproduction_P Parameter: Plant Line Value: WS
  misc_feature: MA Experiment 20001904 PARAMETER Experiment Name: At_Drought_Reproduction_P Parameter: Timepoint (day) Value: 7
  misc_feature: MA Experiment 20001904 PARAMETER Experiment Name: At_Drought_Reproduction_P Parameter: Tissue Value: Rosettes
  misc_feature: MA Experiment 20001904 PARAMETER Experiment Name: At_Drought_Reproduction_P Parameter: Treatment Value: Drought vs. No Drought
  misc_feature: MA Experiment ID: 20001906 Result: Up-regulated in Transcription
  misc_feature: MA Experiment 20001906 PARAMETER Experiment Name: At_Drought_Reproduction_P Parameter: Age (day) Value: 35
  misc_feature: MA Experiment 20001906 PARAMETER Experiment Name: At_Drought_Reproduction_P Parameter: Organism Value: A. thaliana
  misc_feature: MA Experiment 20001906 PARAMETER Experiment Name: At_Drought_Reproduction_P Parameter: Plant Line Value: WS
  misc_feature: MA Experiment 20001906 PARAMETER Experiment Name: At_Drought_Reproduction_P Parameter: Timepoint (day) Value: 5
  misc_feature: MA Experiment 20001906 PARAMETER Experiment Name: At_Drought_Reproduction_P Parameter: Tissue Value: Siliques
  misc_feature: MA Experiment 20001906 PARAMETER Experiment Name: At_Drought_Reproduction_P Parameter: Treatment Value: Drought vs. No Drought
  misc_feature: MA Experiment ID: 20001908 Result: Up-regulated in Transcription
  misc_feature: MA Experiment 20001908 PARAMETER Experiment Name: At_Drought_Reproduction_P Parameter: Age (day) Value: 40
  misc_feature: MA Experiment 20001908 PARAMETER Experiment Name: At_Drought_Reproduction_P Parameter: Organism Value: A. thaliana
  misc_feature: MA Experiment 20001908 PARAMETER Experiment Name: At_Drought_Reproduction_P Parameter: Plant Line Value: WS
  misc_feature: MA Experiment 20001908 PARAMETER Experiment Name: At_Drought_Reproduction_P Parameter: Timepoint (day) Value: 10
  misc_feature: MA Experiment 20001908 PARAMETER Experiment Name: At_Drought_Reproduction_P Parameter: Tissue Value: Siliques
  misc_feature: MA Experiment 20001908 PARAMETER Experiment Name: At_Drought_Reproduction_P Parameter: Treatment Value: Drought vs. No Drought
gatttagcttcttcgtttccttggtaatcgttctgttttttcgttgattactgtttgaggttttcattgaatcttgtctcgacatgggctactataacaatgtctttgatgaatgcaacgaccaaactgatatcggtcgggttatacgcgatggaagggaagtcattctccaagcatataattgggaatctcataaatatgattggtggagaaacttggatggtaaagttcctgacatcgcgaaatccggctttacttctgcatggttgccaccaccatctcagtctcttgcaccggaaggttatcttccacaggacctttattcactaaactcagcatatggctctgagcatctattgaaatccttactgcgcaagatgaaacaatacaaagttagagctatggctgatatagtcatcaatcatcgtgttgggacaactagaggacatggtggaatgtataaccgttatgatggaatttcattaccgtgggatgaacacgccgtgacttcttgtaccggaggactgggtaaccgaagcacaggggataatttcaatggagttccaaatgttgatcacacacagcattttgttaggaaagatataattggatggcttcgttggttacgcaacaccgtcgggtttcaagatttccgttttgactttgctaggggttattcagcaaactatgtgaaggaatacattggcgcagcgaaaccattattctcggttggagaatgttgggattcttgcaattacaatggccatggtctagactataatcaagatagccatagacagcgtataatcagttggatcgatgcgacgggacagatctctgctgcatttgacttcacaactaaaggaattctgcaggaagccgtaaagggtcagtattggcgtttatgtgatgcccaagggaagccaccgggtgtaatgggatggtggccttcaagagctgtcacattccttgataaccatgacactggctctactcaggctcattggccgttcccttcacaccacgttatggagggctatgcatatatacttactcatcccggcattccctgtgtgttctacgatcacttttacgattggggaagctcaatacatgatcagattgtcaaactgattgacattaggaggcgacaagatatccacagtaggtcaactgtccgtgttttaaaagcagaatctaacttatatgcagccattgttggtgagaaaatatgtatgaagcttggagacggctcttggtgcccttctggtagagactggactctagcaacaagtggccatcgctatgccgtctggcacaagtaattcttttgtgtctatctagctttgagtccaaagaaaaatatatgtaattcattttctgtaccgggttttactataatgtcatgcccttacgtcttcatgacgtaagattttataagttatatttatgaatgtaaaatttgc

SEQ ID NO: 41296 - protein, 413 aa, Arabidopsis thaliana
  peptide (1)..(413): Ceres Seq. ID no. 12371194
  misc_feature (26)..(413): Homolog of NCBI NO: 2851583 NR Description: Alpha-amylase type B isozyme precursor
  misc_feature (26)..(413): Homolog of NCBI NO: 166985 NR Description: alpha-amylase
  misc_feature (24)..(411): Homolog of NCBI NO: 34910588 NR Description: putative alpha-amylase [Oryza sativa (japonica
  misc_feature (24)..(411): Homolog of NCBI NO: 25404842 NR Description: probable alpha-amylase T17F3.14 [imported] -
  misc_feature (24)..(411): Homolog of NCBI NO: 18409378 NR Description: putative alpha-amylase
  misc_feature (18)..(413): Homolog of NCBI NO: 38346145 NR Description: OSJNBb0118P14.5 [Oryza sativa (japonica
  misc_feature (9)..(413): Homolog of NCBI NO: 1220453 NR Description: alpha-amylase
  misc_feature (1)..(413): Homolog of NCBI NO: 7532799 NR Description: alpha-amylase [Malus x domestica]
  misc_feature (1)..(413): Homolog of NCBI NO: 25289325 NR Description: protein T23E18.6 [imported] - Arabidopsis
  misc_feature (1)..(413): Homolog of NCBI NO: 15222959 NR Description: alpha-amylase, putative
MGYYNNVFDECNDQTDIGRVIRDGREVILQAYNWESHKYDWWRNLDGKVPDIAKSGFTSAWLPPPSQSLAPEGYLPQDLYSLNSAYGSEHLLKSLLRKMKQYKVRAMADIVINHRVGTTRGHGGMYNRYDGISLPWDEHAVTSCTGGLGNRSTGDNFNGVPNVDHTQHFVRKDIIGWLRWLRNTVGFQDFRFDFARGYSANYVKEYIGAAKPLFSVGECWDSCNYNGHGLDYNQDSHRQRIISWIDATGQISAAFDFTTKGILQEAVKGQYWRLCDAQGKPPGVMGWWPSRAVTFLDNHDTGSTQAHWPFPSHHVMEGYAYILTHPGIPCVFYDHFYDWGSSIHDQIVKLIDIRRRQDIHSRSTVRVLKAESNLYAAIVGEKICMKLGDGSWCPSGRDWTLATSGHRYAVWHK

SEQ ID NO: 41297 - protein, 315 aa, Arabidopsis thaliana
  peptide (1)..(315): Ceres Seq. ID no. 12371195
  misc_feature (1)..(315): Homolog of NCBI NO: 2851583 NR Description: Alpha-amylase type B isozyme precursor
  misc_feature (1)..(315): Homolog of NCBI NO: 166985 NR Description: alpha-amylase
  misc_feature (1)..(313): Homolog of NCBI NO: 34910588 NR Description: putative alpha-amylase [Oryza sativa (japonica
  misc_feature (1)..(313): Homolog of NCBI NO: 25404842 NR Description: probable alpha-amylase T17F3.14 [imported] -
  misc_feature (1)..(313): Homolog of NCBI NO: 18409378 NR Description: putative alpha-amylase
  misc_feature (1)..(315): Homolog of NCBI NO: 38346145 NR Description: OSJNBb0118P14.5 [Oryza sativa (japonica
  misc_feature (1)..(315): Homolog of NCBI NO: 1220453 NR Description: alpha-amylase
  misc_feature (1)..(315): Homolog of NCBI NO: 7532799 NR Description: alpha-amylase [Malus x domestica]
  misc_feature (1)..(315): Homolog of NCBI NO: 25289325 NR Description: protein T23E18.6 [imported] - Arabidopsis
  misc_feature (1)..(315): Homolog of NCBI NO: 15222959 NR Description: alpha-amylase, putative
MKQYKVRAMADIVINHRVGTTRGHGGMYNRYDGISLPWDEHAVTSCTGGLGNRSTGDNFNGVPNVDHTQHFVRKDIIGWLRWLRNTVGFQDFRFDFARGYSANYVKEYIGAAKPLFSVGECWDSCNYNGHGLDYNQDSHRQRIISWIDATGQISAAFDFTTKGILQEAVKGQYWRLCDAQGKPPGVMGWWPSRAVTFLDNHDTGSTQAHWPFPSHHVMEGYAYILTHPGIPCVFYDHFYDWGSSIHDQIVKLIDIRRRQDIHSRSTVRVLKAESNLYAAIVGEKICMKLGDGSWCPSGRDWTLATSGHRYAVWHK

SEQ ID NO: 41298 - protein, 307 aa, Arabidopsis thaliana
  peptide (1)..(307): Ceres Seq. ID no. 12371196
  misc_feature (1)..(307): Homolog of NCBI NO: 2851583 NR Description: Alpha-amylase type B isozyme precursor
  misc_feature (1)..(307): Homolog of NCBI NO: 166985 NR Description: alpha-amylase
  misc_feature (1)..(305): Homolog of NCBI NO: 34910588 NR Description: putative alpha-amylase [Oryza sativa (japonica
  misc_feature (1)..(305): Homolog of NCBI NO: 25404842 NR Description: probable alpha-amylase T17F3.14 [imported] -
  misc_feature (1)..(305): Homolog of NCBI NO: 18409378 NR Description: putative alpha-amylase
  misc_feature (1)..(307): Homolog of NCBI NO: 38346145 NR Description: OSJNBb0118P14.5 [Oryza sativa (japonica
  misc_feature (1)..(307): Homolog of NCBI NO: 1220453 NR Description: alpha-amylase
  misc_feature (1)..(307): Homolog of NCBI NO: 7532799 NR Description: alpha-amylase [Malus x domestica]
  misc_feature (1)..(307): Homolog of NCBI NO: 25289325 NR Description: protein T23E18.6 [imported] - Arabidopsis
  misc_feature (1)..(307): Homolog of NCBI NO: 15222959 NR Description: alpha-amylase, putative
MADIVINHRVGTTRGHGGMYNRYDGISLPWDEHAVTSCTGGLGNRSTGDNFNGVPNVDHTQHFVRKDIIGWLRWLRNTVGFQDFRFDFARGYSANYVKEYIGAAKPLFSVGECWDSCNYNGHGLDYNQDSHRQRIISWIDATGQISAAFDFTTKGILQEAVKGQYWRLCDAQGKPPGVMGWWPSRAVTFLDNHDTGSTQAHWPFPSHHVMEGYAYILTHPGIPCVFYDHFYDWGSSIHDQIVKLIDIRRRQDIHSRSTVRVLKAESNLYAAIVGEKICMKLGDGSWCPSGRDWTLATSGHRYAVWHK

SEQ ID NO: 41299 - DNA, 1290 bp, Arabidopsis thaliana
  misc_feature (1)..(1290): Ceres Seq. ID no. 12328394
  misc_feature: MA Experiment ID: 108461 Result: Up-regulated in Transcription
  misc_feature: MA Experiment 108461 PARAMETER Experiment Name: At_Germinating_Seeds_cDNA_P Parameter: Age (day) Value: 1 vs. 0
  misc_feature: MA Experiment 108461 PARAMETER Experiment Name: At_Germinating_Seeds_cDNA_P Parameter: Tissue Value: Germinating Seeds
  misc_feature: MA Experiment ID: 20000179 Result: Up-regulated in Transcription
  misc_feature: MA Experiment 20000179 PARAMETER Experiment Name: At_Germinating_Seeds_P Parameter: Age (hr) Value: 6 vs. 0
  misc_feature: MA Experiment 20000179 PARAMETER Experiment Name: At_Germinating_Seeds_P Parameter: Tissue Value: Germinating Seeds
  misc_feature: MA Experiment ID: 20000180 Result: Up-regulated in Transcription
  misc_feature: MA Experiment 20000180 PARAMETER Experiment Name: At_Germinating_Seeds_P Parameter: Age (hr) Value: 24 vs. 0
  misc_feature: MA Experiment 20000180 PARAMETER Experiment Name: At_Germinating_Seeds_P Parameter: Tissue Value: Germinating Seeds
  misc_feature: MA Experiment ID: 20000265 Result: Up-regulated in Transcription
  misc_feature: MA Experiment 20000265 PARAMETER Experiment Name: At_Open_Flower_P Parameter: Age (day) Value: 21
  misc_feature: MA Experiment 20000265 PARAMETER Experiment Name: At_Open_Flower_P Parameter: Plant Line Value: WS
  misc_feature: MA Experiment 20000265 PARAMETER Experiment Name: At_Open_Flower_P Parameter: Tissue Value: Closed Flower vs. Whole Plant
  misc_feature: MA Experiment ID: 20000794 Result: Up-regulated in Transcription
  misc_feature: MA Experiment 20000794 PARAMETER Experiment Name: At_Petals_P Parameter: Age (day) Value: 23-25 days
  misc_feature: MA Experiment 20000794 PARAMETER Experiment Name: At_Petals_P Parameter: Plant Line Value: WS
  misc_feature: MA Experiment 20000794 PARAMETER Experiment Name: At_Petals_P Parameter: Tissue Value: Petals vs. Whole plant
aggcctaacttttagcccaaaatggtaaccttcgtagtgatcggagggttccaaaaagttgcaataacttaaaaaaattatccgaagaagacgatagacagcaaaaagcgttgggcgagaagaagatgacgtgcttctcttctgctactcctcatcgccatcatcttctactttcttctccatctacttccaaatccctgcttcgatttccctcatcttatctgaaacctagccccagtcttctcttccatggctcatctcgctctctcctctcctgttcagacggcagcaacaaccgtcctcctccctccggtgacaccgtcccaaataacttctgtatcattgagggatcagagacagttcaagactttgtgcagatgcagcttcaggaaatccaagataacataaggagtagacgcaataagatatttctcctcatggaggaagtgaggaggttacgtgtgcagcaacgtatcaagagtgttaaagccatcaatgaggacagtgagctcgaggctaccgagatgcctgagatcacatcttctattcctttcctccctaatgtgacaccaaagactttgaaacaactctattcgaccagcgttgcattgatatcgggaattatcttctttggtggtctcattgcacctaatctggaactgaaggtaggacttggaggaacctcttatgaagattttataaggagcttacatctacccttgcaattaagccaggtagatccaattgtggcatctttttctggcggggccgtgggagtcatttcaaccttgatgctaatcgaagttaacaatgttaaacaacaagagaagaagaggtgcaaatactgccttgggactggatacttgccatgcgctcgatgctcagctagtggtgtgtgtttgagcattgatcccatcacaagacctagagctacaaaccagcttatgcaggtcgcgaccacaaaaagatgtctaaattgttccggcgcaggaaaggtgatgtgtccgacatgtctttgcaccgggatggtaacagctagcgagcatgacccccgctttgaccctttcgattagaaaacaatggcctcctttgaaattggtccttgcaaaagctaagccaagcctatgagaactgaggagagccaaacctcgtcatataaatgttttacataataaaagtaattacataataaaagtaacattagaatttttaacttttgtctatagtaaacatgggaaagtatcggttatgtaaagtacttcttcacaaactaaaaaaattcaccagatg

SEQ ID NO: 41300 - protein, 315 aa, Arabidopsis thaliana
  peptide (1)..(315): Ceres Seq. ID no. 12328395
  misc_feature (62)..(315): Homolog of NCBI NO: 15240312 NR Description: putative protein
  misc_feature (60)..(315): Homolog of NCBI NO: 30681288 NR Description: expressed protein [Arabidopsis thaliana]
  misc_feature (1)..(315): Homolog of NCBI NO: 8978349 NR Description: gene_id:K16F4.10~pir||T00468~similar to unknown
  misc_feature (1)..(315): Homolog of NCBI NO: 22326624 NR Description: putative protein
MTCFSSATPHRHHLLLSSPSTSKSLLRFPSSYLKPSPSLLFHGSSRSLLSCSDGSNNRPPPSGDTVPNNFCIIEGSETVQDFVQMQLQEIQDNIRSRRNKIFLLMEEVRRLRVQQRIKSVKAINEDSELEATEMPEITSSIPFLPNVTPKTLKQLYSTSVALISGIIFFGGLIAPNLELKVGLGGTSYEDFIRSLHLPLQLSQVDPIVASFSGGAVGVISTLMLIEVNNVKQQEKKRCKYCLGTGYLPCARCSASGVCLSIDPITRPRATNQLMQVATTKRCLNCSGAGKVMCPTCLCTGMVTASEHDPRFDPFD

SEQ ID NO: 41301 - protein, 231 aa, Arabidopsis thaliana
  peptide (1)..(231): Ceres Seq. ID no. 12328396
  misc_feature (1)..(231): Homolog of NCBI NO: 15240312 NR Description: putative protein
  misc_feature (1)..(231): Homolog of NCBI NO: 30681288 NR Description: expressed protein [Arabidopsis thaliana]
  misc_feature (1)..(231): Homolog of NCBI NO: 8978349 NR Description: gene_id:K16F4.10~pir||T00468~similar to unknown
  misc_feature (1)..(231): Homolog of NCBI NO: 22326624 NR Description: putative protein
MQLQEIQDNIRSRRNKIFLLMEEVRRLRVQQRIKSVKAINEDSELEATEMPEITSSIPFLPNVTPKTLKQLYSTSVALISGIIFFGGLIAPNLELKVGLGGTSYEDFIRSLHLPLQLSQVDPIVASFSGGAVGVISTLMLIEVNNVKQQEKKRCKYCLGTGYLPCARCSASGVCLSIDPITRPRATNQLMQVATTKRCLNCSGAGKVMCPTCLCTGMVTASEHDPRFDPFD

SEQ ID NO: 41302 - protein, 211 aa, Arabidopsis thaliana
  peptide (1)..(211): Ceres Seq. ID no. 12328397
  misc_feature (1)..(211): Homolog of NCBI NO: 15240312 NR Description: putative protein
  misc_feature (1)..(211): Homolog of NCBI NO: 30681288 NR Description: expressed protein [Arabidopsis thaliana]
  misc_feature (1)..(211): Homolog of NCBI NO: 8978349 NR Description: gene_id:K16F4.10~pir||T00468~similar to unknown
  misc_feature (1)..(211): Homolog of NCBI NO: 22326624 NR Description: putative protein
MEEVRRLRVQQRIKSVKAINEDSELEATEMPEITSSIPFLPNVTPKTLKQLYSTSVALISGIIFFGGLIAPNLELKVGLGGTSYEDFIRSLHLPLQLSQVDPIVASFSGGAVGVISTLMLIEVNNVKQQEKKRCKYCLGTGYLPCARCSASGVCLSIDPITRPRATNQLMQVATTKRCLNCSGAGKVMCPTCLCTGMVTASEHDPRFDPFD

SEQ ID NO: 41303 - DNA, 1329 bp, Arabidopsis thaliana
  misc_feature (1)..(1329): Ceres Seq. ID no. 12395460
  misc_feature: MA Experiment ID: 108434 Result: Down-regulated in Transcription
  misc_feature: MA Experiment 108434 PARAMETER Experiment Name: At_Root_Tips_cDNA_P Parameter: Tissue Value: Root Tips
  misc_feature: MA Experiment ID: 108488 Result: Down-regulated in Transcription
  misc_feature: MA Experiment ID: 108577 Result: Down-regulated in Transcription
  misc_feature: MA Experiment 108577 PARAMETER Experiment Name: At_42deg_Heat_cDNA_P Parameter: Temperature (deg C) Value: 42 vs. 22
  misc_feature: MA Experiment 108577 PARAMETER Experiment Name: At_42deg_Heat_cDNA_P Parameter: Timepoint (hr) Value: 6
  misc_feature: MA Experiment 108577 PARAMETER Experiment Name: At_42deg_Heat_cDNA_P Parameter: Tissue Value: Aerial
  misc_feature: MA Experiment ID: 108579 Result: Up-regulated in Transcription
  misc_feature: MA Experiment 108579 PARAMETER Experiment Name: At_4deg_Cold_cDNA_P Parameter: Temperature (deg C) Value: 4 vs. 22
  misc_feature: MA Experiment 108579 PARAMETER Experiment Name: At_4deg_Cold_cDNA_P Parameter: Timepoint (hr) Value: 6
  misc_feature: MA Experiment 108579 PARAMETER Experiment Name: At_4deg_Cold_cDNA_P Parameter: Tissue Value: Aerial
  misc_feature: MA Experiment ID: 108585 Result: Up-regulated in Transcription
  misc_feature: MA Experiment 108585 PARAMETER Experiment Name: At_5mM_NaNP_cDNA_P Parameter: Timepoint (hr) Value: 6
  misc_feature: MA Experiment 108585 PARAMETER Experiment Name: At_5mM_NaNP_cDNA_P Parameter: Tissue Value: Aerial
  misc_feature: MA Experiment 108585 PARAMETER Experiment Name: At_5mM_NaNP_cDNA_P Parameter: Treatment Value: null
  misc_feature: MA Experiment ID: 108668 Result: Up-regulated in Transcription
  misc_feature: MA Experiment 108668 PARAMETER Experiment Name: At_2mM_SA_cDNA_P Parameter: Plant Line Value: WS
  misc_feature: MA Experiment 108668 PARAMETER Experiment Name: At_2mM_SA_cDNA_P Parameter: Timepoint (hr) Value: 6
  misc_feature: MA Experiment 108668 PARAMETER Experiment Name: At_2mM_SA_cDNA_P Parameter: Treatment Value: 2mM SA vs. No Treatment
  misc_feature: MA Experiment ID: 20000090 Result: Up-regulated in Transcription
  misc_feature: MA Experiment ID: 20000111 Result: Down-regulated in Transcription
  misc_feature: MA Experiment 20000111 PARAMETER Experiment Name: At_42deg_Heat_cDNA_P Parameter: Temperature (deg C) Value: 42 vs. 22
  misc_feature: MA Experiment 20000111 PARAMETER Experiment Name: At_42deg_Heat_cDNA_P Parameter: Timepoint (hr) Value: 6
  misc_feature: MA Experiment 20000111 PARAMETER Experiment Name: At_42deg_Heat_cDNA_P Parameter: Tissue Value: Aerial
  misc_feature: MA Experiment ID: 20000113 Result: Down-regulated in Transcription
  misc_feature: MA Experiment 20000113 PARAMETER Experiment Name: At_42deg_Heat_cDNA_P Parameter: Temperature (deg C) Value: 42 vs. 22
  misc_feature: MA Experiment 20000113 PARAMETER Experiment Name: At_42deg_Heat_cDNA_P Parameter: Timepoint (hr) Value: 8
  misc_feature: MA Experiment 20000113 PARAMETER Experiment Name: At_42deg_Heat_cDNA_P Parameter: Tissue Value: Aerial
  misc_feature: MA Experiment ID: 20000144 Result: Down-regulated in Transcription
  misc_feature: MA Experiment 20000144 PARAMETER Experiment Name: At_42deg_Heat_cDNA_P Parameter: Temperature (deg C) Value: 42 vs. 22
  misc_feature: MA Experiment 20000144 PARAMETER Experiment Name: At_42deg_Heat_cDNA_P Parameter: Timepoint (hr) Value: 1
  misc_feature: MA Experiment 20000144 PARAMETER Experiment Name: At_42deg_Heat_cDNA_P Parameter: Tissue Value: Aerial
  misc_feature: MA Experiment ID: 20000182 Result: Up-regulated in Transcription
  misc_feature: MA Experiment 20000182 PARAMETER Experiment Name: At_2mM_SA_P Parameter: Age (day) Value: 14
  misc_feature: MA Experiment 20000182 PARAMETER Experiment Name: At_2mM_SA_P Parameter: Organism Value: A. thaliana
  misc_feature: MA Experiment 20000182 PARAMETER Experiment Name: At_2mM_SA_P Parameter: Plant Line Value: WS
  misc_feature: MA Experiment 20000182 PARAMETER Experiment Name: At_2mM_SA_P Parameter: Timepoint (hr) Value: 6
  misc_feature: MA Experiment 20000182 PARAMETER Experiment Name: At_2mM_SA_P Parameter: Tissue Value: Aerial
  misc_feature: MA Experiment 20000182 PARAMETER Experiment Name: At_2mM_SA_P Parameter: Treatment Value: 2mM SA vs. No Treatment
  misc_feature: MA Experiment ID: 20000234 Result: Down-regulated in Transcription
  misc_feature: MA Experiment 20000234 PARAMETER Experiment Name: At_Siliques_P Parameter: Age (day) Value: 21
  misc_feature: MA Experiment 20000234 PARAMETER Experiment Name: At_Siliques_P Parameter: Organism Value: A. thaliana
  misc_feature: MA Experiment 20000234 PARAMETER Experiment Name: At_Siliques_P Parameter: Plant Line Value: WS
  misc_feature: MA Experiment 20000234 PARAMETER Experiment Name: At_Siliques_P Parameter: Tissue Value: Less Than 5mm Siliques vs. Whole Plant
  misc_feature: MA Experiment ID: 20000264 Result: Down-regulated in Transcription
  misc_feature: MA Experiment 20000264 PARAMETER Experiment Name: At_Open_Flower_P Parameter: Age (day) Value: 21
  misc_feature: MA Experiment 20000264 PARAMETER Experiment Name: At_Open_Flower_P Parameter: Plant Line Value: WS
  misc_feature: MA Experiment 20000264 PARAMETER Experiment Name: At_Open_Flower_P Parameter: Tissue Value: Open Flower vs. Whole Plant
  misc_feature: MA Experiment ID: 20000265 Result: Down-regulated in Transcription
  misc_feature: MA Experiment 20000265 PARAMETER Experiment Name: At_Open_Flower_P Parameter: Age (day) Value: 21
  misc_feature: MA Experiment 20000265 PARAMETER Experiment Name: At_Open_Flower_P Parameter: Plant Line Value: WS
  misc_feature: MA Experiment 20000265 PARAMETER Experiment Name: At_Open_Flower_P Parameter: Tissue Value: Closed Flower vs. Whole Plant
  misc_feature: MA Experiment ID: 20000286 Result: Down-regulated in Transcription
  misc_feature: MA Experiment 20000286 PARAMETER Experiment Name: At_Open_Flower_P Parameter: Age (day) Value: 21
  misc_feature: MA Experiment 20000286 PARAMETER Experiment Name: At_Open_Flower_P Parameter: Plant Line Value: WS
  misc_feature: MA Experiment 20000286 PARAMETER Experiment Name: At_Open_Flower_P Parameter: Tissue Value: Half Open vs. Whole Plant
  misc_feature: MA Experiment ID: 20000437 Result: Up-regulated in Transcription
  misc_feature: MA Experiment 20000437 PARAMETER Experiment Name: At_Drought_P Parameter: Age (day) Value: 8
  misc_feature: MA Experiment 20000437 PARAMETER Experiment Name: At_Drought_P Parameter: Organism Value: A. thaliana
  misc_feature: MA Experiment 20000437 PARAMETER Experiment Name: At_Drought_P Parameter: Plant Line Value: WS
  misc_feature: MA Experiment 20000437 PARAMETER Experiment Name: At_Drought_P Parameter: Timepoint (hr) Value: 24
  misc_feature: MA Experiment 20000437 PARAMETER Experiment Name: At_Drought_P Parameter: Tissue Value: Whole Plant
  misc_feature: MA Experiment 20000437 PARAMETER Experiment Name: At_Drought_P Parameter: Treatment Value: Drought vs. No Drought
  misc_feature: MA Experiment ID: 20000438 Result: Down-regulated in Transcription
  misc_feature: MA Experiment 20000438 PARAMETER Experiment Name: At_Shoots__P Parameter: Age (day) Value: 14
  misc_feature: MA Experiment 20000438 PARAMETER Experiment Name: At_Shoots__P Parameter: Tissue Value: Shoots vs. Whole Plant
gaaaaccaaattagggtttttaatttccagattgttttgtttatttgaataaatctccgcaagtttcaattaggttgcaaaaatcgaagaaattttcttcgattcaaaaaaaatgggaaaattttgttgcttcacttccgcttctgaggttgtgggaggacaatcatcatcacgatcaggtaaaggaagaagtgatgaagggatgatcaagtatggttttagtctagtgaaaggaaaagctaaccatccaatggaagattatcatgttgctaactttatcaacatccaagaccatgaattgggtctttttgctatttatgatggtcatatgggtgatagtgtccctgcttacttgcagaaacgtctcttctccaatatccttaaggagggagagttttgggttgatcctcgaaggtctattgcaaaagcttatgagaagacggaccaagcgattctatcgaatagttctgacttgggtcgtggtggttctactgctgtgactgctatattgattaatgggagaaagttgtggatagctaatgttggtgattcacgagctgttctttctcatggtggcgctataacgcagatgagtacagatcatgagcctcgtactgaaaggtcgagtattgaagatagaggtggatttgtatccaatctaccaggtgatgttcctcgggtgaatggtcaattagctgtgtctcgtgcttttggagataagggacttaagacacacttgagttcagagcctgacataaaagaagctactgtagatagccagacagatgttcttctcttggctagtgatggcatctggaaggtgatgacaaatgaagaggcaatggagatagcgagaagagtgaaagatccacagaaagcggcaaaggaattaacagctgaagcattgagaagagagagtaaagacgacatatcttgtgtcgtggtccgattcagatgacaaactctctgaaaggatacttacggggagatgggttccttatataataatttcaatcaaagattcatcaggacaaaaaagcttgttttcactggattcgactctgatgattctggttcggtttaggaccggtctaagtttcaatttgtgattagctgcttcttgctatagcttatgtgcgttcgttgtgtaaattgtgtgttttaaagacgataagaaaatgaacaaaaaaggagtggggaatggagttttgtggtgggtgatggggggttttgttattataattggttgatttgttatatttaatcatcgggatataaatattaggatgtttttacaaatatgtgaaagtacttttggattaggtttgc

SEQ ID NO: 41304 - protein, 281 aa, Arabidopsis thaliana
  peptide (1)..(281): Ceres Seq. ID no. 12395461
  misc_feature (32)..(273): Pfam Name: Protein phosphatase 2C Pfam Description: Protein phosphatase 2C
  misc_feature (22)..(280): Homolog of NCBI NO: 15238651 NR Description: Protein phosphatase 2C-like protein; protein id:
  misc_feature (12)..(281): Homolog of NCBI NO: 4336436 NR Description: protein phosphatase type 2C [Lotus japonicus]
  misc_feature (18)..(280): Homolog of NCBI NO: 18417190 NR Description: protein phosphatase 2C (PP2C)
  misc_feature (16)..(281): Homolog of NCBI NO: 18399423 NR Description: protein phosphatase 2C (PP2C)
  misc_feature (47)..(281): Homolog of NCBI NO: 25406547 NR Description: hypothetical protein T11I11.14 [imported] -
  misc_feature (1)..(281): Homolog of NCBI NO: 15081703 NR Description: At1g78200/T11I11_14 [Arabidopsis thaliana]
  misc_feature (1)..(281): Homolog of NCBI NO: 18411863 NR Description: protein phosphatase 2C (PP2C)
  misc_feature (1)..(281): Homolog of NCBI NO: 15218759 NR Description: protein phosphatase 2C (PP2C)
  misc_feature (1)..(281): Homolog of NCBI NO: 21537096 NR Description: protein phosphatase type 2C, putative
  misc_feature (1)..(281): Homolog of NCBI NO: 18395099 NR Description: protein phosphatase 2C (PP2C), putative
MGKFCCFTSASEVVGGQSSSRSGKGRSDEGMIKYGFSLVKGKANHPMEDYHVANFINIQDHELGLFAIYDGHMGDSVPAYLQKRLFSNILKEGEFWVDPRRSIAKAYEKTDQAILSNSSDLGRGGSTAVTAILINGRKLWIANVGDSRAVLSHGGAITQMSTDHEPRTERSSIEDRGGFVSNLPGDVPRVNGQLAVSRAFGDKGLKTHLSSEPDIKEATVDSQTDVLLLASDGIWKVMTNEEAMEIARRVKDPQKAAKELTAEALRRESKDDISCVVVRFR

SEQ ID NO: 41305 - protein, 251 aa, Arabidopsis thaliana
  peptide (1)..(251): Ceres Seq. ID no. 12395462
  misc_feature (2)..(243): Pfam Name: Protein phosphatase 2C Pfam Description: Protein phosphatase 2C
  misc_feature (1)..(250): Homolog of NCBI NO: 15238651 NR Description: Protein phosphatase 2C-like protein; protein id:
  misc_feature (1)..(251): Homolog of NCBI NO: 4336436 NR Description: protein phosphatase type 2C [Lotus japonicus]
  misc_feature (1)..(250): Homolog of NCBI NO: 18417190 NR Description: protein phosphatase 2C (PP2C)
  misc_feature (1)..(251): Homolog of NCBI NO: 18399423 NR Description: protein phosphatase 2C (PP2C)
  misc_feature (17)..(251): Homolog of NCBI NO: 25406547 NR Description: hypothetical protein T11I11.14 [imported] -
  misc_feature (1)..(251): Homolog of NCBI NO: 15081703 NR Description: At1g78200/T11I11_14 [Arabidopsis thaliana]
  misc_feature (1)..(251): Homolog of NCBI NO: 18411863 NR Description: protein phosphatase 2C (PP2C)
  misc_feature (1)..(251): Homolog of NCBI NO: 15218759 NR Description: protein phosphatase 2C (PP2C)
  misc_feature (1)..(251): Homolog of NCBI NO: 21537096 NR Description: protein phosphatase type 2C, putative
  misc_feature (1)..(251): Homolog of NCBI NO: 18395099 NR Description: protein phosphatase 2C (PP2C), putative
MIKYGFSLVKGKANHPMEDYHVANFINIQDHELGLFAIYDGHMGDSVPAYLQKRLFSNILKEGEFWVDPRRSIAKAYEKTDQAILSNSSDLGRGGSTAVTAILINGRKLWIANVGDSRAVLSHGGAITQMSTDHEPRTERSSIEDRGGFVSNLPGDVPRVNGQLAVSRAFGDKGLKTHLSSEPDIKEATVDSQTDVLLLASDGIWKVMTNEEAMEIARRVKDPQKAAKELTAEALRRESKDDISCVVVRFR

SEQ ID NO: 41306 - protein, 235 aa, Arabidopsis thaliana
  peptide (1)..(235): Ceres Seq. ID no. 12395463
  misc_feature (1)..(227): Pfam Name: Protein phosphatase 2C Pfam Description: Protein phosphatase 2C
  misc_feature (1)..(234): Homolog of NCBI NO: 15238651 NR Description: Protein phosphatase 2C-like protein; protein id:
  misc_feature (1)..(235): Homolog of NCBI NO: 4336436 NR Description: protein phosphatase type 2C [Lotus japonicus]
  misc_feature (1)..(234): Homolog of NCBI NO: 18417190 NR Description: protein phosphatase 2C (PP2C)
  misc_feature (1)..(235): Homolog of NCBI NO: 18399423 NR Description: protein phosphatase 2C (PP2C)
  misc_feature (1)..(235): Homolog of NCBI NO: 25406547 NR Description: hypothetical protein T11I11.14 [imported] -
  misc_feature (1)..(235): Homolog of NCBI NO: 15081703 NR Description: At1g78200/T11I11_14 [Arabidopsis thaliana]
  misc_feature (1)..(235): Homolog of NCBI NO: 18411863 NR Description: protein phosphatase 2C (PP2C)
  misc_feature (1)..(235): Homolog of NCBI NO: 15218759 NR Description: protein phosphatase 2C (PP2C)
  misc_feature (1)..(235): Homolog of NCBI NO: 21537096 NR Description: protein phosphatase type 2C, putative
  misc_feature (1)..(235): Homolog of NCBI NO: 18395099 NR Description: protein phosphatase 2C (PP2C), putative
MEDYHVANFINIQDHELGLFAIYDGHMGDSVPAYLQKRLFSNILKEGEFWVDPRRSIAKAYEKTDQAILSNSSDLGRGGSTAVTAILINGRKLWIANVGDSRAVLSHGGAITQMSTDHEPRTERSSIEDRGGFVSNLPGDVPRVNGQLAVSRAFGDKGLKTHLSSEPDIKEATVDSQTDVLLLASDGIWKVMTNEEAMEIARRVKDPQKAAKELTAEALRRESKDDISCVVVRFR

SEQ ID NO: 41307 - DNA, 1668 bp, Arabidopsis thaliana
  misc_feature (1)..(1668): Ceres Seq. ID no. 12323946
  misc_feature: MA Experiment ID: 20000173 Result: Up-regulated in Transcription
  misc_feature: MA Experiment 20000173 PARAMETER Experiment Name: At_42deg_Heat_P Parameter: Age (day) Value: 14
  misc_feature: MA Experiment 20000173 PARAMETER Experiment Name: At_42deg_Heat_P Parameter: Organism Value: A. thaliana
  misc_feature: MA Experiment 20000173 PARAMETER Experiment Name: At_42deg_Heat_P Parameter: Plant Line Value: WS
  misc_feature: MA Experiment 20000173 PARAMETER Experiment Name: At_42deg_Heat_P Parameter: Temperature (deg C) Value: 42 vs. 22
  misc_feature: MA Experiment 20000173 PARAMETER Experiment Name: At_42deg_Heat_P Parameter: Timepoint (hr) Value: 6
  misc_feature: MA Experiment 20000173 PARAMETER Experiment Name: At_42deg_Heat_P Parameter: Tissue Value: Aerial
  misc_feature: MA Experiment ID: 20000185 Result: Down-regulated in Transcription
  misc_feature: MA Experiment 20000185 PARAMETER Experiment Name: At_Roots__P Parameter: Age (day) Value: 7 vs. 21
  misc_feature: MA Experiment 20000185 PARAMETER Experiment Name: At_Roots__P Parameter: Organism Value: A. thaliana
  misc_feature: MA Experiment 20000185 PARAMETER Experiment Name: At_Roots__P Parameter: Tissue Value: Roots vs. Whole Plant
  misc_feature: MA Experiment ID: 20000234 Result: Down-regulated in Transcription
  misc_feature: MA Experiment 20000234 PARAMETER Experiment Name: At_Siliques_P Parameter: Age (day) Value: 21
  misc_feature: MA Experiment 20000234 PARAMETER Experiment Name: At_Siliques_P Parameter: Organism Value: A. thaliana
  misc_feature: MA Experiment 20000234 PARAMETER Experiment Name: At_Siliques_P Parameter: Plant Line Value: WS
  misc_feature: MA Experiment 20000234 PARAMETER Experiment Name: At_Siliques_P Parameter: Tissue Value: Less Than 5mm Siliques vs. Whole Plant
  misc_feature: MA Experiment ID: 20000235 Result: Down-regulated in Transcription
  misc_feature: MA Experiment 20000235 PARAMETER Experiment Name: At_Siliques_P Parameter: Age (day) Value: 21
  misc_feature: MA Experiment 20000235 PARAMETER Experiment Name: At_Siliques_P Parameter: Organism Value: A. thaliana
  misc_feature: MA Experiment 20000235 PARAMETER Experiment Name: At_Siliques_P Parameter: Plant Line Value: WS
  misc_feature: MA Experiment 20000235 PARAMETER Experiment Name: At_Siliques_P Parameter: Tissue Value: 5-10mm Siliques vs. Whole Plant
  misc_feature: MA Experiment ID: 20000264 Result: Up-regulated in Transcription
  misc_feature: MA Experiment 20000264 PARAMETER Experiment Name: At_Open_Flower_P Parameter: Age (day) Value: 21
  misc_feature: MA Experiment 20000264 PARAMETER Experiment Name: At_Open_Flower_P Parameter: Plant Line Value: WS
  misc_feature: MA Experiment 20000264 PARAMETER Experiment Name: At_Open_Flower_P Parameter: Tissue Value: Open Flower vs. Whole Plant
  misc_feature: MA Experiment ID: 20000265 Result: Down-regulated in Transcription
  misc_feature: MA Experiment 20000265 PARAMETER Experiment Name: At_Open_Flower_P Parameter: Age (day) Value: 21
  misc_feature: MA Experiment 20000265 PARAMETER Experiment Name: At_Open_Flower_P Parameter: Plant Line Value: WS
  misc_feature: MA Experiment 20000265 PARAMETER Experiment Name: At_Open_Flower_P Parameter: Tissue Value: Closed Flower vs. Whole Plant
  misc_feature: MA Experiment ID: 20000286 Result: Up-regulated in Transcription
  misc_feature: MA Experiment 20000286 PARAMETER Experiment Name: At_Open_Flower_P Parameter: Age (day) Value: 21
  misc_feature: MA Experiment 20000286 PARAMETER Experiment Name: At_Open_Flower_P Parameter: Plant Line Value: WS
  misc_feature: MA Experiment 20000286 PARAMETER Experiment Name: At_Open_Flower_P Parameter: Tissue Value: Half Open vs. Whole Plant
  misc_feature: MA Experiment ID: 20000439 Result: Down-regulated in Transcription
  misc_feature: MA Experiment 20000439 PARAMETER Experiment Name: At_Roots__P Parameter: Age (day) Value: 14 vs. 21
  misc_feature: MA Experiment 20000439 PARAMETER Experiment Name: At_Roots__P Parameter: Organism Value: A. thaliana
  misc_feature: MA Experiment 20000439 PARAMETER Experiment Name: At_Roots__P Parameter: Tissue Value: Roots vs. Whole Plant
  misc_feature: MA Experiment ID: 20000452 Result: Down-regulated in Transcription
  misc_feature: MA Experiment 20000452 PARAMETER Experiment Name: At_CS6879_Shoots-Roots_P Parameter: Age (day) Value: 14
  misc_feature: MA Experiment 20000452 PARAMETER Experiment Name: At_CS6879_Shoots-Roots_P Parameter: Organism Value: A. thaliana
  misc_feature: MA Experiment 20000452 PARAMETER Experiment Name: At_CS6879_Shoots-Roots_P Parameter: Plant Line Value: CS6879 vs. WS
  misc_feature: MA Experiment 20000452 PARAMETER Experiment Name: At_CS6879_Shoots-Roots_P Parameter: Tissue Value: Shoots
  misc_feature: MA Experiment ID: 20000794 Result: Up-regulated in Transcription
  misc_feature: MA Experiment 20000794 PARAMETER Experiment Name: At_Petals_P Parameter: Age (day) Value: 23-25 days
  misc_feature: MA Experiment 20000794 PARAMETER Experiment Name: At_Petals_P Parameter: Plant Line Value: WS
  misc_feature: MA Experiment 20000794 PARAMETER Experiment Name: At_Petals_P Parameter: Tissue Value: Petals vs. Whole plant
  misc_feature: MA Experiment ID: 20001909 Result: Up-regulated in Transcription
  misc_feature: MA Experiment 20001909 PARAMETER Experiment Name: At_Drought_Reproduction_P Parameter: Age (day) Value: 35
  misc_feature: MA Experiment 20001909 PARAMETER Experiment Name: At_Drought_Reproduction_P Parameter: Organism Value: A. thaliana
  misc_feature: MA Experiment 20001909 PARAMETER Experiment Name: At_Drought_Reproduction_P Parameter: Plant Line Value: WS
  misc_feature: MA Experiment 20001909 PARAMETER Experiment Name: At_Drought_Reproduction_P Parameter: Timepoint (day) Value: 5
  misc_feature: MA Experiment 20001909 PARAMETER Experiment Name: At_Drought_Reproduction_P Parameter: Tissue Value: Flowers
  misc_feature: MA Experiment 20001909 PARAMETER Experiment Name: At_Drought_Reproduction_P Parameter: Treatment Value: Drought vs. No Drought
cctcatacaaagaaaaagaaagagttagcaacaaaaaaaaaacaataattatgtctatgttcctaggtttgctcttcctcttccctctctttttcatcctatttaaaaaccttttacctccgagaaagaagcttcctccgggaccaacgggtcttccgctaataggaaacttgcaccagcttggaagattgcttcacagttctcttcacaagctctctttagaacatggaccagtgatgcttgtccgttggggggtcgtccctatggccgtgttctcttccaacgaagcagctaaagaagttctcaagactcatgacttagagacttgtaaccgtcctaagctggtcgccaacgggttgtttactcacggctataaagacattggtttcactcagtatggtgaggaatggcgagagatgaaaaagttcgtggggcttgagctctttagtccaaaaaaacataagtctttcaggtatatcagagaggaagaaggtgacttgttggtcaagaaaatatcaaattatgctcaaacacaaaccttggtggatttgagaaaatccttgttctcctacaccgccagtatcatatttagagaagcctttggacagaacttccgcgagtgcgattacatcaatatggacaaacttgaagagctggtgcaagagacagaaaccaacgtatgcagcttggcattcactgacttcttccccagaggtctcgggtggcttgtagaccggatctccggtcagcattcgaggatgaacatagccttttccaaactcaccactttctttgaagatgtgatcgatgagcttttgaagactaaacaacttgatgatcactcagacctcgtcactgccatgttggatgtgatcaatagacccagaaaattcggttctttaaagatcacttacgatcatctcatagcaatgatgtcggatgtggttttggcgggagtaaacgctggaacagtaacaatgatatggacgatgacagagcttacaagacatcctagagtgatgaagaaacttcaagaagaaattcgagcaacactcggaccaaacaaagagagaatcacagaagaagatctagagaaagttgagtacttgaatctggtgatcaaagaatcattcagactacatccaccagctcctctcttgctcccaagagaaacaatgtccgacatcgagattcaaggctaccacattcccaagaacgcccatgtaaagatcaacacttatgcgataggacgtgatcctaaacgttggactaaccctgaagaattcaatcctgagaggtttttgaatacctcaatcaactacaagggtcagcattacgagctcttgccctttggagccggtcgtaggaactgtccaggtatgaccttgggaatcaccattcttgagctaggtcttcttaacattctctactacttcgattggagtttacccagtggaatgaccattaaagacattgacatggaagaagacggcgctttgaacatcgccaagaaagtccctctgcagctcgtaccaactcttccataatcactcgtgaataatagtattaaataagatgatcaagatttgtatgtttgcctctatcatactacatttggtttttctttcctttttttcgtgttgccatattaatatatatccatgtttt

SEQ ID NO: 41308 - protein, 514 aa, Arabidopsis thaliana
  peptide (1)..(514): Ceres Seq. ID no. 12323947
  misc_feature (45)..(509): Pfam Name: Cytochrome P450 Pfam Description: Cytochrome P450
  misc_feature (79)..(513): Homolog of NCBI NO: 22655216 NR Description: cytochrome P450 71B5 [Arabidopsis thaliana]
  misc_feature (79)..(513): Homolog of NCBI NO: 15724230 NR Description: AT3g53280/T4D2_200 [Arabidopsis thaliana]
  misc_feature (17)..(513): Homolog of NCBI NO: 15231782 NR Description: cytochrome P450 monooxygenase
  misc_feature (17)..(512): Homolog of NCBI NO: 15229913 NR Description: cytochrome p450 family; protein id: At3g44250.1
  misc_feature (17)..(512): Homolog of NCBI NO: 15231525 NR Description: cytochrome p450 family
  misc_feature (17)..(513): Homolog of NCBI NO: 15231524 NR Description: cytochrome p450 family; protein id: At3g26190.1
  misc_feature (88)..(514): Homolog of NCBI NO: 22327366 NR Description: similar to cytochrome p450 family; protein id:
  misc_feature (15)..(514): Homolog of NCBI NO: 13878369 NR Description: CYTOCHROME P450 71B8
  misc_feature (17)..(514): Homolog of NCBI NO: 15810491 NR Description: putative cytochrome P450 protein [Arabidopsis
  misc_feature (17)..(514): Homolog of NCBI NO: 15231786 NR Description: cytochrome p450 family
SYKEKERVSNKKKTIIMSMFLGLLFLFPLFFILFKNLLPPRKKLPPGPTGLPLIGNLHQLGRLLHSSLHKLSLEHGPVMLVRWGVVPMAVFSSNEAAKEVLKTHDLETCNRPKLVANGLFTHGYKDIGFTQYGEEWREMKKFVGLELFSPKKHKSFRYIREEEGDLLVKKISNYAQTQTLVDLRKSLFSYTASIIFREAFGQNFRECDYINMDKLEELVQETETNVCSLAFTDFFPRGLGWLVDRISGQHSRMNIAFSKLTTFFEDVIDELLKTKQLDDHSDLVTAMLDVINRPRKFGSLKITYDHLIAMMSDVVLAGVNAGTVTMIWTMTELTRHPRVMKKLQEEIRATLGPNKERITEEDLEKVEYLNLVIKESFRLHPPAPLLLPRETMSDIEIQGYHIPKNAHVKINTYAIGRDPKRWTNPEEFNPERFLNTSINYKGQHYELLPFGAGRRNCPGMTLGITILELGLLNILYYFDWSLPSGMTIKDIDMEEDGALNIAKKVPLQLVPTLP

SEQ ID NO: 41309 - protein, 498 aa, Arabidopsis thaliana
  peptide (1)..(498): Ceres Seq. ID no. 12323948
  misc_feature (29)..(493): Pfam Name: Cytochrome P450 Pfam Description: Cytochrome P450
  misc_feature (63)..(497): Homolog of NCBI NO: 22655216 NR Description: cytochrome P450 71B5 [Arabidopsis thaliana]
  misc_feature (63)..(497): Homolog of NCBI NO: 15724230 NR Description: AT3g53280/T4D2_200 [Arabidopsis thaliana]
  misc_feature (1)..(497): Homolog of NCBI NO: 15231782 NR Description: cytochrome P450 monooxygenase
  misc_feature (1)..(496): Homolog of NCBI NO: 15229913 NR Description: cytochrome p450 family; protein id: At3g44250.1
  misc_feature (1)..(496): Homolog of NCBI NO: 15231525 NR Description: cytochrome p450 family
  misc_feature (1)..(497): Homolog of NCBI NO: 15231524 NR Description: cytochrome p450 family; protein id: At3g26190.1
  misc_feature (72)..(498): Homolog of NCBI NO: 22327366 NR Description: similar to cytochrome p450 family; protein id:
  misc_feature (1)..(498): Homolog of NCBI NO: 13878369 NR Description: CYTOCHROME P450 71B8
  misc_feature (1)..(498): Homolog of NCBI NO: 15810491 NR Description: putative cytochrome P450 protein [Arabidopsis
  misc_feature (1)..(498): Homolog of NCBI NO: 15231786 NR Description: cytochrome p450 family
MSMFLGLLFLFPLFFILFKNLLPPRKKLPPGPTGLPLIGNLHQLGRLLHSSLHKLSLEHGPVMLVRWGVVPMAVFSSNEAAKEVLKTHDLETCNRPKLVANGLFTHGYKDIGFTQYGEEWREMKKFVGLELFSPKKHKSFRYIREEEGDLLVKKISNYAQTQTLVDLRKSLFSYTASIIFREAFGQNFRECDYINMDKLEELVQETETNVCSLAFTDFFPRGLGWLVDRISGQHSRMNIAFSKLTTFFEDVIDELLKTKQLDDHSDLVTAMLDVINRPRKFGSLKITYDHLIAMMSDVVLAGVNAGTVTMIWTMTELTRHPRVMKKLQEEIRATLGPNKERITEEDLEKVEYLNLVIKESFRLHPPAPLLLPRETMSDIEIQGYHIPKNAHVKINTYAIGRDPKRWTNPEEFNPERFLNTSINYKGQHYELLPFGAGRRNCPGMTLGITILELGLLNILYYFDWSLPSGMTIKDIDMEEDGALNIAKKVPLQLVPTLP

SEQ ID NO: 41310 - protein, 496 aa, Arabidopsis thaliana
  peptide (1)..(496): Ceres Seq. ID no. 12323949
  misc_feature (27)..(491): Pfam Name: Cytochrome P450 Pfam Description: Cytochrome P450
  misc_feature (61)..(495): Homolog of NCBI NO: 22655216 NR Description: cytochrome P450 71B5 [Arabidopsis thaliana]
  misc_feature (61)..(495): Homolog of NCBI NO: 15724230 NR Description: AT3g53280/T4D2_200 [Arabidopsis thaliana]
  misc_feature (1)..(495): Homolog of NCBI NO: 15231782 NR Description: cytochrome P450 monooxygenase
  misc_feature (1)..(494): Homolog of NCBI NO: 15229913 NR Description: cytochrome p450 family; protein id: At3g44250.1
  misc_feature (1)..(494): Homolog of NCBI NO: 15231525 NR Description: cytochrome p450 family
  misc_feature (1)..(495): Homolog of NCBI NO: 15231524 NR Description: cytochrome p450 family; protein id: At3g26190.1
  misc_feature (70)..(496): Homolog of NCBI NO: 22327366 NR Description: similar to cytochrome p450 family; protein id:
  misc_feature (1)..(496): Homolog of NCBI NO: 13878369 NR Description: CYTOCHROME P450 71B8
  misc_feature (1)..(496): Homolog of NCBI NO: 15810491 NR Description: putative cytochrome P450 protein [Arabidopsis
  misc_feature (1)..(496): Homolog of NCBI NO: 15231786 NR Description: cytochrome p450 family
MFLGLLFLFPLFFILFKNLLPPRKKLPPGPTGLPLIGNLHQLGRLLHSSLHKLSLEHGPVMLVRWGVVPMAVFSSNEAAKEVLKTHDLETCNRPKLVANGLFTHGYKDIGFTQYGEEWREMKKFVGLELFSPKKHKSFRYIREEEGDLLVKKISNYAQTQTLVDLRKSLFSYTASIIFREAFGQNFRECDYINMDKLEELVQETETNVCSLAFTDFFPRGLGWLVDRISGQHSRMNIAFSKLTTFFEDVIDELLKTKQLDDHSDLVTAMLDVINRPRKFGSLKITYDHLIAMMSDVVLAGVNAGTVTMIWTMTELTRHPRVMKKLQEEIRATLGPNKERITEEDLEKVEYLNLVIKESFRLHPPAPLLLPRETMSDIEIQGYHIPKNAHVKINTYAIGRDPKRWTNPEEFNPERFLNTSINYKGQHYELLPFGAGRRNCPGMTLGITILELGLLNILYYFDWSLPSGMTIKDIDMEEDGALNIAKKVPLQLVPTLP

SEQ ID NO: 41311 - DNA, 1599 bp, Arabidopsis thaliana
  misc_feature (1)..(1599): Ceres Seq. ID no. 12395110
  misc_feature: MA Experiment ID: 108461 Result: Up-regulated in Transcription
  misc_feature: MA Experiment 108461 PARAMETER Experiment Name: At_Germinating_Seeds_cDNA_P Parameter: Age (day) Value: 1 vs. 0
  misc_feature: MA Experiment 108461 PARAMETER Experiment Name: At_Germinating_Seeds_cDNA_P Parameter: Tissue Value: Germinating Seeds
  misc_feature: MA Experiment ID: 108462 Result: Up-regulated in Transcription
  misc_feature: MA Experiment 108462 PARAMETER Experiment Name: At_Germinating_Seeds_cDNA_P Parameter: Age (day) Value: 2 vs. 0
  misc_feature: MA Experiment 108462 PARAMETER Experiment Name: At_Germinating_Seeds_cDNA_P Parameter: Tissue Value: Germinating Seeds
  misc_feature: MA Experiment ID: 108463 Result: Up-regulated in Transcription
  misc_feature: MA Experiment 108463 PARAMETER Experiment Name: At_Germinating_Seeds_cDNA_P Parameter: Age (day) Value: 3 vs. 0
  misc_feature: MA Experiment 108463 PARAMETER Experiment Name: At_Germinating_Seeds_cDNA_P Parameter: Tissue Value: Germinating Seeds
  misc_feature: MA Experiment ID: 108464 Result: Up-regulated in Transcription
  misc_feature: MA Experiment 108464 PARAMETER Experiment Name: At_Germinating_Seeds_cDNA_P Parameter: Age (day) Value: 4 vs. 0
  misc_feature: MA Experiment 108464 PARAMETER Experiment Name: At_Germinating_Seeds_cDNA_P Parameter: Tissue Value: Germinating Seeds
  misc_feature: MA Experiment ID: 108488 Result: Down-regulated in Transcription
  misc_feature: MA Experiment ID: 108573 Result: Up-regulated in Transcription
  misc_feature: MA Experiment 108573 PARAMETER Experiment Name: At_Drought_cDNA_P Parameter: Timepoint (hr) Value: 6
  misc_feature: MA Experiment 108573 PARAMETER Experiment Name: At_Drought_cDNA_P Parameter: Tissue Value: Aerial
  misc_feature: MA Experiment 108573 PARAMETER Experiment Name: At_Drought_cDNA_P Parameter: Treatment Value: Drought vs. No Drought
  misc_feature: MA Experiment ID: 108595 Result: Down-regulated in Transcription
  misc_feature: MA Experiment 108595 PARAMETER Experiment Name: At_Ler-pi_Ovule_cDNA_P Parameter: Plant Line Value: null
  misc_feature: MA Experiment ID: 20000113 Result: Down-regulated in Transcription
  misc_feature: MA Experiment 20000113 PARAMETER Experiment Name: At_42deg_Heat_cDNA_P Parameter: Temperature (deg C) Value: 42 vs. 22
  misc_feature: MA Experiment 20000113 PARAMETER Experiment Name: At_42deg_Heat_cDNA_P Parameter: Timepoint (hr) Value: 8
  misc_feature: MA Experiment 20000113 PARAMETER Experiment Name: At_42deg_Heat_cDNA_P Parameter: Tissue Value: Aerial
  misc_feature: MA Experiment ID: 20000179 Result: Up-regulated in Transcription
  misc_feature: MA Experiment 20000179 PARAMETER Experiment Name: At_Germinating_Seeds_P Parameter: Age (hr) Value: 6 vs. 0
  misc_feature: MA Experiment 20000179 PARAMETER Experiment Name: At_Germinating_Seeds_P Parameter: Tissue Value: Germinating Seeds
  misc_feature: MA Experiment ID: 20000180 Result: Up-regulated in Transcription
  misc_feature: MA Experiment 20000180 PARAMETER Experiment Name: At_Germinating_Seeds_P Parameter: Age (hr) Value: 24 vs. 0
  misc_feature: MA Experiment 20000180 PARAMETER Experiment Name: At_Germinating_Seeds_P Parameter: Tissue Value: Germinating Seeds
  misc_feature: MA Experiment ID: 20000265 Result: Down-regulated in Transcription
  misc_feature: MA Experiment 20000265 PARAMETER Experiment Name: At_Open_Flower_P Parameter: Age (day) Value: 21
  misc_feature: MA Experiment 20000265 PARAMETER Experiment Name: At_Open_Flower_P Parameter: Plant Line Value: WS
  misc_feature: MA Experiment 20000265 PARAMETER Experiment Name: At_Open_Flower_P Parameter: Tissue Value: Closed Flower vs. Whole Plant
  misc_feature: MA Experiment ID: 20000495 Result: Down-regulated in Transcription
  misc_feature: MA Experiment 20000495 PARAMETER Experiment Name: At_Guard_Cells_P Parameter: Harvest Date Value: 8/2/2002
  misc_feature: MA Experiment 20000495 PARAMETER Experiment Name: At_Guard_Cells_P Parameter: Organism Value: A. thaliana
  misc_feature: MA Experiment 20000495 PARAMETER Experiment Name: At_Guard_Cells_P Parameter: Tissue Value: Guard Cells vs. Leaves
aagaaggtattggatcgctgacagataacccgatcagattcagggagtttaatcgatcagatcattttttgtcaatgacgaaaaaggcggtgcttattgggatcaattacccaggaaccaaggcggagttacggggatgcgtcaacgatgttcgtcgtatgtacaaatgtctcgttgaacggtacggcttctccgaggagaacatcaccgttctcatcgacaccgatgaatcctctactcagcctactggcaagaacatccgccgcgcgcttgctgatctcgtcgaatctgccgattccggcgacgttcttgtcgttcattacagtggacacggtacgaggttgccggctgagactggtgaagacgatgacactggtttcgacgagtgtattgttccttgcgacatgaatctgattactgatgatgattttagagatcttgtggacaaggttcctccaggttgcagaatgacaatcatttcagactcttgtcacagtggtggcctaatcgacgaagccaaggagcagattggagagagcactaagaaagaagccgaggacgaagatgaatctgaagaatcttcttcaagattcgggtttaggaagttcttgcgcagcaaagtggaaggcgccatcgagtctcgagggtttcacattggagggaacaagaaggatgaagatgaggcggaagaaatcgagactaaggagattgagcttgaagacggagaaacgatccatgccaaagacaaatctcttcctctgcagaccttgattgatattctcaagcagcaaacagggaatgataatatcgaagttgggaaaatcaggccaagcctttttgatgcgtttggtgatgattcgagcccgaaagtgaagaagtttatgaaagtgatcttaggtaagcttcaggctggaaatggagaagaaggtggattaatgggaatgcttggcaaattggcttcagggtttcttgagggtaaactaaacgatgaagactatgtgaaacccgctatgcagacacacgttgggagtaaagaagaggtttatgctggtggatcaagaggttcggttccgcttccagacagcgggatactgatcagcggttgccaaaccgatcagacctctgctgatgcgactccagcggggaaaccaactgaggcttatggagcgatgagcaattcgatacagacgatattggaggagacagacggtgagatatcaaacagagaaatggttacaagggctaggaaggcattgaagaagcaagggtttactcagcagccaggtttgtattgccatgatggttatgccaacgctcctttcatctgttgaaaacagaggttttattgaatgttttttactacacgttgattgaagtttctggtcgcaaaaataagcctgttttttttttgctgtttgatggcatttatgtaatttacaagttatgtgtgttgtgttctgtgaaacactaaaattcttcttgttttattgagatctattatgttggttgtgaaattatttttttttggttttcttttcttgtttaactcttgtgtattctgatttctgcacatcaataagaaaaagttttttttaacgg

SEQ ID NO: 41312 - protein, 442 aa, Arabidopsis thaliana
  peptide (1)..(442): Ceres Seq. ID no. 12395111
  misc_feature (27)..(442): Pfam Name: Caspase domain Pfam Description: Caspase domain
  misc_feature (25)..(442): Homolog of NCBI NO: 32482818 NR Description: metacaspase 4 [Arabidopsis thaliana]
  misc_feature (27)..(442): Homolog of NCBI NO: 34908928 NR Description: putative latex-abundant protein
  misc_feature (25)..(190): Homolog of NCBI NO: 15219340 NR Description: hypothetical protein common family; protein id:
  misc_feature (209)..(442): Homolog of NCBI NO: 15219340 NR Description: hypothetical protein common family; protein id:
  misc_feature (25)..(442): Homolog of NCBI NO: 40644374 NR Description: metacaspase type II [Picea abies]
  misc_feature (25)..(442): Homolog of NCBI NO: 4235430 NR Description: latex-abundant protein [Hevea brasiliensis]
  misc_feature (32)..(442): Homolog of NCBI NO: 23343885 NR Description: metacaspase 1 [Lycopersicon esculentum]
  misc_feature (25)..(442): Homolog of NCBI NO: 15219342 NR Description: hypothetical protein common family; protein id:
  misc_feature (25)..(442): Homolog of NCBI NO: 33304380 NR Description: metacaspase 7 [Arabidopsis thaliana]
  misc_feature (25)..(442): Homolog of NCBI NO: 15219345 NR Description: hypothetical protein common family
EGIGSLTDNPIRFREFNRSDHFLSMTKKAVLIGINYPGTKAELRGCVNDVRRMYKCLVERYGFSEENITVLIDTDESSTQPTGKNIRRALADLVESADSGDVLVVHYSGHGTRLPAETGEDDDTGFDECIVPCDMNLITDDDFRDLVDKVPPGCRMTIISDSCHSGGLIDEAKEQIGESTKKEAEDEDESEESSSRFGFRKFLRSKVEGAIESRGFHIGGNKKDEDEAEEIETKEIELEDGETIHAKDKSLPLQTLIDILKQQTGNDNIEVGKIRPSLFDAFGDDSSPKVKKFMKVILGKLQAGNGEEGGLMGMLGKLASGFLEGKLNDEDYVKPAMQTHVGSKEEVYAGGSRGSVPLPDSGILISGCQTDQTSADATPAGKPTEAYGAMSNSIQTILEETDGEISNREMVTRARKALKKQGFTQQPGLYCHDGYANAPFIC

SEQ ID NO: 41313 - protein, 418 aa, Arabidopsis thaliana
  peptide (1)..(418): Ceres Seq. ID no. 12395112
  misc_feature (3)..(418): Pfam Name: Caspase domain Pfam Description: Caspase domain
  misc_feature (1)..(418): Homolog of NCBI NO: 32482818 NR Description: metacaspase 4 [Arabidopsis thaliana]
  misc_feature (3)..(418): Homolog of NCBI NO: 34908928 NR Description: putative latex-abundant protein
  misc_feature (1)..(166): Homolog of NCBI NO: 15219340 NR Description: hypothetical protein common family; protein id:
  misc_feature (185)..(418): Homolog of NCBI NO: 15219340 NR Description: hypothetical protein common family; protein id:
  misc_feature (1)..(418): Homolog of NCBI NO: 40644374 NR Description: metacaspase type II [Picea abies]
  misc_feature (1)..(418): Homolog of NCBI NO: 4235430 NR Description: latex-abundant protein [Hevea brasiliensis]
  misc_feature (8)..(418): Homolog of NCBI NO: 23343885 NR Description: metacaspase 1 [Lycopersicon esculentum]
  misc_feature (1)..(418): Homolog of NCBI NO: 15219342 NR Description: hypothetical protein common family; protein id:
  misc_feature (1)..(418): Homolog of NCBI NO: 33304380 NR Description: metacaspase 7 [Arabidopsis thaliana]
  misc_feature (1)..(418): Homolog of NCBI NO: 15219345 NR Description: hypothetical protein common family
MTKKAVLIGINYPGTKAELRGCVNDVRRMYKCLVERYGFSEENITVLIDTDESSTQPTGKNIRRALADLVESADSGDVLVVHYSGHGTRLPAETGEDDDTGFDECIVPCDMNLITDDDFRDLVDKVPPGCRMTIISDSCHSGGLIDEAKEQIGESTKKEAEDEDESEESSSRFGFRKFLRSKVEGAIESRGFHIGGNKKDEDEAEEIETKEIELEDGETIHAKDKSLPLQTLIDILKQQTGNDNIEVGKIRPSLFDAFGDDSSPKVKKFMKVILGKLQAGNGEEGGLMGMLGKLASGFLEGKLNDEDYVKPAMQTHVGSKEEVYAGGSRGSVPLPDSGILISGCQTDQTSADATPAGKPTEAYGAMSNSIQTILEETDGEISNREMVTRARKALKKQGFTQQPGLYCHDGYANAPFIC

SEQ ID NO: 41314 - protein, 390 aa, Arabidopsis thaliana
  peptide (1)..(390): Ceres Seq. ID no. 12395113
  misc_feature (1)..(390): Pfam Name: Caspase domain Pfam Description: Caspase domain
  misc_feature (1)..(390): Homolog of NCBI NO: 32482818 NR Description: metacaspase 4 [Arabidopsis thaliana]
  misc_feature (1)..(390): Homolog of NCBI NO: 34908928 NR Description: putative latex-abundant protein
  misc_feature (1)..(138): Homolog of NCBI NO: 15219340 NR Description: hypothetical protein common family; protein id:
  misc_feature (157)..(390): Homolog of NCBI NO: 15219340 NR Description: hypothetical protein common family; protein id:
  misc_feature (1)..(390): Homolog of NCBI NO: 40644374 NR Description: metacaspase type II [Picea abies]
  misc_feature (1)..(390): Homolog of NCBI NO: 4235430 NR Description: latex-abundant protein [Hevea brasiliensis]
  misc_feature (1)..(390): Homolog of NCBI NO: 23343885 NR Description: metacaspase 1 [Lycopersicon esculentum]
  misc_feature (1)..(390): Homolog of NCBI NO: 15219342 NR Description: hypothetical protein common family; protein id:
  misc_feature (1)..(390): Homolog of NCBI NO: 33304380 NR Description: metacaspase 7 [Arabidopsis thaliana]
  misc_feature (1)..(390): Homolog of NCBI NO: 15219345 NR Description: hypothetical protein common family
MYKCLVERYGFSEENITVLIDTDESSTQPTGKNIRRALADLVESADSGDVLVVHYSGHGTRLPAETGEDDDTGFDECIVPCDMNLITDDDFRDLVDKVPPGCRMTIISDSCHSGGLIDEAKEQIGESTKKEAEDEDESEESSSRFGFRKFLRSKVEGAIESRGFHIGGNKKDEDEAEEIETKEIELEDGETIHAKDKSLPLQTLIDILKQQTGNDNIEVGKIRPSLFDAFGDDSSPKVKKFMKVILGKLQAGNGEEGGLMGMLGKLASGFLEGKLNDEDYVKPAMQTHVGSKEEVYAGGSRGSVPLPDSGILISGCQTDQTSADATPAGKPTEAYGAMSNSIQTILEETDGEISNREMVTRARKALKKQGFTQQPGLYCHDGYANAPFIC

SEQ ID NO: 41315 - DNA, 1527 bp, Arabidopsis thaliana
  misc_feature (1)..(1527): Ceres Seq. ID no. 12330695
  misc_feature: MA Experiment ID: 108573 Result: Up-regulated in Transcription
  misc_feature: MA Experiment 108573 PARAMETER Experiment Name: At_Drought_cDNA_P Parameter: Timepoint (hr) Value: 6
  misc_feature: MA Experiment 108573 PARAMETER Experiment Name: At_Drought_cDNA_P Parameter: Tissue Value: Aerial
  misc_feature: MA Experiment 108573 PARAMETER Experiment Name: At_Drought_cDNA_P Parameter: Treatment Value: Drought vs. No Drought
  misc_feature: MA Experiment ID: 108577 Result: Down-regulated in Transcription
  misc_feature: MA Experiment 108577 PARAMETER Experiment Name: At_42deg_Heat_cDNA_P Parameter: Temperature (deg C) Value: 42 vs. 22
  misc_feature: MA Experiment 108577 PARAMETER Experiment Name: At_42deg_Heat_cDNA_P Parameter: Timepoint (hr) Value: 6
  misc_feature: MA Experiment 108577 PARAMETER Experiment Name: At_42deg_Heat_cDNA_P Parameter: Tissue Value: Aerial
aaaaatctttcgggtcaaaatttccgaaccctaactttagccccaaattagagagagatgcagaaacgggagcttgggaaatccggcggtaattccggtggatcttcgggtccaccagcgaagagaggccgtcccttcggtagtacaagtgctaactcagctgctgctgctgcagcggcggcagcagcggacgcgatgtcaccgtcagctttacttggtccttctcttctagttcacaattccttcgtcgagcagaacaatagaagaatagttcttgcgttgcagagtggtttgaagagtgaggtgacatgggcattgaacacacttacgttgctttccttcaaggaaaaagaagatattcgaagagatgtcatgcctcttgctaagatagctggcttgcttgatgcccttctcttaattatagatgattggcgtgacatagctctcccaaaggacctgacaagagggactagagttagaactttaggtacaaatgcttcagttacgggatttggcaatgagtatgatgctctagcctctattcaaccccctggatccgggattggttcttctgctgctgaggcattaggaaaaaagagcactggtaaacatcagtcatctcagtggtggatggaagaggatggtttgtttaatctagacgatgaagggagatcagagaaacaaatgtgtgctattgctgcatcgaacgttatccgcaacttctccttcatgcctgataatgaagttgtaatggctcagcatcgccattgcttagaaactgttttccagtgcatacacgatcatatgaccgaggatgaagagctggtcacaaactcgctagagacaattgtaaacctagcgcatttgatggatcttcgaattttcagctcgcttaagcagtcatacatcaacataaatgaaaagaaagctgttcaagctgtggtcggaatcctcaattcttctgtcaaagcttggaattgtgctgctgctgagttgctagggcgtttgataatcaatccggacaatgaacctttcattagtcctttaattccgcagatacacaagcgactaatcgatcttttgagcatacaagccgttgatgcacaagctgcagctgttggagcactctacaatctcgtggaagttaacatggattgcagattaaagctagcaagtgagagatgggcggttgataggttgctgaaagtgataaagactccgcatccggttccagaagtatgtaggaaagctgcaatgatccttgagaaccttgtctcggagcctcaaaacagaggattgctactcgcgtatgagaatgctttcgctgagctgctttttcaagagggtaagtattctgattcatttgctaggattttgtatgaactcactgctagatctaatagcagagttgcttcagctagaggaatctggggcatgtaaaagtcttctctagattagtgggtttgattaattgattgtgttgtaaactttaatcatttgctatgtattaaaaaagcagtgttgttg

SEQ ID NO: 41316 - protein, 460 aa, Arabidopsis thaliana
  peptide (1)..(460): Ceres Seq. ID no. 12330696
  misc_feature (7)..(459): Homolog of NCBI NO: 14192867 NR Description: Unknown protein [Oryza sativa]
  misc_feature (1)..(460): Homolog of NCBI NO: 21537098 NR Description: unknown [Arabidopsis thaliana]
  misc_feature (1)..(460): Homolog of NCBI NO: 18403609 NR Description: expressed protein
MQKRELGKSGGNSGGSSGPPAKRGRPFGSTSANSAAAAAAAAAADAMSPSALLGPSLLVHNSFVEQNNRRIVLALQSGLKSEVTWALNTLTLLSFKEKEDIRRDVMPLAKIAGLLDALLLIIDDWRDIALPKDLTRGTRVRTLGTNASVTGFGNEYDALASIQPPGSGIGSSAAEALGKKSTGKHQSSQWWMEEDGLFNLDDEGRSEKQMCAIAASNVIRNFSFMPDNEVVMAQHRHCLETVFQCIHDHMTEDEELVTNSLETIVNLAHLMDLRIFSSLKQSYININEKKAVQAVVGILNSSVKAWNCAAAELLGRLIINPDNEPFISPLIPQIHKRLIDLLSIQAVDAQAAAVGALYNLVEVNMDCRLKLASERWAVDRLLKVIKTPHPVPEVCRKAAMILENLVSEPQNRGLLLAYENAFAELLFQEGKYSDSFARILYELTARSNSRVASARGIWGM

SEQ ID NO: 41317 - protein, 414 aa, Arabidopsis thaliana
  peptide (1)..(414): Ceres Seq. ID no. 12330697
  misc_feature (1)..(413): Homolog of NCBI NO: 14192867 NR Description: Unknown protein [Oryza sativa]
  misc_feature (1)..(414): Homolog of NCBI NO: 21537098 NR Description: unknown [Arabidopsis thaliana]
  misc_feature (1)..(414): Homolog of NCBI NO: 18403609 NR Description: expressed protein
MSPSALLGPSLLVHNSFVEQNNRRIVLALQSGLKSEVTWALNTLTLLSFKEKEDIRRDVMPLAKIAGLLDALLLIIDDWRDIALPKDLTRGTRVRTLGTNASVTGFGNEYDALASIQPPGSGIGSSAAEALGKKSTGKHQSSQWWMEEDGLFNLDDEGRSEKQMCAIAASNVIRNFSFMPDNEVVMAQHRHCLETVFQCIHDHMTEDEELVTNSLETIVNLAHLMDLRIFSSLKQSYININEKKAVQAVVGILNSSVKAWNCAAAELLGRLIINPDNEPFISPLIPQIHKRLIDLLSIQAVDAQAAAVGALYNLVEVNMDCRLKLASERWAVDRLLKVIKTPHPVPEVCRKAAMILENLVSEPQNRGLLLAYENAFAELLFQEGKYSDSFARILYELTARSNSRVASARGIWGM

SEQ ID NO: 41318 - protein, 355 aa, Arabidopsis thaliana
  peptide (1)..(355): Ceres Seq. ID no. 12330698
  misc_feature (1)..(354): Homolog of NCBI NO: 14192867 NR Description: Unknown protein [Oryza sativa]
  misc_feature (1)..(355): Homolog of NCBI NO: 21537098 NR Description: unknown [Arabidopsis thaliana]
  misc_feature (1)..(355): Homolog of NCBI NO: 18403609 NR Description: expressed protein
MPLAKIAGLLDALLLIIDDWRDIALPKDLTRGTRVRTLGTNASVTGFGNEYDALASIQPPGSGIGSSAAEALGKKSTGKHQSSQWWMEEDGLFNLDDEGRSEKQMCAIAASNVIRNFSFMPDNEVVMAQHRHCLETVFQCIHDHMTEDEELVTNSLETIVNLAHLMDLRIFSSLKQSYININEKKAVQAVVGILNSSVKAWNCAAAELLGRLIINPDNEPFISPLIPQIHKRLIDLLSIQAVDAQAAAVGALYNLVEVNMDCRLKLASERWAVDRLLKVIKTPHPVPEVCRKAAMILENLVSEPQNRGLLLAYENAFAELLFQEGKYSDSFARILYELTARSNSRVASARGIWGM

SEQ ID NO: 41319 - DNA, 1387 bp, Arabidopsis thaliana; identical to SEQ ID NO: 39947
  misc_feature (1)..(1387): Ceres Seq. ID no. 13575410
  misc_feature: MA Experiment ID: 108595 Result: Down-regulated in Transcription
  misc_feature: MA Experiment 108595 PARAMETER Experiment Name: At_Ler-pi_Ovule_cDNA_P Parameter: Plant Line Value: null
  misc_feature: MA Experiment ID: 20000179 Result: Up-regulated in Transcription
  misc_feature: MA Experiment 20000179 PARAMETER Experiment Name: At_Germinating_Seeds_P Parameter: Age (hr) Value: 6 vs. 0
  misc_feature: MA Experiment 20000179 PARAMETER Experiment Name: At_Germinating_Seeds_P Parameter: Tissue Value: Germinating Seeds
  misc_feature: MA Experiment ID: 20000265 Result: Up-regulated in Transcription
  misc_feature: MA Experiment 20000265 PARAMETER Experiment Name: At_Open_Flower_P Parameter: Age (day) Value: 21
  misc_feature: MA Experiment 20000265 PARAMETER Experiment Name: At_Open_Flower_P Parameter: Plant Line Value: WS
  misc_feature: MA Experiment 20000265 PARAMETER Experiment Name: At_Open_Flower_P Parameter: Tissue Value: Closed Flower vs. Whole Plant
  misc_feature: MA Experiment ID: 20000495 Result: Up-regulated in Transcription
  misc_feature: MA Experiment 20000495 PARAMETER Experiment Name: At_Guard_Cells_P Parameter: Harvest Date Value: 8/2/2002
  misc_feature: MA Experiment 20000495 PARAMETER Experiment Name: At_Guard_Cells_P Parameter: Organism Value: A. thaliana
  misc_feature: MA Experiment 20000495 PARAMETER Experiment Name: At_Guard_Cells_P Parameter: Tissue Value: Guard Cells vs. Leaves

SEQ ID NO: 41320 - protein, 396 aa, Arabidopsis thaliana; identical to SEQ ID NO: 39948
  peptide (1)..(396): Ceres Seq. ID no. 13575411
  misc_feature (9)..(161): Homolog of NCBI NO: 25371182 NR Description: hypothetical protein At2g01220 [imported] -
  misc_feature (319)..(392): Homolog of NCBI NO: 34911372 NR Description: P0034C09.17 [Oryza sativa (japonica
  misc_feature (14)..(104): Homolog of NCBI NO: 34911372 NR Description: P0034C09.17 [Oryza sativa (japonica
  misc_feature (159)..(279): Homolog of NCBI NO: 34911372 NR Description: P0034C09.17 [Oryza sativa (japonica
  misc_feature (9)..(393): Homolog of NCBI NO: 9294466 NR Description: gb|AAD14522.1~gene_id:MGF10.2~similar to unknown
  misc_feature (9)..(393): Homolog of NCBI NO: 15232221 NR Description: expressed protein [Arabidopsis thaliana]
  misc_feature (9)..(396): Homolog of NCBI NO: 21537099 NR Description: unknown [Arabidopsis thaliana]
  misc_feature (9)..(396): Homolog of NCBI NO: 30677890 NR Description: expressed protein [Arabidopsis thaliana]
  misc_feature (9)..(396): Homolog of NCBI NO: 26451899 NR Description: unknown protein [Arabidopsis thaliana]
  misc_feature (9)..(396): Homolog of NCBI NO: 30677893 NR Description: expressed protein [Arabidopsis thaliana]
  misc_feature (9)..(161): Homolog of NCBI NO: 25371182 NR Description: hypothetical protein At2g01220 [imported] -
  misc_feature (319)..(392): Homolog of NCBI NO: 34911372 NR Description: P0034C09.17 [Oryza sativa (japonica
  misc_feature (14)..(104): Homolog of NCBI NO: 34911372 NR Description: P0034C09.17 [Oryza sativa (japonica
  misc_feature (159)..(279): Homolog of NCBI NO: 34911372 NR Description: P0034C09.17 [Oryza sativa (japonica
  misc_feature (9)..(393): Homolog of NCBI NO: 9294466 NR Description: gb|AAD14522.1~gene_id:MGF10.2~similar to unknown
  misc_feature (9)..(393): Homolog of NCBI NO: 15232221 NR Description: expressed protein [Arabidopsis thaliana]
  misc_feature (9)..(396): Homolog of NCBI NO: 21537099 NR Description: unknown [Arabidopsis thaliana]
  misc_feature (9)..(396): Homolog of NCBI NO: 30677890 NR Description: expressed protein [Arabidopsis thaliana]
  misc_feature (9)..(396): Homolog of NCBI NO: 26451899 NR Description: unknown protein [Arabidopsis thaliana]
  misc_feature (9)..(396): Homolog of NCBI NO: 30677893 NR Description: expressed protein [Arabidopsis thaliana]

SEQ ID NO: 41321 - protein, 388 aa, Arabidopsis thaliana; identical to SEQ ID NO: 39949
  peptide (1)..(388): Ceres Seq. ID no. 13575412
  misc_feature (1)..(153): Homolog of NCBI NO: 25371182 NR Description: hypothetical protein At2g01220 [imported] -
  misc_feature (311)..(384): Homolog of NCBI NO: 34911372 NR Description: P0034C09.17 [Oryza sativa (japonica
  misc_feature (6)..(96): Homolog of NCBI NO: 34911372 NR Description: P0034C09.17 [Oryza sativa (japonica
  misc_feature (151)..(271): Homolog of NCBI NO: 34911372 NR Description: P0034C09.17 [Oryza sativa (japonica
  misc_feature (1)..(385): Homolog of NCBI NO: 9294466 NR Description: gb|AAD14522.1~gene_id:MGF10.2~similar to unknown
  misc_feature (1)..(385): Homolog of NCBI NO: 15232221 NR Description: expressed protein [Arabidopsis thaliana]
  misc_feature (1)..(388): Homolog of NCBI NO: 21537099 NR Description: unknown [Arabidopsis thaliana]
  misc_feature (1)..(388): Homolog of NCBI NO: 30677890 NR Description: expressed protein [Arabidopsis thaliana]
  misc_feature (1)..(388): Homolog of NCBI NO: 26451899 NR Description: unknown protein [Arabidopsis thaliana]
  misc_feature (1)..(388): Homolog of NCBI NO: 30677893 NR Description: expressed protein [Arabidopsis thaliana]
  misc_feature (1)..(153): Homolog of NCBI NO: 25371182 NR Description: hypothetical protein At2g01220 [imported] -
  misc_feature (311)..(384): Homolog of NCBI NO: 34911372 NR Description: P0034C09.17 [Oryza sativa (japonica
  misc_feature (6)..(96): Homolog of NCBI NO: 34911372 NR Description: P0034C09.17 [Oryza sativa (japonica
  misc_feature (151)..(271): Homolog of NCBI NO: 34911372 NR Description: P0034C09.17 [Oryza sativa (japonica
  misc_feature (1)..(385): Homolog of NCBI NO: 9294466 NR Description: gb|AAD14522.1~gene_id:MGF10.2~similar to unknown
  misc_feature (1)..(385): Homolog of NCBI NO: 15232221 NR Description: expressed protein [Arabidopsis thaliana]
  misc_feature (1)..(388): Homolog of NCBI NO: 21537099 NR Description: unknown [Arabidopsis thaliana]
  misc_feature (1)..(388): Homolog of NCBI NO: 30677890 NR Description: expressed protein [Arabidopsis thaliana]
  misc_feature (1)..(388): Homolog of NCBI NO: 26451899 NR Description: unknown protein [Arabidopsis thaliana]
  misc_feature (1)..(388): Homolog of NCBI NO: 30677893 NR Description: expressed protein [Arabidopsis thaliana]

SEQ ID NO: 41322 - protein, 353 aa, Arabidopsis thaliana; identical to SEQ ID NO: 39950
  peptide (1)..(353): Ceres Seq. ID no. 13575413
  misc_feature (1)..(118): Homolog of NCBI NO: 25371182 NR Description: hypothetical protein At2g01220 [imported] -
  misc_feature (276)..(349): Homolog of NCBI NO: 34911372 NR Description: P0034C09.17 [Oryza sativa (japonica
  misc_feature (1)..(61): Homolog of NCBI NO: 34911372 NR Description: P0034C09.17 [Oryza sativa (japonica
  misc_feature (116)..(236): Homolog of NCBI NO: 34911372 NR Description: P0034C09.17 [Oryza sativa (japonica
  misc_feature (1)..(350): Homolog of NCBI NO: 9294466 NR Description: gb|AAD14522.1~gene_id:MGF10.2~similar to unknown
  misc_feature (1)..(350): Homolog of NCBI NO: 15232221 NR Description: expressed protein [Arabidopsis thaliana]
  misc_feature (1)..(353): Homolog of NCBI NO: 21537099 NR Description: unknown [Arabidopsis thaliana]
  misc_feature (1)..(353): Homolog of NCBI NO: 30677890 NR Description: expressed protein [Arabidopsis thaliana]
  misc_feature (1)..(353): Homolog of NCBI NO: 26451899 NR Description: unknown protein [Arabidopsis thaliana]
  misc_feature (1)..(353): Homolog of NCBI NO: 30677893 NR Description: expressed protein [Arabidopsis thaliana]
  misc_feature (1)..(118): Homolog of NCBI NO: 25371182 NR Description: hypothetical protein At2g01220 [imported] -
  misc_feature (276)..(349): Homolog of NCBI NO: 34911372 NR Description: P0034C09.17 [Oryza sativa (japonica
  misc_feature (1)..(61): Homolog of NCBI NO: 34911372 NR Description: P0034C09.17 [Oryza sativa (japonica
  misc_feature (116)..(236): Homolog of NCBI NO: 34911372 NR Description: P0034C09.17 [Oryza sativa (japonica
  misc_feature (1)..(350): Homolog of NCBI NO: 9294466 NR Description: gb|AAD14522.1~gene_id:MGF10.2~similar to unknown
  misc_feature (1)..(350): Homolog of NCBI NO: 15232221 NR Description: expressed protein [Arabidopsis thaliana]
  misc_feature (1)..(353): Homolog of NCBI NO: 21537099 NR Description: unknown [Arabidopsis thaliana]
  misc_feature (1)..(353): Homolog of NCBI NO: 30677890 NR Description: expressed protein [Arabidopsis thaliana]
  misc_feature (1)..(353): Homolog of NCBI NO: 26451899 NR Description: unknown protein [Arabidopsis thaliana]
  misc_feature (1)..(353): Homolog of NCBI NO: 30677893 NR Description: expressed protein [Arabidopsis thaliana]

SEQ ID NO: 41323 - DNA, 1676 bp, Arabidopsis thaliana
  misc_feature (1)..(1676): Ceres Seq. ID no. 13489621
  misc_feature: MA Experiment ID: 108435 Result: Down-regulated in Transcription
  misc_feature: MA Experiment 108435 PARAMETER Experiment Name: At_stm_Mutants_cDNA_P Parameter: Plant Line Value: wt Landsburg vs stm
  misc_feature: MA Experiment 108435 PARAMETER Experiment Name: At_stm_Mutants_cDNA_P Parameter: Tissue Value: Shoot Apical Meristem Region
  misc_feature: MA Experiment ID: 108461 Result: Down-regulated in Transcription
  misc_feature: MA Experiment 108461 PARAMETER Experiment Name: At_Germinating_Seeds_cDNA_P Parameter: Age (day) Value: 1 vs. 0
  misc_feature: MA Experiment 108461 PARAMETER Experiment Name: At_Germinating_Seeds_cDNA_P Parameter: Tissue Value: Germinating Seeds
  misc_feature: MA Experiment ID: 108561 Result: Up-regulated in Transcription
  misc_feature: MA Experiment 108561 PARAMETER Experiment Name: At_100uM_ABA_cDNA_P Parameter: Timepoint (hr) Value: 6
  misc_feature: MA Experiment 108561 PARAMETER Experiment Name: At_100uM_ABA_cDNA_P Parameter: Tissue Value: Aerial
  misc_feature: MA Experiment 108561 PARAMETER Experiment Name: At_100uM_ABA_cDNA_P Parameter: Treatment Value: 100uM ABA vs. No Treatment
  misc_feature: MA Experiment ID: 108572 Result: Up-regulated in Transcription
  misc_feature: MA Experiment 108572 PARAMETER Experiment Name: At_Drought_cDNA_P Parameter: Timepoint (hr) Value: 1
  misc_feature: MA Experiment 108572 PARAMETER Experiment Name: At_Drought_cDNA_P Parameter: Tissue Value: Aerial
  misc_feature: MA Experiment 108572 PARAMETER Experiment Name: At_Drought_cDNA_P Parameter: Treatment Value: Drought vs. No Drought
  misc_feature: MA Experiment ID: 108573 Result: Up-regulated in Transcription
  misc_feature: MA Experiment 108573 PARAMETER Experiment Name: At_Drought_cDNA_P Parameter: Timepoint (hr) Value: 6
  misc_feature: MA Experiment 108573 PARAMETER Experiment Name: At_Drought_cDNA_P Parameter: Tissue Value: Aerial
  misc_feature: MA Experiment 108573 PARAMETER Experiment Name: At_Drought_cDNA_P Parameter: Treatment Value: Drought vs. No Drought
  misc_feature: MA Experiment ID: 108574 Result: Up-regulated in Transcription
  misc_feature: MA Experiment 108574 PARAMETER Experiment Name: At_Wounding__cDNA_P Parameter: Timepoint (hr) Value: 1
  misc_feature: MA Experiment 108574 PARAMETER Experiment Name: At_Wounding__cDNA_P Parameter: Tissue Value: Aerial
  misc_feature: MA Experiment 108574 PARAMETER Experiment Name: At_Wounding__cDNA_P Parameter: Treatment Value: Wounding vs. No Wounding
  misc_feature: MA Experiment ID: 108607 Result: Up-regulated in Transcription
  misc_feature: MA Experiment 108607 PARAMETER Experiment Name: At_100uM_ABA_cDNA_P Parameter: Timepoint (hr) Value: 4
  misc_feature: MA Experiment 108607 PARAMETER Experiment Name: At_100uM_ABA_cDNA_P Parameter: Tissue Value: Aerial
  misc_feature: MA Experiment 108607 PARAMETER Experiment Name: At_100uM_ABA_cDNA_P Parameter: Treatment Value: 100uM ABA vs. No Treatment
  misc_feature: MA Experiment ID: 108608 Result: Up-regulated in Transcription
  misc_feature: MA Experiment 108608 PARAMETER Experiment Name: At_100uM_ABA_cDNA_P Parameter: Timepoint (hr) Value: 1
  misc_feature: MA Experiment 108608 PARAMETER Experiment Name: At_100uM_ABA_cDNA_P Parameter: Tissue Value: Aerial
  misc_feature: MA Experiment 108608 PARAMETER Experiment Name: At_100uM_ABA_cDNA_P Parameter: Treatment Value: 100uM ABA vs. No Treatment
  misc_feature: MA Experiment ID: 108667 Result: Up-regulated in Transcription
  misc_feature: MA Experiment 108667 PARAMETER Experiment Name: At_2mM_SA_cDNA_P Parameter: Plant Line Value: WS
  misc_feature: MA Experiment 108667 PARAMETER Experiment Name: At_2mM_SA_cDNA_P Parameter: Timepoint (hr) Value: 1
  misc_feature: MA Experiment 108667 PARAMETER Experiment Name: At_2mM_SA_cDNA_P Parameter: Treatment Value: 2mM SA vs. No Treatment
  misc_feature: MA Experiment ID: 20000072 Result: Up-regulated in Transcription
  misc_feature: MA Experiment 20000072 PARAMETER Experiment Name: At_100uM_ABA_Mutants_cDNA_P Parameter: Plant Line Value: CS8105
  misc_feature: MA Experiment 20000072 PARAMETER Experiment Name: At_100uM_ABA_Mutants_cDNA_P Parameter: Timepoint (hr) Value: 6
  misc_feature: MA Experiment 20000072 PARAMETER Experiment Name: At_100uM_ABA_Mutants_cDNA_P Parameter: Tissue Value: Aerial
  misc_feature: MA Experiment 20000072 PARAMETER Experiment Name: At_100uM_ABA_Mutants_cDNA_P Parameter: Treatment Value: 100uM ABA vs. No Treatment
  misc_feature: MA Experiment ID: 20000087 Result: Up-regulated in Transcription
  misc_feature: MA Experiment 20000087 PARAMETER Experiment Name: At_100uM_ABA_Mutants_cDNA_P Parameter: Plant Line Value: WS
  misc_feature: MA Experiment 20000087 PARAMETER Experiment Name: At_100uM_ABA_Mutants_cDNA_P Parameter: Timepoint (hr) Value: 6
  misc_feature: MA Experiment 20000087 PARAMETER Experiment Name: At_100uM_ABA_Mutants_cDNA_P Parameter: Tissue Value: Aerial
  misc_feature: MA Experiment 20000087 PARAMETER Experiment Name: At_100uM_ABA_Mutants_cDNA_P Parameter: Treatment Value: 100uM ABA vs. No Treatment
  misc_feature: MA Experiment ID: 20000224 Result: Up-regulated in Transcription
  misc_feature: MA Experiment ID: 20000347 Result: Up-regulated in Transcription
  misc_feature: MA Experiment 20000347 PARAMETER Experiment Name: At_2mM_SA_Sub_P Parameter: Age (day) Value: 14
  misc_feature: MA Experiment 20000347 PARAMETER Experiment Name: At_2mM_SA_Sub_P Parameter: Organism Value: A. thaliana
  misc_feature: MA Experiment 20000347 PARAMETER Experiment Name: At_2mM_SA_Sub_P Parameter: Plant Line Value: WS
  misc_feature: MA Experiment 20000347 PARAMETER Experiment Name: At_2mM_SA_Sub_P Parameter: Timepoint (hr) Value: 6
  misc_feature: MA Experiment 20000347 PARAMETER Experiment Name: At_2mM_SA_Sub_P Parameter: Tissue Value: Aerial
  misc_feature: MA Experiment 20000347 PARAMETER Experiment Name: At_2mM_SA_Sub_P Parameter: Treatment Value: 2mM SA vs. No Treatment
  misc_feature: MA Experiment ID: 20000348 Result: Up-regulated in Transcription
  misc_feature: MA Experiment 20000348 PARAMETER Experiment Name: At_100uM_ABA_Sub_P Parameter: Age (day) Value: 14
  misc_feature: MA Experiment 20000348 PARAMETER Experiment Name: At_100uM_ABA_Sub_P Parameter: Organism Value: A. thaliana
  misc_feature: MA Experiment 20000348 PARAMETER Experiment Name: At_100uM_ABA_Sub_P Parameter: Plant Line Value: WS
  misc_feature: MA Experiment 20000348 PARAMETER Experiment Name: At_100uM_ABA_Sub_P Parameter: Timepoint (hr) Value: 1
  misc_feature: MA Experiment 20000348 PARAMETER Experiment Name: At_100uM_ABA_Sub_P Parameter: Tissue Value: Aerial
  misc_feature: MA Experiment 20000348 PARAMETER Experiment Name: At_100uM_ABA_Sub_P Parameter: Treatment Value: 100uM ABA vs. No Treatment
  misc_feature: MA Experiment ID: 20000355 Result: Up-regulated in Transcription
  misc_feature: MA Experiment 20000355 PARAMETER Experiment Name: At_Siliques_Sub_P Parameter: Age (day) Value: 21
  misc_feature: MA Experiment 20000355 PARAMETER Experiment Name: At_Siliques_Sub_P Parameter: Organism Value: A. thaliana
  misc_feature: MA Experiment 20000355 PARAMETER Experiment Name: At_Siliques_Sub_P Parameter: Plant Line Value: WS
  misc_feature: MA Experiment 20000355 PARAMETER Experiment Name: At_Siliques_Sub_P Parameter: Tissue Value: Less Than 5mm Siliques vs. Whole Plant
  misc_feature: MA Experiment ID: 20000440 Result: Up-regulated in Transcription
  misc_feature: MA Experiment 20000440 PARAMETER Experiment Name: At_Closed-Flower__Sub_P Parameter: Tissue Value: Closed Flower vs. Whole Plant
aagaaaaacgaaatacagatgaaacaatgtccacaagtctgagaatctgatatttatctcagaaacatactcattttaatattctcatagatcggtcacagggaagaaaagaaattggaggaccaaattcggaaagcacgaggcagagcagttcttgtaaattttcgaaatggaggaaaagccggcgggcagaagagtagtgttggttgcagttccagctcaaggacatatctctccaataatgcaacttgcaaaaacacttcacttgaagggtttctcaatcacaatcgctcagacaaagttcaattactttagcccttcagatgacttcactgattttcagtttgtcaccattccagaaagcttaccagagtctgattttgaggatctcgggccaatagagtttctgcataagctcaacaaagagtgtcaggtgagcttcaaagactgtttgggtcagttgttgctgcaacaaggtaatgagatagcctgtgttgtctacgacgagttcatgtactttgctgaagctgcagccaaagagtttaagcttccaaacgtcattttcagcaccacaagtgccacggcttttgtttgccgctctgcattcgacaaactttatgcaaacagtatcctgactcccttgaaagaacccaaaggacaacaaaacgagctagtgccagagtttcatcccctgagatgcaaagactttccggtttcacattgggcatcattagaaagcatgatggagctgtataggaatacagttgacaaacggacagcttcctcggtgataatcaacacagcgagctgtctagagagctcatctctgtctcgtctgcagcaacagctacaaattccagtttatcctataggccctcttcacctggtggcatcagcttctacgagtcttcttgaagagaacaagagctgtattgaatggttgaacaaacaaaagaaaaactctgtgatattcgtaagcttgggaagcttagctttgatggaaatcaatgaggtgatagaaactgctttgggattggatagtagcaagcaacagttcttgtgggtcattcggccagggtcagtacgtggttcggaatggatagagaacttgcctaaggagtttagtaagataatttcgggtcgaggttacattgtgaaatgggctccacagaaggaagtactttctcatcctgcagtaggaggattttggagccattgcggatggaactcgacactagagagcatcggggaaggagttccaatgatttgcaagccgttttccagtgatcaaatggtgaatgcgagatacttggagtgtgtatggaaaattgggattcaagttgagggtgatctagacagaggagcggtcgagagagctgtgaggaggttaatggtggaggaagaaggggaggggatgaggaagagagctatcagtttgaaagagcaacttagagcctctgttataagtggaggttcttcacacaactcgctagaggagtttgtacactacatgaggactctatgaagacttttgtctttactaaaacaccaaaacttcaagattcctctttcaactattccaagttgtttttagagaaagtatcatatcctaaaatatctaagtgatgccaagatgtatttggataaatgaatgaacaaagccatttcattgtgtt

SEQ ID NO: 41324 - protein, 451 aa, Arabidopsis thaliana
  peptide (1)..(451): Ceres Seq. ID no. 13489622
  misc_feature (9)..(451): Pfam Name: UDP-glucoronosyl and UDP-glucosyl transferase Pfam Description: UDP-glucoronosyl and UDP-glucosyl transferase
  misc_feature (1)..(450): Homolog of NCBI NO: 15232620 NR Description: glucuronosyl transferase-related protein
  misc_feature (1)..(448): Homolog of NCBI NO: 15232619 NR Description: UDP-glycosyltransferase family [Arabidopsis
  misc_feature (1)..(445): Homolog of NCBI NO: 15240825 NR Description: glycosyltransferase family [Arabidopsis thaliana]
  misc_feature (1)..(448): Homolog of NCBI NO: 15238467 NR Description: glycosyltransferase family [Arabidopsis thaliana]
  misc_feature (1)..(445): Homolog of NCBI NO: 15240822 NR Description: glucosyltransferase-related protein [Arabidopsis
  misc_feature (1)..(451): Homolog of NCBI NO: 30697251 NR Description: glycosyltransferase family [Arabidopsis thaliana]
  misc_feature (1)..(451): Homolog of NCBI NO: 11258169 NR Description: glucosyltransferase-like protein - Arabidopsis
  misc_feature (1)..(451): Homolog of NCBI NO: 18408251 NR Description: glucosyltransferase-related protein [Arabidopsis
  misc_feature (1)..(451): Homolog of NCBI NO: 21537102 NR Description: glucosyltransferase-like protein [Arabidopsis
  misc_feature (1)..(451): Homolog of NCBI NO: 15232618 NR Description: glucosyltransferase-related protein [Arabidopsis
MEEKPAGRRVVLVAVPAQGHISPIMQLAKTLHLKGFSITIAQTKFNYFSPSDDFTDFQFVTIPESLPESDFEDLGPIEFLHKLNKECQVSFKDCLGQLLLQQGNEIACVVYDEFMYFAEAAAKEFKLPNVIFSTTSATAFVCRSAFDKLYANSILTPLKEPKGQQNELVPEFHPLRCKDFPVSHWASLESMMELYRNTVDKRTASSVIINTASCLESSSLSRLQQQLQIPVYPIGPLHLVASASTSLLEENKSCIEWLNKQKKNSVIFVSLGSLALMEINEVIETALGLDSSKQQFLWVIRPGSVRGSEWIENLPKEFSKIISGRGYIVKWAPQKEVLSHPAVGGFWSHCGWNSTLESIGEGVPMICKPFSSDQMVNARYLECVWKIGIQVEGDLDRGAVERAVRRLMVEEEGEGMRKRAISLKEQLRASVISGGSSHNSLEEFVHYMRTL

SEQ ID NO: 41325 - protein, 427 aa, Arabidopsis thaliana
  peptide (1)..(427): Ceres Seq. ID no. 13489623
  misc_feature (1)..(427): Pfam Name: UDP-glucoronosyl and UDP-glucosyl transferase Pfam Description: UDP-glucoronosyl and UDP-glucosyl transferase
  misc_feature (1)..(426): Homolog of NCBI NO: 15232620 NR Description: glucuronosyl transferase-related protein
  misc_feature (1)..(424): Homolog of NCBI NO: 15232619 NR Description: UDP-glycosyltransferase family [Arabidopsis
  misc_feature (1)..(421): Homolog of NCBI NO: 15240825 NR Description: glycosyltransferase family [Arabidopsis thaliana]
  misc_feature (1)..(424): Homolog of NCBI NO: 15238467 NR Description: glycosyltransferase family [Arabidopsis thaliana]
  misc_feature (1)..(421): Homolog of NCBI NO: 15240822 NR Description: glucosyltransferase-related protein [Arabidopsis
  misc_feature (1)..(427): Homolog of NCBI NO: 30697251 NR Description: glycosyltransferase family [Arabidopsis thaliana]
  misc_feature (1)..(427): Homolog of NCBI NO: 11258169 NR Description: glucosyltransferase-like protein - Arabidopsis
  misc_feature (1)..(427): Homolog of NCBI NO: 18408251 NR Description: glucosyltransferase-related protein [Arabidopsis
  misc_feature (1)..(427): Homolog of NCBI NO: 21537102 NR Description: glucosyltransferase-like protein [Arabidopsis
  misc_feature (1)..(427): Homolog of NCBI NO: 15232618 NR Description: glucosyltransferase-related protein [Arabidopsis
MQLAKTLHLKGFSITIAQTKFNYFSPSDDFTDFQFVTIPESLPESDFEDLGPIEFLHKLNKECQVSFKDCLGQLLLQQGNEIACVVYDEFMYFAEAAAKEFKLPNVIFSTTSATAFVCRSAFDKLYANSILTPLKEPKGQQNELVPEFHPLRCKDFPVSHWASLESMMELYRNTVDKRTASSVIINTASCLESSSLSRLQQQLQIPVYPIGPLHLVASASTSLLEENKSCIEWLNKQKKNSVIFVSLGSLALMEINEVIETALGLDSSKQQFLWVIRPGSVRGSEWIENLPKEFSKIISGRGYIVKWAPQKEVLSHPAVGGFWSHCGWNSTLESIGEGVPMICKPFSSDQMVNARYLECVWKIGIQVEGDLDRGAVERAVRRLMVEEEGEGMRKRAISLKEQLRASVISGGSSHNSLEEFVHYMRTL

SEQ ID NO: 41326 - protein, 337 aa, Arabidopsis thaliana
  peptide (1)..(337): Ceres Seq. ID no. 13489624
  misc_feature (1)..(337): Pfam Name: UDP-glucoronosyl and UDP-glucosyl transferase Pfam Description: UDP-glucoronosyl and UDP-glucosyl transferase
  misc_feature (1)..(336): Homolog of NCBI NO: 15232620 NR Description: glucuronosyl transferase-related protein
  misc_feature (1)..(334): Homolog of NCBI NO: 15232619 NR Description: UDP-glycosyltransferase family [Arabidopsis
  misc_feature (1)..(331): Homolog of NCBI NO: 15240825 NR Description: glycosyltransferase family [Arabidopsis thaliana]
  misc_feature (1)..(334): Homolog of NCBI NO: 15238467 NR Description: glycosyltransferase family [Arabidopsis thaliana]
  misc_feature (1)..(331): Homolog of NCBI NO: 15240822 NR Description: glucosyltransferase-related protein [Arabidopsis
  misc_feature (1)..(337): Homolog of NCBI NO: 30697251 NR Description: glycosyltransferase family [Arabidopsis thaliana]
  misc_feature (1)..(337): Homolog of NCBI NO: 11258169 NR Description: glucosyltransferase-like protein - Arabidopsis
  misc_feature (1)..(337): Homolog of NCBI NO: 18408251 NR Description: glucosyltransferase-related protein [Arabidopsis
  misc_feature (1)..(337): Homolog of NCBI NO: 21537102 NR Description: glucosyltransferase-like protein [Arabidopsis
  misc_feature (1)..(337): Homolog of NCBI NO: 15232618 NR Description: glucosyltransferase-related protein [Arabidopsis
MYFAEAAAKEFKLPNVIFSTTSATAFVCRSAFDKLYANSILTPLKEPKGQQNELVPEFHPLRCKDFPVSHWASLESMMELYRNTVDKRTASSVIINTASCLESSSLSRLQQQLQIPVYPIGPLHLVASASTSLLEENKSCIEWLNKQKKNSVIFVSLGSLALMEINEVIETALGLDSSKQQFLWVIRPGSVRGSEWIENLPKEFSKIISGRGYIVKWAPQKEVLSHPAVGGFWSHCGWNSTLESIGEGVPMICKPFSSDQMVNARYLECVWKIGIQVEGDLDRGAVERAVRRLMVEEEGEGMRKRAISLKEQLRASVISGGSSHNSLEEFVHYMRTL

SEQ ID NO: 41327 - DNA, 1396 bp, Arabidopsis thaliana
  misc_feature (1)..(1396): Ceres Seq. ID no. 12336234
  misc_feature: MA Experiment ID: 108573 Result: Up-regulated in Transcription
  misc_feature: MA Experiment 108573 PARAMETER Experiment Name: At_Drought_cDNA_P Parameter: Timepoint (hr) Value: 6
  misc_feature: MA Experiment 108573 PARAMETER Experiment Name: At_Drought_cDNA_P Parameter: Tissue Value: Aerial
  misc_feature: MA Experiment 108573 PARAMETER Experiment Name: At_Drought_cDNA_P Parameter: Treatment Value: Drought vs. No Drought
  misc_feature: MA Experiment ID: 108576 Result: Down-regulated in Transcription
  misc_feature: MA Experiment 108576 PARAMETER Experiment Name: At_42deg_Heat_cDNA_P Parameter: Temperature (deg C) Value: 42 vs. 22
  misc_feature: MA Experiment 108576 PARAMETER Experiment Name: At_42deg_Heat_cDNA_P Parameter: Timepoint (hr) Value: 1
  misc_feature: MA Experiment 108576 PARAMETER Experiment Name: At_42deg_Heat_cDNA_P Parameter: Tissue Value: Aerial
  misc_feature: MA Experiment ID: 20000111 Result: Down-regulated in Transcription
  misc_feature: MA Experiment 20000111 PARAMETER Experiment Name: At_42deg_Heat_cDNA_P Parameter: Temperature (deg C) Value: 42 vs. 22
  misc_feature: MA Experiment 20000111 PARAMETER Experiment Name: At_42deg_Heat_cDNA_P Parameter: Timepoint (hr) Value: 6
  misc_feature: MA Experiment 20000111 PARAMETER Experiment Name: At_42deg_Heat_cDNA_P Parameter: Tissue Value: Aerial
  misc_feature: MA Experiment ID: 20000185 Result: Up-regulated in Transcription
  misc_feature: MA Experiment 20000185 PARAMETER Experiment Name: At_Roots__P Parameter: Age (day) Value: 7 vs. 21
  misc_feature: MA Experiment 20000185 PARAMETER Experiment Name: At_Roots__P Parameter: Organism Value: A. thaliana
  misc_feature: MA Experiment 20000185 PARAMETER Experiment Name: At_Roots__P Parameter: Tissue Value: Roots vs. Whole Plant
  misc_feature: MA Experiment ID: 20000234 Result: Up-regulated in Transcription
  misc_feature: MA Experiment 20000234 PARAMETER Experiment Name: At_Siliques_P Parameter: Age (day) Value: 21
  misc_feature: MA Experiment 20000234 PARAMETER Experiment Name: At_Siliques_P Parameter: Organism Value: A. thaliana
  misc_feature: MA Experiment 20000234 PARAMETER Experiment Name: At_Siliques_P Parameter: Plant Line Value: WS
  misc_feature: MA Experiment 20000234 PARAMETER Experiment Name: At_Siliques_P Parameter: Tissue Value: Less Than 5mm Siliques vs. Whole Plant
  misc_feature: MA Experiment ID: 20000264 Result: Up-regulated in Transcription
  misc_feature: MA Experiment 20000264 PARAMETER Experiment Name: At_Open_Flower_P Parameter: Age (day) Value: 21
  misc_feature: MA Experiment 20000264 PARAMETER Experiment Name: At_Open_Flower_P Parameter: Plant Line Value: WS
  misc_feature: MA Experiment 20000264 PARAMETER Experiment Name: At_Open_Flower_P Parameter: Tissue Value: Open Flower vs. Whole Plant
  misc_feature: MA Experiment ID: 20000265 Result: Up-regulated in Transcription
  misc_feature: MA Experiment 20000265 PARAMETER Experiment Name: At_Open_Flower_P Parameter: Age (day) Value: 21
  misc_feature: MA Experiment 20000265 PARAMETER Experiment Name: At_Open_Flower_P Parameter: Plant Line Value: WS
  misc_feature: MA Experiment 20000265 PARAMETER Experiment Name: At_Open_Flower_P Parameter: Tissue Value: Closed Flower vs. Whole Plant
  misc_feature: MA Experiment ID: 20000286 Result: Up-regulated in Transcription
  misc_feature: MA Experiment 20000286 PARAMETER Experiment Name: At_Open_Flower_P Parameter: Age (day) Value: 21
  misc_feature: MA Experiment 20000286 PARAMETER Experiment Name: At_Open_Flower_P Parameter: Plant Line Value: WS
  misc_feature: MA Experiment 20000286 PARAMETER Experiment Name: At_Open_Flower_P Parameter: Tissue Value: Half Open vs. Whole Plant
  misc_feature: MA Experiment ID: 20000439 Result: Up-regulated in Transcription
  misc_feature: MA Experiment 20000439 PARAMETER Experiment Name: At_Roots__P Parameter: Age (day) Value: 14 vs. 21
  misc_feature: MA Experiment 20000439 PARAMETER Experiment Name: At_Roots__P Parameter: Organism Value: A. thaliana
  misc_feature: MA Experiment 20000439 PARAMETER Experiment Name: At_Roots__P Parameter: Tissue Value: Roots vs. Whole Plant
  misc_feature: MA Experiment ID: 20000794 Result: Up-regulated in Transcription
  misc_feature: MA Experiment 20000794 PARAMETER Experiment Name: At_Petals_P Parameter: Age (day) Value: 23-25 days
  misc_feature: MA Experiment 20000794 PARAMETER Experiment Name: At_Petals_P Parameter: Plant Line Value: WS
  misc_feature: MA Experiment 20000794 PARAMETER Experiment Name: At_Petals_P Parameter: Tissue Value: Petals vs. Whole plant
  misc_feature: MA Experiment ID: 20001247 Result: Down-regulated in Transcription
  misc_feature: MA Experiment 20001247 PARAMETER Experiment Name: At_Far-red-induction_P Parameter: Age (day) Value: 7
  misc_feature: MA Experiment 20001247 PARAMETER Experiment Name: At_Far-red-induction_P Parameter: Light Value: Far-red vs. White
  misc_feature: MA Experiment 20001247 PARAMETER Experiment Name: At_Far-red-induction_P Parameter: Organism Value: A. thaliana
  misc_feature: MA Experiment 20001247 PARAMETER Experiment Name: At_Far-red-induction_P Parameter: Plant Line Value: Columbia
  misc_feature: MA Experiment 20001247 PARAMETER Experiment Name: At_Far-red-induction_P Parameter: Timepoint (hr) Value: 1
  misc_feature: MA Experiment 20001247 PARAMETER Experiment Name: At_Far-red-induction_P Parameter: Tissue Value: Whole Plant
  misc_feature: MA Experiment ID: 20001248 Result: Down-regulated in Transcription
  misc_feature: MA Experiment 20001248 PARAMETER Experiment Name: At_Far-red-induction_P Parameter: Age (day) Value: 7
  misc_feature: MA Experiment 20001248 PARAMETER Experiment Name: At_Far-red-induction_P Parameter: Light Value: Far-red vs. White
  misc_feature: MA Experiment 20001248 PARAMETER Experiment Name: At_Far-red-induction_P Parameter: Organism Value: A. thaliana
  misc_feature: MA Experiment 20001248 PARAMETER Experiment Name: At_Far-red-induction_P Parameter: Plant Line Value: Columbia
  misc_feature: MA Experiment 20001248 PARAMETER Experiment Name: At_Far-red-induction_P Parameter: Timepoint (hr) Value: 4
  misc_feature: MA Experiment 20001248 PARAMETER Experiment Name: At_Far-red-induction_P Parameter: Tissue Value: Whole Plant
attattatttccagagaagcttctcttttgattctctcgctctctctttcttcatcgcctcttcgagcttcgatggttgggaatattctggtgaccggtggtgctggttacatcggaagtcacacggttcttcagcttcttctcggaggctataacaccgtcgttatagacaacctcgacaattcctctctcgtttcgatccaacgcgtcaaggatctcgccggagatcatggacaaaatctcaccgtccaccaggtggaccttcgcgataaacccgcacttgagaaggttttctccgaaacaaagtttgatgcagtaatgcattttgctggattgaaagcagttggtgagagcgtggcgaaaccacttctgtattataacaataacttgattgcgactattacacttttggaagtaatggctgcacacggatgtaaaaagcttgtattttcttcgtccgctactgtgtatggctggccaaaggaggttccttgtacagaagagtctcccctgtctggaatgagtccttatggacggacaaagctgttcatagaggacatttgccgtgatgtacaacgtggtgatcctgaatggagaatcataatgctgaggtactttaaccctgtgggagctcaccctagcggtcgcattggtgaggatccttgtgggactccaaataatctcatgccttatgtccagcaagtcgttgttgggaggctacctaacctaaaaatttatggaactgactataccactaaagatggcactggtgtacgagactatattcatgttgttgatctagcagatggccatatatttgcgcttcaaaagctagacgatactgaaataggttgtgaggtatacaacctgggaaccggaaaaggaacaacagtgttggagatggttgatgcatttgagaaagcttctggaatgaaaatcccactggtgaaggttggaaggagaccaggtgatgcagaaaccgtctatgcgtcaacagaaaaagctgaacgcgaactaaactggaaggcaaattttggaatcgaagaaatgtgtagggatcagtggaactgggcaagcaacaatcctttcggttacggttcttcaccaaactcaacataacgaagctaacgtatccaacactccattctttttcttttgggtcgtcggctgttatctttatgttacacactcaggttttagctttaaagcctaaacacagtgagggagaagttacttctctattcatatatctgctttctccttttgtaatttatatatatcttatatacgcataggtttaacttaagcggatccttttgttttttggatttgtataatctctcttaggaaattaattgtcatgggattatatttgtattaaatagaaactgaattc

SEQ ID NO: 41328 - protein, 372 aa, Arabidopsis thaliana
  peptide (1)..(372): Ceres Seq. ID no. 12336235
  misc_feature (29)..(362): Pfam Name: NAD dependent epimerase/dehydratase family Pfam Description: NAD dependent epimerase/dehydratase family
  misc_feature (29)..(372): Homolog of NCBI NO: 11386775 NR Description: UDP-glucose 4-epimerase GEPI48 (Galactowaldenase)
  misc_feature (25)..(372): Homolog of NCBI NO: 21536846 NR Description: UDPglucose 4-epimerase-like protein [Arabidopsis
  misc_feature (25)..(368): Homolog of NCBI NO: 15236988 NR Description: UDP-galactose 4-epimerase - like protein
  misc_feature (25)..(368): Homolog of NCBI NO: 12643850 NR Description: Probable UDP-glucose 4-epimerase At4g10960
  misc_feature (25)..(371): Homolog of NCBI NO: 21553659 NR Description: UDP-galactose 4-epimerase-like protein
  misc_feature (25)..(372): Homolog of NCBI NO: 15236663 NR Description: UDPglucose 4-epimerase - like protein
  misc_feature (25)..(86): Homolog of NCBI NO: 6633809 NR Description: F1N19.2 [Arabidopsis thaliana]
  misc_feature (258)..(372): Homolog of NCBI NO: 6633809 NR Description: F1N19.2 [Arabidopsis thaliana]
  misc_feature (86)..(259): Homolog of NCBI NO: 6633809 NR Description: F1N19.2 [Arabidopsis thaliana]
  misc_feature (25)..(372): Homolog of NCBI NO: 15217653 NR Description: UDP-galactose 4-epimerase, putative; protein id:
IIISREASLLILSLSLSSSPLRASMVGNILVTGGAGYIGSHTVLQLLLGGYNTVVIDNLDNSSLVSIQRVKDLAGDHGQNLTVHQVDLRDKPALEKVFSETKFDAVMHFAGLKAVGESVAKPLLYYNNNLIATITLLEVMAAHGCKKLVFSSSATVYGWPKEVPCTEESPLSGMSPYGRTKLFIEDICRDVQRGDPEWRIIMLRYFNPVGAHPSGRIGEDPCGTPNNLMPYVQQVVVGRLPNLKIYGTDYTTKDGTGVRDYIHVVDLADGHIFALQKLDDTEIGCEVYNLGTGKGTTVLEMVDAFEKASGMKIPLVKVGRRPGDAETVYASTEKAERELNWKANFGIEEMCRDQWNWASNNPFGYGSSPNST

SEQ ID NO: 41329 - protein, 348 aa, Arabidopsis thaliana
  peptide (1)..(348): Ceres Seq. ID no. 12336236
  misc_feature (5)..(338): Pfam Name: NAD dependent epimerase/dehydratase family Pfam Description: NAD dependent epimerase/dehydratase family
  misc_feature (5)..(348): Homolog of NCBI NO: 11386775 NR Description: UDP-glucose 4-epimerase GEPI48 (Galactowaldenase)
  misc_feature (1)..(348): Homolog of NCBI NO: 21536846 NR Description: UDPglucose 4-epimerase-like protein [Arabidopsis
  misc_feature (1)..(344): Homolog of NCBI NO: 15236988 NR Description: UDP-galactose 4-epimerase - like protein
  misc_feature (1)..(344): Homolog of NCBI NO: 12643850 NR Description: Probable UDP-glucose 4-epimerase At4g10960
  misc_feature (1)..(347): Homolog of NCBI NO: 21553659 NR Description: UDP-galactose 4-epimerase-like protein
  misc_feature (1)..(348): Homolog of NCBI NO: 15236663 NR Description: UDPglucose 4-epimerase - like protein
  misc_feature (1)..(62): Homolog of NCBI NO: 6633809 NR Description: F1N19.2 [Arabidopsis thaliana]
  misc_feature (234)..(348): Homolog of NCBI NO: 6633809 NR Description: F1N19.2 [Arabidopsis thaliana]
  misc_feature (62)..(235): Homolog of NCBI NO: 6633809 NR Description: F1N19.2 [Arabidopsis thaliana]
  misc_feature (1)..(348): Homolog of NCBI NO: 15217653 NR Description: UDP-galactose 4-epimerase, putative; protein id:
MVGNILVTGGAGYIGSHTVLQLLLGGYNTVVIDNLDNSSLVSIQRVKDLAGDHGQNLTVHQVDLRDKPALEKVFSETKFDAVMHFAGLKAVGESVAKPLLYYNNNLIATITLLEVMAAHGCKKLVFSSSATVYGWPKEVPCTEESPLSGMSPYGRTKLFIEDICRDVQRGDPEWRIIMLRYFNPVGAHPSGRIGEDPCGTPNNLMPYVQQVVVGRLPNLKIYGTDYTTKDGTGVRDYIHVVDLADGHIFALQKLDDTEIGCEVYNLGTGKGTTVLEMVDAFEKASGMKIPLVKVGRRPGDAETVYASTEKAERELNWKANFGIEEMCRDQWNWASNNPFGYGSSPNST

SEQ ID NO: 41330 - protein, 266 aa, Arabidopsis thaliana
  peptide (1)..(266): Ceres Seq. ID no. 12336237
  misc_feature (1)..(256): Pfam Name: NAD dependent epimerase/dehydratase family Pfam Description: NAD dependent epimerase/dehydratase family
  misc_feature (1)..(266): Homolog of NCBI NO: 21715990 NR Description: UDP-glucose 4-epimerase [Oryza sativa (japonica
  misc_feature (1)..(266): Homolog of NCBI NO: 11386775 NR Description: UDP-glucose 4-epimerase GEPI48 (Galactowaldenase)
  misc_feature (1)..(266): Homolog of NCBI NO: 21536846 NR Description: UDPglucose 4-epimerase-like protein [Arabidopsis
  misc_feature (1)..(262): Homolog of NCBI NO: 15236988 NR Description: UDP-galactose 4-epimerase - like protein
  misc_feature (1)..(262): Homolog of NCBI NO: 12643850 NR Description: Probable UDP-glucose 4-epimerase At4g10960
  misc_feature (1)..(265): Homolog of NCBI NO: 21553659 NR Description: UDP-galactose 4-epimerase-like protein
  misc_feature (1)..(266): Homolog of NCBI NO: 15236663 NR Description: UDPglucose 4-epimerase - like protein
  misc_feature (152)..(266): Homolog of NCBI NO: 6633809 NR Description: F1N19.2 [Arabidopsis thaliana]
  misc_feature (1)..(153): Homolog of NCBI NO: 6633809 NR Description: F1N19.2 [Arabidopsis thaliana]
  misc_feature (1)..(266): Homolog of NCBI NO: 15217653 NR Description: UDP-galactose 4-epimerase, putative; protein id:
MHFAGLKAVGESVAKPLLYYNNNLIATITLLEVMAAHGCKKLVFSSSATVYGWPKEVPCTEESPLSGMSPYGRTKLFIEDICRDVQRGDPEWRIIMLRYFNPVGAHPSGRIGEDPCGTPNNLMPYVQQVVVGRLPNLKIYGTDYTTKDGTGVRDYIHVVDLADGHIFALQKLDDTEIGCEVYNLGTGKGTTVLEMVDAFEKASGMKIPLVKVGRRPGDAETVYASTEKAERELNWKANFGIEEMCRDQWNWASNNPFGYGSSPNST

SEQ ID NO: 41331 - DNA, 1269 bp, Arabidopsis thaliana
  misc_feature (1)..(1269): Ceres Seq. ID no. 13491544
  misc_feature: MA Experiment ID: 108572 Result: Up-regulated in Transcription
  misc_feature: MA Experiment 108572 PARAMETER Experiment Name: At_Drought_cDNA_P Parameter: Timepoint (hr) Value: 1
  misc_feature: MA Experiment 108572 PARAMETER Experiment Name: At_Drought_cDNA_P Parameter: Tissue Value: Aerial
  misc_feature: MA Experiment 108572 PARAMETER Experiment Name: At_Drought_cDNA_P Parameter: Treatment Value: Drought vs. No Drought
  misc_feature: MA Experiment ID: 20000173 Result: Up-regulated in Transcription
  misc_feature: MA Experiment 20000173 PARAMETER Experiment Name: At_42deg_Heat_P Parameter: Age (day) Value: 14
  misc_feature: MA Experiment 20000173 PARAMETER Experiment Name: At_42deg_Heat_P Parameter: Organism Value: A. thaliana
  misc_feature: MA Experiment 20000173 PARAMETER Experiment Name: At_42deg_Heat_P Parameter: Plant Line Value: WS
  misc_feature: MA Experiment 20000173 PARAMETER Experiment Name: At_42deg_Heat_P Parameter: Temperature (deg C) Value: 42 vs. 22
  misc_feature: MA Experiment 20000173 PARAMETER Experiment Name: At_42deg_Heat_P Parameter: Timepoint (hr) Value: 6
  misc_feature: MA Experiment 20000173 PARAMETER Experiment Name: At_42deg_Heat_P Parameter: Tissue Value: Aerial
  misc_feature: MA Experiment ID: 20000179 Result: Up-regulated in Transcription
  misc_feature: MA Experiment 20000179 PARAMETER Experiment Name: At_Germinating_Seeds_P Parameter: Age (hr) Value: 6 vs. 0
  misc_feature: MA Experiment 20000179 PARAMETER Experiment Name: At_Germinating_Seeds_P Parameter: Tissue Value: Germinating Seeds
  misc_feature: MA Experiment ID: 20000180 Result: Up-regulated in Transcription
  misc_feature: MA Experiment 20000180 PARAMETER Experiment Name: At_Germinating_Seeds_P Parameter: Age (hr) Value: 24 vs. 0
  misc_feature: MA Experiment 20000180 PARAMETER Experiment Name: At_Germinating_Seeds_P Parameter: Tissue Value: Germinating Seeds
  misc_feature: MA Experiment ID: 20000264 Result: Up-regulated in Transcription
  misc_feature: MA Experiment 20000264 PARAMETER Experiment Name: At_Open_Flower_P Parameter: Age (day) Value: 21
  misc_feature: MA Experiment 20000264 PARAMETER Experiment Name: At_Open_Flower_P Parameter: Plant Line Value: WS
  misc_feature: MA Experiment 20000264 PARAMETER Experiment Name: At_Open_Flower_P Parameter: Tissue Value: Open Flower vs. Whole Plant
  misc_feature: MA Experiment ID: 20001555 Result: Down-regulated in Transcription
  misc_feature: MA Experiment 20001555 PARAMETER Experiment Name: At_Drought_Soil_Dry_P Parameter: Age (day) Value: 24
  misc_feature: MA Experiment 20001555 PARAMETER Experiment Name: At_Drought_Soil_Dry_P Parameter: Organism Value: A. thaliana
  misc_feature: MA Experiment 20001555 PARAMETER Experiment Name: At_Drought_Soil_Dry_P Parameter: Plant Line Value: WS
  misc_feature: MA Experiment 20001555 PARAMETER Experiment Name: At_Drought_Soil_Dry_P Parameter: Post Timepoint (hr) Value: None
  misc_feature: MA Experiment 20001555 PARAMETER Experiment Name: At_Drought_Soil_Dry_P Parameter: Post-Treatment Value: None
  misc_feature: MA Experiment 20001555 PARAMETER Experiment Name: At_Drought_Soil_Dry_P Parameter: Timepoint (day) Value: 10
  misc_feature: MA Experiment 20001555 PARAMETER Experiment Name: At_Drought_Soil_Dry_P Parameter: Treatment Value: Drought vs. No Drought
  misc_feature: MA Experiment ID: 20001905 Result: Up-regulated in Transcription
  misc_feature: MA Experiment 20001905 PARAMETER Experiment Name: At_Drought_Reproduction_P Parameter: Age (day) Value: 40
  misc_feature: MA Experiment 20001905 PARAMETER Experiment Name: At_Drought_Reproduction_P Parameter: Organism Value: A. thaliana
  misc_feature: MA Experiment 20001905 PARAMETER Experiment Name: At_Drought_Reproduction_P Parameter: Plant Line Value: WS
  misc_feature: MA Experiment 20001905 PARAMETER Experiment Name: At_Drought_Reproduction_P Parameter: Timepoint (day) Value: 10
  misc_feature: MA Experiment 20001905 PARAMETER Experiment Name: At_Drought_Reproduction_P Parameter: Tissue Value: Rosettes
  misc_feature: MA Experiment 20001905 PARAMETER Experiment Name: At_Drought_Reproduction_P Parameter: Treatment Value: Drought vs. No Drought
accattccaaaatagtcaccgcccaaaaaaaaaaaaatcctttttttctcttcttgagagagagaaagagagagggagacaagtttgttctggataaaaagacaattcatttctattttaattgtctgcaaaattctcacgggccatcggagagaggagacagaggtggtgctgcacaagaatccttcctcctatatcctacaagactttggaatgggaagagaagttgttgaggtgcttatggaccgaaacgccgacgtttcaagcgctagagttcatgttgctcctaagatagctgcagaggagactgatgaggaatttgaagtcaaagaatgcacagaggagaagtctctttctgagaatgcaccaaatgttggatctgctgagagagttggagctcagaaatcacctaaaacccgtaatggaaatgctaaagtttcaaagcaggatgctcctcttctcgcggtgaggaagccattgcaacccgagaacaagaagcatattgatgacgaagataattgctccattgcttcttccgttgcaacttccatgaggatgggtaagtctggattgacttatggaagtgctccaacgtttaggagtgctcaacgtgctgagaaacgcaaggagtattaccaaaagctcgaggagaaaaaccaagcgcttgaagctgagaggaacgagcttgaacagaggcaaaaggatgaacaagaagcagccttgaagcaacttagaaagaatctcaagttcaaggctaaacccgtccccaacttctactacgaggcacctcctgcgaaacctgagctcaagaagcttcctttgacacgtcccaagtcgccaaaactgatcctttctcggagaaaaagcttcagcgacgcagtcagctcgtcttcccgtgaagagattctgaagacagtctctaaccggaaccgacacagcactggaacagttcagaacaaagacgatgatcacaggaacaagaacaccaatgctgcgcacgacagccctcgtgtcagatcaggcaaaggtaaatccggattgaaaccagtgaacgagtcctcagaagaagcttgaaatttcaaaagatgatgctttgttggtctaacttgatcttgccggagaaaatgtaaaatcaaagactctttgtttttcggttatttccggtatacgtttggttcactatgtaactgtctttttttcgattttaagttttaacatgaaaaactttatgttgattgttgaacaactcctcctaatgttgaaatttgt

SEQ ID NO: 41332 - protein, 286 aa, Arabidopsis thaliana
  peptide (1)..(286): Ceres Seq. ID no. 13491545
  misc_feature (42)..(259): Homolog of NCBI NO: 15228950 NR Description: expressed protein [Arabidopsis thaliana]
  misc_feature (42)..(259): Homolog of NCBI NO: 9294199 NR Description: gb|AAF04893.1~gene_id:MXC7.13~similar to unknown
  misc_feature (46)..(286): Homolog of NCBI NO: 21553401 NR Description: unknown [Arabidopsis thaliana]
  misc_feature (46)..(286): Homolog of NCBI NO: 18404945 NR Description: expressed protein [Arabidopsis thaliana]
  misc_feature (1)..(50): Homolog of NCBI NO: 28453880 NR Description: WAVE-DAMPENED2 [Arabidopsis thaliana]
  misc_feature (94)..(242): Homolog of NCBI NO: 28453880 NR Description: WAVE-DAMPENED2 [Arabidopsis thaliana]
  misc_feature (1)..(286): Homolog of NCBI NO: 21618286 NR Description: unknown [Arabidopsis thaliana]
  misc_feature (1)..(286): Homolog of NCBI NO: 18396961 NR Description: expressed protein [Arabidopsis thaliana]
  misc_feature (1)..(286): Homolog of NCBI NO: 6175167 NR Description: unknown protein [Arabidopsis thaliana]
  misc_feature (1)..(286): Homolog of NCBI NO: 30679219 NR Description: expressed protein [Arabidopsis thaliana]
MGREVVEVLMDRNADVSSARVHVAPKIAAEETDEEFEVKECTEEKSLSENAPNVGSAERVGAQKSPKTRNGNAKVSKQDAPLLAVRKPLQPENKKHIDDEDNCSIASSVATSMRMGKSGLTYGSAPTFRSAQRAEKRKEYYQKLEEKNQALEAERNELEQRQKDEQEAALKQLRKNLKFKAKPVPNFYYEAPPAKPELKKLPLTRPKSPKLILSRRKSFSDAVSSSSREEILKTVSNRNRHSTGTVQNKDDDHRNKNTNAAHDSPRVRSGKGKSGLKPVNESSEEA

SEQ ID NO: 41333 - protein, 277 aa, Arabidopsis thaliana
  peptide (1)..(277): Ceres Seq. ID no. 13491546
  misc_feature (33)..(250): Homolog of NCBI NO: 15228950 NR Description: expressed protein [Arabidopsis thaliana]
  misc_feature (33)..(250): Homolog of NCBI NO: 9294199 NR Description: gb|AAF04893.1~gene_id:MXC7.13~similar to unknown
  misc_feature (37)..(277): Homolog of NCBI NO: 21553401 NR Description: unknown [Arabidopsis thaliana]
  misc_feature (37)..(277): Homolog of NCBI NO: 18404945 NR Description: expressed protein [Arabidopsis thaliana]
  misc_feature (1)..(41): Homolog of NCBI NO: 28453880 NR Description: WAVE-DAMPENED2 [Arabidopsis thaliana]
  misc_feature (85)..(233): Homolog of NCBI NO: 28453880 NR Description: WAVE-DAMPENED2 [Arabidopsis thaliana]
  misc_feature (1)..(277): Homolog of NCBI NO: 21618286 NR Description: unknown [Arabidopsis thaliana]
  misc_feature (1)..(277): Homolog of NCBI NO: 18396961 NR Description: expressed protein [Arabidopsis thaliana]
  misc_feature (1)..(277): Homolog of NCBI NO: 6175167 NR Description: unknown protein [Arabidopsis thaliana]
  misc_feature (1)..(277): Homolog of NCBI NO: 30679219 NR Description: expressed protein [Arabidopsis thaliana]
MDRNADVSSARVHVAPKIAAEETDEEFEVKECTEEKSLSENAPNVGSAERVGAQKSPKTRNGNAKVSKQDAPLLAVRKPLQPENKKHIDDEDNCSIASSVATSMRMGKSGLTYGSAPTFRSAQRAEKRKEYYQKLEEKNQALEAERNELEQRQKDEQEAALKQLRKNLKFKAKPVPNFYYEAPPAKPELKKLPLTRPKSPKLILSRRKSFSDAVSSSSREEILKTVSNRNRHSTGTVQNKDDDHRNKNTNAAHDSPRVRSGKGKSGLKPVNESSEEA

SEQ ID NO: 41334 - protein, 174 aa, Arabidopsis thaliana
  peptide (1)..(174): Ceres Seq. ID no. 13491547
  misc_feature (1)..(142): Homolog of NCBI NO: 34897180 NR Description: unknown protein [Oryza sativa (japonica
  misc_feature (1)..(147): Homolog of NCBI NO: 15228950 NR Description: expressed protein [Arabidopsis thaliana]
  misc_feature (1)..(147): Homolog of NCBI NO: 9294199 NR Description: gb|AAF04893.1~gene_id:MXC7.13~similar to unknown
  misc_feature (1)..(174): Homolog of NCBI NO: 21553401 NR Description: unknown [Arabidopsis thaliana]
  misc_feature (1)..(174): Homolog of NCBI NO: 18404945 NR Description: expressed protein [Arabidopsis thaliana]
  misc_feature (1)..(130): Homolog of NCBI NO: 28453880 NR Description: WAVE-DAMPENED2 [Arabidopsis thaliana]
  misc_feature (1)..(174): Homolog of NCBI NO: 21618286 NR Description: unknown [Arabidopsis thaliana]
  misc_feature (1)..(174): Homolog of NCBI NO: 18396961 NR Description: expressed protein [Arabidopsis thaliana]
  misc_feature (1)..(174): Homolog of NCBI NO: 6175167 NR Description: unknown protein [Arabidopsis thaliana]
  misc_feature (1)..(174): Homolog of NCBI NO: 30679219 NR Description: expressed protein [Arabidopsis thaliana]
MRMGKSGLTYGSAPTFRSAQRAEKRKEYYQKLEEKNQALEAERNELEQRQKDEQEAALKQLRKNLKFKAKPVPNFYYEAPPAKPELKKLPLTRPKSPKLILSRRKSFSDAVSSSSREEILKTVSNRNRHSTGTVQNKDDDHRNKNTNAAHDSPRVRSGKGKSGLKPVNESSEEA

SEQ ID NO: 41335 - DNA, 1454 bp, Arabidopsis thaliana
  misc_feature (1)..(1454): Ceres Seq. ID no. 13488793
  misc_feature: MA Experiment ID: 108435 Result: Up-regulated in Transcription
  misc_feature: MA Experiment 108435 PARAMETER Experiment Name: At_stm_Mutants_cDNA_P Parameter: Plant Line Value: wt Landsburg vs stm
  misc_feature: MA Experiment 108435 PARAMETER Experiment Name: At_stm_Mutants_cDNA_P Parameter: Tissue Value: Shoot Apical Meristem Region
  misc_feature: MA Experiment ID: 108462 Result: Up-regulated in Transcription
  misc_feature: MA Experiment 108462 PARAMETER Experiment Name: At_Germinating_Seeds_cDNA_P Parameter: Age (day) Value: 2 vs. 0
  misc_feature: MA Experiment 108462 PARAMETER Experiment Name: At_Germinating_Seeds_cDNA_P Parameter: Tissue Value: Germinating Seeds
  misc_feature: MA Experiment ID: 108464 Result: Up-regulated in Transcription
  misc_feature: MA Experiment 108464 PARAMETER Experiment Name: At_Germinating_Seeds_cDNA_P Parameter: Age (day) Value: 4 vs. 0
  misc_feature: MA Experiment 108464 PARAMETER Experiment Name: At_Germinating_Seeds_cDNA_P Parameter: Tissue Value: Germinating Seeds
  misc_feature: MA Experiment ID: 108488 Result: Down-regulated in Transcription
  misc_feature: MA Experiment ID: 108573 Result: Up-regulated in Transcription
  misc_feature: MA Experiment 108573 PARAMETER Experiment Name: At_Drought_cDNA_P Parameter: Timepoint (hr) Value: 6
  misc_feature: MA Experiment 108573 PARAMETER Experiment Name: At_Drought_cDNA_P Parameter: Tissue Value: Aerial
  misc_feature: MA Experiment 108573 PARAMETER Experiment Name: At_Drought_cDNA_P Parameter: Treatment Value: Drought vs. No Drought
  misc_feature: MA Experiment ID: 108576 Result: Up-regulated in Transcription
  misc_feature: MA Experiment 108576 PARAMETER Experiment Name: At_42deg_Heat_cDNA_P Parameter: Temperature (deg C) Value: 42 vs. 22
  misc_feature: MA Experiment 108576 PARAMETER Experiment Name: At_42deg_Heat_cDNA_P Parameter: Timepoint (hr) Value: 1
  misc_feature: MA Experiment 108576 PARAMETER Experiment Name: At_42deg_Heat_cDNA_P Parameter: Tissue Value: Aerial
  misc_feature: MA Experiment ID: 108577 Result: Up-regulated in Transcription
  misc_feature: MA Experiment 108577 PARAMETER Experiment Name: At_42deg_Heat_cDNA_P Parameter: Temperature (deg C) Value: 42 vs. 22
  misc_feature: MA Experiment 108577 PARAMETER Experiment Name: At_42deg_Heat_cDNA_P Parameter: Timepoint (hr) Value: 6
  misc_feature: MA Experiment 108577 PARAMETER Experiment Name: At_42deg_Heat_cDNA_P Parameter: Tissue Value: Aerial
  misc_feature: MA Experiment ID: 20000069 Result: Down-regulated in Transcription
  misc_feature: MA Experiment 20000069 PARAMETER Experiment Name: At_100uM_ABA_Mutants_cDNA_P Parameter: Plant Line Value: CS23
  misc_feature: MA Experiment 20000069 PARAMETER Experiment Name: At_100uM_ABA_Mutants_cDNA_P Parameter: Timepoint (hr) Value: 6
  misc_feature: MA Experiment 20000069 PARAMETER Experiment Name: At_100uM_ABA_Mutants_cDNA_P Parameter: Tissue Value: Aerial
  misc_feature: MA Experiment 20000069 PARAMETER Experiment Name: At_100uM_ABA_Mutants_cDNA_P Parameter: Treatment Value: 100uM ABA vs. No Treatment
  misc_feature: MA Experiment ID: 20000093 Result: Up-regulated in Transcription
  misc_feature: MA Experiment 20000093 PARAMETER Experiment Name: At_42deg_Heat_cDNA_P Parameter: Temperature (deg C) Value: 42 vs. 22
  misc_feature: MA Experiment 20000093 PARAMETER Experiment Name: At_42deg_Heat_cDNA_P Parameter: Timepoint (hr) Value: 0.5
  misc_feature: MA Experiment 20000093 PARAMETER Experiment Name: At_42deg_Heat_cDNA_P Parameter: Tissue Value: Aerial
  misc_feature: MA Experiment ID: 20000111 Result: Up-regulated in Transcription
  misc_feature: MA Experiment 20000111 PARAMETER Experiment Name: At_42deg_Heat_cDNA_P Parameter: Temperature (deg C) Value: 42 vs. 22
  misc_feature: MA Experiment 20000111 PARAMETER Experiment Name: At_42deg_Heat_cDNA_P Parameter: Timepoint (hr) Value: 6
  misc_feature: MA Experiment 20000111 PARAMETER Experiment Name: At_42deg_Heat_cDNA_P Parameter: Tissue Value: Aerial
  misc_feature: MA Experiment ID: 20000112 Result: Up-regulated in Transcription
  misc_feature: MA Experiment 20000112 PARAMETER Experiment Name: At_42deg_Heat_cDNA_P Parameter: Temperature (deg C) Value: 42 vs. 22
  misc_feature: MA Experiment 20000112 PARAMETER Experiment Name: At_42deg_Heat_cDNA_P Parameter: Timepoint (hr) Value: 2
  misc_feature: MA Experiment 20000112 PARAMETER Experiment Name: At_42deg_Heat_cDNA_P Parameter: Tissue Value: Aerial
  misc_feature: MA Experiment ID: 20000113 Result: Up-regulated in Transcription
  misc_feature: MA Experiment 20000113 PARAMETER Experiment Name: At_42deg_Heat_cDNA_P Parameter: Temperature (deg C) Value: 42 vs. 22
  misc_feature: MA Experiment 20000113 PARAMETER Experiment Name: At_42deg_Heat_cDNA_P Parameter: Timepoint (hr) Value: 8
  misc_feature: MA Experiment 20000113 PARAMETER Experiment Name: At_42deg_Heat_cDNA_P Parameter: Tissue Value: Aerial
  misc_feature: MA Experiment ID: 20000144 Result: Up-regulated in Transcription
  misc_feature: MA Experiment 20000144 PARAMETER Experiment Name: At_42deg_Heat_cDNA_P Parameter: Temperature (deg C) Value: 42 vs. 22
  misc_feature: MA Experiment 20000144 PARAMETER Experiment Name: At_42deg_Heat_cDNA_P Parameter: Timepoint (hr) Value: 1
  misc_feature: MA Experiment 20000144 PARAMETER Experiment Name: At_42deg_Heat_cDNA_P Parameter: Tissue Value: Aerial
  misc_feature: MA Experiment ID: 20000171 Result: Up-regulated in Transcription
  misc_feature: MA Experiment 20000171 PARAMETER Experiment Name: At_42deg_Heat_P Parameter: Age (day) Value: 14
  misc_feature: MA Experiment 20000171 PARAMETER Experiment Name: At_42deg_Heat_P Parameter: Organism Value: A. thaliana
  misc_feature: MA Experiment 20000171 PARAMETER Experiment Name: At_42deg_Heat_P Parameter: Plant Line Value: WS
  misc_feature: MA Experiment 20000171 PARAMETER Experiment Name: At_42deg_Heat_P Parameter: Temperature (deg C) Value: 42 vs. 22
  misc_feature: MA Experiment 20000171 PARAMETER Experiment Name: At_42deg_Heat_P Parameter: Timepoint (hr) Value: 1
  misc_feature: MA Experiment 20000171 PARAMETER Experiment Name: At_42deg_Heat_P Parameter: Tissue Value: Aerial
  misc_feature: MA Experiment ID: 20000173 Result: Up-regulated in Transcription
  misc_feature: MA Experiment 20000173 PARAMETER Experiment Name: At_42deg_Heat_P Parameter: Age (day) Value: 14
  misc_feature: MA Experiment 20000173 PARAMETER Experiment Name: At_42deg_Heat_P Parameter: Organism Value: A. thaliana
  misc_feature: MA Experiment 20000173 PARAMETER Experiment Name: At_42deg_Heat_P Parameter: Plant Line Value: WS
  misc_feature: MA Experiment 20000173 PARAMETER Experiment Name: At_42deg_Heat_P Parameter: Temperature (deg C) Value: 42 vs. 22
  misc_feature: MA Experiment 20000173 PARAMETER Experiment Name: At_42deg_Heat_P Parameter: Timepoint (hr) Value: 6
  misc_feature: MA Experiment 20000173 PARAMETER Experiment Name: At_42deg_Heat_P Parameter: Tissue Value: Aerial
  misc_feature: MA Experiment ID: 20000179 Result: Up-regulated in Transcription
  misc_feature: MA Experiment 20000179 PARAMETER Experiment Name: At_Germinating_Seeds_P Parameter: Age (hr) Value: 6 vs. 0
  misc_feature: MA Experiment 20000179 PARAMETER Experiment Name: At_Germinating_Seeds_P Parameter: Tissue Value: Germinating Seeds
  misc_feature: MA Experiment ID: 20000180 Result: Up-regulated in Transcription
  misc_feature: MA Experiment 20000180 PARAMETER Experiment Name: At_Germinating_Seeds_P Parameter: Age (hr) Value: 24 vs. 0
  misc_feature: MA Experiment 20000180 PARAMETER Experiment Name: At_Germinating_Seeds_P Parameter: Tissue Value: Germinating Seeds
  misc_feature: MA Experiment ID: 20000185 Result: Up-regulated in Transcription
  misc_feature: MA Experiment 20000185 PARAMETER Experiment Name: At_Roots__P Parameter: Age (day) Value: 7 vs. 21
  misc_feature: MA Experiment 20000185 PARAMETER Experiment Name: At_Roots__P Parameter: Organism Value: A. thaliana
  misc_feature: MA Experiment 20000185 PARAMETER Experiment Name: At_Roots__P Parameter: Tissue Value: Roots vs. Whole Plant
  misc_feature: MA Experiment ID: 20000443 Result: Up-regulated in Transcription
  misc_feature: MA Experiment 20000443 PARAMETER Experiment Name: At_1uM_BR-BRZ__P Parameter: Tissue Value: Shoot Apices
  misc_feature: MA Experiment 20000443 PARAMETER Experiment Name: At_1uM_BR-BRZ__P Parameter: Treatment Value: 1uM BRZ vs. No Treatment
  misc_feature: MA Experiment ID: 20000495 Result: Up-regulated in Transcription
  misc_feature: MA Experiment 20000495 PARAMETER Experiment Name: At_Guard_Cells_P Parameter: Harvest Date Value: 8/2/2002
  misc_feature: MA Experiment 20000495 PARAMETER Experiment Name: At_Guard_Cells_P Parameter: Organism Value: A. thaliana
  misc_feature: MA Experiment 20000495 PARAMETER Experiment Name: At_Guard_Cells_P Parameter: Tissue Value: Guard Cells vs. Leaves
  misc_feature: MA Experiment ID: 20001248 Result: Down-regulated in Transcription
  misc_feature: MA Experiment 20001248 PARAMETER Experiment Name: At_Far-red-induction_P Parameter: Age (day) Value: 7
  misc_feature: MA Experiment 20001248 PARAMETER Experiment Name: At_Far-red-induction_P Parameter: Light Value: Far-red vs. White
  misc_feature: MA Experiment 20001248 PARAMETER Experiment Name: At_Far-red-induction_P Parameter: Organism Value: A. thaliana
  misc_feature: MA Experiment 20001248 PARAMETER Experiment Name: At_Far-red-induction_P Parameter: Plant Line Value: Columbia
  misc_feature: MA Experiment 20001248 PARAMETER Experiment Name: At_Far-red-induction_P Parameter: Timepoint (hr) Value: 4
  misc_feature: MA Experiment 20001248 PARAMETER Experiment Name: At_Far-red-induction_P Parameter: Tissue Value: Whole Plant
  misc_feature: MA Experiment ID: 20001450 Result: Down-regulated in Transcription
  misc_feature: MA Experiment 20001450 PARAMETER Experiment Name: At_Far-red-induction_P Parameter: Age (day) Value: 7
  misc_feature: MA Experiment 20001450 PARAMETER Experiment Name: At_Far-red-induction_P Parameter: Light Value: Far-red vs. White
  misc_feature: MA Experiment 20001450 PARAMETER Experiment Name: At_Far-red-induction_P Parameter: Organism Value: A. thaliana
  misc_feature: MA Experiment 20001450 PARAMETER Experiment Name: At_Far-red-induction_P Parameter: Plant Line Value: Columbia
  misc_feature: MA Experiment 20001450 PARAMETER Experiment Name: At_Far-red-induction_P Parameter: Timepoint (hr) Value: 8
  misc_feature: MA Experiment 20001450 PARAMETER Experiment Name: At_Far-red-induction_P Parameter: Tissue Value: Whole Plant
  misc_feature: MA Experiment ID: 20001555 Result: Up-regulated in Transcription
  misc_feature: MA Experiment 20001555 PARAMETER Experiment Name: At_Drought_Soil_Dry_P Parameter: Age (day) Value: 24
  misc_feature: MA Experiment 20001555 PARAMETER Experiment Name: At_Drought_Soil_Dry_P Parameter: Organism Value: A. thaliana
  misc_feature: MA Experiment 20001555 PARAMETER Experiment Name: At_Drought_Soil_Dry_P Parameter: Plant Line Value: WS
  misc_feature: MA Experiment 20001555 PARAMETER Experiment Name: At_Drought_Soil_Dry_P Parameter: Post Timepoint (hr) Value: None
  misc_feature: MA Experiment 20001555 PARAMETER Experiment Name: At_Drought_Soil_Dry_P Parameter: Post-Treatment Value: None
  misc_feature: MA Experiment 20001555 PARAMETER Experiment Name: At_Drought_Soil_Dry_P Parameter: Timepoint (day) Value: 10
  misc_feature: MA Experiment 20001555 PARAMETER Experiment Name: At_Drought_Soil_Dry_P Parameter: Treatment Value: Drought vs. No Drought
  misc_feature: MA Experiment ID: 20001559 Result: Up-regulated in Transcription
  misc_feature: MA Experiment 20001559 PARAMETER Experiment Name: At_Drought_Soil_Dry_P Parameter: Age (day) Value: 28
  misc_feature: MA Experiment 20001559 PARAMETER Experiment Name: At_Drought_Soil_Dry_P Parameter: Organism Value: A. thaliana
  misc_feature: MA Experiment 20001559 PARAMETER Experiment Name: At_Drought_Soil_Dry_P Parameter: Plant Line Value: WS
  misc_feature: MA Experiment 20001559 PARAMETER Experiment Name: At_Drought_Soil_Dry_P Parameter: Post Timepoint (hr) Value: 29
  misc_feature: MA Experiment 20001559 PARAMETER Experiment Name: At_Drought_Soil_Dry_P Parameter: Post-Treatment Value: Re-Water vs. No Drought
  misc_feature: MA Experiment 20001559 PARAMETER Experiment Name: At_Drought_Soil_Dry_P Parameter: Timepoint (day) Value: 14
  misc_feature: MA Experiment 20001559 PARAMETER Experiment Name: At_Drought_Soil_Dry_P Parameter: Treatment Value: Drought vs. No Drought
  misc_feature: MA Experiment ID: 20001905 Result: Up-regulated in Transcription
  misc_feature: MA Experiment 20001905 PARAMETER Experiment Name: At_Drought_Reproduction_P Parameter: Age (day) Value: 40
  misc_feature: MA Experiment 20001905 PARAMETER Experiment Name: At_Drought_Reproduction_P Parameter: Organism Value: A. thaliana
  misc_feature: MA Experiment 20001905 PARAMETER Experiment Name: At_Drought_Reproduction_P Parameter: Plant Line Value: WS
  misc_feature: MA Experiment 20001905 PARAMETER Experiment Name: At_Drought_Reproduction_P Parameter: Timepoint (day) Value: 10
  misc_feature: MA Experiment 20001905 PARAMETER Experiment Name: At_Drought_Reproduction_P Parameter: Tissue Value: Rosettes
  misc_feature: MA Experiment 20001905 PARAMETER Experiment Name: At_Drought_Reproduction_P Parameter: Treatment Value: Drought vs. No Drought
  misc_feature: MA Experiment ID: 20001906 Result: Up-regulated in Transcription
  misc_feature: MA Experiment 20001906 PARAMETER Experiment Name: At_Drought_Reproduction_P Parameter: Age (day) Value: 35
  misc_feature: MA Experiment 20001906 PARAMETER Experiment Name: At_Drought_Reproduction_P Parameter: Organism Value: A. thaliana
  misc_feature: MA Experiment 20001906 PARAMETER Experiment Name: At_Drought_Reproduction_P Parameter: Plant Line Value: WS
  misc_feature: MA Experiment 20001906 PARAMETER Experiment Name: At_Drought_Reproduction_P Parameter: Timepoint (day) Value: 5
  misc_feature: MA Experiment 20001906 PARAMETER Experiment Name: At_Drought_Reproduction_P Parameter: Tissue Value: Siliques
  misc_feature: MA Experiment 20001906 PARAMETER Experiment Name: At_Drought_Reproduction_P Parameter: Treatment Value: Drought vs. No Drought
  misc_feature: MA Experiment ID: 20001908 Result: Up-regulated in Transcription
  misc_feature: MA Experiment 20001908 PARAMETER Experiment Name: At_Drought_Reproduction_P Parameter: Age (day) Value: 40
  misc_feature: MA Experiment 20001908 PARAMETER Experiment Name: At_Drought_Reproduction_P Parameter: Organism Value: A. thaliana
  misc_feature: MA Experiment 20001908 PARAMETER Experiment Name: At_Drought_Reproduction_P Parameter: Plant Line Value: WS
  misc_feature: MA Experiment 20001908 PARAMETER Experiment Name: At_Drought_Reproduction_P Parameter: Timepoint (day) Value: 10
  misc_feature: MA Experiment 20001908 PARAMETER Experiment Name: At_Drought_Reproduction_P Parameter: Tissue Value: Siliques
  misc_feature: MA Experiment 20001908 PARAMETER Experiment Name: At_Drought_Reproduction_P Parameter: Treatment Value: Drought vs. No Drought
  misc_feature: MA Experiment ID: 20001911 Result: Up-regulated in Transcription
  misc_feature: MA Experiment 20001911 PARAMETER Experiment Name: At_Drought_Reproduction_P Parameter: Age (day) Value: 40
  misc_feature: MA Experiment 20001911 PARAMETER Experiment Name: At_Drought_Reproduction_P Parameter: Organism Value: A. thaliana
  misc_feature: MA Experiment 20001911 PARAMETER Experiment Name: At_Drought_Reproduction_P Parameter: Plant Line Value: WS
  misc_feature: MA Experiment 20001911 PARAMETER Experiment Name: At_Drought_Reproduction_P Parameter: Timepoint (day) Value: 10
  misc_feature: MA Experiment 20001911 PARAMETER Experiment Name: At_Drought_Reproduction_P Parameter: Tissue Value: Flowers
  misc_feature: MA Experiment 20001911 PARAMETER Experiment Name: At_Drought_Reproduction_P Parameter: Treatment Value: Drought vs. No Drought
atggggaaacgtgaaattcattttactccggtgggtcgtcaggtgcagagagttctggaatatccattgcgcttggagaatcgttcgccgatgtcttactcaagaaggtcaagatactctccttcactatctccttatgacaagcgtcgtggaaggtctgtgtcaaggtcattgtctagaagcccgacgaggagtgtctcaagcgatgctgagaatcctggtaacagtttatatgtaactggattgtctcaccgggttactgaaagagatctggaggatcatttcgctaaagaaggaaaggtaactgatgttcaccttgtcctggacccatggactagagaatctcgcggatttggttttatctctatgaaaagtgttggtgatgctaaccgttgcatcagatctctagatcactctgttctgcagggccgcgtcatcactgttgagaaggcaagacgtcgtagaggacgtactccaactccaggaaagtacttggggctgagaactgctcgaggacgacataagtctcctagctactctccccgcaggtctgttagctgctctcgtagtcgtagtcgaagctactcatctgatcggggcagatcttattctccaagctatgggagaagaggaaggtcatcctcgtactcacccttctatcgacgacgcagattctactctccttcgagatctccttcacctgatgatcgttacaacaggagacgcgacagatcatactcaccttactacaggcggagggaccggtccagatcctactcacgtaactgtagagcacgggacagatcaccttactacatgcggaggtacaggtccagatccaggtcatactcgcctcgctacagagcacgtgaccgatcatgctcaccctactacaggggaagagaccggtcttattcaccccactaccaagggagagacagatcctactcacctgaaagtcgttactacagaaggcacaggtcggtatcgggaagcgtaagccctggagggagaagcatgtcacgtagcatatccccaaggaagggaaggaaagagagcagaagcaagtctcggaggcacgacaggcaatcttcaatgtgtcattcgaggagcgcaagatcaagcacctccagatccgtcagcccataacagtctctacttacttgaagttgacatcaatcactcacgtctgttgttgtattaagcattttgggacttgtctattccttgtatttggaattgatgacagtacgtatgttatgttggtttggtgttaggatactttattacttctgtggaaatgttgctttggcgacgagtcgtgagagaaatggaatctcttctttgttacaaaaaatctattttcatgtctttctactccaacaaatttctgttgttgtataattgttccacttacttttccaactttttttcataatcaatagacgattttc

SEQ ID NO: 41336 - protein, 382 aa, Arabidopsis thaliana
  peptide (1)..(382): Ceres Seq. ID no. 13488794
  misc_feature (77)..(148): Pfam Name: RNA recognition motif. (a.k.a. RRM, RBD, or RNP domain) Pfam Description: RNA recognition motif. (a.k.a. RRM, RBD, or RNP
  misc_feature (24)..(351): Homolog of NCBI NO: 16944647 NR Description: conserved hypothetical protein [Neurospora crassa]
  misc_feature (29)..(222): Homolog of NCBI NO: 11275253 NR Description: transformer-2-like protein - liverwort
  misc_feature (22)..(215): Homolog of NCBI NO: 7489207 NR Description: transformer-SR ribonucleoprotein - common tobacco
  misc_feature (9)..(248): Homolog of NCBI NO: 40253470 NR Description: putative transformer-SR ribonucleoprotein
  misc_feature (31)..(150): Homolog of NCBI NO: 30680096 NR Description: transformer serine/arginine-rich
  misc_feature (57)..(381): Homolog of NCBI NO: 34902002 NR Description: putative transformer serine/arginine-rich
  misc_feature (31)..(382): Homolog of NCBI NO: 18390758 NR Description: transformer serine/arginine-rich
  misc_feature (1)..(30): Homolog of NCBI NO: 8778550 NR Description: F22G5.31 [Arabidopsis thaliana]
  misc_feature (64)..(382): Homolog of NCBI NO: 8778550 NR Description: F22G5.31 [Arabidopsis thaliana]
  misc_feature (1)..(382): Homolog of NCBI NO: 28973767 NR Description: putative transformer-SR ribonucleoprotein
MGKREIHFTPVGRQVQRVLEYPLRLENRSPMSYSRRSRYSPSLSPYDKRRGRSVSRSLSRSPTRSVSSDAENPGNSLYVTGLSHRVTERDLEDHFAKEGKVTDVHLVLDPWTRESRGFGFISMKSVGDANRCIRSLDHSVLQGRVITVEKARRRRGRTPTPGKYLGLRTARGRHKSPSYSPRRSVSCSRSRSRSYSSDRGRSYSPSYGRRGRSSSYSPFYRRRRFYSPSRSPSPDDRYNRRRDRSYSPYYRRRDRSRSYSRNCRARDRSPYYMRRYRSRSRSYSPRYRARDRSCSPYYRGRDRSYSPHYQGRDRSYSPESRYYRRHRSVSGSVSPGGRSMSRSISPRKGRKESRSKSRRHDRQSSMCHSRSARSSTSRSVSP

SEQ ID NO: 41337 - protein, 352 aa, Arabidopsis thaliana
  peptide (1)..(352): Ceres Seq. ID no. 13488795
  misc_feature (47)..(118): Pfam Name: RNA recognition motif. (a.k.a. RRM, RBD, or RNP domain) Pfam Description: RNA recognition motif. (a.k.a. RRM, RBD, or RNP
  misc_feature (1)..(321): Homolog of NCBI NO: 32405782 NR Description: hypothetical protein [Neurospora crassa]
  misc_feature (1)..(321): Homolog of NCBI NO: 16944647 NR Description: conserved hypothetical protein [Neurospora crassa]
  misc_feature (1)..(192): Homolog of NCBI NO: 11275253 NR Description: transformer-2-like protein - liverwort
  misc_feature (1)..(185): Homolog of NCBI NO: 7489207 NR Description: transformer-SR ribonucleoprotein - common tobacco
  misc_feature (1)..(218): Homolog of NCBI NO: 40253470 NR Description: putative transformer-SR ribonucleoprotein
  misc_feature (1)..(120): Homolog of NCBI NO: 30680096 NR Description: transformer serine/arginine-rich
  misc_feature (27)..(351): Homolog of NCBI NO: 34902002 NR Description: putative transformer serine/arginine-rich
  misc_feature (1)..(352): Homolog of NCBI NO: 18390758 NR Description: transformer serine/arginine-rich
  misc_feature (34)..(352): Homolog of NCBI NO: 8778550 NR Description: F22G5.31 [Arabidopsis thaliana]
  misc_feature (1)..(352): Homolog of NCBI NO: 28973767 NR Description: putative transformer-SR ribonucleoprotein
MSYSRRSRYSPSLSPYDKRRGRSVSRSLSRSPTRSVSSDAENPGNSLYVTGLSHRVTERDLEDHFAKEGKVTDVHLVLDPWTRESRGFGFISMKSVGDANRCIRSLDHSVLQGRVITVEKARRRRGRTPTPGKYLGLRTARGRHKSPSYSPRRSVSCSRSRSRSYSSDRGRSYSPSYGRRGRSSSYSPFYRRRRFYSPSRSPSPDDRYNRRRDRSYSPYYRRRDRSRSYSRNCRARDRSPYYMRRYRSRSRSYSPRYRARDRSCSPYYRGRDRSYSPHYQGRDRSYSPESRYYRRHRSVSGSVSPGGRSMSRSISPRKGRKESRSKSRRHDRQSSMCHSRSARSSTSRSVSP

SEQ ID NO: 41338 - protein, 260 aa, Arabidopsis thaliana
  peptide (1)..(260): Ceres Seq. ID no. 13488796
  misc_feature (1)..(229): Homolog of NCBI NO: 32405782 NR Description: hypothetical protein [Neurospora crassa]
  misc_feature (1)..(229): Homolog of NCBI NO: 16944647 NR Description: conserved hypothetical protein [Neurospora crassa]
  misc_feature (1)..(100): Homolog of NCBI NO: 11275253 NR Description: transformer-2-like protein - liverwort
  misc_feature (1)..(93): Homolog of NCBI NO: 7489207 NR Description: transformer-SR ribonucleoprotein - common tobacco
  misc_feature (1)..(126): Homolog of NCBI NO: 40253470 NR Description: putative transformer-SR ribonucleoprotein
  misc_feature (1)..(28): Homolog of NCBI NO: 30680096 NR Description: transformer serine/arginine-rich
  misc_feature (1)..(259): Homolog of NCBI NO: 34902002 NR Description: putative transformer serine/arginine-rich
  misc_feature (1)..(260): Homolog of NCBI NO: 18390758 NR Description: transformer serine/arginine-rich
  misc_feature (1)..(260): Homolog of NCBI NO: 8778550 NR Description: F22G5.31 [Arabidopsis thaliana]
  misc_feature (1)..(260): Homolog of NCBI NO: 28973767 NR Description: putative transformer-SR ribonucleoprotein
MKSVGDANRCIRSLDHSVLQGRVITVEKARRRRGRTPTPGKYLGLRTARGRHKSPSYSPRRSVSCSRSRSRSYSSDRGRSYSPSYGRRGRSSSYSPFYRRRRFYSPSRSPSPDDRYNRRRDRSYSPYYRRRDRSRSYSRNCRARDRSPYYMRRYRSRSRSYSPRYRARDRSCSPYYRGRDRSYSPHYQGRDRSYSPESRYYRRHRSVSGSVSPGGRSMSRSISPRKGRKESRSKSRRHDRQSSMCHSRSARSSTSRSVSP

SEQ ID NO: 41339 - DNA, 1128 bp, Arabidopsis thaliana
  misc_feature (1)..(1128): Ceres Seq. ID no. 12395675
  misc_feature: MA Experiment ID: 108435 Result: Down-regulated in Transcription
  misc_feature: MA Experiment 108435 PARAMETER Experiment Name: At_stm_Mutants_cDNA_P Parameter: Plant Line Value: wt Landsburg vs stm
  misc_feature: MA Experiment 108435 PARAMETER Experiment Name: At_stm_Mutants_cDNA_P Parameter: Tissue Value: Shoot Apical Meristem Region
  misc_feature: MA Experiment ID: 108488 Result: Up-regulated in Transcription
  misc_feature: MA Experiment ID: 108595 Result: Down-regulated in Transcription
  misc_feature: MA Experiment 108595 PARAMETER Experiment Name: At_Ler-pi_Ovule_cDNA_P Parameter: Plant Line Value: null
  misc_feature: MA Experiment ID: 20001905 Result: Down-regulated in Transcription
  misc_feature: MA Experiment 20001905 PARAMETER Experiment Name: At_Drought_Reproduction_P Parameter: Age (day) Value: 40
  misc_feature: MA Experiment 20001905 PARAMETER Experiment Name: At_Drought_Reproduction_P Parameter: Organism Value: A. thaliana
  misc_feature: MA Experiment 20001905 PARAMETER Experiment Name: At_Drought_Reproduction_P Parameter: Plant Line Value: WS
  misc_feature: MA Experiment 20001905 PARAMETER Experiment Name: At_Drought_Reproduction_P Parameter: Timepoint (day) Value: 10
  misc_feature: MA Experiment 20001905 PARAMETER Experiment Name: At_Drought_Reproduction_P Parameter: Tissue Value: Rosettes
  misc_feature: MA Experiment 20001905 PARAMETER Experiment Name: At_Drought_Reproduction_P Parameter: Treatment Value: Drought vs. No Drought
acacatacaagactctcctcacagaacgatttagatttaatcgggaaaaagttcagtcagtgacactaatgttcgaatcgaacatggttcttcaaacactatcttcttcttctcctccaattcaccgtctctatcttcaccattctcagattctcccttcttctgggtcacccagcaagatttctcttcagatacatggaaggactttggccattcgatcttttcatgattatgtctttgcagaaatttctgctagaggtttaccggctttgaacaaagcttccttgaagaagctaccaatcaaaggatctacctttctgctggggcagagcttgttgatggtttctgctcacccacagttggcagcagcagcagaaatcataaagcctgaaccgatttacgaagttggagagttatttgaacttagtattcagctttcttacttgctgttactactggggttgcttggagttggtactttctatgtgatccgtcaagtacttgtacgcagagaactagacctctccgctaaagaattgcaggagcaagtaaggagcggagatgcaagtgcaacagagctctttgagcttggtgcagtgatgttgaggaagttttatcctgcagccaacaagtttttgcaacaagctatccagaaatgggacggtgatgatcaagatcttgctcaggtctataacgctcttggagtgagttatgtacgagaggataaacttgacaaaggaattgctcagtttgaaatggcggtgaagctgcaacccggttatgtaacagcttggaacaaccttggggatgcttatgagaagaagaaggagttgcctttggcattgaatgcgtttgaagaagttttgttgtttgatccaaacaataaggtggctcggcctcggcgagatgcgttgaaggatcgcgtgaagctttataaaggtgttgtggctgttaagtctaagaaacggtgacggctcaaacaagatgcaaactctgaaccaagaaccgttggtctctctcccccttgtgtatttttttggtttggtaatatgtatggagattttgtgttaatatgaaaatgaaactttgttgttttttgtaaccaataaaatcagatgtttaaaactt

SEQ ID NO: 41340 - protein, 322 aa, Arabidopsis thaliana
  peptide (1)..(322): Ceres Seq. ID no. 12395676
  misc_feature (261)..(294): Pfam Name: TPR Domain Pfam Description: TPR Domain
  misc_feature (142)..(305): Homolog of NCBI NO: 23129236 NR Description: hypothetical protein [Nostoc punctiforme]
  misc_feature (142)..(308): Homolog of NCBI NO: 23042213 NR Description: hypothetical protein [Trichodesmium erythraeum
  misc_feature (140)..(308): Homolog of NCBI NO: 22299949 NR Description: photosystem I assembly related protein
  misc_feature (119)..(229): Homolog of NCBI NO: 38636894 NR Description: stress inducible protein-like
  misc_feature (119)..(229): Homolog of NCBI NO: 37535100 NR Description: unknown protein [Oryza sativa (japonica
  misc_feature (119)..(322): Homolog of NCBI NO: 37535090 NR Description: putative stress inducible protein
  misc_feature (28)..(322): Homolog of NCBI NO: 7487355 NR Description: hypothetical protein T22J18.13 - Arabidopsis
  misc_feature (23)..(322): Homolog of NCBI NO: 22329737 NR Description: expressed protein
  misc_feature (23)..(322): Homolog of NCBI NO: 30687988 NR Description: tetratricopeptide repeat (TPR)-containing protein
  misc_feature (23)..(322): Homolog of NCBI NO: 21537104 NR Description: unknown [Arabidopsis thaliana]
TYKTLLTERFRFNREKVQSVTLMFESNMVLQTLSSSSPPIHRLYLHHSQILPSSGSPSKISLQIHGRTLAIRSFHDYVFAEISARGLPALNKASLKKLPIKGSTFLLGQSLLMVSAHPQLAAAAEIIKPEPIYEVGELFELSIQLSYLLLLLGLLGVGTFYVIRQVLVRRELDLSAKELQEQVRSGDASATELFELGAVMLRKFYPAANKFLQQAIQKWDGDDQDLAQVYNALGVSYVREDKLDKGIAQFEMAVKLQPGYVTAWNNLGDAYEKKKELPLALNAFEEVLLFDPNNKVARPRRDALKDRVKLYKGVVAVKSKKR

SEQ ID NO: 41341 - protein, 300 aa, Arabidopsis thaliana
  peptide (1)..(300): Ceres Seq. ID no. 12395677
  misc_feature (239)..(272): Pfam Name: TPR Domain Pfam Description: TPR Domain
  misc_feature (120)..(283): Homolog of NCBI NO: 23129236 NR Description: hypothetical protein [Nostoc punctiforme]
  misc_feature (120)..(286): Homolog of NCBI NO: 23042213 NR Description: hypothetical protein [Trichodesmium erythraeum
  misc_feature (118)..(286): Homolog of NCBI NO: 22299949 NR Description: photosystem I assembly related protein
  misc_feature (97)..(207): Homolog of NCBI NO: 38636894 NR Description: stress inducible protein-like
  misc_feature (97)..(207): Homolog of NCBI NO: 37535100 NR Description: unknown protein [Oryza sativa (japonica
  misc_feature (97)..(300): Homolog of NCBI NO: 37535090 NR Description: putative stress inducible protein
  misc_feature (6)..(300): Homolog of NCBI NO: 7487355 NR Description: hypothetical protein T22J18.13 - Arabidopsis
  misc_feature (1)..(300): Homolog of NCBI NO: 22329737 NR Description: expressed protein
  misc_feature (1)..(300): Homolog of NCBI NO: 30687988 NR Description: tetratricopeptide repeat (TPR)-containing protein
  misc_feature (1)..(300): Homolog of NCBI NO: 21537104 NR Description: unknown [Arabidopsis thaliana]
MFESNMVLQTLSSSSPPIHRLYLHHSQILPSSGSPSKISLQIHGRTLAIRSFHDYVFAEISARGLPALNKASLKKLPIKGSTFLLGQSLLMVSAHPQLAAAAEIIKPEPIYEVGELFELSIQLSYLLLLLGLLGVGTFYVIRQVLVRRELDLSAKELQEQVRSGDASATELFELGAVMLRKFYPAANKFLQQAIQKWDGDDQDLAQVYNALGVSYVREDKLDKGIAQFEMAVKLQPGYVTAWNNLGDAYEKKKELPLALNAFEEVLLFDPNNKVARPRRDALKDRVKLYKGVVAVKSKKR

SEQ ID NO: 41342 - protein, 295 aa, Arabidopsis thaliana
  peptide (1)..(295): Ceres Seq. ID no. 12395678
  misc_feature (234)..(267): Pfam Name: TPR Domain Pfam Description: TPR Domain
  misc_feature (115)..(278): Homolog of NCBI NO: 23129236 NR Description: hypothetical protein [Nostoc punctiforme]
  misc_feature (115)..(281): Homolog of NCBI NO: 23042213 NR Description: hypothetical protein [Trichodesmium erythraeum
  misc_feature (113)..(281): Homolog of NCBI NO: 22299949 NR Description: photosystem I assembly related protein
  misc_feature (92)..(202): Homolog of NCBI NO: 38636894 NR Description: stress inducible protein-like
  misc_feature (92)..(202): Homolog of NCBI NO: 37535100 NR Description: unknown protein [Oryza sativa (japonica
  misc_feature (92)..(295): Homolog of NCBI NO: 37535090 NR Description: putative stress inducible protein
  misc_feature (1)..(295): Homolog of NCBI NO: 7487355 NR Description: hypothetical protein T22J18.13 - Arabidopsis
  misc_feature (1)..(295): Homolog of NCBI NO: 22329737 NR Description: expressed protein
  misc_feature (1)..(295): Homolog of NCBI NO: 30687988 NR Description: tetratricopeptide repeat (TPR)-containing protein
  misc_feature (1)..(295): Homolog of NCBI NO: 21537104 NR Description: unknown [Arabidopsis thaliana]
MVLQTLSSSSPPIHRLYLHHSQILPSSGSPSKISLQIHGRTLAIRSFHDYVFAEISARGLPALNKASLKKLPIKGSTFLLGQSLLMVSAHPQLAAAAEIIKPEPIYEVGELFELSIQLSYLLLLLGLLGVGTFYVIRQVLVRRELDLSAKELQEQVRSGDASATELFELGAVMLRKFYPAANKFLQQAIQKWDGDDQDLAQVYNALGVSYVREDKLDKGIAQFEMAVKLQPGYVTAWNNLGDAYEKKKELPLALNAFEEVLLFDPNNKVARPRRDALKDRVKLYKGVVAVKSKKR

SEQ ID NO: 41343 - DNA, 1482 bp, Arabidopsis thaliana
  misc_feature (1)..(1482): Ceres Seq. ID no. 13500025
  misc_feature: MA Experiment ID: 108434 Result: Up-regulated in Transcription
  misc_feature: MA Experiment 108434 PARAMETER Experiment Name: At_Root_Tips_cDNA_P Parameter: Tissue Value: Root Tips
  misc_feature: MA Experiment ID: 108435 Result: Down-regulated in Transcription
  misc_feature: MA Experiment 108435 PARAMETER Experiment Name: At_stm_Mutants_cDNA_P Parameter: Plant Line Value: wt Landsburg vs stm
  misc_feature: MA Experiment 108435 PARAMETER Experiment Name: At_stm_Mutants_cDNA_P Parameter: Tissue Value: Shoot Apical Meristem Region
  misc_feature: MA Experiment ID: 108462 Result: Up-regulated in Transcription
  misc_feature: MA Experiment 108462 PARAMETER Experiment Name: At_Germinating_Seeds_cDNA_P Parameter: Age (day) Value: 2 vs. 0
  misc_feature: MA Experiment 108462 PARAMETER Experiment Name: At_Germinating_Seeds_cDNA_P Parameter: Tissue Value: Germinating Seeds
  misc_feature: MA Experiment ID: 108488 Result: Up-regulated in Transcription
  misc_feature: MA Experiment ID: 108561 Result: Down-regulated in Transcription
  misc_feature: MA Experiment 108561 PARAMETER Experiment Name: At_100uM_ABA_cDNA_P Parameter: Timepoint (hr) Value: 6
  misc_feature: MA Experiment 108561 PARAMETER Experiment Name: At_100uM_ABA_cDNA_P Parameter: Tissue Value: Aerial
  misc_feature: MA Experiment 108561 PARAMETER Experiment Name: At_100uM_ABA_cDNA_P Parameter: Treatment Value: 100uM ABA vs. No Treatment
  misc_feature: MA Experiment ID: 108573 Result: Down-regulated in Transcription
  misc_feature: MA Experiment 108573 PARAMETER Experiment Name: At_Drought_cDNA_P Parameter: Timepoint (hr) Value: 6
  misc_feature: MA Experiment 108573 PARAMETER Experiment Name: At_Drought_cDNA_P Parameter: Tissue Value: Aerial
  misc_feature: MA Experiment 108573 PARAMETER Experiment Name: At_Drought_cDNA_P Parameter: Treatment Value: Drought vs. No Drought
  misc_feature: MA Experiment ID: 108585 Result: Down-regulated in Transcription
  misc_feature: MA Experiment 108585 PARAMETER Experiment Name: At_5mM_NaNP_cDNA_P Parameter: Timepoint (hr) Value: 6
  misc_feature: MA Experiment 108585 PARAMETER Experiment Name: At_5mM_NaNP_cDNA_P Parameter: Tissue Value: Aerial
  misc_feature: MA Experiment 108585 PARAMETER Experiment Name: At_5mM_NaNP_cDNA_P Parameter: Treatment Value: null
  misc_feature: MA Experiment ID: 108595 Result: Down-regulated in Transcription
  misc_feature: MA Experiment 108595 PARAMETER Experiment Name: At_Ler-pi_Ovule_cDNA_P Parameter: Plant Line Value: null
  misc_feature: MA Experiment ID: 108668 Result: Down-regulated in Transcription
  misc_feature: MA Experiment 108668 PARAMETER Experiment Name: At_2mM_SA_cDNA_P Parameter: Plant Line Value: WS
  misc_feature: MA Experiment 108668 PARAMETER Experiment Name: At_2mM_SA_cDNA_P Parameter: Timepoint (hr) Value: 6
  misc_feature: MA Experiment 108668 PARAMETER Experiment Name: At_2mM_SA_cDNA_P Parameter: Treatment Value: 2mM SA vs. No Treatment
  misc_feature: MA Experiment ID: 20000070 Result: Down-regulated in Transcription
  misc_feature: MA Experiment 20000070 PARAMETER Experiment Name: At_100uM_ABA_Mutants_cDNA_P Parameter: Plant Line Value: CS24
  misc_feature: MA Experiment 20000070 PARAMETER Experiment Name: At_100uM_ABA_Mutants_cDNA_P Parameter: Timepoint (hr) Value: 6
  misc_feature: MA Experiment 20000070 PARAMETER Experiment Name: At_100uM_ABA_Mutants_cDNA_P Parameter: Tissue Value: Aerial
  misc_feature: MA Experiment 20000070 PARAMETER Experiment Name: At_100uM_ABA_Mutants_cDNA_P Parameter: Treatment Value: 100uM ABA vs. No Treatment
  misc_feature: MA Experiment ID: 20000071 Result: Down-regulated in Transcription
  misc_feature: MA Experiment 20000071 PARAMETER Experiment Name: At_100uM_ABA_Mutants_cDNA_P Parameter: Plant Line Value: CS8104
  misc_feature: MA Experiment 20000071 PARAMETER Experiment Name: At_100uM_ABA_Mutants_cDNA_P Parameter: Timepoint (hr) Value: 6
  misc_feature: MA Experiment 20000071 PARAMETER Experiment Name: At_100uM_ABA_Mutants_cDNA_P Parameter: Tissue Value: Aerial
  misc_feature: MA Experiment 20000071 PARAMETER Experiment Name: At_100uM_ABA_Mutants_cDNA_P Parameter: Treatment Value: 100uM ABA vs. No Treatment
  misc_feature: MA Experiment ID: 20000111 Result: Down-regulated in Transcription
  misc_feature: MA Experiment 20000111 PARAMETER Experiment Name: At_42deg_Heat_cDNA_P Parameter: Temperature (deg C) Value: 42 vs. 22
  misc_feature: MA Experiment 20000111 PARAMETER Experiment Name: At_42deg_Heat_cDNA_P Parameter: Timepoint (hr) Value: 6
  misc_feature: MA Experiment 20000111 PARAMETER Experiment Name: At_42deg_Heat_cDNA_P Parameter: Tissue Value: Aerial
  misc_feature: MA Experiment ID: 20000113 Result: Down-regulated in Transcription
  misc_feature: MA Experiment 20000113 PARAMETER Experiment Name: At_42deg_Heat_cDNA_P Parameter: Temperature (deg C) Value: 42 vs. 22
  misc_feature: MA Experiment 20000113 PARAMETER Experiment Name: At_42deg_Heat_cDNA_P Parameter: Timepoint (hr) Value: 8
  misc_feature: MA Experiment 20000113 PARAMETER Experiment Name: At_42deg_Heat_cDNA_P Parameter: Tissue Value: Aerial
  misc_feature: MA Experiment ID: 20000117 Result: Down-regulated in Transcription
  misc_feature: MA Experiment 20000117 PARAMETER Experiment Name: At_100uM_ABA_Mutants_cDNA_P Parameter: Plant Line Value: Columbia
  misc_feature: MA Experiment 20000117 PARAMETER Experiment Name: At_100uM_ABA_Mutants_cDNA_P Parameter: Timepoint (hr) Value: 6
  misc_feature: MA Experiment 20000117 PARAMETER Experiment Name: At_100uM_ABA_Mutants_cDNA_P Parameter: Tissue Value: Aerial
  misc_feature: MA Experiment 20000117 PARAMETER Experiment Name: At_100uM_ABA_Mutants_cDNA_P Parameter: Treatment Value: 100uM ABA vs. No Treatment
  misc_feature: MA Experiment ID: 20000173 Result: Down-regulated in Transcription
  misc_feature: MA Experiment 20000173 PARAMETER Experiment Name: At_42deg_Heat_P Parameter: Age (day) Value: 14
  misc_feature: MA Experiment 20000173 PARAMETER Experiment Name: At_42deg_Heat_P Parameter: Organism Value: A. thaliana
  misc_feature: MA Experiment 20000173 PARAMETER Experiment Name: At_42deg_Heat_P Parameter: Plant Line Value: WS
  misc_feature: MA Experiment 20000173 PARAMETER Experiment Name: At_42deg_Heat_P Parameter: Temperature (deg C) Value: 42 vs. 22
  misc_feature: MA Experiment 20000173 PARAMETER Experiment Name: At_42deg_Heat_P Parameter: Timepoint (hr) Value: 6
  misc_feature: MA Experiment 20000173 PARAMETER Experiment Name: At_42deg_Heat_P Parameter: Tissue Value: Aerial
  misc_feature: MA Experiment ID: 20000180 Result: Up-regulated in Transcription
  misc_feature: MA Experiment 20000180 PARAMETER Experiment Name: At_Germinating_Seeds_P Parameter: Age (hr) Value: 24 vs. 0
  misc_feature: MA Experiment 20000180 PARAMETER Experiment Name: At_Germinating_Seeds_P Parameter: Tissue Value: Germinating Seeds
  misc_feature: MA Experiment ID: 20000182 Result: Down-regulated in Transcription
  misc_feature: MA Experiment 20000182 PARAMETER Experiment Name: At_2mM_SA_P Parameter: Age (day) Value: 14
  misc_feature: MA Experiment 20000182 PARAMETER Experiment Name: At_2mM_SA_P Parameter: Organism Value: A. thaliana
  misc_feature: MA Experiment 20000182 PARAMETER Experiment Name: At_2mM_SA_P Parameter: Plant Line Value: WS
  misc_feature: MA Experiment 20000182 PARAMETER Experiment Name: At_2mM_SA_P Parameter: Timepoint (hr) Value: 6
  misc_feature: MA Experiment 20000182 PARAMETER Experiment Name: At_2mM_SA_P Parameter: Tissue Value: Aerial
  misc_feature: MA Experiment 20000182 PARAMETER Experiment Name: At_2mM_SA_P Parameter: Treatment Value: 2mM SA vs. No Treatment
  misc_feature: MA Experiment ID: 20000185 Result: Down-regulated in Transcription
  misc_feature: MA Experiment 20000185 PARAMETER Experiment Name: At_Roots__P Parameter: Age (day) Value: 7 vs. 21
  misc_feature: MA Experiment 20000185 PARAMETER Experiment Name: At_Roots__P Parameter: Organism Value: A. thaliana
  misc_feature: MA Experiment 20000185 PARAMETER Experiment Name: At_Roots__P Parameter: Tissue Value: Roots vs. Whole Plant
  misc_feature: MA Experiment ID: 20000436 Result: Down-regulated in Transcription
  misc_feature: MA Experiment 20000436 PARAMETER Experiment Name: At_Drought_P Parameter: Age (day) Value: 7
  misc_feature: MA Experiment 20000436 PARAMETER Experiment Name: At_Drought_P Parameter: Organism Value: A. thaliana
  misc_feature: MA Experiment 20000436 PARAMETER Experiment Name: At_Drought_P Parameter: Plant Line Value: WS
  misc_feature: MA Experiment 20000436 PARAMETER Experiment Name: At_Drought_P Parameter: Timepoint (hr) Value: 12
  misc_feature: MA Experiment 20000436 PARAMETER Experiment Name: At_Drought_P Parameter: Tissue Value: Whole Plant
  misc_feature: MA Experiment 20000436 PARAMETER Experiment Name: At_Drought_P Parameter: Treatment Value: Drought vs. No Drought
  misc_feature: MA Experiment ID: 20000437 Result: Down-regulated in Transcription
  misc_feature: MA Experiment 20000437 PARAMETER Experiment Name: At_Drought_P Parameter: Age (day) Value: 8
  misc_feature: MA Experiment 20000437 PARAMETER Experiment Name: At_Drought_P Parameter: Organism Value: A. thaliana
  misc_feature: MA Experiment 20000437 PARAMETER Experiment Name: At_Drought_P Parameter: Plant Line Value: WS
  misc_feature: MA Experiment 20000437 PARAMETER Experiment Name: At_Drought_P Parameter: Timepoint (hr) Value: 24
  misc_feature: MA Experiment 20000437 PARAMETER Experiment Name: At_Drought_P Parameter: Tissue Value: Whole Plant
  misc_feature: MA Experiment 20000437 PARAMETER Experiment Name: At_Drought_P Parameter: Treatment Value: Drought vs. No Drought
  misc_feature: MA Experiment ID: 20000438 Result: Up-regulated in Transcription
  misc_feature: MA Experiment 20000438 PARAMETER Experiment Name: At_Shoots__P Parameter: Age (day) Value: 14
  misc_feature: MA Experiment 20000438 PARAMETER Experiment Name: At_Shoots__P Parameter: Tissue Value: Shoots vs. Whole Plant
  misc_feature: MA Experiment ID: 20000439 Result: Down-regulated in Transcription
  misc_feature: MA Experiment 20000439 PARAMETER Experiment Name: At_Roots__P Parameter: Age (day) Value: 14 vs. 21
  misc_feature: MA Experiment 20000439 PARAMETER Experiment Name: At_Roots__P Parameter: Organism Value: A. thaliana
  misc_feature: MA Experiment 20000439 PARAMETER Experiment Name: At_Roots__P Parameter: Tissue Value: Roots vs. Whole Plant
  misc_feature: MA Experiment ID: 20001248 Result: Down-regulated in Transcription
  misc_feature: MA Experiment 20001248 PARAMETER Experiment Name: At_Far-red-induction_P Parameter: Age (day) Value: 7
  misc_feature: MA Experiment 20001248 PARAMETER Experiment Name: At_Far-red-induction_P Parameter: Light Value: Far-red vs. White
  misc_feature: MA Experiment 20001248 PARAMETER Experiment Name: At_Far-red-induction_P Parameter: Organism Value: A. thaliana
  misc_feature: MA Experiment 20001248 PARAMETER Experiment Name: At_Far-red-induction_P Parameter: Plant Line Value: Columbia
  misc_feature: MA Experiment 20001248 PARAMETER Experiment Name: At_Far-red-induction_P Parameter: Timepoint (hr) Value: 4
  misc_feature: MA Experiment 20001248 PARAMETER Experiment Name: At_Far-red-induction_P Parameter: Tissue Value: Whole Plant
  misc_feature: MA Experiment ID: 20001450 Result: Down-regulated in Transcription
  misc_feature: MA Experiment 20001450 PARAMETER Experiment Name: At_Far-red-induction_P Parameter: Age (day) Value: 7
  misc_feature: MA Experiment 20001450 PARAMETER Experiment Name: At_Far-red-induction_P Parameter: Light Value: Far-red vs. White
  misc_feature: MA Experiment 20001450 PARAMETER Experiment Name: At_Far-red-induction_P Parameter: Organism Value: A. thaliana
  misc_feature: MA Experiment 20001450 PARAMETER Experiment Name: At_Far-red-induction_P Parameter: Plant Line Value: Columbia
  misc_feature: MA Experiment 20001450 PARAMETER Experiment Name: At_Far-red-induction_P Parameter: Timepoint (hr) Value: 8
  misc_feature: MA Experiment 20001450 PARAMETER Experiment Name: At_Far-red-induction_P Parameter: Tissue Value: Whole Plant
  misc_feature: MA Experiment ID: 20001451 Result: Down-regulated in Transcription
  misc_feature: MA Experiment 20001451 PARAMETER Experiment Name: At_Far-red-induction_P Parameter: Age (day) Value: 7
  misc_feature: MA Experiment 20001451 PARAMETER Experiment Name: At_Far-red-induction_P Parameter: Light Value: Far-red vs. White
  misc_feature: MA Experiment 20001451 PARAMETER Experiment Name: At_Far-red-induction_P Parameter: Organism Value: A. thaliana
  misc_feature: MA Experiment 20001451 PARAMETER Experiment Name: At_Far-red-induction_P Parameter: Plant Line Value: Columbia
  misc_feature: MA Experiment 20001451 PARAMETER Experiment Name: At_Far-red-induction_P Parameter: Timepoint (hr) Value: 24
  misc_feature: MA Experiment 20001451 PARAMETER Experiment Name: At_Far-red-induction_P Parameter: Tissue Value: Whole Plant
  misc_feature: MA Experiment ID: 20001906 Result: Down-regulated in Transcription
  misc_feature: MA Experiment 20001906 PARAMETER Experiment Name: At_Drought_Reproduction_P Parameter: Age (day) Value: 35
  misc_feature: MA Experiment 20001906 PARAMETER Experiment Name: At_Drought_Reproduction_P Parameter: Organism Value: A. thaliana
  misc_feature: MA Experiment 20001906 PARAMETER Experiment Name: At_Drought_Reproduction_P Parameter: Plant Line Value: WS
  misc_feature: MA Experiment 20001906 PARAMETER Experiment Name: At_Drought_Reproduction_P Parameter: Timepoint (day) Value: 5
  misc_feature: MA Experiment 20001906 PARAMETER Experiment Name: At_Drought_Reproduction_P Parameter: Tissue Value: Siliques
  misc_feature: MA Experiment 20001906 PARAMETER Experiment Name: At_Drought_Reproduction_P Parameter: Treatment Value: Drought vs. No Drought
  misc_feature: MA Experiment ID: 20001911 Result: Down-regulated in Transcription
  misc_feature: MA Experiment 20001911 PARAMETER Experiment Name: At_Drought_Reproduction_P Parameter: Age (day) Value: 40
  misc_feature: MA Experiment 20001911 PARAMETER Experiment Name: At_Drought_Reproduction_P Parameter: Organism Value: A. thaliana
  misc_feature: MA Experiment 20001911 PARAMETER Experiment Name: At_Drought_Reproduction_P Parameter: Plant Line Value: WS
  misc_feature: MA Experiment 20001911 PARAMETER Experiment Name: At_Drought_Reproduction_P Parameter: Timepoint (day) Value: 10
  misc_feature: MA Experiment 20001911 PARAMETER Experiment Name: At_Drought_Reproduction_P Parameter: Tissue Value: Flowers
  misc_feature: MA Experiment 20001911 PARAMETER Experiment Name: At_Drought_Reproduction_P Parameter: Treatment Value: Drought vs. No Drought
gaagacgttaaccccatctcgttgaaagagagaagatgctaagatctcaaaacagagtataacaacaccttgacctcgttgaagaagcctttgagattgtctcggggatctgaaaaatgtcaatccttcaagtctctacttcgtctctttcttcttctactcttctctccatatctcccagaaaatctctctcatctaccaagtcatgccggatagttcgatgttccgtcgagggaactactgtaaccgagagaaaagtctcggcaaccagcgagccacttcttctgagagctgttaaaggtgaagttgttgatagacctccggtttggcttatgaggcaagctgggaggtacatgaagagttatcaaactctctgtgagaagtatccttctttcagagatagatcagagaatgcagatcttgtggtggaaatttctttgcagccatggaaggtgtttaagccagatggggtgattctgttctcagacattctcactccattgtctggaatgaacatacctttcgacattgttaaaggaaaaggtcctatcatctttaacccgcctcaatcagctgccgacgttgctcaagttagagaattcgtaccagaggaatctgttccttatgttggagaagcactcagaagattaagaaatgaggtgaacaatgaagccgctgttctgggatttgttggagctccatttacactttcttcgtatgtaatcgaaggtggctcatctaagaacttcacacagataaaaagattagctttttctcaacccaaggttctacatgccttactccagaagttcacaacctcgatgataacgtacatacgctatcaagcagatagcggagctcaagctgtgcaaatattcgactcttgggcaaccgagcttagcccggtggattttgaggagtttagcttaccttatctcaaacagattgtggaagctgtgaaacaaactcacccaaacctacctctcatactttatgctagtggatcaggaggtttgctagagagactggctcggaccggtgtggatgttgtgagcttggactggactgtggacatggctgaaggaagagaccggctaggaagagacatagcagttcaaggaaacgttgatccgggagttctatttggatcgaaagaatttatcacaagccggattcatgatactgtgaagaaagctgggagagataaacacattctcaacttggggcatggtattaaagttggaacccctgaagagaatgtagcacacttctttgaggttgctcaagaaattagatattaagagaaagaatgaatgtgatgattattatgctttgttgttaatttcggccttccatctttttttctttttccatttgagatgtgtaattttatttttatattttaactgtaatttttttttgtagactacttggaagaaagtaatgattaacgtgcaatggatattcatatatgtaggctct

SEQ ID NO: 41344 - protein, 394 aa, Arabidopsis thaliana
  peptide (1)..(394): Ceres Seq. ID no. 13500026
  misc_feature (51)..(392): Pfam Name: Uroporphyrinogen decarboxylase (URO-D) Pfam Description: Uroporphyrinogen decarboxylase (URO-D)
  misc_feature (51)..(392): Pfam Name: Uroporphyrinogen decarboxylase (URO-D) Pfam Description: Uroporphyrinogen decarboxylase (URO-D)
  misc_feature (52)..(392): Homolog of NCBI NO: 33240529 NR Description: Uroporphyrinogen decarboxylase
  misc_feature (48)..(392): Homolog of NCBI NO: 231982 NR Description: Uroporphyrinogen decarboxylase (URO-D) (UPD)
  misc_feature (50)..(392): Homolog of NCBI NO: 16332025 NR Description: uroporphyrinogen decarboxylase [Synechocystis sp.
  misc_feature (54)..(392): Homolog of NCBI NO: 23041382 NR Description: hypothetical protein [Trichodesmium erythraeum
  misc_feature (63)..(394): Homolog of NCBI NO: 6014938 NR Description: Uroporphyrinogen decarboxylase, chloroplast
  misc_feature (52)..(392): Homolog of NCBI NO: 33240529 NR Description: Uroporphyrinogen decarboxylase
  misc_feature (50)..(392): Homolog of NCBI NO: 16332025 NR Description: uroporphyrinogen decarboxylase [Synechocystis sp.
  misc_feature (63)..(394): Homolog of NCBI NO: 6014938 NR Description: Uroporphyrinogen decarboxylase, chloroplast
  misc_feature (1)..(394): Homolog of NCBI NO: 15226690 NR Description: uroporphyrinogen decarboxylase (UPD), putative
  misc_feature (1)..(394): Homolog of NCBI NO: 14334768 NR Description: putative uroporphyrinogen decarboxylase
  misc_feature (7)..(394): Homolog of NCBI NO: 2501647 NR Description: Uroporphyrinogen decarboxylase, chloroplast
  misc_feature (42)..(394): Homolog of NCBI NO: 16975230 NR Description: Chain A, Crystal Structure And Substrate Binding Of The Uroporphyrinogen-Iii Decarboxylase From Nicotiana Tabacum:
  misc_feature (65)..(394): Homolog of NCBI NO: 2501646 NR Description: Uroporphyrinogen decarboxylase (UPD)
  misc_feature (54)..(392): Homolog of NCBI NO: 23041382 NR Description: hypothetical protein [Trichodesmium erythraeum
  misc_feature (48)..(392): Homolog of NCBI NO: 231982 NR Description: Uroporphyrinogen decarboxylase (URO-D) (UPD)
  misc_feature (65)..(394): Homolog of NCBI NO: 2501646 NR Description: Uroporphyrinogen decarboxylase (UPD)
  misc_feature (42)..(394): Homolog of NCBI NO: 16975230 NR Description: Chain A, Crystal Structure And Substrate Binding Of The Uroporphyrinogen-Iii Decarboxylase From Nicotiana Tabacum:
  misc_feature (7)..(394): Homolog of NCBI NO: 2501647 NR Description: Uroporphyrinogen decarboxylase, chloroplast
  misc_feature (1)..(394): Homolog of NCBI NO: 14334768 NR Description: putative uroporphyrinogen decarboxylase
  misc_feature (1)..(394): Homolog of NCBI NO: 15226690 NR Description: uroporphyrinogen decarboxylase (UPD), putative
MSILQVSTSSLSSSTLLSISPRKSLSSTKSCRIVRCSVEGTTVTERKVSATSEPLLLRAVKGEVVDRPPVWLMRQAGRYMKSYQTLCEKYPSFRDRSENADLVVEISLQPWKVFKPDGVILFSDILTPLSGMNIPFDIVKGKGPIIFNPPQSAADVAQVREFVPEESVPYVGEALRRLRNEVNNEAAVLGFVGAPFTLSSYVIEGGSSKNFTQIKRLAFSQPKVLHALLQKFTTSMITYIRYQADSGAQAVQIFDSWATELSPVDFEEFSLPYLKQIVEAVKQTHPNLPLILYASGSGGLLERLARTGVDVVSLDWTVDMAEGRDRLGRDIAVQGNVDPGVLFGSKEFITSRIHDTVKKAGRDKHILNLGHGIKVGTPEENVAHFFEVAQEIRY

SEQ ID NO: 41345 - protein, 322 aa, Arabidopsis thaliana
  peptide (1)..(322): Ceres Seq. ID no. 13500027
  misc_feature (1)..(320): Pfam Name: Uroporphyrinogen decarboxylase (URO-D) Pfam Description: Uroporphyrinogen decarboxylase (URO-D)
  misc_feature (1)..(320): Pfam Name: Uroporphyrinogen decarboxylase (URO-D) Pfam Description: Uroporphyrinogen decarboxylase (URO-D)
  misc_feature (1)..(320): Homolog of NCBI NO: 33240529 NR Description: Uroporphyrinogen decarboxylase
  misc_feature (1)..(320): Homolog of NCBI NO: 231982 NR Description: Uroporphyrinogen decarboxylase (URO-D) (UPD)
  misc_feature (1)..(320): Homolog of NCBI NO: 16332025 NR Description: uroporphyrinogen decarboxylase [Synechocystis sp.
  misc_feature (1)..(320): Homolog of NCBI NO: 23041382 NR Description: hypothetical protein [Trichodesmium erythraeum
  misc_feature (1)..(322): Homolog of NCBI NO: 6014938 NR Description: Uroporphyrinogen decarboxylase, chloroplast
  misc_feature (1)..(320): Homolog of NCBI NO: 33240529 NR Description: Uroporphyrinogen decarboxylase
  misc_feature (1)..(320): Homolog of NCBI NO: 16332025 NR Description: uroporphyrinogen decarboxylase [Synechocystis sp.
  misc_feature (1)..(322): Homolog of NCBI NO: 6014938 NR Description: Uroporphyrinogen decarboxylase, chloroplast
  misc_feature (1)..(322): Homolog of NCBI NO: 15226690 NR Description: uroporphyrinogen decarboxylase (UPD), putative
  misc_feature (1)..(322): Homolog of NCBI NO: 14334768 NR Description: putative uroporphyrinogen decarboxylase
  misc_feature (1)..(322): Homolog of NCBI NO: 2501647 NR Description: Uroporphyrinogen decarboxylase, chloroplast
  misc_feature (1)..(322): Homolog of NCBI NO: 16975230 NR Description: Chain A, Crystal Structure And Substrate Binding Of The Uroporphyrinogen-Iii Decarboxylase From Nicotiana Tabacum:
  misc_feature (1)..(322): Homolog of NCBI NO: 2501646 NR Description: Uroporphyrinogen decarboxylase (UPD)
  misc_feature (1)..(320): Homolog of NCBI NO: 23041382 NR Description: hypothetical protein [Trichodesmium erythraeum
  misc_feature (1)..(320): Homolog of NCBI NO: 231982 NR Description: Uroporphyrinogen decarboxylase (URO-D) (UPD)
  misc_feature (1)..(322): Homolog of NCBI NO: 2501646 NR Description: Uroporphyrinogen decarboxylase (UPD)
  misc_feature (1)..(322): Homolog of NCBI NO: 16975230 NR Description: Chain A, Crystal Structure And Substrate Binding Of The Uroporphyrinogen-Iii Decarboxylase From Nicotiana Tabacum:
  misc_feature (1)..(322): Homolog of NCBI NO: 2501647 NR Description: Uroporphyrinogen decarboxylase, chloroplast
  misc_feature (1)..(322): Homolog of NCBI NO: 14334768 NR Description: putative uroporphyrinogen decarboxylase
  misc_feature (1)..(322): Homolog of NCBI NO: 15226690 NR Description: uroporphyrinogen decarboxylase (UPD), putative
MRQAGRYMKSYQTLCEKYPSFRDRSENADLVVEISLQPWKVFKPDGVILFSDILTPLSGMNIPFDIVKGKGPIIFNPPQSAADVAQVREFVPEESVPYVGEALRRLRNEVNNEAAVLGFVGAPFTLSSYVIEGGSSKNFTQIKRLAFSQPKVLHALLQKFTTSMITYIRYQADSGAQAVQIFDSWATELSPVDFEEFSLPYLKQIVEAVKQTHPNLPLILYASGSGGLLERLARTGVDVVSLDWTVDMAEGRDRLGRDIAVQGNVDPGVLFGSKEFITSRIHDTVKKAGRDKHILNLGHGIKVGTPEENVAHFFEVAQEIRY

SEQ ID NO: 41346 - protein, 315 aa, Arabidopsis thaliana
  peptide (1)..(315): Ceres Seq. ID no. 13500028
  misc_feature (1)..(313): Pfam Name: Uroporphyrinogen decarboxylase (URO-D) Pfam Description: Uroporphyrinogen decarboxylase (URO-D)
  misc_feature (1)..(313): Pfam Name: Uroporphyrinogen decarboxylase (URO-D) Pfam Description: Uroporphyrinogen decarboxylase (URO-D)
  misc_feature (1)..(313): Homolog of NCBI NO: 33240529 NR Description: Uroporphyrinogen decarboxylase
  misc_feature (1)..(313): Homolog of NCBI NO: 231982 NR Description: Uroporphyrinogen decarboxylase (URO-D) (UPD)
  misc_feature (1)..(313): Homolog of NCBI NO: 16332025 NR Description: uroporphyrinogen decarboxylase [Synechocystis sp.
  misc_feature (1)..(313): Homolog of NCBI NO: 23041382 NR Description: hypothetical protein [Trichodesmium erythraeum
  misc_feature (1)..(315): Homolog of NCBI NO: 6014938 NR Description: Uroporphyrinogen decarboxylase, chloroplast
  misc_feature (1)..(313): Homolog of NCBI NO: 33240529 NR Description: Uroporphyrinogen decarboxylase
  misc_feature (1)..(313): Homolog of NCBI NO: 16332025 NR Description: uroporphyrinogen decarboxylase [Synechocystis sp.
  misc_feature (1)..(315): Homolog of NCBI NO: 6014938 NR Description: Uroporphyrinogen decarboxylase, chloroplast
  misc_feature (1)..(315): Homolog of NCBI NO: 15226690 NR Description: uroporphyrinogen decarboxylase (UPD), putative
  misc_feature (1)..(315): Homolog of NCBI NO: 14334768 NR Description: putative uroporphyrinogen decarboxylase
  misc_feature (1)..(315): Homolog of NCBI NO: 2501647 NR Description: Uroporphyrinogen decarboxylase, chloroplast
  misc_feature (1)..(315): Homolog of NCBI NO: 16975230 NR Description: Chain A, Crystal Structure And Substrate Binding Of The Uroporphyrinogen-Iii Decarboxylase From Nicotiana Tabacum:
  misc_feature (1)..(315): Homolog of NCBI NO: 2501646 NR Description: Uroporphyrinogen decarboxylase (UPD)
  misc_feature (1)..(313): Homolog of NCBI NO: 23041382 NR Description: hypothetical protein [Trichodesmium erythraeum
  misc_feature (1)..(313): Homolog of NCBI NO: 231982 NR Description: Uroporphyrinogen decarboxylase (URO-D) (UPD)
  misc_feature (1)..(315): Homolog of NCBI NO: 2501646 NR Description: Uroporphyrinogen decarboxylase (UPD)
  misc_feature (1)..(315): Homolog of NCBI NO: 16975230 NR Description: Chain A, Crystal Structure And Substrate Binding Of The Uroporphyrinogen-Iii Decarboxylase From Nicotiana Tabacum:
  misc_feature (1)..(315): Homolog of NCBI NO: 2501647 NR Description: Uroporphyrinogen decarboxylase, chloroplast
  misc_feature (1)..(315): Homolog of NCBI NO: 14334768 NR Description: putative uroporphyrinogen decarboxylase
  misc_feature (1)..(315): Homolog of NCBI NO: 15226690 NR Description: uroporphyrinogen decarboxylase (UPD), putative
MKSYQTLCEKYPSFRDRSENADLVVEISLQPWKVFKPDGVILFSDILTPLSGMNIPFDIVKGKGPIIFNPPQSAADVAQVREFVPEESVPYVGEALRRLRNEVNNEAAVLGFVGAPFTLSSYVIEGGSSKNFTQIKRLAFSQPKVLHALLQKFTTSMITYIRYQADSGAQAVQIFDSWATELSPVDFEEFSLPYLKQIVEAVKQTHPNLPLILYASGSGGLLERLARTGVDVVSLDWTVDMAEGRDRLGRDIAVQGNVDPGVLFGSKEFITSRIHDTVKKAGRDKHILNLGHGIKVGTPEENVAHFFEVAQEIRY

SEQ ID NO: 41347 - DNA, 1524 bp, Arabidopsis thaliana
  misc_feature (1)..(1524): Ceres Seq. ID no. 12385052
  misc_feature: MA Experiment ID: 108462 Result: Up-regulated in Transcription
  misc_feature: MA Experiment 108462 PARAMETER Experiment Name: At_Germinating_Seeds_cDNA_P Parameter: Age (day) Value: 2 vs. 0
  misc_feature: MA Experiment 108462 PARAMETER Experiment Name: At_Germinating_Seeds_cDNA_P Parameter: Tissue Value: Germinating Seeds
  misc_feature: MA Experiment ID: 108464 Result: Up-regulated in Transcription
  misc_feature: MA Experiment 108464 PARAMETER Experiment Name: At_Germinating_Seeds_cDNA_P Parameter: Age (day) Value: 4 vs. 0
  misc_feature: MA Experiment 108464 PARAMETER Experiment Name: At_Germinating_Seeds_cDNA_P Parameter: Tissue Value: Germinating Seeds
  misc_feature: MA Experiment ID: 108561 Result: Up-regulated in Transcription
  misc_feature: MA Experiment 108561 PARAMETER Experiment Name: At_100uM_ABA_cDNA_P Parameter: Timepoint (hr) Value: 6
  misc_feature: MA Experiment 108561 PARAMETER Experiment Name: At_100uM_ABA_cDNA_P Parameter: Tissue Value: Aerial
  misc_feature: MA Experiment 108561 PARAMETER Experiment Name: At_100uM_ABA_cDNA_P Parameter: Treatment Value: 100uM ABA vs. No Treatment
  misc_feature: MA Experiment ID: 108573 Result: Up-regulated in Transcription
  misc_feature: MA Experiment 108573 PARAMETER Experiment Name: At_Drought_cDNA_P Parameter: Timepoint (hr) Value: 6
  misc_feature: MA Experiment 108573 PARAMETER Experiment Name: At_Drought_cDNA_P Parameter: Tissue Value: Aerial
  misc_feature: MA Experiment 108573 PARAMETER Experiment Name: At_Drought_cDNA_P Parameter: Treatment Value: Drought vs. No Drought
  misc_feature: MA Experiment ID: 108594 Result: Down-regulated in Transcription
  misc_feature: MA Experiment 108594 PARAMETER Experiment Name: At_Ler-rhl_Root_cDNA_P Parameter: Plant Line Value: null
  misc_feature: MA Experiment ID: 108668 Result: Up-regulated in Transcription
  misc_feature: MA Experiment 108668 PARAMETER Experiment Name: At_2mM_SA_cDNA_P Parameter: Plant Line Value: WS
  misc_feature: MA Experiment 108668 PARAMETER Experiment Name: At_2mM_SA_cDNA_P Parameter: Timepoint (hr) Value: 6
  misc_feature: MA Experiment 108668 PARAMETER Experiment Name: At_2mM_SA_cDNA_P Parameter: Treatment Value: 2mM SA vs. No Treatment
  misc_feature: MA Experiment ID: 20000072 Result: Up-regulated in Transcription
  misc_feature: MA Experiment 20000072 PARAMETER Experiment Name: At_100uM_ABA_Mutants_cDNA_P Parameter: Plant Line Value: CS8105
  misc_feature: MA Experiment 20000072 PARAMETER Experiment Name: At_100uM_ABA_Mutants_cDNA_P Parameter: Timepoint (hr) Value: 6
  misc_feature: MA Experiment 20000072 PARAMETER Experiment Name: At_100uM_ABA_Mutants_cDNA_P Parameter: Tissue Value: Aerial
  misc_feature: MA Experiment 20000072 PARAMETER Experiment Name: At_100uM_ABA_Mutants_cDNA_P Parameter: Treatment Value: 100uM ABA vs. No Treatment
  misc_feature: MA Experiment ID: 20000173 Result: Down-regulated in Transcription
  misc_feature: MA Experiment 20000173 PARAMETER Experiment Name: At_42deg_Heat_P Parameter: Age (day) Value: 14
  misc_feature: MA Experiment 20000173 PARAMETER Experiment Name: At_42deg_Heat_P Parameter: Organism Value: A. thaliana
  misc_feature: MA Experiment 20000173 PARAMETER Experiment Name: At_42deg_Heat_P Parameter: Plant Line Value: WS
  misc_feature: MA Experiment 20000173 PARAMETER Experiment Name: At_42deg_Heat_P Parameter: Temperature (deg C) Value: 42 vs. 22
  misc_feature: MA Experiment 20000173 PARAMETER Experiment Name: At_42deg_Heat_P Parameter: Timepoint (hr) Value: 6
  misc_feature: MA Experiment 20000173 PARAMETER Experiment Name: At_42deg_Heat_P Parameter: Tissue Value: Aerial
  misc_feature: MA Experiment ID: 20000182 Result: Up-regulated in Transcription
  misc_feature: MA Experiment 20000182 PARAMETER Experiment Name: At_2mM_SA_P Parameter: Age (day) Value: 14
  misc_feature: MA Experiment 20000182 PARAMETER Experiment Name: At_2mM_SA_P Parameter: Organism Value: A. thaliana
  misc_feature: MA Experiment 20000182 PARAMETER Experiment Name: At_2mM_SA_P Parameter: Plant Line Value: WS
  misc_feature: MA Experiment 20000182 PARAMETER Experiment Name: At_2mM_SA_P Parameter: Timepoint (hr) Value: 6
  misc_feature: MA Experiment 20000182 PARAMETER Experiment Name: At_2mM_SA_P Parameter: Tissue Value: Aerial
  misc_feature: MA Experiment 20000182 PARAMETER Experiment Name: At_2mM_SA_P Parameter: Treatment Value: 2mM SA vs. No Treatment
  misc_feature: MA Experiment ID: 20000184 Result: Up-regulated in Transcription
  misc_feature: MA Experiment 20000184 PARAMETER Experiment Name: At_Shoots__P Parameter: Age (day) Value: 7
  misc_feature: MA Experiment 20000184 PARAMETER Experiment Name: At_Shoots__P Parameter: Tissue Value: Shoots vs. Whole Plant
  misc_feature: MA Experiment ID: 20000437 Result: Down-regulated in Transcription
  misc_feature: MA Experiment 20000437 PARAMETER Experiment Name: At_Drought_P Parameter: Age (day) Value: 8
  misc_feature: MA Experiment 20000437 PARAMETER Experiment Name: At_Drought_P Parameter: Organism Value: A. thaliana
  misc_feature: MA Experiment 20000437 PARAMETER Experiment Name: At_Drought_P Parameter: Plant Line Value: WS
  misc_feature: MA Experiment 20000437 PARAMETER Experiment Name: At_Drought_P Parameter: Timepoint (hr) Value: 24
  misc_feature: MA Experiment 20000437 PARAMETER Experiment Name: At_Drought_P Parameter: Tissue Value: Whole Plant
  misc_feature: MA Experiment 20000437 PARAMETER Experiment Name: At_Drought_P Parameter: Treatment Value: Drought vs. No Drought
  misc_feature: MA Experiment ID: 20000438 Result: Up-regulated in Transcription
  misc_feature: MA Experiment 20000438 PARAMETER Experiment Name: At_Shoots__P Parameter: Age (day) Value: 14
  misc_feature: MA Experiment 20000438 PARAMETER Experiment Name: At_Shoots__P Parameter: Tissue Value: Shoots vs. Whole Plant
  misc_feature: MA Experiment ID: 20000439 Result: Up-regulated in Transcription
  misc_feature: MA Experiment 20000439 PARAMETER Experiment Name: At_Roots__P Parameter: Age (day) Value: 14 vs. 21
  misc_feature: MA Experiment 20000439 PARAMETER Experiment Name: At_Roots__P Parameter: Organism Value: A. thaliana
  misc_feature: MA Experiment 20000439 PARAMETER Experiment Name: At_Roots__P Parameter: Tissue Value: Roots vs. Whole Plant
gaatcgtcgttacctcatgtgatgctcgtatcattcccagggcaaggtcacataagccctcttcttcgtctcggaaagatcattgcctctaaaggcttaatcgtcacctttgtaaccacagaggaaccattgggcaagaagatgcgtcaagccaacaatattcaagacggtgtgctcaaaccggtcgggctaggttttctccggttcgagttcttcgaggatggatttgtctacaaagaagactttgatttgttacaaaaatcacttgaagtttccggaaaacgagagatcaagaatcttgtcaagaaatatgagaagcaaccagtgagatgtctcataaataatgcctttgttccatgggtttgtgacatagccgaggagcttcaaatcccatcagctgttctttgggtccagtcttgtgcttgcctcgccgcttattactattaccaccaccagttagttaagtttccgaccgaaaccgagccggaaataaccgttgacgtccctttcaagccattaaaattgaagcatgacgagatccctagctttcttcacccttcctctccgctgtcctctataggaggtaccattttagagcagatcaagcgacttcacaagcctttctctgttctcatcgaaacttttcaagaacttgaaaaagataccattgaccacatgtcccagctctgccctcaagtcaacttcaaccccatcggtccgctttttactatggctaaaaccataaggtctgacatcaagggagacatctccaagccagatagtgactgcatagagtggcttcactcgagagaaccatcctccgttgtttacatctcttttgggactttggctttcttgaagcaaaaccagatcgacgagattgctcacggcattctcaactccgggttgtcctgcttatgggttttgcgtcctcccttagaaggcttagccatagaaccacatgtcttgcctctagagcttgaagagaaagggaagattgtggaatggtgtcaacaagagaaagttttggctcatcctgcggttgcttgcttcttaagtcactgtggatggaactcaaccatggaggctttaacttcaggagttcccgttatttgtttcccgcagtggggagatcaggtgacaaatgcggtgtacctgattggtgttttcaagacaggattgagactcagccgtggagcttctgatgagaggattgttccaagggaggaggttgctgagcgactgcttgaggccaccgttggagagaaggcggtggagctgagagaaaacgctcggaggtggaaggaggaggcggagtctgccgtggcttacggtggaacatcggaaaggaattttcaagagtttgttgacaagttggttgatgtcaagacaatgacaaacattaataatgtcgtgtaagtcgtaaatatcatattgatacttgttattaccggattacgatttttaattgtttaatatgtactaaattgtatgcatcgatataaagtgaacaattttatgttg

SEQ ID NO: 41348 - protein, 472 aa, Arabidopsis thaliana
  peptide (1)..(472): Ceres Seq. ID no. 12385053
  misc_feature (3)..(459): Homolog of NCBI NO: 13431605 NR Description: Limonoid UDP-glucosyltransferase (Limonoid
  misc_feature (6)..(469): Homolog of NCBI NO: 30683281 NR Description: UDP-glycosyltransferase family [Arabidopsis
  misc_feature (6)..(469): Homolog of NCBI NO: 7433899 NR Description: probable indole-3-acetate
  misc_feature (6)..(469): Homolog of NCBI NO: 25082972 NR Description: indole-3-acetate beta-glucosyltransferase like
  misc_feature (5)..(469): Homolog of NCBI NO: 9794913 NR Description: UDP-glucose:sinapate glucosyltransferase
  misc_feature (5)..(470): Homolog of NCBI NO: 20259348 NR Description: putative UDP-glucose:indole-3-acetate
  misc_feature (5)..(470): Homolog of NCBI NO: 15233091 NR Description: UDP-glucosyltransferase, putative
  misc_feature (6)..(470): Homolog of NCBI NO: 15234616 NR Description: UDP-glycosyltransferase, putative
  misc_feature (6)..(470): Homolog of NCBI NO: 21593030 NR Description: indole-3-acetate beta-glucosyltransferase like
  misc_feature (1)..(472): Homolog of NCBI NO: 15234619 NR Description: indole-3-acetate beta-glucosyltransferase like
ESSLPHVMLVSFPGQGHISPLLRLGKIIASKGLIVTFVTTEEPLGKKMRQANNIQDGVLKPVGLGFLRFEFFEDGFVYKEDFDLLQKSLEVSGKREIKNLVKKYEKQPVRCLINNAFVPWVCDIAEELQIPSAVLWVQSCACLAAYYYYHHQLVKFPTETEPEITVDVPFKPLKLKHDEIPSFLHPSSPLSSIGGTILEQIKRLHKPFSVLIETFQELEKDTIDHMSQLCPQVNFNPIGPLFTMAKTIRSDIKGDISKPDSDCIEWLHSREPSSVVYISFGTLAFLKQNQIDEIAHGILNSGLSCLWVLRPPLEGLAIEPHVLPLELEEKGKIVEWCQQEKVLAHPAVACFLSHCGWNSTMEALTSGVPVICFPQWGDQVTNAVYLIGVFKTGLRLSRGASDERIVPREEVAERLLEATVGEKAVELRENARRWKEEAESAVAYGGTSERNFQEFVDKLVDVKTMTNINNVV

SEQ ID NO: 41349 - protein, 465 aa, Arabidopsis thaliana
  peptide (1)..(465): Ceres Seq. ID no. 12385054
  misc_feature (1)..(452): Homolog of NCBI NO: 13431605 NR Description: Limonoid UDP-glucosyltransferase (Limonoid
  misc_feature (1)..(462): Homolog of NCBI NO: 30683281 NR Description: UDP-glycosyltransferase family [Arabidopsis
  misc_feature (1)..(462): Homolog of NCBI NO: 7433899 NR Description: probable indole-3-acetate
  misc_feature (1)..(462): Homolog of NCBI NO: 25082972 NR Description: indole-3-acetate beta-glucosyltransferase like
  misc_feature (1)..(462): Homolog of NCBI NO: 9794913 NR Description: UDP-glucose:sinapate glucosyltransferase
  misc_feature (1)..(463): Homolog of NCBI NO: 20259348 NR Description: putative UDP-glucose:indole-3-acetate
  misc_feature (1)..(463): Homolog of NCBI NO: 15233091 NR Description: UDP-glucosyltransferase, putative
  misc_feature (1)..(463): Homolog of NCBI NO: 15234616 NR Description: UDP-glycosyltransferase, putative
  misc_feature (1)..(463): Homolog of NCBI NO: 21593030 NR Description: indole-3-acetate beta-glucosyltransferase like
  misc_feature (1)..(465): Homolog of NCBI NO: 15234619 NR Description: indole-3-acetate beta-glucosyltransferase like
MLVSFPGQGHISPLLRLGKIIASKGLIVTFVTTEEPLGKKMRQANNIQDGVLKPVGLGFLRFEFFEDGFVYKEDFDLLQKSLEVSGKREIKNLVKKYEKQPVRCLINNAFVPWVCDIAEELQIPSAVLWVQSCACLAAYYYYHHQLVKFPTETEPEITVDVPFKPLKLKHDEIPSFLHPSSPLSSIGGTILEQIKRLHKPFSVLIETFQELEKDTIDHMSQLCPQVNFNPIGPLFTMAKTIRSDIKGDISKPDSDCIEWLHSREPSSVVYISFGTLAFLKQNQIDEIAHGILNSGLSCLWVLRPPLEGLAIEPHVLPLELEEKGKIVEWCQQEKVLAHPAVACFLSHCGWNSTMEALTSGVPVICFPQWGDQVTNAVYLIGVFKTGLRLSRGASDERIVPREEVAERLLEATVGEKAVELRENARRWKEEAESAVAYGGTSERNFQEFVDKLVDVKTMTNINNVV

SEQ ID NO: 41350 - protein, 425 aa, Arabidopsis thaliana
  peptide (1)..(425): Ceres Seq. ID no. 12385055
  misc_feature (1)..(412): Homolog of NCBI NO: 13431605 NR Description: Limonoid UDP-glucosyltransferase (Limonoid
  misc_feature (1)..(422): Homolog of NCBI NO: 30683281 NR Description: UDP-glycosyltransferase family [Arabidopsis
  misc_feature (1)..(422): Homolog of NCBI NO: 7433899 NR Description: probable indole-3-acetate
  misc_feature (1)..(422): Homolog of NCBI NO: 25082972 NR Description: indole-3-acetate beta-glucosyltransferase like
  misc_feature (1)..(422): Homolog of NCBI NO: 9794913 NR Description: UDP-glucose:sinapate glucosyltransferase
  misc_feature (1)..(423): Homolog of NCBI NO: 20259348 NR Description: putative UDP-glucose:indole-3-acetate
  misc_feature (1)..(423): Homolog of NCBI NO: 15233091 NR Description: UDP-glucosyltransferase, putative
  misc_feature (1)..(423): Homolog of NCBI NO: 15234616 NR Description: UDP-glycosyltransferase, putative
  misc_feature (1)..(423): Homolog of NCBI NO: 21593030 NR Description: indole-3-acetate beta-glucosyltransferase like
  misc_feature (1)..(425): Homolog of NCBI NO: 15234619 NR Description: indole-3-acetate beta-glucosyltransferase like
MRQANNIQDGVLKPVGLGFLRFEFFEDGFVYKEDFDLLQKSLEVSGKREIKNLVKKYEKQPVRCLINNAFVPWVCDIAEELQIPSAVLWVQSCACLAAYYYYHHQLVKFPTETEPEITVDVPFKPLKLKHDEIPSFLHPSSPLSSIGGTILEQIKRLHKPFSVLIETFQELEKDTIDHMSQLCPQVNFNPIGPLFTMAKTIRSDIKGDISKPDSDCIEWLHSREPSSVVYISFGTLAFLKQNQIDEIAHGILNSGLSCLWVLRPPLEGLAIEPHVLPLELEEKGKIVEWCQQEKVLAHPAVACFLSHCGWNSTMEALTSGVPVICFPQWGDQVTNAVYLIGVFKTGLRLSRGASDERIVPREEVAERLLEATVGEKAVELRENARRWKEEAESAVAYGGTSERNFQEFVDKLVDVKTMTNINNVV

SEQ ID NO: 41351 - DNA, 1934 bp, Arabidopsis thaliana
  misc_feature (1)..(1934): Ceres Seq. ID no. 12558487
  misc_feature: MA Experiment ID: 20000171 Result: Down-regulated in Transcription
  misc_feature: MA Experiment 20000171 PARAMETER Experiment Name: At_42deg_Heat_P Parameter: Age (day) Value: 14
  misc_feature: MA Experiment 20000171 PARAMETER Experiment Name: At_42deg_Heat_P Parameter: Organism Value: A. thaliana
  misc_feature: MA Experiment 20000171 PARAMETER Experiment Name: At_42deg_Heat_P Parameter: Plant Line Value: WS
  misc_feature: MA Experiment 20000171 PARAMETER Experiment Name: At_42deg_Heat_P Parameter: Temperature (deg C) Value: 42 vs. 22
  misc_feature: MA Experiment 20000171 PARAMETER Experiment Name: At_42deg_Heat_P Parameter: Timepoint (hr) Value: 1
  misc_feature: MA Experiment 20000171 PARAMETER Experiment Name: At_42deg_Heat_P Parameter: Tissue Value: Aerial
  misc_feature: MA Experiment ID: 20000173 Result: Down-regulated in Transcription
  misc_feature: MA Experiment 20000173 PARAMETER Experiment Name: At_42deg_Heat_P Parameter: Age (day) Value: 14
  misc_feature: MA Experiment 20000173 PARAMETER Experiment Name: At_42deg_Heat_P Parameter: Organism Value: A. thaliana
  misc_feature: MA Experiment 20000173 PARAMETER Experiment Name: At_42deg_Heat_P Parameter: Plant Line Value: WS
  misc_feature: MA Experiment 20000173 PARAMETER Experiment Name: At_42deg_Heat_P Parameter: Temperature (deg C) Value: 42 vs. 22
  misc_feature: MA Experiment 20000173 PARAMETER Experiment Name: At_42deg_Heat_P Parameter: Timepoint (hr) Value: 6
  misc_feature: MA Experiment 20000173 PARAMETER Experiment Name: At_42deg_Heat_P Parameter: Tissue Value: Aerial
  misc_feature: MA Experiment ID: 20000179 Result: Up-regulated in Transcription
  misc_feature: MA Experiment 20000179 PARAMETER Experiment Name: At_Germinating_Seeds_P Parameter: Age (hr) Value: 6 vs. 0
  misc_feature: MA Experiment 20000179 PARAMETER Experiment Name: At_Germinating_Seeds_P Parameter: Tissue Value: Germinating Seeds
  misc_feature: MA Experiment ID: 20000180 Result: Up-regulated in Transcription
  misc_feature: MA Experiment 20000180 PARAMETER Experiment Name: At_Germinating_Seeds_P Parameter: Age (hr) Value: 24 vs. 0
  misc_feature: MA Experiment 20000180 PARAMETER Experiment Name: At_Germinating_Seeds_P Parameter: Tissue Value: Germinating Seeds
  misc_feature: MA Experiment ID: 20000437 Result: Down-regulated in Transcription
  misc_feature: MA Experiment 20000437 PARAMETER Experiment Name: At_Drought_P Parameter: Age (day) Value: 8
  misc_feature: MA Experiment 20000437 PARAMETER Experiment Name: At_Drought_P Parameter: Organism Value: A. thaliana
  misc_feature: MA Experiment 20000437 PARAMETER Experiment Name: At_Drought_P Parameter: Plant Line Value: WS
  misc_feature: MA Experiment 20000437 PARAMETER Experiment Name: At_Drought_P Parameter: Timepoint (hr) Value: 24
  misc_feature: MA Experiment 20000437 PARAMETER Experiment Name: At_Drought_P Parameter: Tissue Value: Whole Plant
  misc_feature: MA Experiment 20000437 PARAMETER Experiment Name: At_Drought_P Parameter: Treatment Value: Drought vs. No Drought
  misc_feature: MA Experiment ID: 20000794 Result: Down-regulated in Transcription
  misc_feature: MA Experiment 20000794 PARAMETER Experiment Name: At_Petals_P Parameter: Age (day) Value: 23-25 days
  misc_feature: MA Experiment 20000794 PARAMETER Experiment Name: At_Petals_P Parameter: Plant Line Value: WS
  misc_feature: MA Experiment 20000794 PARAMETER Experiment Name: At_Petals_P Parameter: Tissue Value: Petals vs. Whole plant
  misc_feature: MA Experiment ID: 20001905 Result: Down-regulated in Transcription
  misc_feature: MA Experiment 20001905 PARAMETER Experiment Name: At_Drought_Reproduction_P Parameter: Age (day) Value: 40
  misc_feature: MA Experiment 20001905 PARAMETER Experiment Name: At_Drought_Reproduction_P Parameter: Organism Value: A. thaliana
  misc_feature: MA Experiment 20001905 PARAMETER Experiment Name: At_Drought_Reproduction_P Parameter: Plant Line Value: WS
  misc_feature: MA Experiment 20001905 PARAMETER Experiment Name: At_Drought_Reproduction_P Parameter: Timepoint (day) Value: 10
  misc_feature: MA Experiment 20001905 PARAMETER Experiment Name: At_Drought_Reproduction_P Parameter: Tissue Value: Rosettes
  misc_feature: MA Experiment 20001905 PARAMETER Experiment Name: At_Drought_Reproduction_P Parameter: Treatment Value: Drought vs. No Drought
  misc_feature: MA Experiment ID: 20001906 Result: Down-regulated in Transcription
  misc_feature: MA Experiment 20001906 PARAMETER Experiment Name: At_Drought_Reproduction_P Parameter: Age (day) Value: 35
  misc_feature: MA Experiment 20001906 PARAMETER Experiment Name: At_Drought_Reproduction_P Parameter: Organism Value: A. thaliana
  misc_feature: MA Experiment 20001906 PARAMETER Experiment Name: At_Drought_Reproduction_P Parameter: Plant Line Value: WS
  misc_feature: MA Experiment 20001906 PARAMETER Experiment Name: At_Drought_Reproduction_P Parameter: Timepoint (day) Value: 5
  misc_feature: MA Experiment 20001906 PARAMETER Experiment Name: At_Drought_Reproduction_P Parameter: Tissue Value: Siliques
  misc_feature: MA Experiment 20001906 PARAMETER Experiment Name: At_Drought_Reproduction_P Parameter: Treatment Value: Drought vs. No Drought
  misc_feature: MA Experiment ID: 20001911 Result: Down-regulated in Transcription
  misc_feature: MA Experiment 20001911 PARAMETER Experiment Name: At_Drought_Reproduction_P Parameter: Age (day) Value: 40
  misc_feature: MA Experiment 20001911 PARAMETER Experiment Name: At_Drought_Reproduction_P Parameter: Organism Value: A. thaliana
  misc_feature: MA Experiment 20001911 PARAMETER Experiment Name: At_Drought_Reproduction_P Parameter: Plant Line Value: WS
  misc_feature: MA Experiment 20001911 PARAMETER Experiment Name: At_Drought_Reproduction_P Parameter: Timepoint (day) Value: 10
  misc_feature: MA Experiment 20001911 PARAMETER Experiment Name: At_Drought_Reproduction_P Parameter: Tissue Value: Flowers
  misc_feature: MA Experiment 20001911 PARAMETER Experiment Name: At_Drought_Reproduction_P Parameter: Treatment Value: Drought vs. No Drought
agacagaatcaaaacttgtgtagaccgagaatccatctctcacaaaccccaaaccaaaaaaaaatcaaaaaaaaaaatcaagaacaaatcgaaatctcaactctgtgaaaacctcgtccttgttcttcttctgcttctcccattccttcgatttttgcttcaatggatgtttgatttgctctctgactgcgtttgtttactatactatggaccctgagagtatcatggctgctgatgggactgattctgctcctgcaaatggtggtttagcaatggaaaatgtatgtgttaaagaaaatggggctgtttctgtcgaaaccgtggacactacttcagaaagtcagaatgagaattcggcaaacagttccactttggatacaattgaacacgtcaaggaggcagctgagggcacacaagttgaacatgtagatgattcaaagtgtatgaaaggcgaaaaagctcaacggaagccaaggcatgagaaactatcaggtggtaagaataattcatcggttcacatcaaaaagagcaaagagggcaaaagtgcagatgctaaagtggcagcatcaaatggttctgttgctcctaatgtacagacaacaaatcctcttaagagcaaatcattcaatgggcgagaggcacaagtcacaaagcaagggaagcatgactctgcacctgctgaaagcgctgatggggagaaggtgaaaccaaagtctcaaaagaaacaagcccatgagacatctgaagatgatactcagtcttctaatagtccgaaagcagacgatggaaaacctcgtaaagttggtgcacttccaaattatggattcagtttcaaatgtgaccaacgggctgaaaagagaaaagagttctatgttaagcttgaggagaagactcatgcaaaagaagaggaaattaatagcatgcaagccaagtccaaggaaacacaagaagctgagcttaggatgctaaggaagagtttgaacttcaaagccacacctatgcctagcttttatcaagaacctcagccgcctaaaacagagttaaagaagataccaccaacgagaccaaaatctccaaaactcgggcgaaagaagactgcttctggagcagattctgaagaaactcaaacccctcgccttggtaggctaagcctagatgagagagcttctaaagataacccaactgcaaagggaattatgccaacagttgatctgaagaagcaacctgtgcgcaagtcacttccaagattgccatctcagaaaacagttctccccgatggaaaacccgccccagcaaaagctgccataatcccagcaaaggtaagacctgagaaaaagaaacttgaaaaagatgcagaaaccgtaaaccagacttcacatcccacagaagaggaagcacaagtgacagtatcatccaatgctgatgtagaagattcacatgagactgtatctccaaggatgaatgaagacagagccgacaagtccattgaggtatctgaagcggttgctgttgagcattaaaaactctgcggtacgatcattactctcaagactcatcatatctcttgcattaagtaaggaggacaagagagaaagaaaccgtataatatttatatatatcttcagccaaaacttatatgagaagagatgggtaaaaagagtggacagaatcatgtggatttggttctaaaggttgctgtgcttttatatattcctatgtttgatggtaatgtttttaatcttttaaggtgtttttttctttcttttatgtcaagatcttccttctttttctttttgatgctttcaatcctaaaaggtgaatattcaggagatactgctttcgttctgtctgtgtattcttttcttttccttttttcttatttttgttattatggcttatgtgcaaattcttttgttatataattgattctcttc

SEQ ID NO: 41352 - protein, 437 aa, Arabidopsis thaliana
  peptide (1)..(437): Ceres Seq. ID no. 12558488
  misc_feature (44)..(405): Pfam Name: AF-4 proto-oncoprotein Pfam Description: AF-4 proto-oncoprotein
  misc_feature (25)..(300): Homolog of NCBI NO: 9294199 NR Description: gb|AAF04893.1~gene_id:MXC7.13~similar to unknown
  misc_feature (37)..(325): Homolog of NCBI NO: 34897180 NR Description: unknown protein [Oryza sativa (japonica
  misc_feature (2)..(384): Homolog of NCBI NO: 25408425 NR Description: hypothetical protein At2g35880 [imported] -
  misc_feature (107)..(384): Homolog of NCBI NO: 18403980 NR Description: expressed protein
  misc_feature (104)..(437): Homolog of NCBI NO: 7486636 NR Description: hypothetical protein F8B4.30 - Arabidopsis
  misc_feature (104)..(437): Homolog of NCBI NO: 7485356 NR Description: hypothetical protein F10M6.40 - Arabidopsis
  misc_feature (1)..(408): Homolog of NCBI NO: 7485356 NR Description: hypothetical protein F10M6.40 - Arabidopsis
  misc_feature (1)..(408): Homolog of NCBI NO: 7486636 NR Description: hypothetical protein F8B4.30 - Arabidopsis
  misc_feature (27)..(436): Homolog of NCBI NO: 15224733 NR Description: unknown protein; protein id: At2g25480.1
  misc_feature (1)..(437): Homolog of NCBI NO: 18417986 NR Description: putative protein
MDPESIMAADGTDSAPANGGLAMENVCVKENGAVSVETVDTTSESQNENSANSSTLDTIEHVKEAAEGTQVEHVDDSKCMKGEKAQRKPRHEKLSGGKNNSSVHIKKSKEGKSADAKVAASNGSVAPNVQTTNPLKSKSFNGREAQVTKQGKHDSAPAESADGEKVKPKSQKKQAHETSEDDTQSSNSPKADDGKPRKVGALPNYGFSFKCDQRAEKRKEFYVKLEEKTHAKEEEINSMQAKSKETQEAELRMLRKSLNFKATPMPSFYQEPQPPKTELKKIPPTRPKSPKLGRKKTASGADSEETQTPRLGRLSLDERASKDNPTAKGIMPTVDLKKQPVRKSLPRLPSQKTVLPDGKPAPAKAAIIPAKVRPEKKKLEKDAETVNQTSHPTEEEAQVTVSSNADVEDSHETVSPRMNEDRADKSIEVSEAVAVEH

SEQ ID NO: 41353 - protein, 431 aa, Arabidopsis thaliana
  peptide (1)..(431): Ceres Seq. ID no. 12558489
  misc_feature (38)..(399): Pfam Name: AF-4 proto-oncoprotein Pfam Description: AF-4 proto-oncoprotein
  misc_feature (19)..(294): Homolog of NCBI NO: 9294199 NR Description: gb|AAF04893.1~gene_id:MXC7.13~similar to unknown
  misc_feature (31)..(319): Homolog of NCBI NO: 34897180 NR Description: unknown protein [Oryza sativa (japonica
  misc_feature (1)..(378): Homolog of NCBI NO: 25408425 NR Description: hypothetical protein At2g35880 [imported] -
  misc_feature (101)..(378): Homolog of NCBI NO: 18403980 NR Description: expressed protein
  misc_feature (98)..(431): Homolog of NCBI NO: 7486636 NR Description: hypothetical protein F8B4.30 - Arabidopsis
  misc_feature (98)..(431): Homolog of NCBI NO: 7485356 NR Description: hypothetical protein F10M6.40 - Arabidopsis
  misc_feature (1)..(402): Homolog of NCBI NO: 7485356 NR Description: hypothetical protein F10M6.40 - Arabidopsis
  misc_feature (1)..(402): Homolog of NCBI NO: 7486636 NR Description: hypothetical protein F8B4.30 - Arabidopsis
  misc_feature (21)..(430): Homolog of NCBI NO: 15224733 NR Description: unknown protein; protein id: At2g25480.1
  misc_feature (1)..(431): Homolog of NCBI NO: 18417986 NR Description: putative protein
MAADGTDSAPANGGLAMENVCVKENGAVSVETVDTTSESQNENSANSSTLDTIEHVKEAAEGTQVEHVDDSKCMKGEKAQRKPRHEKLSGGKNNSSVHIKKSKEGKSADAKVAASNGSVAPNVQTTNPLKSKSFNGREAQVTKQGKHDSAPAESADGEKVKPKSQKKQAHETSEDDTQSSNSPKADDGKPRKVGALPNYGFSFKCDQRAEKRKEFYVKLEEKTHAKEEEINSMQAKSKETQEAELRMLRKSLNFKATPMPSFYQEPQPPKTELKKIPPTRPKSPKLGRKKTASGADSEETQTPRLGRLSLDERASKDNPTAKGIMPTVDLKKQPVRKSLPRLPSQKTVLPDGKPAPAKAAIIPAKVRPEKKKLEKDAETVNQTSHPTEEEAQVTVSSNADVEDSHETVSPRMNEDRADKSIEVSEAVAVEH

SEQ ID NO: 41354 - protein, 415 aa, Arabidopsis thaliana
  peptide (1)..(415): Ceres Seq. ID no. 12558490
  misc_feature (22)..(383): Pfam Name: AF-4 proto-oncoprotein Pfam Description: AF-4 proto-oncoprotein
  misc_feature (3)..(278): Homolog of NCBI NO: 9294199 NR Description: gb|AAF04893.1~gene_id:MXC7.13~similar to unknown
  misc_feature (15)..(303): Homolog of NCBI NO: 34897180 NR Description: unknown protein [Oryza sativa (japonica
  misc_feature (1)..(362): Homolog of NCBI NO: 25408425 NR Description: hypothetical protein At2g35880 [imported] -
  misc_feature (85)..(362): Homolog of NCBI NO: 18403980 NR Description: expressed protein
  misc_feature (82)..(415): Homolog of NCBI NO: 7486636 NR Description: hypothetical protein F8B4.30 - Arabidopsis
  misc_feature (82)..(415): Homolog of NCBI NO: 7485356 NR Description: hypothetical protein F10M6.40 - Arabidopsis
  misc_feature (1)..(386): Homolog of NCBI NO: 7485356 NR Description: hypothetical protein F10M6.40 - Arabidopsis
  misc_feature (1)..(386): Homolog of NCBI NO: 7486636 NR Description: hypothetical protein F8B4.30 - Arabidopsis
  misc_feature (5)..(414): Homolog of NCBI NO: 15224733 NR Description: unknown protein; protein id: At2g25480.1
  misc_feature (1)..(415): Homolog of NCBI NO: 18417986 NR Description: putative protein
MENVCVKENGAVSVETVDTTSESQNENSANSSTLDTIEHVKEAAEGTQVEHVDDSKCMKGEKAQRKPRHEKLSGGKNNSSVHIKKSKEGKSADAKVAASNGSVAPNVQTTNPLKSKSFNGREAQVTKQGKHDSAPAESADGEKVKPKSQKKQAHETSEDDTQSSNSPKADDGKPRKVGALPNYGFSFKCDQRAEKRKEFYVKLEEKTHAKEEEINSMQAKSKETQEAELRMLRKSLNFKATPMPSFYQEPQPPKTELKKIPPTRPKSPKLGRKKTASGADSEETQTPRLGRLSLDERASKDNPTAKGIMPTVDLKKQPVRKSLPRLPSQKTVLPDGKPAPAKAAIIPAKVRPEKKKLEKDAETVNQTSHPTEEEAQVTVSSNADVEDSHETVSPRMNEDRADKSIEVSEAVAVEH

SEQ ID NO: 41355 - DNA, 1553 bp, Arabidopsis thaliana
  misc_feature (1)..(1553): Ceres Seq. ID no. 12329896
  misc_feature: MA Experiment ID: 20000166 Result: Up-regulated in Transcription
  misc_feature: MA Experiment 20000166 PARAMETER Experiment Name: At_100uM_ABA_P Parameter: Age (day) Value: 14
  misc_feature: MA Experiment 20000166 PARAMETER Experiment Name: At_100uM_ABA_P Parameter: Organism Value: A. thaliana
  misc_feature: MA Experiment 20000166 PARAMETER Experiment Name: At_100uM_ABA_P Parameter: Plant Line Value: WS
  misc_feature: MA Experiment 20000166 PARAMETER Experiment Name: At_100uM_ABA_P Parameter: Timepoint (hr) Value: 1
  misc_feature: MA Experiment 20000166 PARAMETER Experiment Name: At_100uM_ABA_P Parameter: Tissue Value: Aerial
  misc_feature: MA Experiment 20000166 PARAMETER Experiment Name: At_100uM_ABA_P Parameter: Treatment Value: 100uM ABA vs. No Treatment
  misc_feature: MA Experiment ID: 20000169 Result: Up-regulated in Transcription
  misc_feature: MA Experiment 20000169 PARAMETER Experiment Name: At_100uM_ABA_P Parameter: Age (day) Value: 14
  misc_feature: MA Experiment 20000169 PARAMETER Experiment Name: At_100uM_ABA_P Parameter: Organism Value: A. thaliana
  misc_feature: MA Experiment 20000169 PARAMETER Experiment Name: At_100uM_ABA_P Parameter: Plant Line Value: WS
  misc_feature: MA Experiment 20000169 PARAMETER Experiment Name: At_100uM_ABA_P Parameter: Timepoint (hr) Value: 6
  misc_feature: MA Experiment 20000169 PARAMETER Experiment Name: At_100uM_ABA_P Parameter: Tissue Value: Aerial
  misc_feature: MA Experiment 20000169 PARAMETER Experiment Name: At_100uM_ABA_P Parameter: Treatment Value: 100uM ABA vs. No Treatment
  misc_feature: MA Experiment ID: 20000171 Result: Up-regulated in Transcription
  misc_feature: MA Experiment 20000171 PARAMETER Experiment Name: At_42deg_Heat_P Parameter: Age (day) Value: 14
  misc_feature: MA Experiment 20000171 PARAMETER Experiment Name: At_42deg_Heat_P Parameter: Organism Value: A. thaliana
  misc_feature: MA Experiment 20000171 PARAMETER Experiment Name: At_42deg_Heat_P Parameter: Plant Line Value: WS
  misc_feature: MA Experiment 20000171 PARAMETER Experiment Name: At_42deg_Heat_P Parameter: Temperature (deg C) Value: 42 vs. 22
  misc_feature: MA Experiment 20000171 PARAMETER Experiment Name: At_42deg_Heat_P Parameter: Timepoint (hr) Value: 1
  misc_feature: MA Experiment 20000171 PARAMETER Experiment Name: At_42deg_Heat_P Parameter: Tissue Value: Aerial
  misc_feature: MA Experiment ID: 20000180 Result: Down-regulated in Transcription
  misc_feature: MA Experiment 20000180 PARAMETER Experiment Name: At_Germinating_Seeds_P Parameter: Age (hr) Value: 24 vs. 0
  misc_feature: MA Experiment 20000180 PARAMETER Experiment Name: At_Germinating_Seeds_P Parameter: Tissue Value: Germinating Seeds
  misc_feature: MA Experiment ID: 20000184 Result: Down-regulated in Transcription
  misc_feature: MA Experiment 20000184 PARAMETER Experiment Name: At_Shoots__P Parameter: Age (day) Value: 7
  misc_feature: MA Experiment 20000184 PARAMETER Experiment Name: At_Shoots__P Parameter: Tissue Value: Shoots vs. Whole Plant
  misc_feature: MA Experiment ID: 20000185 Result: Down-regulated in Transcription
  misc_feature: MA Experiment 20000185 PARAMETER Experiment Name: At_Roots__P Parameter: Age (day) Value: 7 vs. 21
  misc_feature: MA Experiment 20000185 PARAMETER Experiment Name: At_Roots__P Parameter: Organism Value: A. thaliana
  misc_feature: MA Experiment 20000185 PARAMETER Experiment Name: At_Roots__P Parameter: Tissue Value: Roots vs. Whole Plant
  misc_feature: MA Experiment ID: 20000213 Result: Up-regulated in Transcription
  misc_feature: MA Experiment 20000213 PARAMETER Experiment Name: At_4deg_Cold_P Parameter: Timepoint (hr) Value: 2
  misc_feature: MA Experiment ID: 20000214 Result: Down-regulated in Transcription
  misc_feature: MA Experiment 20000214 PARAMETER Experiment Name: At_4deg_Cold_P Parameter: Timepoint (hr) Value: 6
  misc_feature: MA Experiment ID: 20000227 Result: Up-regulated in Transcription
  misc_feature: MA Experiment 20000227 PARAMETER Experiment Name: At_Root-Tips-vs-Tops_P Parameter: Tissue Value: Root Tips vs. Root Tops
  misc_feature: MA Experiment ID: 20000234 Result: Down-regulated in Transcription
  misc_feature: MA Experiment 20000234 PARAMETER Experiment Name: At_Siliques_P Parameter: Age (day) Value: 21
  misc_feature: MA Experiment 20000234 PARAMETER Experiment Name: At_Siliques_P Parameter: Organism Value: A. thaliana
  misc_feature: MA Experiment 20000234 PARAMETER Experiment Name: At_Siliques_P Parameter: Plant Line Value: WS
  misc_feature: MA Experiment 20000234 PARAMETER Experiment Name: At_Siliques_P Parameter: Tissue Value: Less Than 5mm Siliques vs. Whole Plant
  misc_feature: MA Experiment ID: 20000286 Result: Down-regulated in Transcription
  misc_feature: MA Experiment 20000286 PARAMETER Experiment Name: At_Open_Flower_P Parameter: Age (day) Value: 21
  misc_feature: MA Experiment 20000286 PARAMETER Experiment Name: At_Open_Flower_P Parameter: Plant Line Value: WS
  misc_feature: MA Experiment 20000286 PARAMETER Experiment Name: At_Open_Flower_P Parameter: Tissue Value: Half Open vs. Whole Plant
  misc_feature: MA Experiment ID: 20000308 Result: Up-regulated in Transcription
  misc_feature: MA Experiment 20000308 PARAMETER Experiment Name: At_100mM_NaCl__P Parameter: Age (day) Value: 17
  misc_feature: MA Experiment 20000308 PARAMETER Experiment Name: At_100mM_NaCl__P Parameter: Organism Value: A. thaliana
  misc_feature: MA Experiment 20000308 PARAMETER Experiment Name: At_100mM_NaCl__P Parameter: Plant Line Value: WS
  misc_feature: MA Experiment 20000308 PARAMETER Experiment Name: At_100mM_NaCl__P Parameter: Timepoint (hr) Value: 72
  misc_feature: MA Experiment 20000308 PARAMETER Experiment Name: At_100mM_NaCl__P Parameter: Tissue Value: Whole Plant
  misc_feature: MA Experiment 20000308 PARAMETER Experiment Name: At_100mM_NaCl__P Parameter: Treatment Value: 100mM NaCl vs. No Treatment
  misc_feature: MA Experiment ID: 20000437 Result: Up-regulated in Transcription
  misc_feature: MA Experiment 20000437 PARAMETER Experiment Name: At_Drought_P Parameter: Age (day) Value: 8
  misc_feature: MA Experiment 20000437 PARAMETER Experiment Name: At_Drought_P Parameter: Organism Value: A. thaliana
  misc_feature: MA Experiment 20000437 PARAMETER Experiment Name: At_Drought_P Parameter: Plant Line Value: WS
  misc_feature: MA Experiment 20000437 PARAMETER Experiment Name: At_Drought_P Parameter: Timepoint (hr) Value: 24
  misc_feature: MA Experiment 20000437 PARAMETER Experiment Name: At_Drought_P Parameter: Tissue Value: Whole Plant
  misc_feature: MA Experiment 20000437 PARAMETER Experiment Name: At_Drought_P Parameter: Treatment Value: Drought vs. No Drought
  misc_feature: MA Experiment ID: 20000438 Result: Down-regulated in Transcription
  misc_feature: MA Experiment 20000438 PARAMETER Experiment Name: At_Shoots__P Parameter: Age (day) Value: 14
  misc_feature: MA Experiment 20000438 PARAMETER Experiment Name: At_Shoots__P Parameter: Tissue Value: Shoots vs. Whole Plant
  misc_feature: MA Experiment ID: 20000439 Result: Down-regulated in Transcription
  misc_feature: MA Experiment 20000439 PARAMETER Experiment Name: At_Roots__P Parameter: Age (day) Value: 14 vs. 21
  misc_feature: MA Experiment 20000439 PARAMETER Experiment Name: At_Roots__P Parameter: Organism Value: A. thaliana
  misc_feature: MA Experiment 20000439 PARAMETER Experiment Name: At_Roots__P Parameter: Tissue Value: Roots vs. Whole Plant
  misc_feature: MA Experiment ID: 20000453 Result: Up-regulated in Transcription
  misc_feature: MA Experiment 20000453 PARAMETER Experiment Name: At_100uM_ABA_P Parameter: Age (day) Value: 15
  misc_feature: MA Experiment 20000453 PARAMETER Experiment Name: At_100uM_ABA_P Parameter: Organism Value: A. thaliana
  misc_feature: MA Experiment 20000453 PARAMETER Experiment Name: At_100uM_ABA_P Parameter: Plant Line Value: WS
  misc_feature: MA Experiment 20000453 PARAMETER Experiment Name: At_100uM_ABA_P Parameter: Timepoint (hr) Value: 24
  misc_feature: MA Experiment 20000453 PARAMETER Experiment Name: At_100uM_ABA_P Parameter: Tissue Value: Aerial
  misc_feature: MA Experiment 20000453 PARAMETER Experiment Name: At_100uM_ABA_P Parameter: Treatment Value: 100uM ABA vs. No Treatment
  misc_feature: MA Experiment ID: 20000460 Result: Up-regulated in Transcription
  misc_feature: MA Experiment 20000460 PARAMETER Experiment Name: At_10percent_PEG_P Parameter: Age (day) Value: 12
  misc_feature: MA Experiment 20000460 PARAMETER Experiment Name: At_10percent_PEG_P Parameter: Organism Value: A. thaliana
  misc_feature: MA Experiment 20000460 PARAMETER Experiment Name: At_10percent_PEG_P Parameter: Plant Line Value: WS
  misc_feature: MA Experiment 20000460 PARAMETER Experiment Name: At_10percent_PEG_P Parameter: Timepoint (day) Value: 12
  misc_feature: MA Experiment 20000460 PARAMETER Experiment Name: At_10percent_PEG_P Parameter: Tissue Value: Whole Plant
  misc_feature: MA Experiment 20000460 PARAMETER Experiment Name: At_10percent_PEG_P Parameter: Treatment Value: 10percent PEG vs. No Treatment
  misc_feature: MA Experiment ID: 20001450 Result: Up-regulated in Transcription
  misc_feature: MA Experiment 20001450 PARAMETER Experiment Name: At_Far-red-induction_P Parameter: Age (day) Value: 7
  misc_feature: MA Experiment 20001450 PARAMETER Experiment Name: At_Far-red-induction_P Parameter: Light Value: Far-red vs. White
  misc_feature: MA Experiment 20001450 PARAMETER Experiment Name: At_Far-red-induction_P Parameter: Organism Value: A. thaliana
  misc_feature: MA Experiment 20001450 PARAMETER Experiment Name: At_Far-red-induction_P Parameter: Plant Line Value: Columbia
  misc_feature: MA Experiment 20001450 PARAMETER Experiment Name: At_Far-red-induction_P Parameter: Timepoint (hr) Value: 8
  misc_feature: MA Experiment 20001450 PARAMETER Experiment Name: At_Far-red-induction_P Parameter: Tissue Value: Whole Plant
  misc_feature: MA Experiment ID: 20001557 Result: Up-regulated in Transcription
  misc_feature: MA Experiment 20001557 PARAMETER Experiment Name: At_Drought_Soil_Dry_P Parameter: Age (day) Value: 27
  misc_feature: MA Experiment 20001557 PARAMETER Experiment Name: At_Drought_Soil_Dry_P Parameter: Organism Value: A. thaliana
  misc_feature: MA Experiment 20001557 PARAMETER Experiment Name: At_Drought_Soil_Dry_P Parameter: Plant Line Value: WS
  misc_feature: MA Experiment 20001557 PARAMETER Experiment Name: At_Drought_Soil_Dry_P Parameter: Post Timepoint (hr) Value: 3
  misc_feature: MA Experiment 20001557 PARAMETER Experiment Name: At_Drought_Soil_Dry_P Parameter: Post-Treatment Value: Re-Water vs. No Drought
  misc_feature: MA Experiment 20001557 PARAMETER Experiment Name: At_Drought_Soil_Dry_P Parameter: Timepoint (day) Value: 13
  misc_feature: MA Experiment 20001557 PARAMETER Experiment Name: At_Drought_Soil_Dry_P Parameter: Treatment Value: Drought vs. No Drought
  misc_feature: MA Experiment ID: 20001558 Result: Up-regulated in Transcription
  misc_feature: MA Experiment 20001558 PARAMETER Experiment Name: At_Drought_Soil_Dry_P Parameter: Age (day) Value: 27
  misc_feature: MA Experiment 20001558 PARAMETER Experiment Name: At_Drought_Soil_Dry_P Parameter: Organism Value: A. thaliana
  misc_feature: MA Experiment 20001558 PARAMETER Experiment Name: At_Drought_Soil_Dry_P Parameter: Plant Line Value: WS
  misc_feature: MA Experiment 20001558 PARAMETER Experiment Name: At_Drought_Soil_Dry_P Parameter: Post Timepoint (hr) Value: 6
  misc_feature: MA Experiment 20001558 PARAMETER Experiment Name: At_Drought_Soil_Dry_P Parameter: Post-Treatment Value: Re-Water vs. No Drought
  misc_feature: MA Experiment 20001558 PARAMETER Experiment Name: At_Drought_Soil_Dry_P Parameter: Timepoint (day) Value: 13
  misc_feature: MA Experiment 20001558 PARAMETER Experiment Name: At_Drought_Soil_Dry_P Parameter: Treatment Value: Drought vs. No Drought
  misc_feature: MA Experiment ID: 20001559 Result: Up-regulated in Transcription
  misc_feature: MA Experiment 20001559 PARAMETER Experiment Name: At_Drought_Soil_Dry_P Parameter: Age (day) Value: 28
  misc_feature: MA Experiment 20001559 PARAMETER Experiment Name: At_Drought_Soil_Dry_P Parameter: Organism Value: A. thaliana
  misc_feature: MA Experiment 20001559 PARAMETER Experiment Name: At_Drought_Soil_Dry_P Parameter: Plant Line Value: WS
  misc_feature: MA Experiment 20001559 PARAMETER Experiment Name: At_Drought_Soil_Dry_P Parameter: Post Timepoint (hr) Value: 29
  misc_feature: MA Experiment 20001559 PARAMETER Experiment Name: At_Drought_Soil_Dry_P Parameter: Post-Treatment Value: Re-Water vs. No Drought
  misc_feature: MA Experiment 20001559 PARAMETER Experiment Name: At_Drought_Soil_Dry_P Parameter: Timepoint (day) Value: 14
  misc_feature: MA Experiment 20001559 PARAMETER Experiment Name: At_Drought_Soil_Dry_P Parameter: Treatment Value: Drought vs. No Drought
  misc_feature: MA Experiment ID: 20001560 Result: Up-regulated in Transcription
  misc_feature: MA Experiment 20001560 PARAMETER Experiment Name: At_Drought_Soil_Dry_P Parameter: Age (day) Value: 28
  misc_feature: MA Experiment 20001560 PARAMETER Experiment Name: At_Drought_Soil_Dry_P Parameter: Organism Value: A. thaliana
  misc_feature: MA Experiment 20001560 PARAMETER Experiment Name: At_Drought_Soil_Dry_P Parameter: Plant Line Value: WS
  misc_feature: MA Experiment 20001560 PARAMETER Experiment Name: At_Drought_Soil_Dry_P Parameter: Post Timepoint (hr) Value: None
  misc_feature: MA Experiment 20001560 PARAMETER Experiment Name: At_Drought_Soil_Dry_P Parameter: Post-Treatment Value: None
  misc_feature: MA Experiment 20001560 PARAMETER Experiment Name: At_Drought_Soil_Dry_P Parameter: Timepoint (day) Value: 14
  misc_feature: MA Experiment 20001560 PARAMETER Experiment Name: At_Drought_Soil_Dry_P Parameter: Treatment Value: Drought vs. No Drought
  misc_feature: MA Experiment ID: 20001757 Result: Down-regulated in Transcription
  misc_feature: MA Experiment 20001757 PARAMETER Experiment Name: At_50mM_NH4NO3_L-to-H_P Parameter: Timepoint (hr) Value: 6
  misc_feature: MA Experiment 20001757 PARAMETER Experiment Name: At_50mM_NH4NO3_L-to-H_P Parameter: Tissue Value: Leaf
  misc_feature: MA Experiment 20001757 PARAMETER Experiment Name: At_50mM_NH4NO3_L-to-H_P Parameter: Treatment Value: 50mM NH4NO3 vs 100mM Mannitol
atgaaccaagaaaatatcttcaaattattgaacacaaaagtaagaaaaaagtgagataataaggaaattaaaacaataaattatcctttcggtgggattttttttgtcgtcttctattgtttttgtgagtgtgtgtgtttatataatggtaagagatctctgatctctcaagcttctctatagagagagtttcttctcatgctctttctaccaaggagaagattttctcgttaattttgtttgacttgcctcttcgaagcaacctgattctgtggtctgaatcttttcaagggaagagaagataagctaaacaagagaatggtgacaggttgtgttgatcttcatcaatctttcaaatctgcagattcatcttctgtgccaattcctcctcctcttccatcaaaatctgatggactcaagaaaaaacttgggcatagcagcgtttcgacagccacaagagatatgtgggatcgtcttttcaatgacggatacaaagctgatgtagtcatctatacagataatggcagtatcatctatgctcatgccaacatccttggaactgcttccactgtgatcaaaggcatgttgaagcaagccaagagacatggcaagtggcatacaatatcaatccgaggtgtccctcatgatgctgtgcgagtttttatccgtttcctctactcttcttgctatgagaaagaagaaatgaacgagtttatcatgcatttgctacttctgtcacacgcgtacgtggttcctcagctgaaacgggtctgtgaatggcatctagaacatggtttgcttaccactgagaatgtggttgatgtgttccagcttgcgctgctgtgtgatttccctcggcttagcctcatatctcaccgtatgatcatgaaacactttaacgaactctctgcgacagaagcatggacagctatgaagaaaagccatccctttcttgagaaagaagttagagactcagtaatcatcgaagcaaatacgcggaaagagaggatgagaaaacgcaatgatcagaggatatattcgcagctatacgaagcaatggaagcacttgttcatatatgcagagatggatgtaaaacaatagggccacacgataaagatttcaaaccgaaccatgcaacgtgtaactatgaagcttgcaagggattagaatcactgatccggcatttcgcaggctgtaagctaagagttccaggaggttgcgtgcattgcaagagaatgtggcaactccttgaactgcattcacgtgtttgcgcaggttctgatcaatgtcgagtccctctatgcagaaaccttaaggagaagatggagaaacagagcaagaaagatgagtcgagatggaaacttctggtgaagaatgtattggggagtaagaaaatcggaggctctcctttctttttaccggtgacaaactgttaaaaaacattttgtcaatctcaagaagggcgagttttaagcgtttcttgtgatcctatctttaaaacaagtgtaacataatgagtttgaataaatgacacatattttggtcggccaag

SEQ ID NO: 41356 - protein, 372 aa, Arabidopsis thaliana
  peptide (1)..(372): Ceres Seq. ID no. 12329897
  misc_feature (54)..(160): Pfam Name: BTB/POZ domain Pfam Description: BTB/POZ domain
  misc_feature (51)..(358): Homolog of NCBI NO: 7487530 NR Description: hypothetical protein T29H11.120 - Arabidopsis
  misc_feature (51)..(358): Homolog of NCBI NO: 18408618 NR Description: putative protein
  misc_feature (51)..(358): Homolog of NCBI NO: 15242656 NR Description: putative protein; protein id: At5g63160.1
  misc_feature (18)..(296): Homolog of NCBI NO: 34907566 NR Description: B1078G07.24 [Oryza sativa (japonica
  misc_feature (14)..(329): Homolog of NCBI NO: 15221235 NR Description: hypothetical protein; protein id: At1g05690.1
  misc_feature (14)..(367): Homolog of NCBI NO: 21537174 NR Description: unknown [Arabidopsis thaliana]
  misc_feature (14)..(367): Homolog of NCBI NO: 26453150 NR Description: unknown protein [Arabidopsis thaliana]
  misc_feature (14)..(367): Homolog of NCBI NO: 18420081 NR Description: putative protein
  misc_feature (14)..(367): Homolog of NCBI NO: 7485765 NR Description: hypothetical protein F19F18.100 - Arabidopsis
  misc_feature (1)..(372): Homolog of NCBI NO: 15240763 NR Description: putative protein
MVTGCVDLHQSFKSADSSSVPIPPPLPSKSDGLKKKLGHSSVSTATRDMWDRLFNDGYKADVVIYTDNGSIIYAHANILGTASTVIKGMLKQAKRHGKWHTISIRGVPHDAVRVFIRFLYSSCYEKEEMNEFIMHLLLLSHAYVVPQLKRVCEWHLEHGLLTTENVVDVFQLALLCDFPRLSLISHRMIMKHFNELSATEAWTAMKKSHPFLEKEVRDSVIIEANTRKERMRKRNDQRIYSQLYEAMEALVHICRDGCKTIGPHDKDFKPNHATCNYEACKGLESLIRHFAGCKLRVPGGCVHCKRMWQLLELHSRVCAGSDQCRVPLCRNLKEKMEKQSKKDESRWKLLVKNVLGSKKIGGSPFFLPVTNC

SEQ ID NO: 41357 - protein, 324 aa, Arabidopsis thaliana
  peptide (1)..(324): Ceres Seq. ID no. 12329898
  misc_feature (6)..(112): Pfam Name: BTB/POZ domain Pfam Description: BTB/POZ domain
  misc_feature (3)..(310): Homolog of NCBI NO: 7487530 NR Description: hypothetical protein T29H11.120 - Arabidopsis
  misc_feature (3)..(310): Homolog of NCBI NO: 18408618 NR Description: putative protein
  misc_feature (3)..(310): Homolog of NCBI NO: 15242656 NR Description: putative protein; protein id: At5g63160.1
  misc_feature (1)..(248): Homolog of NCBI NO: 34907566 NR Description: B1078G07.24 [Oryza sativa (japonica
  misc_feature (1)..(281): Homolog of NCBI NO: 15221235 NR Description: hypothetical protein; protein id: At1g05690.1
  misc_feature (1)..(319): Homolog of NCBI NO: 21537174 NR Description: unknown [Arabidopsis thaliana]
  misc_feature (1)..(319): Homolog of NCBI NO: 26453150 NR Description: unknown protein [Arabidopsis thaliana]
  misc_feature (1)..(319): Homolog of NCBI NO: 18420081 NR Description: putative protein
  misc_feature (1)..(319): Homolog of NCBI NO: 7485765 NR Description: hypothetical protein F19F18.100 - Arabidopsis
  misc_feature (1)..(324): Homolog of NCBI NO: 15240763 NR Description: putative protein
MWDRLFNDGYKADVVIYTDNGSIIYAHANILGTASTVIKGMLKQAKRHGKWHTISIRGVPHDAVRVFIRFLYSSCYEKEEMNEFIMHLLLLSHAYVVPQLKRVCEWHLEHGLLTTENVVDVFQLALLCDFPRLSLISHRMIMKHFNELSATEAWTAMKKSHPFLEKEVRDSVIIEANTRKERMRKRNDQRIYSQLYEAMEALVHICRDGCKTIGPHDKDFKPNHATCNYEACKGLESLIRHFAGCKLRVPGGCVHCKRMWQLLELHSRVCAGSDQCRVPLCRNLKEKMEKQSKKDESRWKLLVKNVLGSKKIGGSPFFLPVTNC

SEQ ID NO: 41358 - protein, 284 aa, Arabidopsis thaliana
  peptide (1)..(284): Ceres Seq. ID no. 12329899
  misc_feature (1)..(72): Pfam Name: BTB/POZ domain Pfam Description: BTB/POZ domain
  misc_feature (1)..(270): Homolog of NCBI NO: 7487530 NR Description: hypothetical protein T29H11.120 - Arabidopsis
  misc_feature (1)..(270): Homolog of NCBI NO: 18408618 NR Description: putative protein
  misc_feature (1)..(270): Homolog of NCBI NO: 15242656 NR Description: putative protein; protein id: At5g63160.1
  misc_feature (1)..(208): Homolog of NCBI NO: 34907566 NR Description: B1078G07.24 [Oryza sativa (japonica
  misc_feature (1)..(241): Homolog of NCBI NO: 15221235 NR Description: hypothetical protein; protein id: At1g05690.1
  misc_feature (1)..(279): Homolog of NCBI NO: 21537174 NR Description: unknown [Arabidopsis thaliana]
  misc_feature (1)..(279): Homolog of NCBI NO: 26453150 NR Description: unknown protein [Arabidopsis thaliana]
  misc_feature (1)..(279): Homolog of NCBI NO: 18420081 NR Description: putative protein
  misc_feature (1)..(279): Homolog of NCBI NO: 7485765 NR Description: hypothetical protein F19F18.100 - Arabidopsis
  misc_feature (1)..(284): Homolog of NCBI NO: 15240763 NR Description: putative protein
MLKQAKRHGKWHTISIRGVPHDAVRVFIRFLYSSCYEKEEMNEFIMHLLLLSHAYVVPQLKRVCEWHLEHGLLTTENVVDVFQLALLCDFPRLSLISHRMIMKHFNELSATEAWTAMKKSHPFLEKEVRDSVIIEANTRKERMRKRNDQRIYSQLYEAMEALVHICRDGCKTIGPHDKDFKPNHATCNYEACKGLESLIRHFAGCKLRVPGGCVHCKRMWQLLELHSRVCAGSDQCRVPLCRNLKEKMEKQSKKDESRWKLLVKNVLGSKKIGGSPFFLPVTNC

SEQ ID NO: 41359 - DNA, 1490 bp, Arabidopsis thaliana
  misc_feature (1)..(1490): Ceres Seq. ID no. 12328604
  misc_feature: MA Experiment ID: 108434 Result: Up-regulated in Transcription
  misc_feature: MA Experiment 108434 PARAMETER Experiment Name: At_Root_Tips_cDNA_P Parameter: Tissue Value: Root Tips
  misc_feature: MA Experiment ID: 20000234 Result: Up-regulated in Transcription
  misc_feature: MA Experiment 20000234 PARAMETER Experiment Name: At_Siliques_P Parameter: Age (day) Value: 21
  misc_feature: MA Experiment 20000234 PARAMETER Experiment Name: At_Siliques_P Parameter: Organism Value: A. thaliana
  misc_feature: MA Experiment 20000234 PARAMETER Experiment Name: At_Siliques_P Parameter: Plant Line Value: WS
  misc_feature: MA Experiment 20000234 PARAMETER Experiment Name: At_Siliques_P Parameter: Tissue Value: Less Than 5mm Siliques vs. Whole Plant
  misc_feature: MA Experiment ID: 20000495 Result: Up-regulated in Transcription
  misc_feature: MA Experiment 20000495 PARAMETER Experiment Name: At_Guard_Cells_P Parameter: Harvest Date Value: 8/2/2002
  misc_feature: MA Experiment 20000495 PARAMETER Experiment Name: At_Guard_Cells_P Parameter: Organism Value: A. thaliana
  misc_feature: MA Experiment 20000495 PARAMETER Experiment Name: At_Guard_Cells_P Parameter: Tissue Value: Guard Cells vs. Leaves
ccgtcttcaccgtttccttccacgcctccgccggcaagctagttttctgactggagttccatcgtggacgccgtaatccctctttttcgtactggtaaattcttttcaatagattatctttgtgatttatatatcaagtctacaatctaaatcggagacgagattcggaaacctcactatcgattccaaacttcaattcagattatcttcctaaaaatgaagattcttacactcgtaatgcttttatgctactcgttcgtctcttctaccggagatacgactatccacacaaacaattgggctgttttggtctgcacttctcgcttctggtttaactaccggcacatggccaatactctgtccctctataggacagtcaagagacttggaataccagatgagaggatcattcttatgctggctgatgatatggcctgtaatgctagaaatgaatatcctgctcaagttttcaacaatgaaaaccacaaacttaacctctatggagataacgttgaggtagattatcgtggatatgaggtaacagttgaaaatttcttacgggttttgactgggcgtcatgagaatgctgttccaaggtcaaagcgtctcctcagtgatgagggtagccatatactactgtacatgactgggcatggaggtgatgaatttttgaagtttcaagatgcagaagaactccagagtcacgatttagcagatgctgtaaaacaaatgaaagagaagcgtagattcaaggagctgatgataatggttgatacttgccaagctgccactctctttaatcagcttcaatctcctggtgttttggctattggtagcagtctaaaaggagagaactcatattcccatcacctggattcagatattggtgtatctgttgtagatcggtttacatattacactcttgcattctttgagaggctcaatatctatgacaatgcatcacttaacagtttatttaggtcctacgatccgagactgctaatgtctactgcctactaccggactgatctttaccaaccacatctggtggaggtaccggtcacaaatttcttcggttcagttatggagaccattcatactgattcagcttacaaagctttctcaagtaaaatctccgaaagaaagatcaattctgagatgccattcaatcaactttccgaacacgatcttaaagaagagcttgagaatacaaacataccaaacgatgagttgatagctgagaagcaaaaatgcccatattcacaaatgcgggcagacctccacgagaaagtggagaagcttgaaaatgtcgatacagtggttaacctcagcatagcattgatggtactcgctgtaatggtctcatcatctttactacgatgaagaactgatataatcatctgcacttcacttaatctatgtagtctgattcactgttgcagcttcacacccattttgtaattttttgcacaatgctataaaaaaaattc

SEQ ID NO: 41360 - protein, 388 aa, Arabidopsis thaliana
  peptide (1)..(388): Ceres Seq. ID no. 12328605
  misc_feature (2)..(327): Pfam Name: Peptidase C13 family Pfam Description: Peptidase C13 family
  misc_feature (1)..(306): Homolog of NCBI NO: 29788753 NR Description: phosphatidylinositol glycan, class K [Mus
  misc_feature (24)..(345): Homolog of NCBI NO: 23199983 NR Description: phosphatidylinositol glycan, class K precursor
  misc_feature (24)..(345): Homolog of NCBI NO: 1518259 NR Description: gpi8 [Homo sapiens]
  misc_feature (24)..(383): Homolog of NCBI NO: 6320538 NR Description: Protein involved in the attachment of
  misc_feature (14)..(296): Homolog of NCBI NO: 7511896 NR Description: hypothetical protein 133E12.3 - fruit fly
  misc_feature (14)..(329): Homolog of NCBI NO: 24639234 NR Description: CG4406-PA [Drosophila melanogaster]
  misc_feature (1)..(342): Homolog of NCBI NO: 9802563 NR Description: F22O13.24 [Arabidopsis thaliana]
  misc_feature (1)..(342): Homolog of NCBI NO: 7485988 NR Description: hypothetical protein F22O13.26 - Arabidopsis
  misc_feature (1)..(388): Homolog of NCBI NO: 18390936 NR Description: putative GPI-anchor transamidase (U32517)
  misc_feature (1)..(388): Homolog of NCBI NO: 21537105 NR Description: putative GPI-anchor transamidase [Arabidopsis
MKILTLVMLLCYSFVSSTGDTTIHTNNWAVLVCTSRFWFNYRHMANTLSLYRTVKRLGIPDERIILMLADDMACNARNEYPAQVFNNENHKLNLYGDNVEVDYRGYEVTVENFLRVLTGRHENAVPRSKRLLSDEGSHILLYMTGHGGDEFLKFQDAEELQSHDLADAVKQMKEKRRFKELMIMVDTCQAATLFNQLQSPGVLAIGSSLKGENSYSHHLDSDIGVSVVDRFTYYTLAFFERLNIYDNASLNSLFRSYDPRLLMSTAYYRTDLYQPHLVEVPVTNFFGSVMETIHTDSAYKAFSSKISERKINSEMPFNQLSEHDLKEELENTNIPNDELIAEKQKCPYSQMRADLHEKVEKLENVDTVVNLSIALMVLAVMVSSSLLR

SEQ ID NO: 41361 - protein, 381 aa, Arabidopsis thaliana
  peptide (1)..(381): Ceres Seq. ID no. 12328606
  misc_feature (1)..(320): Pfam Name: Peptidase C13 family Pfam Description: Peptidase C13 family
  misc_feature (1)..(299): Homolog of NCBI NO: 29788753 NR Description: phosphatidylinositol glycan, class K [Mus
  misc_feature (17)..(338): Homolog of NCBI NO: 23199983 NR Description: phosphatidylinositol glycan, class K precursor
  misc_feature (17)..(338): Homolog of NCBI NO: 1518259 NR Description: gpi8 [Homo sapiens]
  misc_feature (17)..(376): Homolog of NCBI NO: 6320538 NR Description: Protein involved in the attachment of
  misc_feature (7)..(289): Homolog of NCBI NO: 7511896 NR Description: hypothetical protein 133E12.3 - fruit fly
  misc_feature (7)..(322): Homolog of NCBI NO: 24639234 NR Description: CG4406-PA [Drosophila melanogaster]
  misc_feature (1)..(335): Homolog of NCBI NO: 9802563 NR Description: F22O13.24 [Arabidopsis thaliana]
  misc_feature (1)..(335): Homolog of NCBI NO: 7485988 NR Description: hypothetical protein F22O13.26 - Arabidopsis
  misc_feature (1)..(381): Homolog of NCBI NO: 18390936 NR Description: putative GPI-anchor transamidase (U32517)
  misc_feature (1)..(381): Homolog of NCBI NO: 21537105 NR Description: putative GPI-anchor transamidase [Arabidopsis
MLLCYSFVSSTGDTTIHTNNWAVLVCTSRFWFNYRHMANTLSLYRTVKRLGIPDERIILMLADDMACNARNEYPAQVFNNENHKLNLYGDNVEVDYRGYEVTVENFLRVLTGRHENAVPRSKRLLSDEGSHILLYMTGHGGDEFLKFQDAEELQSHDLADAVKQMKEKRRFKELMIMVDTCQAATLFNQLQSPGVLAIGSSLKGENSYSHHLDSDIGVSVVDRFTYYTLAFFERLNIYDNASLNSLFRSYDPRLLMSTAYYRTDLYQPHLVEVPVTNFFGSVMETIHTDSAYKAFSSKISERKINSEMPFNQLSEHDLKEELENTNIPNDELIAEKQKCPYSQMRADLHEKVEKLENVDTVVNLSIALMVLAVMVSSSLLR

SEQ ID NO: 41362 - protein, 345 aa, Arabidopsis thaliana
  peptide (1)..(345): Ceres Seq. ID no. 12328607
  misc_feature (1)..(284): Pfam Name: Peptidase C13 family Pfam Description: Peptidase C13 family
  misc_feature (1)..(263): Homolog of NCBI NO: 29788753 NR Description: phosphatidylinositol glycan, class K [Mus
  misc_feature (1)..(302): Homolog of NCBI NO: 23199983 NR Description: phosphatidylinositol glycan, class K precursor
  misc_feature (1)..(302): Homolog of NCBI NO: 1518259 NR Description: gpi8 [Homo sapiens]
  misc_feature (1)..(340): Homolog of NCBI NO: 6320538 NR Description: Protein involved in the attachment of
  misc_feature (1)..(253): Homolog of NCBI NO: 7511896 NR Description: hypothetical protein 133E12.3 - fruit fly
  misc_feature (1)..(286): Homolog of NCBI NO: 24639234 NR Description: CG4406-PA [Drosophila melanogaster]
  misc_feature (1)..(299): Homolog of NCBI NO: 9802563 NR Description: F22O13.24 [Arabidopsis thaliana]
  misc_feature (1)..(299): Homolog of NCBI NO: 7485988 NR Description: hypothetical protein F22O13.26 - Arabidopsis
  misc_feature (1)..(345): Homolog of NCBI NO: 18390936 NR Description: putative GPI-anchor transamidase (U32517)
  misc_feature (1)..(345): Homolog of NCBI NO: 21537105 NR Description: putative GPI-anchor transamidase [Arabidopsis
MANTLSLYRTVKRLGIPDERIILMLADDMACNARNEYPAQVFNNENHKLNLYGDNVEVDYRGYEVTVENFLRVLTGRHENAVPRSKRLLSDEGSHILLYMTGHGGDEFLKFQDAEELQSHDLADAVKQMKEKRRFKELMIMVDTCQAATLFNQLQSPGVLAIGSSLKGENSYSHHLDSDIGVSVVDRFTYYTLAFFERLNIYDNASLNSLFRSYDPRLLMSTAYYRTDLYQPHLVEVPVTNFFGSVMETIHTDSAYKAFSSKISERKINSEMPFNQLSEHDLKEELENTNIPNDELIAEKQKCPYSQMRADLHEKVEKLENVDTVVNLSIALMVLAVMVSSSLLR

SEQ ID NO: 41363 - DNA, 1377 bp, Arabidopsis thaliana
  misc_feature (1)..(1377): Ceres Seq. ID no. 12330730
  misc_feature: MA Experiment ID: 108464 Result: Up-regulated in Transcription
  misc_feature: MA Experiment 108464 PARAMETER Experiment Name: At_Germinating_Seeds_cDNA_P Parameter: Age (day) Value: 4 vs. 0
  misc_feature: MA Experiment 108464 PARAMETER Experiment Name: At_Germinating_Seeds_cDNA_P Parameter: Tissue Value: Germinating Seeds
  misc_feature: MA Experiment ID: 108469 Result: Up-regulated in Transcription
  misc_feature: MA Experiment ID: 108668 Result: Up-regulated in Transcription
  misc_feature: MA Experiment 108668 PARAMETER Experiment Name: At_2mM_SA_cDNA_P Parameter: Plant Line Value: WS
  misc_feature: MA Experiment 108668 PARAMETER Experiment Name: At_2mM_SA_cDNA_P Parameter: Timepoint (hr) Value: 6
  misc_feature: MA Experiment 108668 PARAMETER Experiment Name: At_2mM_SA_cDNA_P Parameter: Treatment Value: 2mM SA vs. No Treatment
  misc_feature: MA Experiment ID: 20000068 Result: Down-regulated in Transcription
  misc_feature: MA Experiment ID: 20000087 Result: Down-regulated in Transcription
  misc_feature: MA Experiment 20000087 PARAMETER Experiment Name: At_100uM_ABA_Mutants_cDNA_P Parameter: Plant Line Value: WS
  misc_feature: MA Experiment 20000087 PARAMETER Experiment Name: At_100uM_ABA_Mutants_cDNA_P Parameter: Timepoint (hr) Value: 6
  misc_feature: MA Experiment 20000087 PARAMETER Experiment Name: At_100uM_ABA_Mutants_cDNA_P Parameter: Tissue Value: Aerial
  misc_feature: MA Experiment 20000087 PARAMETER Experiment Name: At_100uM_ABA_Mutants_cDNA_P Parameter: Treatment Value: 100uM ABA vs. No Treatment
  misc_feature: MA Experiment ID: 20000111 Result: Down-regulated in Transcription
  misc_feature: MA Experiment 20000111 PARAMETER Experiment Name: At_42deg_Heat_cDNA_P Parameter: Temperature (deg C) Value: 42 vs. 22
  misc_feature: MA Experiment 20000111 PARAMETER Experiment Name: At_42deg_Heat_cDNA_P Parameter: Timepoint (hr) Value: 6
  misc_feature: MA Experiment 20000111 PARAMETER Experiment Name: At_42deg_Heat_cDNA_P Parameter: Tissue Value: Aerial
  misc_feature: MA Experiment ID: 20000113 Result: Down-regulated in Transcription
  misc_feature: MA Experiment 20000113 PARAMETER Experiment Name: At_42deg_Heat_cDNA_P Parameter: Temperature (deg C) Value: 42 vs. 22
  misc_feature: MA Experiment 20000113 PARAMETER Experiment Name: At_42deg_Heat_cDNA_P Parameter: Timepoint (hr) Value: 8
  misc_feature: MA Experiment 20000113 PARAMETER Experiment Name: At_42deg_Heat_cDNA_P Parameter: Tissue Value: Aerial
  misc_feature: MA Experiment ID: 20000144 Result: Down-regulated in Transcription
  misc_feature: MA Experiment 20000144 PARAMETER Experiment Name: At_42deg_Heat_cDNA_P Parameter: Temperature (deg C) Value: 42 vs. 22
  misc_feature: MA Experiment 20000144 PARAMETER Experiment Name: At_42deg_Heat_cDNA_P Parameter: Timepoint (hr) Value: 1
  misc_feature: MA Experiment 20000144 PARAMETER Experiment Name: At_42deg_Heat_cDNA_P Parameter: Tissue Value: Aerial
  misc_feature: MA Experiment ID: 20000171 Result: Down-regulated in Transcription
  misc_feature: MA Experiment 20000171 PARAMETER Experiment Name: At_42deg_Heat_P Parameter: Age (day) Value: 14
  misc_feature: MA Experiment 20000171 PARAMETER Experiment Name: At_42deg_Heat_P Parameter: Organism Value: A. thaliana
  misc_feature: MA Experiment 20000171 PARAMETER Experiment Name: At_42deg_Heat_P Parameter: Plant Line Value: WS
  misc_feature: MA Experiment 20000171 PARAMETER Experiment Name: At_42deg_Heat_P Parameter: Temperature (deg C) Value: 42 vs. 22
  misc_feature: MA Experiment 20000171 PARAMETER Experiment Name: At_42deg_Heat_P Parameter: Timepoint (hr) Value: 1
  misc_feature: MA Experiment 20000171 PARAMETER Experiment Name: At_42deg_Heat_P Parameter: Tissue Value: Aerial
  misc_feature: MA Experiment ID: 20000173 Result: Down-regulated in Transcription
  misc_feature: MA Experiment 20000173 PARAMETER Experiment Name: At_42deg_Heat_P Parameter: Age (day) Value: 14
  misc_feature: MA Experiment 20000173 PARAMETER Experiment Name: At_42deg_Heat_P Parameter: Organism Value: A. thaliana
  misc_feature: MA Experiment 20000173 PARAMETER Experiment Name: At_42deg_Heat_P Parameter: Plant Line Value: WS
  misc_feature: MA Experiment 20000173 PARAMETER Experiment Name: At_42deg_Heat_P Parameter: Temperature (deg C) Value: 42 vs. 22
  misc_feature: MA Experiment 20000173 PARAMETER Experiment Name: At_42deg_Heat_P Parameter: Timepoint (hr) Value: 6
  misc_feature: MA Experiment 20000173 PARAMETER Experiment Name: At_42deg_Heat_P Parameter: Tissue Value: Aerial
  misc_feature: MA Experiment ID: 20000182 Result: Up-regulated in Transcription
  misc_feature: MA Experiment 20000182 PARAMETER Experiment Name: At_2mM_SA_P Parameter: Age (day) Value: 14
  misc_feature: MA Experiment 20000182 PARAMETER Experiment Name: At_2mM_SA_P Parameter: Organism Value: A. thaliana
  misc_feature: MA Experiment 20000182 PARAMETER Experiment Name: At_2mM_SA_P Parameter: Plant Line Value: WS
  misc_feature: MA Experiment 20000182 PARAMETER Experiment Name: At_2mM_SA_P Parameter: Timepoint (hr) Value: 6
  misc_feature: MA Experiment 20000182 PARAMETER Experiment Name: At_2mM_SA_P Parameter: Tissue Value: Aerial
  misc_feature: MA Experiment 20000182 PARAMETER Experiment Name: At_2mM_SA_P Parameter: Treatment Value: 2mM SA vs. No Treatment
  misc_feature: MA Experiment ID: 20000184 Result: Down-regulated in Transcription
  misc_feature: MA Experiment 20000184 PARAMETER Experiment Name: At_Shoots__P Parameter: Age (day) Value: 7
  misc_feature: MA Experiment 20000184 PARAMETER Experiment Name: At_Shoots__P Parameter: Tissue Value: Shoots vs. Whole Plant
  misc_feature: MA Experiment ID: 20000234 Result: Down-regulated in Transcription
  misc_feature: MA Experiment 20000234 PARAMETER Experiment Name: At_Siliques_P Parameter: Age (day) Value: 21
  misc_feature: MA Experiment 20000234 PARAMETER Experiment Name: At_Siliques_P Parameter: Organism Value: A. thaliana
  misc_feature: MA Experiment 20000234 PARAMETER Experiment Name: At_Siliques_P Parameter: Plant Line Value: WS
  misc_feature: MA Experiment 20000234 PARAMETER Experiment Name: At_Siliques_P Parameter: Tissue Value: Less Than 5mm Siliques vs. Whole Plant
  misc_feature: MA Experiment ID: 20000235 Result: Down-regulated in Transcription
  misc_feature: MA Experiment 20000235 PARAMETER Experiment Name: At_Siliques_P Parameter: Age (day) Value: 21
  misc_feature: MA Experiment 20000235 PARAMETER Experiment Name: At_Siliques_P Parameter: Organism Value: A. thaliana
  misc_feature: MA Experiment 20000235 PARAMETER Experiment Name: At_Siliques_P Parameter: Plant Line Value: WS
  misc_feature: MA Experiment 20000235 PARAMETER Experiment Name: At_Siliques_P Parameter: Tissue Value: 5-10mm Siliques vs. Whole Plant
  misc_feature: MA Experiment ID: 20000264 Result: Down-regulated in Transcription
  misc_feature: MA Experiment 20000264 PARAMETER Experiment Name: At_Open_Flower_P Parameter: Age (day) Value: 21
  misc_feature: MA Experiment 20000264 PARAMETER Experiment Name: At_Open_Flower_P Parameter: Plant Line Value: WS
  misc_feature: MA Experiment 20000264 PARAMETER Experiment Name: At_Open_Flower_P Parameter: Tissue Value: Open Flower vs. Whole Plant
  misc_feature: MA Experiment ID: 20000286 Result: Down-regulated in Transcription
  misc_feature: MA Experiment 20000286 PARAMETER Experiment Name: At_Open_Flower_P Parameter: Age (day) Value: 21
  misc_feature: MA Experiment 20000286 PARAMETER Experiment Name: At_Open_Flower_P Parameter: Plant Line Value: WS
  misc_feature: MA Experiment 20000286 PARAMETER Experiment Name: At_Open_Flower_P Parameter: Tissue Value: Half Open vs. Whole Plant
  misc_feature: MA Experiment ID: 20000438 Result: Down-regulated in Transcription
  misc_feature: MA Experiment 20000438 PARAMETER Experiment Name: At_Shoots__P Parameter: Age (day) Value: 14
  misc_feature: MA Experiment 20000438 PARAMETER Experiment Name: At_Shoots__P Parameter: Tissue Value: Shoots vs. Whole Plant
  misc_feature: MA Experiment ID: 20000439 Result: Down-regulated in Transcription
  misc_feature: MA Experiment 20000439 PARAMETER Experiment Name: At_Roots__P Parameter: Age (day) Value: 14 vs. 21
  misc_feature: MA Experiment 20000439 PARAMETER Experiment Name: At_Roots__P Parameter: Organism Value: A. thaliana
  misc_feature: MA Experiment 20000439 PARAMETER Experiment Name: At_Roots__P Parameter: Tissue Value: Roots vs. Whole Plant
  misc_feature: MA Experiment ID: 20000506 Result: Up-regulated in Transcription
  misc_feature: MA Experiment 20000506 PARAMETER Experiment Name: At_Wounding_P Parameter: Organism Value: A. thaliana
  misc_feature: MA Experiment 20000506 PARAMETER Experiment Name: At_Wounding_P Parameter: Plant Line Value: WS
  misc_feature: MA Experiment 20000506 PARAMETER Experiment Name: At_Wounding_P Parameter: Timepoint (hr) Value: 6
  misc_feature: MA Experiment 20000506 PARAMETER Experiment Name: At_Wounding_P Parameter: Tissue Value: Aerial
  misc_feature: MA Experiment 20000506 PARAMETER Experiment Name: At_Wounding_P Parameter: Treatment Value: Wounding vs. No Wounding
  misc_feature: MA Experiment ID: 20000573 Result: Up-regulated in Transcription
  misc_feature: MA Experiment 20000573 PARAMETER Experiment Name: At_100uM_ABA_Mutants__P Parameter: Organism Value: A. thaliana
  misc_feature: MA Experiment 20000573 PARAMETER Experiment Name: At_100uM_ABA_Mutants__P Parameter: Plant Line Value: CS22 vs. Ler wt
  misc_feature: MA Experiment 20000573 PARAMETER Experiment Name: At_100uM_ABA_Mutants__P Parameter: Timepoint (hr) Value: N/A
  misc_feature: MA Experiment 20000573 PARAMETER Experiment Name: At_100uM_ABA_Mutants__P Parameter: Tissue Value: Whole Plant
  misc_feature: MA Experiment 20000573 PARAMETER Experiment Name: At_100uM_ABA_Mutants__P Parameter: Treatment Value: None
  misc_feature: MA Experiment ID: 20000574 Result: Up-regulated in Transcription
  misc_feature: MA Experiment 20000574 PARAMETER Experiment Name: At_100uM_ABA_Mutants__P Parameter: Organism Value: A. thaliana
  misc_feature: MA Experiment 20000574 PARAMETER Experiment Name: At_100uM_ABA_Mutants__P Parameter: Plant Line Value: CS23 vs. Ler wt
  misc_feature: MA Experiment 20000574 PARAMETER Experiment Name: At_100uM_ABA_Mutants__P Parameter: Timepoint (hr) Value: N/A
  misc_feature: MA Experiment 20000574 PARAMETER Experiment Name: At_100uM_ABA_Mutants__P Parameter: Tissue Value: Whole Plant
  misc_feature: MA Experiment 20000574 PARAMETER Experiment Name: At_100uM_ABA_Mutants__P Parameter: Treatment Value: None
  misc_feature: MA Experiment ID: 20000794 Result: Down-regulated in Transcription
  misc_feature: MA Experiment 20000794 PARAMETER Experiment Name: At_Petals_P Parameter: Age (day) Value: 23-25 days
  misc_feature: MA Experiment 20000794 PARAMETER Experiment Name: At_Petals_P Parameter: Plant Line Value: WS
  misc_feature: MA Experiment 20000794 PARAMETER Experiment Name: At_Petals_P Parameter: Tissue Value: Petals vs. Whole plant
  misc_feature: MA Experiment ID: 20001554 Result: Down-regulated in Transcription
  misc_feature: MA Experiment 20001554 PARAMETER Experiment Name: At_Drought_Soil_Dry_P Parameter: Age (day) Value: 21
  misc_feature: MA Experiment 20001554 PARAMETER Experiment Name: At_Drought_Soil_Dry_P Parameter: Organism Value: A. thaliana
  misc_feature: MA Experiment 20001554 PARAMETER Experiment Name: At_Drought_Soil_Dry_P Parameter: Plant Line Value: WS
  misc_feature: MA Experiment 20001554 PARAMETER Experiment Name: At_Drought_Soil_Dry_P Parameter: Post Timepoint (hr) Value: None
  misc_feature: MA Experiment 20001554 PARAMETER Experiment Name: At_Drought_Soil_Dry_P Parameter: Post-Treatment Value: None
  misc_feature: MA Experiment 20001554 PARAMETER Experiment Name: At_Drought_Soil_Dry_P Parameter: Timepoint (day) Value: 7
  misc_feature: MA Experiment 20001554 PARAMETER Experiment Name: At_Drought_Soil_Dry_P Parameter: Treatment Value: Drought vs. No Drought
  misc_feature: MA Experiment ID: 20001555 Result: Down-regulated in Transcription
  misc_feature: MA Experiment 20001555 PARAMETER Experiment Name: At_Drought_Soil_Dry_P Parameter: Age (day) Value: 24
  misc_feature: MA Experiment 20001555 PARAMETER Experiment Name: At_Drought_Soil_Dry_P Parameter: Organism Value: A. thaliana
  misc_feature: MA Experiment 20001555 PARAMETER Experiment Name: At_Drought_Soil_Dry_P Parameter: Plant Line Value: WS
  misc_feature: MA Experiment 20001555 PARAMETER Experiment Name: At_Drought_Soil_Dry_P Parameter: Post Timepoint (hr) Value: None
  misc_feature: MA Experiment 20001555 PARAMETER Experiment Name: At_Drought_Soil_Dry_P Parameter: Post-Treatment Value: None
  misc_feature: MA Experiment 20001555 PARAMETER Experiment Name: At_Drought_Soil_Dry_P Parameter: Timepoint (day) Value: 10
  misc_feature: MA Experiment 20001555 PARAMETER Experiment Name: At_Drought_Soil_Dry_P Parameter: Treatment Value: Drought vs. No Drought
  misc_feature: MA Experiment ID: 20001556 Result: Down-regulated in Transcription
  misc_feature: MA Experiment 20001556 PARAMETER Experiment Name: At_Drought_Soil_Dry_P Parameter: Age (day) Value: 26
  misc_feature: MA Experiment 20001556 PARAMETER Experiment Name: At_Drought_Soil_Dry_P Parameter: Organism Value: A. thaliana
  misc_feature: MA Experiment 20001556 PARAMETER Experiment Name: At_Drought_Soil_Dry_P Parameter: Plant Line Value: WS
  misc_feature: MA Experiment 20001556 PARAMETER Experiment Name: At_Drought_Soil_Dry_P Parameter: Post Timepoint (hr) Value: None
  misc_feature: MA Experiment 20001556 PARAMETER Experiment Name: At_Drought_Soil_Dry_P Parameter: Post-Treatment Value: None
  misc_feature: MA Experiment 20001556 PARAMETER Experiment Name: At_Drought_Soil_Dry_P Parameter: Timepoint (day) Value: 12
  misc_feature: MA Experiment 20001556 PARAMETER Experiment Name: At_Drought_Soil_Dry_P Parameter: Treatment Value: Drought vs. No Drought
  misc_feature: MA Experiment ID: 20001557 Result: Down-regulated in Transcription
  misc_feature: MA Experiment 20001557 PARAMETER Experiment Name: At_Drought_Soil_Dry_P Parameter: Age (day) Value: 27
  misc_feature: MA Experiment 20001557 PARAMETER Experiment Name: At_Drought_Soil_Dry_P Parameter: Organism Value: A. thaliana
  misc_feature: MA Experiment 20001557 PARAMETER Experiment Name: At_Drought_Soil_Dry_P Parameter: Plant Line Value: WS
  misc_feature: MA Experiment 20001557 PARAMETER Experiment Name: At_Drought_Soil_Dry_P Parameter: Post Timepoint (hr) Value: 3
  misc_feature: MA Experiment 20001557 PARAMETER Experiment Name: At_Drought_Soil_Dry_P Parameter: Post-Treatment Value: Re-Water vs. No Drought
  misc_feature: MA Experiment 20001557 PARAMETER Experiment Name: At_Drought_Soil_Dry_P Parameter: Timepoint (day) Value: 13
  misc_feature: MA Experiment 20001557 PARAMETER Experiment Name: At_Drought_Soil_Dry_P Parameter: Treatment Value: Drought vs. No Drought
  misc_feature: MA Experiment ID: 20001558 Result: Down-regulated in Transcription
  misc_feature: MA Experiment 20001558 PARAMETER Experiment Name: At_Drought_Soil_Dry_P Parameter: Age (day) Value: 27
  misc_feature: MA Experiment 20001558 PARAMETER Experiment Name: At_Drought_Soil_Dry_P Parameter: Organism Value: A. thaliana
  misc_feature: MA Experiment 20001558 PARAMETER Experiment Name: At_Drought_Soil_Dry_P Parameter: Plant Line Value: WS
  misc_feature: MA Experiment 20001558 PARAMETER Experiment Name: At_Drought_Soil_Dry_P Parameter: Post Timepoint (hr) Value: 6
  misc_feature: MA Experiment 20001558 PARAMETER Experiment Name: At_Drought_Soil_Dry_P Parameter: Post-Treatment Value: Re-Water vs. No Drought
  misc_feature: MA Experiment 20001558 PARAMETER Experiment Name: At_Drought_Soil_Dry_P Parameter: Timepoint (day) Value: 13
  misc_feature: MA Experiment 20001558 PARAMETER Experiment Name: At_Drought_Soil_Dry_P Parameter: Treatment Value: Drought vs. No Drought
  misc_feature: MA Experiment ID: 20001559 Result: Down-regulated in Transcription
  misc_feature: MA Experiment 20001559 PARAMETER Experiment Name: At_Drought_Soil_Dry_P Parameter: Age (day) Value: 28
  misc_feature: MA Experiment 20001559 PARAMETER Experiment Name: At_Drought_Soil_Dry_P Parameter: Organism Value: A. thaliana
  misc_feature: MA Experiment 20001559 PARAMETER Experiment Name: At_Drought_Soil_Dry_P Parameter: Plant Line Value: WS
  misc_feature: MA Experiment 20001559 PARAMETER Experiment Name: At_Drought_Soil_Dry_P Parameter: Post Timepoint (hr) Value: 29
  misc_feature: MA Experiment 20001559 PARAMETER Experiment Name: At_Drought_Soil_Dry_P Parameter: Post-Treatment Value: Re-Water vs. No Drought
  misc_feature: MA Experiment 20001559 PARAMETER Experiment Name: At_Drought_Soil_Dry_P Parameter: Timepoint (day) Value: 14
  misc_feature: MA Experiment 20001559 PARAMETER Experiment Name: At_Drought_Soil_Dry_P Parameter: Treatment Value: Drought vs. No Drought
  misc_feature: MA Experiment ID: 20001560 Result: Down-regulated in Transcription
  misc_feature: MA Experiment 20001560 PARAMETER Experiment Name: At_Drought_Soil_Dry_P Parameter: Age (day) Value: 28
  misc_feature: MA Experiment 20001560 PARAMETER Experiment Name: At_Drought_Soil_Dry_P Parameter: Organism Value: A. thaliana
  misc_feature: MA Experiment 20001560 PARAMETER Experiment Name: At_Drought_Soil_Dry_P Parameter: Plant Line Value: WS
  misc_feature: MA Experiment 20001560 PARAMETER Experiment Name: At_Drought_Soil_Dry_P Parameter: Post Timepoint (hr) Value: None
  misc_feature: MA Experiment 20001560 PARAMETER Experiment Name: At_Drought_Soil_Dry_P Parameter: Post-Treatment Value: None
  misc_feature: MA Experiment 20001560 PARAMETER Experiment Name: At_Drought_Soil_Dry_P Parameter: Timepoint (day) Value: 14
  misc_feature: MA Experiment 20001560 PARAMETER Experiment Name: At_Drought_Soil_Dry_P Parameter: Treatment Value: Drought vs. No Drought
  misc_feature: MA Experiment ID: 20001757 Result: Up-regulated in Transcription
  misc_feature: MA Experiment 20001757 PARAMETER Experiment Name: At_50mM_NH4NO3_L-to-H_P Parameter: Timepoint (hr) Value: 6
  misc_feature: MA Experiment 20001757 PARAMETER Experiment Name: At_50mM_NH4NO3_L-to-H_P Parameter: Tissue Value: Leaf
  misc_feature: MA Experiment 20001757 PARAMETER Experiment Name: At_50mM_NH4NO3_L-to-H_P Parameter: Treatment Value: 50mM NH4NO3 vs 100mM Mannitol
  misc_feature: MA Experiment ID: 20001768 Result: Up-regulated in Transcription
  misc_feature: MA Experiment 20001768 PARAMETER Experiment Name: At_Far-red-enriched-adult_P Parameter: Age (day) Value: 28
  misc_feature: MA Experiment 20001768 PARAMETER Experiment Name: At_Far-red-enriched-adult_P Parameter: Light Value: Far-red enriched vs. White
  misc_feature: MA Experiment 20001768 PARAMETER Experiment Name: At_Far-red-enriched-adult_P Parameter: Organism Value: A. thaliana
  misc_feature: MA Experiment 20001768 PARAMETER Experiment Name: At_Far-red-enriched-adult_P Parameter: Plant Line Value: Columbia
  misc_feature: MA Experiment 20001768 PARAMETER Experiment Name: At_Far-red-enriched-adult_P Parameter: Timepoint (hr) Value: 1
  misc_feature: MA Experiment 20001768 PARAMETER Experiment Name: At_Far-red-enriched-adult_P Parameter: Tissue Value: Aerial
  misc_feature: MA Experiment ID: 20001773 Result: Down-regulated in Transcription
  misc_feature: MA Experiment 20001773 PARAMETER Experiment Name: At_Far-red-enriched-adult_P Parameter: Age (day) Value: 30
  misc_feature: MA Experiment 20001773 PARAMETER Experiment Name: At_Far-red-enriched-adult_P Parameter: Light Value: Far-red enriched vs. White
  misc_feature: MA Experiment 20001773 PARAMETER Experiment Name: At_Far-red-enriched-adult_P Parameter: Organism Value: A. thaliana
  misc_feature: MA Experiment 20001773 PARAMETER Experiment Name: At_Far-red-enriched-adult_P Parameter: Plant Line Value: Columbia
  misc_feature: MA Experiment 20001773 PARAMETER Experiment Name: At_Far-red-enriched-adult_P Parameter: Timepoint (hr) Value: 48
  misc_feature: MA Experiment 20001773 PARAMETER Experiment Name: At_Far-red-enriched-adult_P Parameter: Tissue Value: Aerial
  misc_feature: MA Experiment ID: 20001904 Result: Down-regulated in Transcription
  misc_feature: MA Experiment 20001904 PARAMETER Experiment Name: At_Drought_Reproduction_P Parameter: Age (day) Value: 37
  misc_feature: MA Experiment 20001904 PARAMETER Experiment Name: At_Drought_Reproduction_P Parameter: Organism Value: A. thaliana
  misc_feature: MA Experiment 20001904 PARAMETER Experiment Name: At_Drought_Reproduction_P Parameter: Plant Line Value: WS
  misc_feature: MA Experiment 20001904 PARAMETER Experiment Name: At_Drought_Reproduction_P Parameter: Timepoint (day) Value: 7
  misc_feature: MA Experiment 20001904 PARAMETER Experiment Name: At_Drought_Reproduction_P Parameter: Tissue Value: Rosettes
  misc_feature: MA Experiment 20001904 PARAMETER Experiment Name: At_Drought_Reproduction_P Parameter: Treatment Value: Drought vs. No Drought
  misc_feature: MA Experiment ID: 20001905 Result: Down-regulated in Transcription
  misc_feature: MA Experiment 20001905 PARAMETER Experiment Name: At_Drought_Reproduction_P Parameter: Age (day) Value: 40
  misc_feature: MA Experiment 20001905 PARAMETER Experiment Name: At_Drought_Reproduction_P Parameter: Organism Value: A. thaliana
  misc_feature: MA Experiment 20001905 PARAMETER Experiment Name: At_Drought_Reproduction_P Parameter: Plant Line Value: WS
  misc_feature: MA Experiment 20001905 PARAMETER Experiment Name: At_Drought_Reproduction_P Parameter: Timepoint (day) Value: 10
  misc_feature: MA Experiment 20001905 PARAMETER Experiment Name: At_Drought_Reproduction_P Parameter: Tissue Value: Rosettes
  misc_feature: MA Experiment 20001905 PARAMETER Experiment Name: At_Drought_Reproduction_P Parameter: Treatment Value: Drought vs. No Drought
  misc_feature: MA Experiment ID: 20001910 Result: Down-regulated in Transcription
  misc_feature: MA Experiment 20001910 PARAMETER Experiment Name: At_Drought_Reproduction_P Parameter: Age (day) Value: 37
  misc_feature: MA Experiment 20001910 PARAMETER Experiment Name: At_Drought_Reproduction_P Parameter: Organism Value: A. thaliana
  misc_feature: MA Experiment 20001910 PARAMETER Experiment Name: At_Drought_Reproduction_P Parameter: Plant Line Value: WS
  misc_feature: MA Experiment 20001910 PARAMETER Experiment Name: At_Drought_Reproduction_P Parameter: Timepoint (day) Value: 7
  misc_feature: MA Experiment 20001910 PARAMETER Experiment Name: At_Drought_Reproduction_P Parameter: Tissue Value: Flowers
  misc_feature: MA Experiment 20001910 PARAMETER Experiment Name: At_Drought_Reproduction_P Parameter: Treatment Value: Drought vs. No Drought
acaatgaatttttaaaactggctcaaatgtctttctcttaaggccgatcatcaacctgtatttgtgtttggttggtttcgtcagtagcgctctcacttcagtcacaaagtgaaaccagttacaaaaccagggtgataaaacgaagaagaagagaagacggtgaaaggacgagctgctgatggcctcacgcagagagatttttagcttttctggtccccctccaattccctcttttgactggaacaatttgtaccaccgagcgtcattggtatcatgtttagtgcaaggagtgtacacaatggaacgagataggcaacaaaaccggtgtggttctgactcacaagctagaccttggtgggcgttttacaggttcactttataccaacaacttagggacgcattagatggctccatatacggggccgttttccagaacgacatcaattaccagaatactcccaactcgatagtacctccacgttacattattgcgttacgtggaacgatcttaagcccacaaactatggcttgtgatgttcagcttaacattcgtatcgccttcgagaacctctaccgcgggggtagatttgtgcaggccattcaagcaatgcaatattttgtggccgcatatggaaacacagctatctggattgctggacactctctaggagctggccttgcactactcgcgggaaagatcatggccatgtatggatgccctgtcgaggcttacatcttcaacccacctatctctttgattcctctagagcagctagtggagagtgaggatcttaaatgtgcggtccgactcgctagggatatcctcaaagccggcatagcaagagtcctagatcttaacgagggtcaagaaagccatctatttatgaatttagcttgctggagacctcatttgtttgtgaaccaatcagatccaatctgctcagaatatattggctatttcaaccatagaggcgatatgaatgagctgcaactgggtaggatcgagaggttggctagatactcaattaggagaatattgttcgggggaggagaaagttcgtcgtcgtattcttcagaagaacatcttcattttcttccgtcggccatcgtgatggtgaacacaatcatatcaccggattttcagacagatcatgggattcatcaatggtggaatcctatgcttggacagttttcataccaaattatagcatgacttgcgcttaatttcatcgcttcagttattttcttttcagttgaatcttctatacaaatattgcaaggttttttttgcttcatgtcacatcagactttttcagcattttattttcaattgtattacttcccgaatatactctatttgattaacattattcttct

SEQ ID NO: 41364 - protein, 344 aa, Arabidopsis thaliana
  peptide (1)..(344): Ceres Seq. ID no. 12330731
  misc_feature (1)..(295): Homolog of NCBI NO: 7486138 NR Description: hypothetical protein F25I24.160 - Arabidopsis
  misc_feature (31)..(335): Homolog of NCBI NO: 34910674 NR Description: P0690B02.1 [Oryza sativa (japonica
  misc_feature (1)..(331): Homolog of NCBI NO: 18413406 NR Description: unknown protein; protein id: At4g10955.1
  misc_feature (1)..(331): Homolog of NCBI NO: 18396010 NR Description: expressed protein
  misc_feature (1)..(221): Homolog of NCBI NO: 10177082 NR Description: gene_id:MOP9.4~pir||T04290~similar to unknown
  misc_feature (6)..(331): Homolog of NCBI NO: 15237909 NR Description: putative protein; protein id: At5g24180.1
  misc_feature (1)..(331): Homolog of NCBI NO: 15237918 NR Description: putative protein; protein id: At5g24220.1
  misc_feature (1)..(338): Homolog of NCBI NO: 30689345 NR Description: expressed protein [Arabidopsis thaliana]
  misc_feature (1)..(337): Homolog of NCBI NO: 15237916 NR Description: putative protein
  misc_feature (1)..(344): Homolog of NCBI NO: 15237913 NR Description: putative protein; protein id: At5g24200.1
MASRREIFSFSGPPPIPSFDWNNLYHRASLVSCLVQGVYTMERDRQQNRCGSDSQARPWWAFYRFTLYQQLRDALDGSIYGAVFQNDINYQNTPNSIVPPRYIIALRGTILSPQTMACDVQLNIRIAFENLYRGGRFVQAIQAMQYFVAAYGNTAIWIAGHSLGAGLALLAGKIMAMYGCPVEAYIFNPPISLIPLEQLVESEDLKCAVRLARDILKAGIARVLDLNEGQESHLFMNLACWRPHLFVNQSDPICSEYIGYFNHRGDMNELQLGRIERLARYSIRRILFGGGESSSSYSSEEHLHFLPSAIVMVNTIISPDFQTDHGIHQWWNPMLGQFSYQIIA

SEQ ID NO: 41365 - protein, 304 aa, Arabidopsis thaliana
  peptide (1)..(304): Ceres Seq. ID no. 12330732
  misc_feature (1)..(255): Homolog of NCBI NO: 7486138 NR Description: hypothetical protein F25I24.160 - Arabidopsis
  misc_feature (1)..(295): Homolog of NCBI NO: 34910674 NR Description: P0690B02.1 [Oryza sativa (japonica
  misc_feature (1)..(291): Homolog of NCBI NO: 18413406 NR Description: unknown protein; protein id: At4g10955.1
  misc_feature (1)..(291): Homolog of NCBI NO: 18396010 NR Description: expressed protein
  misc_feature (1)..(181): Homolog of NCBI NO: 10177082 NR Description: gene_id:MOP9.4~pir||T04290~similar to unknown
  misc_feature (1)..(291): Homolog of NCBI NO: 15237909 NR Description: putative protein; protein id: At5g24180.1
  misc_feature (1)..(291): Homolog of NCBI NO: 15237918 NR Description: putative protein; protein id: At5g24220.1
  misc_feature (1)..(298): Homolog of NCBI NO: 30689345 NR Description: expressed protein [Arabidopsis thaliana]
  misc_feature (1)..(297): Homolog of NCBI NO: 15237916 NR Description: putative protein
  misc_feature (1)..(304): Homolog of NCBI NO: 15237913 NR Description: putative protein; protein id: At5g24200.1
MERDRQQNRCGSDSQARPWWAFYRFTLYQQLRDALDGSIYGAVFQNDINYQNTPNSIVPPRYIIALRGTILSPQTMACDVQLNIRIAFENLYRGGRFVQAIQAMQYFVAAYGNTAIWIAGHSLGAGLALLAGKIMAMYGCPVEAYIFNPPISLIPLEQLVESEDLKCAVRLARDILKAGIARVLDLNEGQESHLFMNLACWRPHLFVNQSDPICSEYIGYFNHRGDMNELQLGRIERLARYSIRRILFGGGESSSSYSSEEHLHFLPSAIVMVNTIISPDFQTDHGIHQWWNPMLGQFSYQIIA

SEQ ID NO: 41366 - protein, 229 aa, Arabidopsis thaliana
  peptide (1)..(229): Ceres Seq. ID no. 12330733
  misc_feature (1)..(180): Homolog of NCBI NO: 7486138 NR Description: hypothetical protein F25I24.160 - Arabidopsis
  misc_feature (1)..(220): Homolog of NCBI NO: 34910674 NR Description: P0690B02.1 [Oryza sativa (japonica
  misc_feature (1)..(216): Homolog of NCBI NO: 18413406 NR Description: unknown protein; protein id: At4g10955.1
  misc_feature (1)..(216): Homolog of NCBI NO: 18396010 NR Description: expressed protein
  misc_feature (1)..(106): Homolog of NCBI NO: 10177082 NR Description: gene_id:MOP9.4~pir||T04290~similar to unknown
  misc_feature (1)..(216): Homolog of NCBI NO: 15237909 NR Description: putative protein; protein id: At5g24180.1
  misc_feature (1)..(216): Homolog of NCBI NO: 15237918 NR Description: putative protein; protein id: At5g24220.1
  misc_feature (1)..(223): Homolog of NCBI NO: 30689345 NR Description: expressed protein [Arabidopsis thaliana]
  misc_feature (1)..(222): Homolog of NCBI NO: 15237916 NR Description: putative protein
  misc_feature (1)..(229): Homolog of NCBI NO: 15237913 NR Description: putative protein; protein id: At5g24200.1
MACDVQLNIRIAFENLYRGGRFVQAIQAMQYFVAAYGNTAIWIAGHSLGAGLALLAGKIMAMYGCPVEAYIFNPPISLIPLEQLVESEDLKCAVRLARDILKAGIARVLDLNEGQESHLFMNLACWRPHLFVNQSDPICSEYIGYFNHRGDMNELQLGRIERLARYSIRRILFGGGESSSSYSSEEHLHFLPSAIVMVNTIISPDFQTDHGIHQWWNPMLGQFSYQIIA

SEQ ID NO: 41367 - DNA, 1886 bp, Arabidopsis thaliana
  misc_feature (1)..(1886): Ceres Seq. ID no. 12562541
  misc_feature: MA Experiment ID: 108488 Result: Down-regulated in Transcription
  misc_feature: MA Experiment ID: 108561 Result: Up-regulated in Transcription
  misc_feature: MA Experiment 108561 PARAMETER Experiment Name: At_100uM_ABA_cDNA_P Parameter: Timepoint (hr) Value: 6
  misc_feature: MA Experiment 108561 PARAMETER Experiment Name: At_100uM_ABA_cDNA_P Parameter: Tissue Value: Aerial
  misc_feature: MA Experiment 108561 PARAMETER Experiment Name: At_100uM_ABA_cDNA_P Parameter: Treatment Value: 100uM ABA vs. No Treatment
  misc_feature: MA Experiment ID: 108569 Result: Up-regulated in Transcription
  misc_feature: MA Experiment 108569 PARAMETER Experiment Name: At_0.001%_MeJA__cDNA_P Parameter: Timepoint (hr) Value: 6
  misc_feature: MA Experiment 108569 PARAMETER Experiment Name: At_0.001%_MeJA__cDNA_P Parameter: Tissue Value: Aerial
  misc_feature: MA Experiment 108569 PARAMETER Experiment Name: At_0.001%_MeJA__cDNA_P Parameter: Treatment Value: 0.001% MeJA vs. No Treatment
  misc_feature: MA Experiment ID: 108573 Result: Up-regulated in Transcription
  misc_feature: MA Experiment 108573 PARAMETER Experiment Name: At_Drought_cDNA_P Parameter: Timepoint (hr) Value: 6
  misc_feature: MA Experiment 108573 PARAMETER Experiment Name: At_Drought_cDNA_P Parameter: Tissue Value: Aerial
  misc_feature: MA Experiment 108573 PARAMETER Experiment Name: At_Drought_cDNA_P Parameter: Treatment Value: Drought vs. No Drought
  misc_feature: MA Experiment ID: 108577 Result: Down-regulated in Transcription
  misc_feature: MA Experiment 108577 PARAMETER Experiment Name: At_42deg_Heat_cDNA_P Parameter: Temperature (deg C) Value: 42 vs. 22
  misc_feature: MA Experiment 108577 PARAMETER Experiment Name: At_42deg_Heat_cDNA_P Parameter: Timepoint (hr) Value: 6
  misc_feature: MA Experiment 108577 PARAMETER Experiment Name: At_42deg_Heat_cDNA_P Parameter: Tissue Value: Aerial
  misc_feature: MA Experiment ID: 108605 Result: Up-regulated in Transcription
  misc_feature: MA Experiment 108605 PARAMETER Experiment Name: At_100uM_ABA_cDNA_P Parameter: Timepoint (hr) Value: 6
  misc_feature: MA Experiment 108605 PARAMETER Experiment Name: At_100uM_ABA_cDNA_P Parameter: Tissue Value: Aerial
  misc_feature: MA Experiment 108605 PARAMETER Experiment Name: At_100uM_ABA_cDNA_P Parameter: Treatment Value: 100uM ABA vs. No Treatment
  misc_feature: MA Experiment ID: 108607 Result: Up-regulated in Transcription
  misc_feature: MA Experiment 108607 PARAMETER Experiment Name: At_100uM_ABA_cDNA_P Parameter: Timepoint (hr) Value: 4
  misc_feature: MA Experiment 108607 PARAMETER Experiment Name: At_100uM_ABA_cDNA_P Parameter: Tissue Value: Aerial
  misc_feature: MA Experiment 108607 PARAMETER Experiment Name: At_100uM_ABA_cDNA_P Parameter: Treatment Value: 100uM ABA vs. No Treatment
  misc_feature: MA Experiment ID: 108608 Result: Up-regulated in Transcription
  misc_feature: MA Experiment 108608 PARAMETER Experiment Name: At_100uM_ABA_cDNA_P Parameter: Timepoint (hr) Value: 1
  misc_feature: MA Experiment 108608 PARAMETER Experiment Name: At_100uM_ABA_cDNA_P Parameter: Tissue Value: Aerial
  misc_feature: MA Experiment 108608 PARAMETER Experiment Name: At_100uM_ABA_cDNA_P Parameter: Treatment Value: 100uM ABA vs. No Treatment
  misc_feature: MA Experiment ID: 108609 Result: Up-regulated in Transcription
  misc_feature: MA Experiment 108609 PARAMETER Experiment Name: At_100uM_ABA_cDNA_P Parameter: Timepoint (hr) Value: 24
  misc_feature: MA Experiment 108609 PARAMETER Experiment Name: At_100uM_ABA_cDNA_P Parameter: Tissue Value: Aerial
  misc_feature: MA Experiment 108609 PARAMETER Experiment Name: At_100uM_ABA_cDNA_P Parameter: Treatment Value: 100uM ABA vs. No Treatment
  misc_feature: MA Experiment ID: 108668 Result: Up-regulated in Transcription
  misc_feature: MA Experiment 108668 PARAMETER Experiment Name: At_2mM_SA_cDNA_P Parameter: Plant Line Value: WS
  misc_feature: MA Experiment 108668 PARAMETER Experiment Name: At_2mM_SA_cDNA_P Parameter: Timepoint (hr) Value: 6
  misc_feature: MA Experiment 108668 PARAMETER Experiment Name: At_2mM_SA_cDNA_P Parameter: Treatment Value: 2mM SA vs. No Treatment
  misc_feature: MA Experiment ID: 20000069 Result: Up-regulated in Transcription
  misc_feature: MA Experiment 20000069 PARAMETER Experiment Name: At_100uM_ABA_Mutants_cDNA_P Parameter: Plant Line Value: CS23
  misc_feature: MA Experiment 20000069 PARAMETER Experiment Name: At_100uM_ABA_Mutants_cDNA_P Parameter: Timepoint (hr) Value: 6
  misc_feature: MA Experiment 20000069 PARAMETER Experiment Name: At_100uM_ABA_Mutants_cDNA_P Parameter: Tissue Value: Aerial
  misc_feature: MA Experiment 20000069 PARAMETER Experiment Name: At_100uM_ABA_Mutants_cDNA_P Parameter: Treatment Value: 100uM ABA vs. No Treatment
  misc_feature: MA Experiment ID: 20000070 Result: Up-regulated in Transcription
  misc_feature: MA Experiment 20000070 PARAMETER Experiment Name: At_100uM_ABA_Mutants_cDNA_P Parameter: Plant Line Value: CS24
  misc_feature: MA Experiment 20000070 PARAMETER Experiment Name: At_100uM_ABA_Mutants_cDNA_P Parameter: Timepoint (hr) Value: 6
  misc_feature: MA Experiment 20000070 PARAMETER Experiment Name: At_100uM_ABA_Mutants_cDNA_P Parameter: Tissue Value: Aerial
  misc_feature: MA Experiment 20000070 PARAMETER Experiment Name: At_100uM_ABA_Mutants_cDNA_P Parameter: Treatment Value: 100uM ABA vs. No Treatment
  misc_feature: MA Experiment ID: 20000071 Result: Up-regulated in Transcription
  misc_feature: MA Experiment 20000071 PARAMETER Experiment Name: At_100uM_ABA_Mutants_cDNA_P Parameter: Plant Line Value: CS8104
  misc_feature: MA Experiment 20000071 PARAMETER Experiment Name: At_100uM_ABA_Mutants_cDNA_P Parameter: Timepoint (hr) Value: 6
  misc_feature: MA Experiment 20000071 PARAMETER Experiment Name: At_100uM_ABA_Mutants_cDNA_P Parameter: Tissue Value: Aerial
  misc_feature: MA Experiment 20000071 PARAMETER Experiment Name: At_100uM_ABA_Mutants_cDNA_P Parameter: Treatment Value: 100uM ABA vs. No Treatment
  misc_feature: MA Experiment ID: 20000072 Result: Up-regulated in Transcription
  misc_feature: MA Experiment 20000072 PARAMETER Experiment Name: At_100uM_ABA_Mutants_cDNA_P Parameter: Plant Line Value: CS8105
  misc_feature: MA Experiment 20000072 PARAMETER Experiment Name: At_100uM_ABA_Mutants_cDNA_P Parameter: Timepoint (hr) Value: 6
  misc_feature: MA Experiment 20000072 PARAMETER Experiment Name: At_100uM_ABA_Mutants_cDNA_P Parameter: Tissue Value: Aerial
  misc_feature: MA Experiment 20000072 PARAMETER Experiment Name: At_100uM_ABA_Mutants_cDNA_P Parameter: Treatment Value: 100uM ABA vs. No Treatment
  misc_feature: MA Experiment ID: 20000088 Result: Up-regulated in Transcription
  misc_feature: MA Experiment 20000088 PARAMETER Experiment Name: At_100uM_ABA_Mutants_cDNA_P Parameter: Plant Line Value: Landsberg
  misc_feature: MA Experiment 20000088 PARAMETER Experiment Name: At_100uM_ABA_Mutants_cDNA_P Parameter: Timepoint (hr) Value: 6
  misc_feature: MA Experiment 20000088 PARAMETER Experiment Name: At_100uM_ABA_Mutants_cDNA_P Parameter: Tissue Value: Aerial
  misc_feature: MA Experiment 20000088 PARAMETER Experiment Name: At_100uM_ABA_Mutants_cDNA_P Parameter: Treatment Value: 100uM ABA vs. No Treatment
  misc_feature: MA Experiment ID: 20000112 Result: Down-regulated in Transcription
  misc_feature: MA Experiment 20000112 PARAMETER Experiment Name: At_42deg_Heat_cDNA_P Parameter: Temperature (deg C) Value: 42 vs. 22
  misc_feature: MA Experiment 20000112 PARAMETER Experiment Name: At_42deg_Heat_cDNA_P Parameter: Timepoint (hr) Value: 2
  misc_feature: MA Experiment 20000112 PARAMETER Experiment Name: At_42deg_Heat_cDNA_P Parameter: Tissue Value: Aerial
  misc_feature: MA Experiment ID: 20000113 Result: Down-regulated in Transcription
  misc_feature: MA Experiment 20000113 PARAMETER Experiment Name: At_42deg_Heat_cDNA_P Parameter: Temperature (deg C) Value: 42 vs. 22
  misc_feature: MA Experiment 20000113 PARAMETER Experiment Name: At_42deg_Heat_cDNA_P Parameter: Timepoint (hr) Value: 8
  misc_feature: MA Experiment 20000113 PARAMETER Experiment Name: At_42deg_Heat_cDNA_P Parameter: Tissue Value: Aerial
  misc_feature: MA Experiment ID: 20000144 Result: Down-regulated in Transcription
  misc_feature: MA Experiment 20000144 PARAMETER Experiment Name: At_42deg_Heat_cDNA_P Parameter: Temperature (deg C) Value: 42 vs. 22
  misc_feature: MA Experiment 20000144 PARAMETER Experiment Name: At_42deg_Heat_cDNA_P Parameter: Timepoint (hr) Value: 1
  misc_feature: MA Experiment 20000144 PARAMETER Experiment Name: At_42deg_Heat_cDNA_P Parameter: Tissue Value: Aerial
  misc_feature: MA Experiment ID: 20000166 Result: Up-regulated in Transcription
  misc_feature: MA Experiment 20000166 PARAMETER Experiment Name: At_100uM_ABA_P Parameter: Age (day) Value: 14
  misc_feature: MA Experiment 20000166 PARAMETER Experiment Name: At_100uM_ABA_P Parameter: Organism Value: A. thaliana
  misc_feature: MA Experiment 20000166 PARAMETER Experiment Name: At_100uM_ABA_P Parameter: Plant Line Value: WS
  misc_feature: MA Experiment 20000166 PARAMETER Experiment Name: At_100uM_ABA_P Parameter: Timepoint (hr) Value: 1
  misc_feature: MA Experiment 20000166 PARAMETER Experiment Name: At_100uM_ABA_P Parameter: Tissue Value: Aerial
  misc_feature: MA Experiment 20000166 PARAMETER Experiment Name: At_100uM_ABA_P Parameter: Treatment Value: 100uM ABA vs. No Treatment
  misc_feature: MA Experiment ID: 20000169 Result: Up-regulated in Transcription
  misc_feature: MA Experiment 20000169 PARAMETER Experiment Name: At_100uM_ABA_P Parameter: Age (day) Value: 14
  misc_feature: MA Experiment 20000169 PARAMETER Experiment Name: At_100uM_ABA_P Parameter: Organism Value: A. thaliana
  misc_feature: MA Experiment 20000169 PARAMETER Experiment Name: At_100uM_ABA_P Parameter: Plant Line Value: WS
  misc_feature: MA Experiment 20000169 PARAMETER Experiment Name: At_100uM_ABA_P Parameter: Timepoint (hr) Value: 6
  misc_feature: MA Experiment 20000169 PARAMETER Experiment Name: At_100uM_ABA_P Parameter: Tissue Value: Aerial
  misc_feature: MA Experiment 20000169 PARAMETER Experiment Name: At_100uM_ABA_P Parameter: Treatment Value: 100uM ABA vs. No Treatment
  misc_feature: MA Experiment ID: 20000171 Result: Down-regulated in Transcription
  misc_feature: MA Experiment 20000171 PARAMETER Experiment Name: At_42deg_Heat_P Parameter: Age (day) Value: 14
  misc_feature: MA Experiment 20000171 PARAMETER Experiment Name: At_42deg_Heat_P Parameter: Organism Value: A. thaliana
  misc_feature: MA Experiment 20000171 PARAMETER Experiment Name: At_42deg_Heat_P Parameter: Plant Line Value: WS
  misc_feature: MA Experiment 20000171 PARAMETER Experiment Name: At_42deg_Heat_P Parameter: Temperature (deg C) Value: 42 vs. 22
  misc_feature: MA Experiment 20000171 PARAMETER Experiment Name: At_42deg_Heat_P Parameter: Timepoint (hr) Value: 1
  misc_feature: MA Experiment 20000171 PARAMETER Experiment Name: At_42deg_Heat_P Parameter: Tissue Value: Aerial
  misc_feature: MA Experiment ID: 20000182 Result: Up-regulated in Transcription
  misc_feature: MA Experiment 20000182 PARAMETER Experiment Name: At_2mM_SA_P Parameter: Age (day) Value: 14
  misc_feature: MA Experiment 20000182 PARAMETER Experiment Name: At_2mM_SA_P Parameter: Organism Value: A. thaliana
  misc_feature: MA Experiment 20000182 PARAMETER Experiment Name: At_2mM_SA_P Parameter: Plant Line Value: WS
  misc_feature: MA Experiment 20000182 PARAMETER Experiment Name: At_2mM_SA_P Parameter: Timepoint (hr) Value: 6
  misc_feature: MA Experiment 20000182 PARAMETER Experiment Name: At_2mM_SA_P Parameter: Tissue Value: Aerial
  misc_feature: MA Experiment 20000182 PARAMETER Experiment Name: At_2mM_SA_P Parameter: Treatment Value: 2mM SA vs. No Treatment
  misc_feature: MA Experiment ID: 20000224 Result: Up-regulated in Transcription
  misc_feature: MA Experiment ID: 20000268 Result: Up-regulated in Transcription
  misc_feature: MA Experiment 20000268 PARAMETER Experiment Name: At_100mM_NaCl__P Parameter: Age (day) Value: 14
  misc_feature: MA Experiment 20000268 PARAMETER Experiment Name: At_100mM_NaCl__P Parameter: Organism Value: A. thaliana
  misc_feature: MA Experiment 20000268 PARAMETER Experiment Name: At_100mM_NaCl__P Parameter: Plant Line Value: WS
  misc_feature: MA Experiment 20000268 PARAMETER Experiment Name: At_100mM_NaCl__P Parameter: Timepoint (hr) Value: 6
  misc_feature: MA Experiment 20000268 PARAMETER Experiment Name: At_100mM_NaCl__P Parameter: Tissue Value: Whole Plant
  misc_feature: MA Experiment 20000268 PARAMETER Experiment Name: At_100mM_NaCl__P Parameter: Treatment Value: 100mM NaCl vs. No Treatment
  misc_feature: MA Experiment ID: 20000436 Result: Up-regulated in Transcription
  misc_feature: MA Experiment 20000436 PARAMETER Experiment Name: At_Drought_P Parameter: Age (day) Value: 7
  misc_feature: MA Experiment 20000436 PARAMETER Experiment Name: At_Drought_P Parameter: Organism Value: A. thaliana
  misc_feature: MA Experiment 20000436 PARAMETER Experiment Name: At_Drought_P Parameter: Plant Line Value: WS
  misc_feature: MA Experiment 20000436 PARAMETER Experiment Name: At_Drought_P Parameter: Timepoint (hr) Value: 12
  misc_feature: MA Experiment 20000436 PARAMETER Experiment Name: At_Drought_P Parameter: Tissue Value: Whole Plant
  misc_feature: MA Experiment 20000436 PARAMETER Experiment Name: At_Drought_P Parameter: Treatment Value: Drought vs. No Drought
  misc_feature: MA Experiment ID: 20000437 Result: Up-regulated in Transcription
  misc_feature: MA Experiment 20000437 PARAMETER Experiment Name: At_Drought_P Parameter: Age (day) Value: 8
  misc_feature: MA Experiment 20000437 PARAMETER Experiment Name: At_Drought_P Parameter: Organism Value: A. thaliana
  misc_feature: MA Experiment 20000437 PARAMETER Experiment Name: At_Drought_P Parameter: Plant Line Value: WS
  misc_feature: MA Experiment 20000437 PARAMETER Experiment Name: At_Drought_P Parameter: Timepoint (hr) Value: 24
  misc_feature: MA Experiment 20000437 PARAMETER Experiment Name: At_Drought_P Parameter: Tissue Value: Whole Plant
  misc_feature: MA Experiment 20000437 PARAMETER Experiment Name: At_Drought_P Parameter: Treatment Value: Drought vs. No Drought
  misc_feature: MA Experiment ID: 20000453 Result: Up-regulated in Transcription
  misc_feature: MA Experiment 20000453 PARAMETER Experiment Name: At_100uM_ABA_P Parameter: Age (day) Value: 15
  misc_feature: MA Experiment 20000453 PARAMETER Experiment Name: At_100uM_ABA_P Parameter: Organism Value: A. thaliana
  misc_feature: MA Experiment 20000453 PARAMETER Experiment Name: At_100uM_ABA_P Parameter: Plant Line Value: WS
  misc_feature: MA Experiment 20000453 PARAMETER Experiment Name: At_100uM_ABA_P Parameter: Timepoint (hr) Value: 24
  misc_feature: MA Experiment 20000453 PARAMETER Experiment Name: At_100uM_ABA_P Parameter: Tissue Value: Aerial
  misc_feature: MA Experiment 20000453 PARAMETER Experiment Name: At_100uM_ABA_P Parameter: Treatment Value: 100uM ABA vs. No Treatment
  misc_feature: MA Experiment ID: 20000455 Result: Up-regulated in Transcription
  misc_feature: MA Experiment 20000455 PARAMETER Experiment Name: At_100uM_ABA_P Parameter: Age (day) Value: 16
  misc_feature: MA Experiment 20000455 PARAMETER Experiment Name: At_100uM_ABA_P Parameter: Organism Value: A. thaliana
  misc_feature: MA Experiment 20000455 PARAMETER Experiment Name: At_100uM_ABA_P Parameter: Plant Line Value: WS
  misc_feature: MA Experiment 20000455 PARAMETER Experiment Name: At_100uM_ABA_P Parameter: Timepoint (hr) Value: 48
  misc_feature: MA Experiment 20000455 PARAMETER Experiment Name: At_100uM_ABA_P Parameter: Tissue Value: Aerial
  misc_feature: MA Experiment 20000455 PARAMETER Experiment Name: At_100uM_ABA_P Parameter: Treatment Value: 100uM ABA vs. No Treatment
  misc_feature: MA Experiment ID: 20001554 Result: Up-regulated in Transcription
  misc_feature: MA Experiment 20001554 PARAMETER Experiment Name: At_Drought_Soil_Dry_P Parameter: Age (day) Value: 21
  misc_feature: MA Experiment 20001554 PARAMETER Experiment Name: At_Drought_Soil_Dry_P Parameter: Organism Value: A. thaliana
  misc_feature: MA Experiment 20001554 PARAMETER Experiment Name: At_Drought_Soil_Dry_P Parameter: Plant Line Value: WS
  misc_feature: MA Experiment 20001554 PARAMETER Experiment Name: At_Drought_Soil_Dry_P Parameter: Post Timepoint (hr) Value: None
  misc_feature: MA Experiment 20001554 PARAMETER Experiment Name: At_Drought_Soil_Dry_P Parameter: Post-Treatment Value: None
  misc_feature: MA Experiment 20001554 PARAMETER Experiment Name: At_Drought_Soil_Dry_P Parameter: Timepoint (day) Value: 7
  misc_feature: MA Experiment 20001554 PARAMETER Experiment Name: At_Drought_Soil_Dry_P Parameter: Treatment Value: Drought vs. No Drought
  misc_feature: MA Experiment ID: 20001555 Result: Up-regulated in Transcription
  misc_feature: MA Experiment 20001555 PARAMETER Experiment Name: At_Drought_Soil_Dry_P Parameter: Age (day) Value: 24
  misc_feature: MA Experiment 20001555 PARAMETER Experiment Name: At_Drought_Soil_Dry_P Parameter: Organism Value: A. thaliana
  misc_feature: MA Experiment 20001555 PARAMETER Experiment Name: At_Drought_Soil_Dry_P Parameter: Plant Line Value: WS
  misc_feature: MA Experiment 20001555 PARAMETER Experiment Name: At_Drought_Soil_Dry_P Parameter: Post Timepoint (hr) Value: None
  misc_feature: MA Experiment 20001555 PARAMETER Experiment Name: At_Drought_Soil_Dry_P Parameter: Post-Treatment Value: None
  misc_feature: MA Experiment 20001555 PARAMETER Experiment Name: At_Drought_Soil_Dry_P Parameter: Timepoint (day) Value: 10
  misc_feature: MA Experiment 20001555 PARAMETER Experiment Name: At_Drought_Soil_Dry_P Parameter: Treatment Value: Drought vs. No Drought
  misc_feature: MA Experiment ID: 20001559 Result: Up-regulated in Transcription
  misc_feature: MA Experiment 20001559 PARAMETER Experiment Name: At_Drought_Soil_Dry_P Parameter: Age (day) Value: 28
  misc_feature: MA Experiment 20001559 PARAMETER Experiment Name: At_Drought_Soil_Dry_P Parameter: Organism Value: A. thaliana
  misc_feature: MA Experiment 20001559 PARAMETER Experiment Name: At_Drought_Soil_Dry_P Parameter: Plant Line Value: WS
  misc_feature: MA Experiment 20001559 PARAMETER Experiment Name: At_Drought_Soil_Dry_P Parameter: Post Timepoint (hr) Value: 29
  misc_feature: MA Experiment 20001559 PARAMETER Experiment Name: At_Drought_Soil_Dry_P Parameter: Post-Treatment Value: Re-Water vs. No Drought
  misc_feature: MA Experiment 20001559 PARAMETER Experiment Name: At_Drought_Soil_Dry_P Parameter: Timepoint (day) Value: 14
  misc_feature: MA Experiment 20001559 PARAMETER Experiment Name: At_Drought_Soil_Dry_P Parameter: Treatment Value: Drought vs. No Drought
  misc_feature: MA Experiment ID: 20001904 Result: Up-regulated in Transcription
  misc_feature: MA Experiment 20001904 PARAMETER Experiment Name: At_Drought_Reproduction_P Parameter: Age (day) Value: 37
  misc_feature: MA Experiment 20001904 PARAMETER Experiment Name: At_Drought_Reproduction_P Parameter: Organism Value: A. thaliana
  misc_feature: MA Experiment 20001904 PARAMETER Experiment Name: At_Drought_Reproduction_P Parameter: Plant Line Value: WS
  misc_feature: MA Experiment 20001904 PARAMETER Experiment Name: At_Drought_Reproduction_P Parameter: Timepoint (day) Value: 7
  misc_feature: MA Experiment 20001904 PARAMETER Experiment Name: At_Drought_Reproduction_P Parameter: Tissue Value: Rosettes
  misc_feature: MA Experiment 20001904 PARAMETER Experiment Name: At_Drought_Reproduction_P Parameter: Treatment Value: Drought vs. No Drought
  misc_feature: MA Experiment ID: 20001905 Result: Up-regulated in Transcription
  misc_feature: MA Experiment 20001905 PARAMETER Experiment Name: At_Drought_Reproduction_P Parameter: Age (day) Value: 40
  misc_feature: MA Experiment 20001905 PARAMETER Experiment Name: At_Drought_Reproduction_P Parameter: Organism Value: A. thaliana
  misc_feature: MA Experiment 20001905 PARAMETER Experiment Name: At_Drought_Reproduction_P Parameter: Plant Line Value: WS
  misc_feature: MA Experiment 20001905 PARAMETER Experiment Name: At_Drought_Reproduction_P Parameter: Timepoint (day) Value: 10
  misc_feature: MA Experiment 20001905 PARAMETER Experiment Name: At_Drought_Reproduction_P Parameter: Tissue Value: Rosettes
  misc_feature: MA Experiment 20001905 PARAMETER Experiment Name: At_Drought_Reproduction_P Parameter: Treatment Value: Drought vs. No Drought
  misc_feature: MA Experiment ID: 20001906 Result: Up-regulated in Transcription
  misc_feature: MA Experiment 20001906 PARAMETER Experiment Name: At_Drought_Reproduction_P Parameter: Age (day) Value: 35
  misc_feature: MA Experiment 20001906 PARAMETER Experiment Name: At_Drought_Reproduction_P Parameter: Organism Value: A. thaliana
  misc_feature: MA Experiment 20001906 PARAMETER Experiment Name: At_Drought_Reproduction_P Parameter: Plant Line Value: WS
  misc_feature: MA Experiment 20001906 PARAMETER Experiment Name: At_Drought_Reproduction_P Parameter: Timepoint (day) Value: 5
  misc_feature: MA Experiment 20001906 PARAMETER Experiment Name: At_Drought_Reproduction_P Parameter: Tissue Value: Siliques
  misc_feature: MA Experiment 20001906 PARAMETER Experiment Name: At_Drought_Reproduction_P Parameter: Treatment Value: Drought vs. No Drought
  misc_feature: MA Experiment ID: 20001908 Result: Up-regulated in Transcription
  misc_feature: MA Experiment 20001908 PARAMETER Experiment Name: At_Drought_Reproduction_P Parameter: Age (day) Value: 40
  misc_feature: MA Experiment 20001908 PARAMETER Experiment Name: At_Drought_Reproduction_P Parameter: Organism Value: A. thaliana
  misc_feature: MA Experiment 20001908 PARAMETER Experiment Name: At_Drought_Reproduction_P Parameter: Plant Line Value: WS
  misc_feature: MA Experiment 20001908 PARAMETER Experiment Name: At_Drought_Reproduction_P Parameter: Timepoint (day) Value: 10
  misc_feature: MA Experiment 20001908 PARAMETER Experiment Name: At_Drought_Reproduction_P Parameter: Tissue Value: Siliques
  misc_feature: MA Experiment 20001908 PARAMETER Experiment Name: At_Drought_Reproduction_P Parameter: Treatment Value: Drought vs. No Drought
  misc_feature: MA Experiment ID: 20001911 Result: Up-regulated in Transcription
  misc_feature: MA Experiment 20001911 PARAMETER Experiment Name: At_Drought_Reproduction_P Parameter: Age (day) Value: 40
  misc_feature: MA Experiment 20001911 PARAMETER Experiment Name: At_Drought_Reproduction_P Parameter: Organism Value: A. thaliana
  misc_feature: MA Experiment 20001911 PARAMETER Experiment Name: At_Drought_Reproduction_P Parameter: Plant Line Value: WS
  misc_feature: MA Experiment 20001911 PARAMETER Experiment Name: At_Drought_Reproduction_P Parameter: Timepoint (day) Value: 10
  misc_feature: MA Experiment 20001911 PARAMETER Experiment Name: At_Drought_Reproduction_P Parameter: Tissue Value: Flowers
  misc_feature: MA Experiment 20001911 PARAMETER Experiment Name: At_Drought_Reproduction_P Parameter: Treatment Value: Drought vs. No Drought
aaccaccgtgataaaacagtcctctccatttctctactcaacatccatccgaaccaactcgaagatattatttttcatggattgagcaaagaagaggacgataatttcgaaaatatcgcgatacaatggacaagttctcgtacaattcgtatccagattcagctgaatcgtcgccaagatctcgcgatgtcgaatttgaaaatccgtcgccatgggaggaccagcagcagcagaactacaaggtgaagctcatgtgcagctatggcggcaagatccagcctcgtccacacgataaccagcttacttatgtaaacggcgataccaaaatcatgtcggtcgatcgtggtatcagatttccggctttagtatcgaagctctccgccgtctgcagcggtggtggtgatggaggagaaatctcgttcaagtatcagcttccaggtgaagatctagatgcgttgatttcggtgactaatgatgaggatctggagcacatgatgcatgagtacgatcggttgcttcgtttgtctactaaaccagctaggatgcgtttgtttctcttcccgtcttctcccatttccggcggatttggctccgaaggttcgactaaatcggatcgggatacgcttaatccaatccctagccgacctgaatcggagaaatctgtaaccgctcctccgaataatgctgatttcttgtttggatcggagaaagtagctccaattccgccgtcgccagtgaaggttcctcaaccggtaccggaaccagtggtgcttgaaccgccgcagatgttcgtagatcaacggatgttacaaccggaacacggcgtaaatccggcggagattcaaagacaaatccaggaatttcagatgattcaaatcagagaccaagagcaacaaatgcttcatcagaatcagctacatcaacaacagcaacaacaagaggctatacatcaaaatcagcttcatcaccaacaagaggttatacatcagaatcagctgcttcaacaagaggctatacatcagaatcagatgcttcaacaacaacaacaacaagaggctatgtacagaagaaaaaccgaagacgaagccggaagatacttccctccgacatacactcaaaatccggcgccggtgacgaatcaacaacctccggttggctactggcaaggaaacaccaacaacagtaatattcaggggaatatctacacaacaacgtcacagaatctaccggagcaacaacaacaacaacaagtatacatgattccagctcaatctcaagctccagggacattataccaaagcgtcatgagaccaacggtacaaggaaaccaaggttattacccatcacctgttcagcgacttcatcatcctgatgcatacatggaacagcagaaccagccaggttacaacgtggttcaaccacagccaacgttttcaggtggtccacaagttatgactagtgttggtccgcaagttatgactagtgtcggtcctccaatggggttacaggaaccttattcacagatggggaagcctgtgtactatacggtggctggagaaggcatgatggttcaaccgccaccagcccagcctcagcagcagcagcagcagtaccagggaatgggtcaaccggttagtggcatgaccgatctcagaaccggaccggatgggaaagtggcggttaacatggctgcaccacaagtttcagattcggtgtgagtgtgagattgagttaacattgaggttaatgttatgattatccatttctttaaactttatgatatatgtgtaaaagtgtttttttagatcaaactaggaatctggatttctgatgaatcaattgaagcacttttgatgtttttattttattttattttggtaaacttc

SEQ ID NO: 41368 - protein, 530 aa, Arabidopsis thaliana
  peptide (1)..(530): Ceres Seq. ID no. 12562542
  misc_feature (54)..(147): Pfam Name: PB1 domain Pfam Description: PB1 domain
  misc_feature (13)..(175): Homolog of NCBI NO: 18412822 NR Description: putative protein
  misc_feature (13)..(175): Homolog of NCBI NO: 25407315 NR Description: hypothetical protein AT4g05150 [imported] -
  misc_feature (9)..(168): Homolog of NCBI NO: 34895646 NR Description: P0480E02.2 [Oryza sativa (japonica
  misc_feature (37)..(213): Homolog of NCBI NO: 15231568 NR Description: unknown protein; protein id: At3g26510.1
  misc_feature (37)..(213): Homolog of NCBI NO: 9293928 NR Description: gb|AAF04880.1~gene_id:MFE16.2~similar to unknown
  misc_feature (43)..(172): Homolog of NCBI NO: 25410886 NR Description: hypothetical protein At2g01190 [imported] -
  misc_feature (7)..(192): Homolog of NCBI NO: 18379168 NR Description: expressed protein
  misc_feature (7)..(192): Homolog of NCBI NO: 21553908 NR Description: unknown [Arabidopsis thaliana]
  misc_feature (1)..(475): Homolog of NCBI NO: 15237703 NR Description: putative protein
  misc_feature (1)..(530): Homolog of NCBI NO: 15242462 NR Description: putative protein; protein id: At5g09620.1
MDKFSYNSYPDSAESSPRSRDVEFENPSPWEDQQQQNYKVKLMCSYGGKIQPRPHDNQLTYVNGDTKIMSVDRGIRFPALVSKLSAVCSGGGDGGEISFKYQLPGEDLDALISVTNDEDLEHMMHEYDRLLRLSTKPARMRLFLFPSSPISGGFGSEGSTKSDRDTLNPIPSRPESEKSVTAPPNNADFLFGSEKVAPIPPSPVKVPQPVPEPVVLEPPQMFVDQRMLQPEHGVNPAEIQRQIQEFQMIQIRDQEQQMLHQNQLHQQQQQQEAIHQNQLHHQQEVIHQNQLLQQEAIHQNQMLQQQQQQEAMYRRKTEDEAGRYFPPTYTQNPAPVTNQQPPVGYWQGNTNNSNIQGNIYTTTSQNLPEQQQQQQVYMIPAQSQAPGTLYQSVMRPTVQGNQGYYPSPVQRLHHPDAYMEQQNQPGYNVVQPQPTFSGGPQVMTSVGPQVMTSVGPPMGLQEPYSQMGKPVYYTVAGEGMMVQPPPAQPQQQQQQYQGMGQPVSGMTDLRTGPDGKVAVNMAAPQVSDSV

SEQ ID NO: 41369 - protein, 488 aa, Arabidopsis thaliana
  peptide (1)..(488): Ceres Seq. ID no. 12562543
  misc_feature (12)..(105): Pfam Name: PB1 domain Pfam Description: PB1 domain
  misc_feature (1)..(133): Homolog of NCBI NO: 18412822 NR Description: putative protein
  misc_feature (1)..(133): Homolog of NCBI NO: 25407315 NR Description: hypothetical protein AT4g05150 [imported] -
  misc_feature (1)..(126): Homolog of NCBI NO: 34895646 NR Description: P0480E02.2 [Oryza sativa (japonica
  misc_feature (1)..(171): Homolog of NCBI NO: 15231568 NR Description: unknown protein; protein id: At3g26510.1
  misc_feature (1)..(171): Homolog of NCBI NO: 9293928 NR Description: gb|AAF04880.1~gene_id:MFE16.2~similar to unknown
  misc_feature (1)..(130): Homolog of NCBI NO: 25410886 NR Description: hypothetical protein At2g01190 [imported] -
  misc_feature (1)..(150): Homolog of NCBI NO: 18379168 NR Description: expressed protein
  misc_feature (1)..(150): Homolog of NCBI NO: 21553908 NR Description: unknown [Arabidopsis thaliana]
  misc_feature (1)..(433): Homolog of NCBI NO: 15237703 NR Description: putative protein
  misc_feature (1)..(488): Homolog of NCBI NO: 15242462 NR Description: putative protein; protein id: At5g09620.1
MCSYGGKIQPRPHDNQLTYVNGDTKIMSVDRGIRFPALVSKLSAVCSGGGDGGEISFKYQLPGEDLDALISVTNDEDLEHMMHEYDRLLRLSTKPARMRLFLFPSSPISGGFGSEGSTKSDRDTLNPIPSRPESEKSVTAPPNNADFLFGSEKVAPIPPSPVKVPQPVPEPVVLEPPQMFVDQRMLQPEHGVNPAEIQRQIQEFQMIQIRDQEQQMLHQNQLHQQQQQQEAIHQNQLHHQQEVIHQNQLLQQEAIHQNQMLQQQQQQEAMYRRKTEDEAGRYFPPTYTQNPAPVTNQQPPVGYWQGNTNNSNIQGNIYTTTSQNLPEQQQQQQVYMIPAQSQAPGTLYQSVMRPTVQGNQGYYPSPVQRLHHPDAYMEQQNQPGYNVVQPQPTFSGGPQVMTSVGPQVMTSVGPPMGLQEPYSQMGKPVYYTVAGEGMMVQPPPAQPQQQQQQYQGMGQPVSGMTDLRTGPDGKVAVNMAAPQVSDSV

SEQ ID NO: 41370 - protein, 462 aa, Arabidopsis thaliana
  peptide (1)..(462): Ceres Seq. ID no. 12562544
  misc_feature (1)..(79): Pfam Name: PB1 domain Pfam Description: PB1 domain
  misc_feature (1)..(107): Homolog of NCBI NO: 18412822 NR Description: putative protein
  misc_feature (1)..(107): Homolog of NCBI NO: 25407315 NR Description: hypothetical protein AT4g05150 [imported] -
  misc_feature (1)..(100): Homolog of NCBI NO: 34895646 NR Description: P0480E02.2 [Oryza sativa (japonica
  misc_feature (1)..(145): Homolog of NCBI NO: 15231568 NR Description: unknown protein; protein id: At3g26510.1
  misc_feature (1)..(145): Homolog of NCBI NO: 9293928 NR Description: gb|AAF04880.1~gene_id:MFE16.2~similar to unknown
  misc_feature (1)..(104): Homolog of NCBI NO: 25410886 NR Description: hypothetical protein At2g01190 [imported] -
  misc_feature (1)..(124): Homolog of NCBI NO: 18379168 NR Description: expressed protein
  misc_feature (1)..(124): Homolog of NCBI NO: 21553908 NR Description: unknown [Arabidopsis thaliana]
  misc_feature (1)..(407): Homolog of NCBI NO: 15237703 NR Description: putative protein
  misc_feature (1)..(462): Homolog of NCBI NO: 15242462 NR Description: putative protein; protein id: At5g09620.1
MSVDRGIRFPALVSKLSAVCSGGGDGGEISFKYQLPGEDLDALISVTNDEDLEHMMHEYDRLLRLSTKPARMRLFLFPSSPISGGFGSEGSTKSDRDTLNPIPSRPESEKSVTAPPNNADFLFGSEKVAPIPPSPVKVPQPVPEPVVLEPPQMFVDQRMLQPEHGVNPAEIQRQIQEFQMIQIRDQEQQMLHQNQLHQQQQQQEAIHQNQLHHQQEVIHQNQLLQQEAIHQNQMLQQQQQQEAMYRRKTEDEAGRYFPPTYTQNPAPVTNQQPPVGYWQGNTNNSNIQGNIYTTTSQNLPEQQQQQQVYMIPAQSQAPGTLYQSVMRPTVQGNQGYYPSPVQRLHHPDAYMEQQNQPGYNVVQPQPTFSGGPQVMTSVGPQVMTSVGPPMGLQEPYSQMGKPVYYTVAGEGMMVQPPPAQPQQQQQQYQGMGQPVSGMTDLRTGPDGKVAVNMAAPQVSDSV

SEQ ID NO: 41371 - DNA, 1287 bp, Arabidopsis thaliana
  misc_feature (1)..(1287): Ceres Seq. ID no. 13576598
  misc_feature: MA Experiment ID: 108434 Result: Down-regulated in Transcription
  misc_feature: MA Experiment 108434 PARAMETER Experiment Name: At_Root_Tips_cDNA_P Parameter: Tissue Value: Root Tips
  misc_feature: MA Experiment ID: 108464 Result: Up-regulated in Transcription
  misc_feature: MA Experiment 108464 PARAMETER Experiment Name: At_Germinating_Seeds_cDNA_P Parameter: Age (day) Value: 4 vs. 0
  misc_feature: MA Experiment 108464 PARAMETER Experiment Name: At_Germinating_Seeds_cDNA_P Parameter: Tissue Value: Germinating Seeds
  misc_feature: MA Experiment ID: 108573 Result: Down-regulated in Transcription
  misc_feature: MA Experiment 108573 PARAMETER Experiment Name: At_Drought_cDNA_P Parameter: Timepoint (hr) Value: 6
  misc_feature: MA Experiment 108573 PARAMETER Experiment Name: At_Drought_cDNA_P Parameter: Tissue Value: Aerial
  misc_feature: MA Experiment 108573 PARAMETER Experiment Name: At_Drought_cDNA_P Parameter: Treatment Value: Drought vs. No Drought
  misc_feature: MA Experiment ID: 108594 Result: Down-regulated in Transcription
  misc_feature: MA Experiment 108594 PARAMETER Experiment Name: At_Ler-rhl_Root_cDNA_P Parameter: Plant Line Value: null
  misc_feature: MA Experiment ID: 20000071 Result: Down-regulated in Transcription
  misc_feature: MA Experiment 20000071 PARAMETER Experiment Name: At_100uM_ABA_Mutants_cDNA_P Parameter: Plant Line Value: CS8104
  misc_feature: MA Experiment 20000071 PARAMETER Experiment Name: At_100uM_ABA_Mutants_cDNA_P Parameter: Timepoint (hr) Value: 6
  misc_feature: MA Experiment 20000071 PARAMETER Experiment Name: At_100uM_ABA_Mutants_cDNA_P Parameter: Tissue Value: Aerial
  misc_feature: MA Experiment 20000071 PARAMETER Experiment Name: At_100uM_ABA_Mutants_cDNA_P Parameter: Treatment Value: 100uM ABA vs. No Treatment
  misc_feature: MA Experiment ID: 20000072 Result: Down-regulated in Transcription
  misc_feature: MA Experiment 20000072 PARAMETER Experiment Name: At_100uM_ABA_Mutants_cDNA_P Parameter: Plant Line Value: CS8105
  misc_feature: MA Experiment 20000072 PARAMETER Experiment Name: At_100uM_ABA_Mutants_cDNA_P Parameter: Timepoint (hr) Value: 6
  misc_feature: MA Experiment 20000072 PARAMETER Experiment Name: At_100uM_ABA_Mutants_cDNA_P Parameter: Tissue Value: Aerial
  misc_feature: MA Experiment 20000072 PARAMETER Experiment Name: At_100uM_ABA_Mutants_cDNA_P Parameter: Treatment Value: 100uM ABA vs. No Treatment
  misc_feature: MA Experiment ID: 20000090 Result: Down-regulated in Transcription
  misc_feature: MA Experiment ID: 20000113 Result: Down-regulated in Transcription
  misc_feature: MA Experiment 20000113 PARAMETER Experiment Name: At_42deg_Heat_cDNA_P Parameter: Temperature (deg C) Value: 42 vs. 22
  misc_feature: MA Experiment 20000113 PARAMETER Experiment Name: At_42deg_Heat_cDNA_P Parameter: Timepoint (hr) Value: 8
  misc_feature: MA Experiment 20000113 PARAMETER Experiment Name: At_42deg_Heat_cDNA_P Parameter: Tissue Value: Aerial
  misc_feature: MA Experiment ID: 20000117 Result: Down-regulated in Transcription
  misc_feature: MA Experiment 20000117 PARAMETER Experiment Name: At_100uM_ABA_Mutants_cDNA_P Parameter: Plant Line Value: Columbia
  misc_feature: MA Experiment 20000117 PARAMETER Experiment Name: At_100uM_ABA_Mutants_cDNA_P Parameter: Timepoint (hr) Value: 6
  misc_feature: MA Experiment 20000117 PARAMETER Experiment Name: At_100uM_ABA_Mutants_cDNA_P Parameter: Tissue Value: Aerial
  misc_feature: MA Experiment 20000117 PARAMETER Experiment Name: At_100uM_ABA_Mutants_cDNA_P Parameter: Treatment Value: 100uM ABA vs. No Treatment
  misc_feature: MA Experiment ID: 20000180 Result: Up-regulated in Transcription
  misc_feature: MA Experiment 20000180 PARAMETER Experiment Name: At_Germinating_Seeds_P Parameter: Age (hr) Value: 24 vs. 0
  misc_feature: MA Experiment 20000180 PARAMETER Experiment Name: At_Germinating_Seeds_P Parameter: Tissue Value: Germinating Seeds
  misc_feature: MA Experiment ID: 20000184 Result: Down-regulated in Transcription
  misc_feature: MA Experiment 20000184 PARAMETER Experiment Name: At_Shoots__P Parameter: Age (day) Value: 7
  misc_feature: MA Experiment 20000184 PARAMETER Experiment Name: At_Shoots__P Parameter: Tissue Value: Shoots vs. Whole Plant
  misc_feature: MA Experiment ID: 20000185 Result: Up-regulated in Transcription
  misc_feature: MA Experiment 20000185 PARAMETER Experiment Name: At_Roots__P Parameter: Age (day) Value: 7 vs. 21
  misc_feature: MA Experiment 20000185 PARAMETER Experiment Name: At_Roots__P Parameter: Organism Value: A. thaliana
  misc_feature: MA Experiment 20000185 PARAMETER Experiment Name: At_Roots__P Parameter: Tissue Value: Roots vs. Whole Plant
  misc_feature: MA Experiment ID: 20000213 Result: Up-regulated in Transcription
  misc_feature: MA Experiment 20000213 PARAMETER Experiment Name: At_4deg_Cold_P Parameter: Timepoint (hr) Value: 2
  misc_feature: MA Experiment ID: 20000224 Result: Up-regulated in Transcription
  misc_feature: MA Experiment ID: 20000235 Result: Up-regulated in Transcription
  misc_feature: MA Experiment 20000235 PARAMETER Experiment Name: At_Siliques_P Parameter: Age (day) Value: 21
  misc_feature: MA Experiment 20000235 PARAMETER Experiment Name: At_Siliques_P Parameter: Organism Value: A. thaliana
  misc_feature: MA Experiment 20000235 PARAMETER Experiment Name: At_Siliques_P Parameter: Plant Line Value: WS
  misc_feature: MA Experiment 20000235 PARAMETER Experiment Name: At_Siliques_P Parameter: Tissue Value: 5-10mm Siliques vs. Whole Plant
  misc_feature: MA Experiment ID: 20000437 Result: Down-regulated in Transcription
  misc_feature: MA Experiment 20000437 PARAMETER Experiment Name: At_Drought_P Parameter: Age (day) Value: 8
  misc_feature: MA Experiment 20000437 PARAMETER Experiment Name: At_Drought_P Parameter: Organism Value: A. thaliana
  misc_feature: MA Experiment 20000437 PARAMETER Experiment Name: At_Drought_P Parameter: Plant Line Value: WS
  misc_feature: MA Experiment 20000437 PARAMETER Experiment Name: At_Drought_P Parameter: Timepoint (hr) Value: 24
  misc_feature: MA Experiment 20000437 PARAMETER Experiment Name: At_Drought_P Parameter: Tissue Value: Whole Plant
  misc_feature: MA Experiment 20000437 PARAMETER Experiment Name: At_Drought_P Parameter: Treatment Value: Drought vs. No Drought
  misc_feature: MA Experiment ID: 20000438 Result: Down-regulated in Transcription
  misc_feature: MA Experiment 20000438 PARAMETER Experiment Name: At_Shoots__P Parameter: Age (day) Value: 14
  misc_feature: MA Experiment 20000438 PARAMETER Experiment Name: At_Shoots__P Parameter: Tissue Value: Shoots vs. Whole Plant
  misc_feature: MA Experiment ID: 20000439 Result: Up-regulated in Transcription
  misc_feature: MA Experiment 20000439 PARAMETER Experiment Name: At_Roots__P Parameter: Age (day) Value: 14 vs. 21
  misc_feature: MA Experiment 20000439 PARAMETER Experiment Name: At_Roots__P Parameter: Organism Value: A. thaliana
  misc_feature: MA Experiment 20000439 PARAMETER Experiment Name: At_Roots__P Parameter: Tissue Value: Roots vs. Whole Plant
  misc_feature: MA Experiment ID: 20000452 Result: Up-regulated in Transcription
  misc_feature: MA Experiment 20000452 PARAMETER Experiment Name: At_CS6879_Shoots-Roots_P Parameter: Age (day) Value: 14
  misc_feature: MA Experiment 20000452 PARAMETER Experiment Name: At_CS6879_Shoots-Roots_P Parameter: Organism Value: A. thaliana
  misc_feature: MA Experiment 20000452 PARAMETER Experiment Name: At_CS6879_Shoots-Roots_P Parameter: Plant Line Value: CS6879 vs. WS
  misc_feature: MA Experiment 20000452 PARAMETER Experiment Name: At_CS6879_Shoots-Roots_P Parameter: Tissue Value: Shoots
  misc_feature: MA Experiment ID: 20000794 Result: Up-regulated in Transcription
  misc_feature: MA Experiment 20000794 PARAMETER Experiment Name: At_Petals_P Parameter: Age (day) Value: 23-25 days
  misc_feature: MA Experiment 20000794 PARAMETER Experiment Name: At_Petals_P Parameter: Plant Line Value: WS
  misc_feature: MA Experiment 20000794 PARAMETER Experiment Name: At_Petals_P Parameter: Tissue Value: Petals vs. Whole plant
  misc_feature: MA Experiment ID: 20001248 Result: Down-regulated in Transcription
  misc_feature: MA Experiment 20001248 PARAMETER Experiment Name: At_Far-red-induction_P Parameter: Age (day) Value: 7
  misc_feature: MA Experiment 20001248 PARAMETER Experiment Name: At_Far-red-induction_P Parameter: Light Value: Far-red vs. White
  misc_feature: MA Experiment 20001248 PARAMETER Experiment Name: At_Far-red-induction_P Parameter: Organism Value: A. thaliana
  misc_feature: MA Experiment 20001248 PARAMETER Experiment Name: At_Far-red-induction_P Parameter: Plant Line Value: Columbia
  misc_feature: MA Experiment 20001248 PARAMETER Experiment Name: At_Far-red-induction_P Parameter: Timepoint (hr) Value: 4
  misc_feature: MA Experiment 20001248 PARAMETER Experiment Name: At_Far-red-induction_P Parameter: Tissue Value: Whole Plant
  misc_feature: MA Experiment ID: 20001450 Result: Down-regulated in Transcription
  misc_feature: MA Experiment 20001450 PARAMETER Experiment Name: At_Far-red-induction_P Parameter: Age (day) Value: 7
  misc_feature: MA Experiment 20001450 PARAMETER Experiment Name: At_Far-red-induction_P Parameter: Light Value: Far-red vs. White
  misc_feature: MA Experiment 20001450 PARAMETER Experiment Name: At_Far-red-induction_P Parameter: Organism Value: A. thaliana
  misc_feature: MA Experiment 20001450 PARAMETER Experiment Name: At_Far-red-induction_P Parameter: Plant Line Value: Columbia
  misc_feature: MA Experiment 20001450 PARAMETER Experiment Name: At_Far-red-induction_P Parameter: Timepoint (hr) Value: 8
  misc_feature: MA Experiment 20001450 PARAMETER Experiment Name: At_Far-red-induction_P Parameter: Tissue Value: Whole Plant
  misc_feature: MA Experiment ID: 20001905 Result: Down-regulated in Transcription
  misc_feature: MA Experiment 20001905 PARAMETER Experiment Name: At_Drought_Reproduction_P Parameter: Age (day) Value: 40
  misc_feature: MA Experiment 20001905 PARAMETER Experiment Name: At_Drought_Reproduction_P Parameter: Organism Value: A. thaliana
  misc_feature: MA Experiment 20001905 PARAMETER Experiment Name: At_Drought_Reproduction_P Parameter: Plant Line Value: WS
  misc_feature: MA Experiment 20001905 PARAMETER Experiment Name: At_Drought_Reproduction_P Parameter: Timepoint (day) Value: 10
  misc_feature: MA Experiment 20001905 PARAMETER Experiment Name: At_Drought_Reproduction_P Parameter: Tissue Value: Rosettes
  misc_feature: MA Experiment 20001905 PARAMETER Experiment Name: At_Drought_Reproduction_P Parameter: Treatment Value: Drought vs. No Drought
atcatctagaagcatttgtgtatatatatatatgtgtgtatattcctctctagctttaagtcaaaaccctatataaactatacaccaaagctttgaaccttcaaccaaacccaaaatccaagtgccccaccaaatgcttcaatcctcttccactacacaaaaaaaacaacttaatccctttatacccttttagccaaaaccctcgctaaaagccaatccctcaatataaaataacaagtagaattgatctgcctatatataagattttgagacgaaataagatctaaaccacaagaaagaaagtaaacataaaagtatgggaaggtcaccgtgctgtgagaaagctcacacaaacaaaggagcatggacgaaagaagaggacgagaggctcgtcgcctacattaaagctcatggagaaggctgctggagatctctccccaaagccgccggacttcttcgctgtggcaagagctgccgtctccggtggatcaactatctccggcctgaccttaagcgtggaaacttcaccgaggaagaagacgaactcatcatcaagctccatagccttcttggcaacaaatggtcgcttattgccgggagattaccgggaagaacagataacgagataaagaactattggaacacgcatatacgaagaaagcttataaacagagggattgatccaacgagtcatagaccaatccaagaatcatcagcttctcaagattctaaacctacacaactagaaccagttacgagtaataccattaatatctcattcacttctgctccaaaggtcgaaacgttccatgaaagtataagctttccgggaaaatcagagaaaatctcaatgcttacgttcaaagaagaaaaagatgagtgcccagttcaagaaaagttcccagatttgaatcttgagctcagaatcagtcttcctgatgatgttgatcgtcttcaagggcatggaaagtcaacaacgccacgttgtttcaagtgcagcttagggatgataaacggcatggagtgcagatgcggaagaatgagatgcgatgtagtcggaggtagcagcaaggggagtgacatgagcaatggatttgattttttagggttggcaaagaaagagaccacttctcttttgggctttcgaagcttggagatgaaataatattgtcaaattttaggcgtaactgtacaaaacttttgcctagataatttgaaagtatatcttcaacttgtatgagaaatttaactggtgaattataatatatagaatttgtttttttttct

SEQ ID NO: 41372 - protein, 282 aa, Arabidopsis thaliana
  peptide (1)..(282): Ceres Seq. ID no. 13576599
  misc_feature (14)..(61): Pfam Name: Myb-like DNA-binding domain Pfam Description: Myb-like DNA-binding domain
  misc_feature (1)..(239): Homolog of NCBI NO: 82308 NR Description: myb-related protein 308 - garden snapdragon
  misc_feature (1)..(239): Homolog of NCBI NO: 39725415 NR Description: MYB transcription factor [Eucalyptus gunnii]
  misc_feature (1)..(282): Homolog of NCBI NO: 15227288 NR Description: myb DNA-binding protein [Arabidopsis thaliana]
  misc_feature (1)..(282): Homolog of NCBI NO: 6467223 NR Description: DNA-binding protein [Arabidopsis thaliana]
  misc_feature (1)..(282): Homolog of NCBI NO: 15236236 NR Description: myb family transcription factor [Arabidopsis
  misc_feature (1)..(282): Homolog of NCBI NO: 2129933 NR Description: myb-related protein TMH27 - tomato
  misc_feature (1)..(137): Homolog of NCBI NO: 13346194 NR Description: GHMYB9 [Gossypium hirsutum]
  misc_feature (143)..(282): Homolog of NCBI NO: 13346194 NR Description: GHMYB9 [Gossypium hirsutum]
  misc_feature (1)..(282): Homolog of NCBI NO: 11273985 NR Description: myb-related transcription factor MYB4
  misc_feature (1)..(282): Homolog of NCBI NO: 15233968 NR Description: transcription factor (MYB4) -related [Arabidopsis
MGRSPCCEKAHTNKGAWTKEEDERLVAYIKAHGEGCWRSLPKAAGLLRCGKSCRLRWINYLRPDLKRGNFTEEEDELIIKLHSLLGNKWSLIAGRLPGRTDNEIKNYWNTHIRRKLINRGIDPTSHRPIQESSASQDSKPTQLEPVTSNTINISFTSAPKVETFHESISFPGKSEKISMLTFKEEKDECPVQEKFPDLNLELRISLPDDVDRLQGHGKSTTPRCFKCSLGMINGMECRCGRMRCDVVGGSSKGSDMSNGFDFLGLAKKETTSLLGFRSLEMK

SEQ ID NO: 41373 - DNA, 1553 bp, Arabidopsis thaliana
  misc_feature (1)..(1553): Ceres Seq. ID no. 12331076
  misc_feature: MA Experiment ID: 20000184 Result: Up-regulated in Transcription
  misc_feature: MA Experiment 20000184 PARAMETER Experiment Name: At_Shoots__P Parameter: Age (day) Value: 7
  misc_feature: MA Experiment 20000184 PARAMETER Experiment Name: At_Shoots__P Parameter: Tissue Value: Shoots vs. Whole Plant
  misc_feature: MA Experiment ID: 20000185 Result: Up-regulated in Transcription
  misc_feature: MA Experiment 20000185 PARAMETER Experiment Name: At_Roots__P Parameter: Age (day) Value: 7 vs. 21
  misc_feature: MA Experiment 20000185 PARAMETER Experiment Name: At_Roots__P Parameter: Organism Value: A. thaliana
  misc_feature: MA Experiment 20000185 PARAMETER Experiment Name: At_Roots__P Parameter: Tissue Value: Roots vs. Whole Plant
  misc_feature: MA Experiment ID: 20000438 Result: Up-regulated in Transcription
  misc_feature: MA Experiment 20000438 PARAMETER Experiment Name: At_Shoots__P Parameter: Age (day) Value: 14
  misc_feature: MA Experiment 20000438 PARAMETER Experiment Name: At_Shoots__P Parameter: Tissue Value: Shoots vs. Whole Plant
  misc_feature: MA Experiment ID: 20000439 Result: Up-regulated in Transcription
  misc_feature: MA Experiment 20000439 PARAMETER Experiment Name: At_Roots__P Parameter: Age (day) Value: 14 vs. 21
  misc_feature: MA Experiment 20000439 PARAMETER Experiment Name: At_Roots__P Parameter: Organism Value: A. thaliana
  misc_feature: MA Experiment 20000439 PARAMETER Experiment Name: At_Roots__P Parameter: Tissue Value: Roots vs. Whole Plant
  misc_feature: MA Experiment ID: 20001248 Result: Down-regulated in Transcription
  misc_feature: MA Experiment 20001248 PARAMETER Experiment Name: At_Far-red-induction_P Parameter: Age (day) Value: 7
  misc_feature: MA Experiment 20001248 PARAMETER Experiment Name: At_Far-red-induction_P Parameter: Light Value: Far-red vs. White
  misc_feature: MA Experiment 20001248 PARAMETER Experiment Name: At_Far-red-induction_P Parameter: Organism Value: A. thaliana
  misc_feature: MA Experiment 20001248 PARAMETER Experiment Name: At_Far-red-induction_P Parameter: Plant Line Value: Columbia
  misc_feature: MA Experiment 20001248 PARAMETER Experiment Name: At_Far-red-induction_P Parameter: Timepoint (hr) Value: 4
  misc_feature: MA Experiment 20001248 PARAMETER Experiment Name: At_Far-red-induction_P Parameter: Tissue Value: Whole Plant
aaaacaaaaaaacacagcctttgttctgtttctctgcgatttcttcgattttcctcttcttcgttttgattttcagatttgtttaactcggtcgttgcgttgacttcaaatttcttaaaagagagagagagagagagaggagatagttcagaaaatctgtcagacttgggatctttctcggcaatgcgacgcttgttcgccgcgaaatccctctcccgagaggatacaacctttttgtcattctcttcttcttcggtgacgcgtttcctcaaggctcttcttcctctccgttcagatccaagagatgtccgctaattctcatcctcctaattccaaaaacgtcctctgtaatgcagccgccggtgccgccgccggggttgttgcggctacgtttgtgtgtcctcttgatgttataaaaacgaggtttcaggttcatgggctgcctaagctcggtgatgcaaacatcaaaggtagtctaattgttggcagtcttgagcagatcttcaagagagaagggatgcgtggcttataccgcggtctttcccctactgtcatggctcttctctccaattgggccatttattttacaatgtatgaccagctcaagagctttctttgttcaaatgatcacaaactcagcgttggagctaacgtattggctgcttcgggagctggagctgcaactaccattgccacaaatcctctttgggtcgtcaagactagacttcagacacaaggaatgagagtgggtatagtgccatacaaaagcacattttctgctttaaggagaatagcttatgaggagggaattcgcggattgtacagtggtcttgtccctgcactagctggtatcagtcatgttgccattcagtttcccacatatgagatgatcaaagtgtacttggccaagaaaggtgataaatcagtcgataacctcaatgctcgtgatgtagcagttgcctcttcgattgcaaagatatttgcatccacattaacttacccgcacgaggtagtacgagctaggcttcaagagcaagggcaccacagtgagaaacgttactcaggagtaagagattgcatcaagaaagtgtttgagaaagatgggttccctggtttttacagaggctgcgccacgaatctactgagaacaactcctgcagcagttataactttcactagcttcgaaatggtgcatcgtttcctcgtcactcatataccttctgagcaaagctctatactttaaatccggttttttttttttgatgatgatgacgattaaaagttatttttacacaggtaaaaaaaagtttccccttttgggaaatgattcaaaatagaagttcttttctggtgacttattatgtctctctgttggagaaatcagaatctgagaatgggttgaaacttgagagacccaaaaaagcagaatattttagtgtaaaaaactgactcttttatttctctgttttttgggccttcatgttactgaaaggaaacatatattatcttcaagaaatgattatactattattctggttttcagagtgttatgg

SEQ ID NO: 41374 - protein, 312 aa, Arabidopsis thaliana
  peptide (1)..(312): Ceres Seq. ID no. 12331077
  misc_feature (19)..(284): Homolog of NCBI NO: 24652037 NR Description: CG8026-PA [Drosophila melanogaster]
  misc_feature (17)..(302): Homolog of NCBI NO: 6320831 NR Description: Hypothetical ORF; Yel006wp [Saccharomyces
  misc_feature (17)..(294): Homolog of NCBI NO: 6322185 NR Description: Hypothetical ORF; Yil006wp [Saccharomyces
  misc_feature (11)..(62): Homolog of NCBI NO: 25403521 NR Description: probable mitochondrial carrier protein
  misc_feature (108)..(307): Homolog of NCBI NO: 25403521 NR Description: probable mitochondrial carrier protein
  misc_feature (23)..(305): Homolog of NCBI NO: 34914648 NR Description: OSJNBa0054L14.23 [Oryza sativa (japonica
  misc_feature (11)..(307): Homolog of NCBI NO: 11067279 NR Description: unknown protein [Arabidopsis thaliana]
  misc_feature (11)..(307): Homolog of NCBI NO: 18395659 NR Description: mitochondrial carrier protein family
  misc_feature (56)..(312): Homolog of NCBI NO: 7487567 NR Description: probable mitochondrial carrier protein
  misc_feature (1)..(312): Homolog of NCBI NO: 18407372 NR Description: mitochondrial carrier protein family
MSANSHPPNSKNVLCNAAAGAAAGVVAATFVCPLDVIKTRFQVHGLPKLGDANIKGSLIVGSLEQIFKREGMRGLYRGLSPTVMALLSNWAIYFTMYDQLKSFLCSNDHKLSVGANVLAASGAGAATTIATNPLWVVKTRLQTQGMRVGIVPYKSTFSALRRIAYEEGIRGLYSGLVPALAGISHVAIQFPTYEMIKVYLAKKGDKSVDNLNARDVAVASSIAKIFASTLTYPHEVVRARLQEQGHHSEKRYSGVRDCIKKVFEKDGFPGFYRGCATNLLRTTPAAVITFTSFEMVHRFLVTHIPSEQSSIL

SEQ ID NO: 41375 - protein, 241 aa, Arabidopsis thaliana
  peptide (1)..(241): Ceres Seq. ID no. 12331078
  misc_feature (193)..(230): Homolog of NCBI NO: 24652037 NR Description: CG8026-PA [Drosophila melanogaster]
  misc_feature (1)..(213): Homolog of NCBI NO: 24652037 NR Description: CG8026-PA [Drosophila melanogaster]
  misc_feature (1)..(231): Homolog of NCBI NO: 6320831 NR Description: Hypothetical ORF; Yel006wp [Saccharomyces
  misc_feature (1)..(223): Homolog of NCBI NO: 6322185 NR Description: Hypothetical ORF; Yil006wp [Saccharomyces
  misc_feature (37)..(236): Homolog of NCBI NO: 25403521 NR Description: probable mitochondrial carrier protein
  misc_feature (1)..(234): Homolog of NCBI NO: 34914648 NR Description: OSJNBa0054L14.23 [Oryza sativa (japonica
  misc_feature (1)..(236): Homolog of NCBI NO: 11067279 NR Description: unknown protein [Arabidopsis thaliana]
  misc_feature (1)..(236): Homolog of NCBI NO: 18395659 NR Description: mitochondrial carrier protein family
  misc_feature (1)..(241): Homolog of NCBI NO: 7487567 NR Description: probable mitochondrial carrier protein
  misc_feature (1)..(241): Homolog of NCBI NO: 18407372 NR Description: mitochondrial carrier protein family
MRGLYRGLSPTVMALLSNWAIYFTMYDQLKSFLCSNDHKLSVGANVLAASGAGAATTIATNPLWVVKTRLQTQGMRVGIVPYKSTFSALRRIAYEEGIRGLYSGLVPALAGISHVAIQFPTYEMIKVYLAKKGDKSVDNLNARDVAVASSIAKIFASTLTYPHEVVRARLQEQGHHSEKRYSGVRDCIKKVFEKDGFPGFYRGCATNLLRTTPAAVITFTSFEMVHRFLVTHIPSEQSSIL

SEQ ID NO: 41376 - protein, 229 aa, Arabidopsis thaliana
  peptide (1)..(229): Ceres Seq. ID no. 12331079
  misc_feature (181)..(218): Homolog of NCBI NO: 24652037 NR Description: CG8026-PA [Drosophila melanogaster]
  misc_feature (1)..(201): Homolog of NCBI NO: 24652037 NR Description: CG8026-PA [Drosophila melanogaster]
  misc_feature (1)..(219): Homolog of NCBI NO: 6320831 NR Description: Hypothetical ORF; Yel006wp [Saccharomyces
  misc_feature (1)..(211): Homolog of NCBI NO: 6322185 NR Description: Hypothetical ORF; Yil006wp [Saccharomyces
  misc_feature (25)..(224): Homolog of NCBI NO: 25403521 NR Description: probable mitochondrial carrier protein
  misc_feature (1)..(222): Homolog of NCBI NO: 34914648 NR Description: OSJNBa0054L14.23 [Oryza sativa (japonica
  misc_feature (1)..(224): Homolog of NCBI NO: 11067279 NR Description: unknown protein [Arabidopsis thaliana]
  misc_feature (1)..(224): Homolog of NCBI NO: 18395659 NR Description: mitochondrial carrier protein family
  misc_feature (1)..(229): Homolog of NCBI NO: 7487567 NR Description: probable mitochondrial carrier protein
  misc_feature (1)..(229): Homolog of NCBI NO: 18407372 NR Description: mitochondrial carrier protein family
MALLSNWAIYFTMYDQLKSFLCSNDHKLSVGANVLAASGAGAATTIATNPLWVVKTRLQTQGMRVGIVPYKSTFSALRRIAYEEGIRGLYSGLVPALAGISHVAIQFPTYEMIKVYLAKKGDKSVDNLNARDVAVASSIAKIFASTLTYPHEVVRARLQEQGHHSEKRYSGVRDCIKKVFEKDGFPGFYRGCATNLLRTTPAAVITFTSFEMVHRFLVTHIPSEQSSIL

SEQ ID NO: 41377 - DNA, 1782 bp, Arabidopsis thaliana
  misc_feature (1)..(1782): Ceres Seq. ID no. 12395516
  misc_feature: MA Experiment ID: 108435 Result: Down-regulated in Transcription
  misc_feature: MA Experiment 108435 PARAMETER Experiment Name: At_stm_Mutants_cDNA_P Parameter: Plant Line Value: wt Landsburg vs stm
  misc_feature: MA Experiment 108435 PARAMETER Experiment Name: At_stm_Mutants_cDNA_P Parameter: Tissue Value: Shoot Apical Meristem Region
  misc_feature: MA Experiment ID: 108462 Result: Up-regulated in Transcription
  misc_feature: MA Experiment 108462 PARAMETER Experiment Name: At_Germinating_Seeds_cDNA_P Parameter: Age (day) Value: 2 vs. 0
  misc_feature: MA Experiment 108462 PARAMETER Experiment Name: At_Germinating_Seeds_cDNA_P Parameter: Tissue Value: Germinating Seeds
  misc_feature: MA Experiment ID: 108463 Result: Up-regulated in Transcription
  misc_feature: MA Experiment 108463 PARAMETER Experiment Name: At_Germinating_Seeds_cDNA_P Parameter: Age (day) Value: 3 vs. 0
  misc_feature: MA Experiment 108463 PARAMETER Experiment Name: At_Germinating_Seeds_cDNA_P Parameter: Tissue Value: Germinating Seeds
  misc_feature: MA Experiment ID: 108464 Result: Up-regulated in Transcription
  misc_feature: MA Experiment 108464 PARAMETER Experiment Name: At_Germinating_Seeds_cDNA_P Parameter: Age (day) Value: 4 vs. 0
  misc_feature: MA Experiment 108464 PARAMETER Experiment Name: At_Germinating_Seeds_cDNA_P Parameter: Tissue Value: Germinating Seeds
  misc_feature: MA Experiment ID: 108488 Result: Up-regulated in Transcription
  misc_feature: MA Experiment ID: 108573 Result: Up-regulated in Transcription
  misc_feature: MA Experiment 108573 PARAMETER Experiment Name: At_Drought_cDNA_P Parameter: Timepoint (hr) Value: 6
  misc_feature: MA Experiment 108573 PARAMETER Experiment Name: At_Drought_cDNA_P Parameter: Tissue Value: Aerial
  misc_feature: MA Experiment 108573 PARAMETER Experiment Name: At_Drought_cDNA_P Parameter: Treatment Value: Drought vs. No Drought
  misc_feature: MA Experiment ID: 108577 Result: Up-regulated in Transcription
  misc_feature: MA Experiment 108577 PARAMETER Experiment Name: At_42deg_Heat_cDNA_P Parameter: Temperature (deg C) Value: 42 vs. 22
  misc_feature: MA Experiment 108577 PARAMETER Experiment Name: At_42deg_Heat_cDNA_P Parameter: Timepoint (hr) Value: 6
  misc_feature: MA Experiment 108577 PARAMETER Experiment Name: At_42deg_Heat_cDNA_P Parameter: Tissue Value: Aerial
  misc_feature: MA Experiment ID: 108595 Result: Down-regulated in Transcription
  misc_feature: MA Experiment 108595 PARAMETER Experiment Name: At_Ler-pi_Ovule_cDNA_P Parameter: Plant Line Value: null
  misc_feature: MA Experiment ID: 20000072 Result: Down-regulated in Transcription
  misc_feature: MA Experiment 20000072 PARAMETER Experiment Name: At_100uM_ABA_Mutants_cDNA_P Parameter: Plant Line Value: CS8105
  misc_feature: MA Experiment 20000072 PARAMETER Experiment Name: At_100uM_ABA_Mutants_cDNA_P Parameter: Timepoint (hr) Value: 6
  misc_feature: MA Experiment 20000072 PARAMETER Experiment Name: At_100uM_ABA_Mutants_cDNA_P Parameter: Tissue Value: Aerial
  misc_feature: MA Experiment 20000072 PARAMETER Experiment Name: At_100uM_ABA_Mutants_cDNA_P Parameter: Treatment Value: 100uM ABA vs. No Treatment
  misc_feature: MA Experiment ID: 20000086 Result: Down-regulated in Transcription
  misc_feature: MA Experiment 20000086 PARAMETER Experiment Name: At_100uM_ABA_Mutants_cDNA_P Parameter: Plant Line Value: CS22
  misc_feature: MA Experiment 20000086 PARAMETER Experiment Name: At_100uM_ABA_Mutants_cDNA_P Parameter: Timepoint (hr) Value: 6
  misc_feature: MA Experiment 20000086 PARAMETER Experiment Name: At_100uM_ABA_Mutants_cDNA_P Parameter: Tissue Value: Aerial
  misc_feature: MA Experiment 20000086 PARAMETER Experiment Name: At_100uM_ABA_Mutants_cDNA_P Parameter: Treatment Value: 100uM ABA vs. No Treatment
  misc_feature: MA Experiment ID: 20000087 Result: Down-regulated in Transcription
  misc_feature: MA Experiment 20000087 PARAMETER Experiment Name: At_100uM_ABA_Mutants_cDNA_P Parameter: Plant Line Value: WS
  misc_feature: MA Experiment 20000087 PARAMETER Experiment Name: At_100uM_ABA_Mutants_cDNA_P Parameter: Timepoint (hr) Value: 6
  misc_feature: MA Experiment 20000087 PARAMETER Experiment Name: At_100uM_ABA_Mutants_cDNA_P Parameter: Tissue Value: Aerial
  misc_feature: MA Experiment 20000087 PARAMETER Experiment Name: At_100uM_ABA_Mutants_cDNA_P Parameter: Treatment Value: 100uM ABA vs. No Treatment
  misc_feature: MA Experiment ID: 20000089 Result: Down-regulated in Transcription
  misc_feature: MA Experiment ID: 20000090 Result: Down-regulated in Transcription
  misc_feature: MA Experiment ID: 20001248 Result: Down-regulated in Transcription
  misc_feature: MA Experiment 20001248 PARAMETER Experiment Name: At_Far-red-induction_P Parameter: Age (day) Value: 7
  misc_feature: MA Experiment 20001248 PARAMETER Experiment Name: At_Far-red-induction_P Parameter: Light Value: Far-red vs. White
  misc_feature: MA Experiment 20001248 PARAMETER Experiment Name: At_Far-red-induction_P Parameter: Organism Value: A. thaliana
  misc_feature: MA Experiment 20001248 PARAMETER Experiment Name: At_Far-red-induction_P Parameter: Plant Line Value: Columbia
  misc_feature: MA Experiment 20001248 PARAMETER Experiment Name: At_Far-red-induction_P Parameter: Timepoint (hr) Value: 4
  misc_feature: MA Experiment 20001248 PARAMETER Experiment Name: At_Far-red-induction_P Parameter: Tissue Value: Whole Plant
aagtctttcttacttgccctgctctggaacgtgactttggaggtaacgaaactgtgtcgtgagttgatctaagaggggaagtgaggaatcattttgcttttagctttgaaaagtaaatcctggaaatgtctctcaaggcgttagactacgagtccttgaatgaaaacgtgaagaattgtcagtatgcagtcagaggtgaactttatcttcgtgcttctgagcttcagaaagaaggcaaaaagattattttcacaaatgttggaaaccctcatgctttaggacagaaacctctgacttttcctcgtcaggtggtttctttatgccaagcaccatttctgttagatgatccaaatgttggtatgatattcccagcagatgctattgcaagagctaagcattatctttccttgacttctggtggtcttggtgcttacagtgactcaagaggtcttccgggagttcggaaagaagtcgctgagttcattgaacggcgtgatggatatccaagcgatccagaactcatatttctaactgatggagcgagcaaaggtgtgatgcaaatcttgaattgtgtcatacgcggtcagaaagacggaattctggttccagttccacagtatccactctactcggctactatatctctgttaggtggtactcttgttccttactatcttgaagagtctgaaaactggggacttgatgttaacaaccttcgccaatctgttgctcaagctcgctctcaaggaataacagtaagggcaatggtgattattaaccccggaaacccaactggccagtgtcttagcgaagctaacataagagagatactacggttctgttgtgatgagagattagttcttctcggagacgaagtgtatcagcaaaatatataccaagatgaacgtccctttatcagttccaagaaggttttgatggatatgggagcaccgatcagcaaggaagttcagctcatatctttccacaccgtttccaaaggatactggggcgaatgtgggcaacggggaggttactttgagatgacaaatatccctcccaggaccgttgaggagatatacaaggtggcctctatagctctcagccccaacgtctctgcgcagatatttatgggtttaatggttagcccaccaaagcctggagacatttcatatgaccaattcgttcgtgagagcaagggaatactagaatcactgagaagaagagcaaggatgatgactgatggattcaacagctgcaaaaacgtcgtctgtaatttcacagaaggtgctatgtattcattccctcaaataaagttgccgtcgaaagcaatccaagcagcaaaacaagccggaaaagtccctgacgttttctactgccttaagctcttagaagccacaggaatctccacagttccaggctctggatttggacaaaaagaaggggtgtttcatttaaggacaacaattctgccagcagaagaagaaatgccagagattatggacagtttcaaaaagttcaatgatgagtttatgtctcagtacgctgataactttggttactccagaatgtgaaaaagaaaggacttagagtcagagtcagagatcacttcttcttctttcacgacattattattgtctattcacactcttaaaaagcaataagtactggtcctactctgtgtcaaactcttcttggtgctcttaaaacctttgtatctattgttaccaatttgtgtgactcacacacacacacacaaaaatctctaatgttcaattatatggt

SEQ ID NO: 41378 - protein, 481 aa, Arabidopsis thaliana
  peptide (1)..(481): Ceres Seq. ID no. 12395517
  misc_feature (118)..(465): Pfam Name: Aminotransferase class I and II Pfam Description: Aminotransferase class I and II
  misc_feature (1)..(474): Homolog of NCBI NO: 37533928 NR Description: putative alanine aminotransferase
  misc_feature (4)..(473): Homolog of NCBI NO: 7434113 NR Description: alanine transaminase (EC 2.6.1.2) - Chlamydomonas
  misc_feature (103)..(481): Homolog of NCBI NO: 14596229 NR Description: alanine aminotransferase-like protein
  misc_feature (4)..(481): Homolog of NCBI NO: 34899390 NR Description: putative alanine aminotransferase
  misc_feature (4)..(481): Homolog of NCBI NO: 29569153 NR Description: alanine aminotransferase [Oryza sativa (indica
  misc_feature (1)..(481): Homolog of NCBI NO: 13430566 NR Description: putative alanine aminotransferase [Arabidopsis
  misc_feature (1)..(481): Homolog of NCBI NO: 16604499 NR Description: At1g23310/F26F24_4 [Arabidopsis thaliana]
  misc_feature (1)..(481): Homolog of NCBI NO: 30688330 NR Description: alanine aminotransferase -related [Arabidopsis
  misc_feature (1)..(481): Homolog of NCBI NO: 21537112 NR Description: putative alanine aminotransferase [Arabidopsis
  misc_feature (1)..(481): Homolog of NCBI NO: 15223186 NR Description: putative alanine aminotransferase
MSLKALDYESLNENVKNCQYAVRGELYLRASELQKEGKKIIFTNVGNPHALGQKPLTFPRQVVSLCQAPFLLDDPNVGMIFPADAIARAKHYLSLTSGGLGAYSDSRGLPGVRKEVAEFIERRDGYPSDPELIFLTDGASKGVMQILNCVIRGQKDGILVPVPQYPLYSATISLLGGTLVPYYLEESENWGLDVNNLRQSVAQARSQGITVRAMVIINPGNPTGQCLSEANIREILRFCCDERLVLLGDEVYQQNIYQDERPFISSKKVLMDMGAPISKEVQLISFHTVSKGYWGECGQRGGYFEMTNIPPRTVEEIYKVASIALSPNVSAQIFMGLMVSPPKPGDISYDQFVRESKGILESLRRRARMMTDGFNSCKNVVCNFTEGAMYSFPQIKLPSKAIQAAKQAGKVPDVFYCLKLLEATGISTVPGSGFGQKEGVFHLRTTILPAEEEMPEIMDSFKKFNDEFMSQYADNFGYSRM

SEQ ID NO: 41379 - protein, 403 aa, Arabidopsis thaliana
  peptide (1)..(403): Ceres Seq. ID no. 12395518
  misc_feature (40)..(387): Pfam Name: Aminotransferase class I and II Pfam Description: Aminotransferase class I and II
  misc_feature (1)..(396): Homolog of NCBI NO: 37533928 NR Description: putative alanine aminotransferase
  misc_feature (1)..(395): Homolog of NCBI NO: 7434113 NR Description: alanine transaminase (EC 2.6.1.2) - Chlamydomonas
  misc_feature (25)..(403): Homolog of NCBI NO: 14596229 NR Description: alanine aminotransferase-like protein
  misc_feature (1)..(403): Homolog of NCBI NO: 34899390 NR Description: putative alanine aminotransferase
  misc_feature (1)..(403): Homolog of NCBI NO: 29569153 NR Description: alanine aminotransferase [Oryza sativa (indica
  misc_feature (1)..(403): Homolog of NCBI NO: 13430566 NR Description: putative alanine aminotransferase [Arabidopsis
  misc_feature (1)..(403): Homolog of NCBI NO: 16604499 NR Description: At1g23310/F26F24_4 [Arabidopsis thaliana]
  misc_feature (1)..(403): Homolog of NCBI NO: 30688330 NR Description: alanine aminotransferase -related [Arabidopsis
  misc_feature (1)..(403): Homolog of NCBI NO: 21537112 NR Description: putative alanine aminotransferase [Arabidopsis
  misc_feature (1)..(403): Homolog of NCBI NO: 15223186 NR Description: putative alanine aminotransferase
MIFPADAIARAKHYLSLTSGGLGAYSDSRGLPGVRKEVAEFIERRDGYPSDPELIFLTDGASKGVMQILNCVIRGQKDGILVPVPQYPLYSATISLLGGTLVPYYLEESENWGLDVNNLRQSVAQARSQGITVRAMVIINPGNPTGQCLSEANIREILRFCCDERLVLLGDEVYQQNIYQDERPFISSKKVLMDMGAPISKEVQLISFHTVSKGYWGECGQRGGYFEMTNIPPRTVEEIYKVASIALSPNVSAQIFMGLMVSPPKPGDISYDQFVRESKGILESLRRRARMMTDGFNSCKNVVCNFTEGAMYSFPQIKLPSKAIQAAKQAGKVPDVFYCLKLLEATGISTVPGSGFGQKEGVFHLRTTILPAEEEMPEIMDSFKKFNDEFMSQYADNFGYSRM

SEQ ID NO: 41380 - protein, 338 aa, Arabidopsis thaliana
  peptide (1)..(338): Ceres Seq. ID no. 12395519
  misc_feature (1)..(322): Pfam Name: Aminotransferase class I and II Pfam Description: Aminotransferase class I and II
  misc_feature (1)..(331): Homolog of NCBI NO: 37533928 NR Description: putative alanine aminotransferase
  misc_feature (1)..(330): Homolog of NCBI NO: 7434113 NR Description: alanine transaminase (EC 2.6.1.2) - Chlamydomonas
  misc_feature (1)..(338): Homolog of NCBI NO: 14596229 NR Description: alanine aminotransferase-like protein
  misc_feature (1)..(338): Homolog of NCBI NO: 34899390 NR Description: putative alanine aminotransferase
  misc_feature (1)..(338): Homolog of NCBI NO: 29569153 NR Description: alanine aminotransferase [Oryza sativa (indica
  misc_feature (1)..(338): Homolog of NCBI NO: 13430566 NR Description: putative alanine aminotransferase [Arabidopsis
  misc_feature (1)..(338): Homolog of NCBI NO: 16604499 NR Description: At1g23310/F26F24_4 [Arabidopsis thaliana]
  misc_feature (1)..(338): Homolog of NCBI NO: 30688330 NR Description: alanine aminotransferase -related [Arabidopsis
  misc_feature (1)..(338): Homolog of NCBI NO: 21537112 NR Description: putative alanine aminotransferase [Arabidopsis
  misc_feature (1)..(338): Homolog of NCBI NO: 15223186 NR Description: putative alanine aminotransferase
MQILNCVIRGQKDGILVPVPQYPLYSATISLLGGTLVPYYLEESENWGLDVNNLRQSVAQARSQGITVRAMVIINPGNPTGQCLSEANIREILRFCCDERLVLLGDEVYQQNIYQDERPFISSKKVLMDMGAPISKEVQLISFHTVSKGYWGECGQRGGYFEMTNIPPRTVEEIYKVASIALSPNVSAQIFMGLMVSPPKPGDISYDQFVRESKGILESLRRRARMMTDGFNSCKNVVCNFTEGAMYSFPQIKLPSKAIQAAKQAGKVPDVFYCLKLLEATGISTVPGSGFGQKEGVFHLRTTILPAEEEMPEIMDSFKKFNDEFMSQYADNFGYSRM

SEQ ID NO: 41381 - DNA, 1814 bp, Arabidopsis thaliana
  misc_feature (1)..(1814): Ceres Seq. ID no. 12558491
  misc_feature: MA Experiment ID: 20000180 Result: Down-regulated in Transcription
  misc_feature: MA Experiment 20000180 PARAMETER Experiment Name: At_Germinating_Seeds_P Parameter: Age (hr) Value: 24 vs. 0
  misc_feature: MA Experiment 20000180 PARAMETER Experiment Name: At_Germinating_Seeds_P Parameter: Tissue Value: Germinating Seeds
  misc_feature: MA Experiment ID: 20000437 Result: Up-regulated in Transcription
  misc_feature: MA Experiment 20000437 PARAMETER Experiment Name: At_Drought_P Parameter: Age (day) Value: 8
  misc_feature: MA Experiment 20000437 PARAMETER Experiment Name: At_Drought_P Parameter: Organism Value: A. thaliana
  misc_feature: MA Experiment 20000437 PARAMETER Experiment Name: At_Drought_P Parameter: Plant Line Value: WS
  misc_feature: MA Experiment 20000437 PARAMETER Experiment Name: At_Drought_P Parameter: Timepoint (hr) Value: 24
  misc_feature: MA Experiment 20000437 PARAMETER Experiment Name: At_Drought_P Parameter: Tissue Value: Whole Plant
  misc_feature: MA Experiment 20000437 PARAMETER Experiment Name: At_Drought_P Parameter: Treatment Value: Drought vs. No Drought
ctttcttcactgcaatttttgtgatttacaacatatattaattcttgcctcctccttcactccagctccaaacacaaatctccgacgaaaaacttctctcaagctttctcttttctaatggcgacacctactcaggaagctattgacaccttcatgaccatcaccggctcttccaatgccgtcgccgttcgtaagctcgaggagtatcgtgggaacctcaatagagctgtgaatgcatactttactcatggagatcaaaattcatatgatgcaatggatatagatgatggtgtgactccagtcctctctgaagctagaacaacggacccgttcccgcttcgtgatccaaactttgggagaagtctatttgataatgatcctgttatgtcgcgtcccccatttgttagtcatccaagggaggccagggagatacctatagaggttaaagacagcaatgggccatcaggtcaatctaatgatgctcctactattgaggatgtgaccgagacagctcaagctcacggtccagctgcccaagaggcggtcattatagatgaagtaagtgatgatgataatcagtctgctccaaccggacaaagtaggcatgctgtacctgttggttctgcagaaaataatatgcaacattacaatgatatagaagaacaaattattcgagctgctattgaggcctccaaaatggagactggtgatgacgtaacaaaatctgtcacagtgcagtcagctgagcgagaagtgttgcgcagtgaaggttggaaggcttcatcctcagaaagagaagcttctgaaatggtttctattccagtacagcagggttcccgagcctcaaatggaagattcgcagcacctagctcactgtctgaggatgatgatgatgatgatgacgatgaccctgattatgttgaggaggaagaggaaccccttgttagccacagaccaagacgtgcggtttctggatctcggagctcacttaatgatgatcttccccggagccctgaagcagaagatgcaactattcattcaccgggtgctggcaatggttttccttctgagtggggaggcatttcttctgaggaacatgatgaagctatcatgctagaggctgccatgtttggtggcatttctgagagtgaatatggtgttccttatgcacattatccgcaaaggacacagcgtccaccctcaccgtcattgacagctcagaggttgattcgagaacagcaggatgatgagtatcttgcatcgctggaagctgacagggtaaaagctgaggctcgtcgattggaggaagaagctgctagagtggaagctattgaagaagcaaagagaaaggaggaagaagctcgcaggaaggtcgaagaggaacaggagctggagaggcaattagtttcaaaggaagcatctctgcctcaagagccaccagccggggaagagaacgccattacacttcaagtcaggctgccagatggcacccgtcatggccgccggttctttaaatccgacaaactccaatcacttttcgactttatagacatctgtagagttgtgaagcccaacacttataggctggtaaggccatatcctcggcgtgcttttggagatggagaatgctcatcgactctaaacgatatcggtttaacgagcaaacaagaagcattgttcttggagctgatctagaattggtattattctattggggttacataatttattcttttatatgtcttcttctttttcttcgtagaatttgttactccctaaacatttattggtctatttaatccaaggctggcttt

SEQ ID NO: 41382 - protein, 525 aa, Arabidopsis thaliana
  peptide (1)..(525): Ceres Seq. ID no. 12558492
  misc_feature (442)..(524): Pfam Name: UBX domain Pfam Description: UBX domain
  misc_feature (391)..(525): Homolog of NCBI NO: 30678726 NR Description: expressed protein [Arabidopsis thaliana]
  misc_feature (1)..(384): Homolog of NCBI NO: 30678726 NR Description: expressed protein [Arabidopsis thaliana]
  misc_feature (159)..(428): Homolog of NCBI NO: 18413644 NR Description: putative protein
  misc_feature (375)..(525): Homolog of NCBI NO: 7486575 NR Description: hypothetical protein F7H19.230 - Arabidopsis
  misc_feature (53)..(444): Homolog of NCBI NO: 7487672 NR Description: hypothetical protein T5C23.170 - Arabidopsis
  misc_feature (194)..(525): Homolog of NCBI NO: 7487672 NR Description: hypothetical protein T5C23.170 - Arabidopsis
  misc_feature (1)..(435): Homolog of NCBI NO: 13160609 NR Description: Ara4-interacting protein [Arabidopsis thaliana]
  misc_feature (194)..(525): Homolog of NCBI NO: 18413644 NR Description: putative protein
  misc_feature (1)..(455): Homolog of NCBI NO: 7486575 NR Description: hypothetical protein F7H19.230 - Arabidopsis
  misc_feature (1)..(525): Homolog of NCBI NO: 18416058 NR Description: putative protein
MATPTQEAIDTFMTITGSSNAVAVRKLEEYRGNLNRAVNAYFTHGDQNSYDAMDIDDGVTPVLSEARTTDPFPLRDPNFGRSLFDNDPVMSRPPFVSHPREAREIPIEVKDSNGPSGQSNDAPTIEDVTETAQAHGPAAQEAVIIDEVSDDDNQSAPTGQSRHAVPVGSAENNMQHYNDIEEQIIRAAIEASKMETGDDVTKSVTVQSAEREVLRSEGWKASSSEREASEMVSIPVQQGSRASNGRFAAPSSLSEDDDDDDDDDPDYVEEEEEPLVSHRPRRAVSGSRSSLNDDLPRSPEAEDATIHSPGAGNGFPSEWGGISSEEHDEAIMLEAAMFGGISESEYGVPYAHYPQRTQRPPSPSLTAQRLIREQQDDEYLASLEADRVKAEARRLEEEAARVEAIEEAKRKEEEARRKVEEEQELERQLVSKEASLPQEPPAGEENAITLQVRLPDGTRHGRRFFKSDKLQSLFDFIDICRVVKPNTYRLVRPYPRRAFGDGECSSTLNDIGLTSKQEALFLELI

SEQ ID NO: 41383 - protein, 513 aa, Arabidopsis thaliana
  peptide (1)..(513): Ceres Seq. ID no. 12558493
  misc_feature (430)..(512): Pfam Name: UBX domain Pfam Description: UBX domain
  misc_feature (379)..(513): Homolog of NCBI NO: 30678726 NR Description: expressed protein [Arabidopsis thaliana]
  misc_feature (1)..(372): Homolog of NCBI NO: 30678726 NR Description: expressed protein [Arabidopsis thaliana]
  misc_feature (147)..(416): Homolog of NCBI NO: 18413644 NR Description: putative protein
  misc_feature (363)..(513): Homolog of NCBI NO: 7486575 NR Description: hypothetical protein F7H19.230 - Arabidopsis
  misc_feature (41)..(432): Homolog of NCBI NO: 7487672 NR Description: hypothetical protein T5C23.170 - Arabidopsis
  misc_feature (182)..(513): Homolog of NCBI NO: 7487672 NR Description: hypothetical protein T5C23.170 - Arabidopsis
  misc_feature (1)..(423): Homolog of NCBI NO: 13160609 NR Description: Ara4-interacting protein [Arabidopsis thaliana]
  misc_feature (182)..(513): Homolog of NCBI NO: 18413644 NR Description: putative protein
  misc_feature (1)..(443): Homolog of NCBI NO: 7486575 NR Description: hypothetical protein F7H19.230 - Arabidopsis
  misc_feature (1)..(513): Homolog of NCBI NO: 18416058 NR Description: putative protein
MTITGSSNAVAVRKLEEYRGNLNRAVNAYFTHGDQNSYDAMDIDDGVTPVLSEARTTDPFPLRDPNFGRSLFDNDPVMSRPPFVSHPREAREIPIEVKDSNGPSGQSNDAPTIEDVTETAQAHGPAAQEAVIIDEVSDDDNQSAPTGQSRHAVPVGSAENNMQHYNDIEEQIIRAAIEASKMETGDDVTKSVTVQSAEREVLRSEGWKASSSEREASEMVSIPVQQGSRASNGRFAAPSSLSEDDDDDDDDDPDYVEEEEEPLVSHRPRRAVSGSRSSLNDDLPRSPEAEDATIHSPGAGNGFPSEWGGISSEEHDEAIMLEAAMFGGISESEYGVPYAHYPQRTQRPPSPSLTAQRLIREQQDDEYLASLEADRVKAEARRLEEEAARVEAIEEAKRKEEEARRKVEEEQELERQLVSKEASLPQEPPAGEENAITLQVRLPDGTRHGRRFFKSDKLQSLFDFIDICRVVKPNTYRLVRPYPRRAFGDGECSSTLNDIGLTSKQEALFLELI

SEQ ID NO: 41384 - protein, 473 aa, Arabidopsis thaliana
  peptide (1)..(473): Ceres Seq. ID no. 12558494
  misc_feature (390)..(472): Pfam Name: UBX domain Pfam Description: UBX domain
  misc_feature (339)..(473): Homolog of NCBI NO: 30678726 NR Description: expressed protein [Arabidopsis thaliana]
  misc_feature (1)..(332): Homolog of NCBI NO: 30678726 NR Description: expressed protein [Arabidopsis thaliana]
  misc_feature (107)..(376): Homolog of NCBI NO: 18413644 NR Description: putative protein
  misc_feature (323)..(473): Homolog of NCBI NO: 7486575 NR Description: hypothetical protein F7H19.230 - Arabidopsis
  misc_feature (1)..(392): Homolog of NCBI NO: 7487672 NR Description: hypothetical protein T5C23.170 - Arabidopsis
  misc_feature (142)..(473): Homolog of NCBI NO: 7487672 NR Description: hypothetical protein T5C23.170 - Arabidopsis
  misc_feature (1)..(383): Homolog of NCBI NO: 13160609 NR Description: Ara4-interacting protein [Arabidopsis thaliana]
  misc_feature (142)..(473): Homolog of NCBI NO: 18413644 NR Description: putative protein
  misc_feature (1)..(403): Homolog of NCBI NO: 7486575 NR Description: hypothetical protein F7H19.230 - Arabidopsis
  misc_feature (1)..(473): Homolog of NCBI NO: 18416058 NR Description: putative protein
MDIDDGVTPVLSEARTTDPFPLRDPNFGRSLFDNDPVMSRPPFVSHPREAREIPIEVKDSNGPSGQSNDAPTIEDVTETAQAHGPAAQEAVIIDEVSDDDNQSAPTGQSRHAVPVGSAENNMQHYNDIEEQIIRAAIEASKMETGDDVTKSVTVQSAEREVLRSEGWKASSSEREASEMVSIPVQQGSRASNGRFAAPSSLSEDDDDDDDDDPDYVEEEEEPLVSHRPRRAVSGSRSSLNDDLPRSPEAEDATIHSPGAGNGFPSEWGGISSEEHDEAIMLEAAMFGGISESEYGVPYAHYPQRTQRPPSPSLTAQRLIREQQDDEYLASLEADRVKAEARRLEEEAARVEAIEEAKRKEEEARRKVEEEQELERQLVSKEASLPQEPPAGEENAITLQVRLPDGTRHGRRFFKSDKLQSLFDFIDICRVVKPNTYRLVRPYPRRAFGDGECSSTLNDIGLTSKQEALFLELI

SEQ ID NO: 41385 - DNA, 1440 bp, Arabidopsis thaliana; identical to SEQ ID NO: 21340
  misc_feature (1)..(1440): Ceres Seq. ID no. 12337386
  misc_feature: MA Experiment ID: 20000180 Result: Up-regulated in Transcription
  misc_feature: MA Experiment 20000180 PARAMETER Experiment Name: At_Germinating_Seeds_P Parameter: Age (hr) Value: 24 vs. 0
  misc_feature: MA Experiment 20000180 PARAMETER Experiment Name: At_Germinating_Seeds_P Parameter: Tissue Value: Germinating Seeds
  misc_feature: MA Experiment ID: 20000182 Result: Down-regulated in Transcription
  misc_feature: MA Experiment 20000182 PARAMETER Experiment Name: At_2mM_SA_P Parameter: Age (day) Value: 14
  misc_feature: MA Experiment 20000182 PARAMETER Experiment Name: At_2mM_SA_P Parameter: Organism Value: A. thaliana
  misc_feature: MA Experiment 20000182 PARAMETER Experiment Name: At_2mM_SA_P Parameter: Plant Line Value: WS
  misc_feature: MA Experiment 20000182 PARAMETER Experiment Name: At_2mM_SA_P Parameter: Timepoint (hr) Value: 6
  misc_feature: MA Experiment 20000182 PARAMETER Experiment Name: At_2mM_SA_P Parameter: Tissue Value: Aerial
  misc_feature: MA Experiment 20000182 PARAMETER Experiment Name: At_2mM_SA_P Parameter: Treatment Value: 2mM SA vs. No Treatment
  misc_feature: MA Experiment ID: 20000185 Result: Down-regulated in Transcription
  misc_feature: MA Experiment 20000185 PARAMETER Experiment Name: At_Roots__P Parameter: Age (day) Value: 7 vs. 21
  misc_feature: MA Experiment 20000185 PARAMETER Experiment Name: At_Roots__P Parameter: Organism Value: A. thaliana
  misc_feature: MA Experiment 20000185 PARAMETER Experiment Name: At_Roots__P Parameter: Tissue Value: Roots vs. Whole Plant
  misc_feature: MA Experiment ID: 20000437 Result: Down-regulated in Transcription
  misc_feature: MA Experiment 20000437 PARAMETER Experiment Name: At_Drought_P Parameter: Age (day) Value: 8
  misc_feature: MA Experiment 20000437 PARAMETER Experiment Name: At_Drought_P Parameter: Organism Value: A. thaliana
  misc_feature: MA Experiment 20000437 PARAMETER Experiment Name: At_Drought_P Parameter: Plant Line Value: WS
  misc_feature: MA Experiment 20000437 PARAMETER Experiment Name: At_Drought_P Parameter: Timepoint (hr) Value: 24
  misc_feature: MA Experiment 20000437 PARAMETER Experiment Name: At_Drought_P Parameter: Tissue Value: Whole Plant
  misc_feature: MA Experiment 20000437 PARAMETER Experiment Name: At_Drought_P Parameter: Treatment Value: Drought vs. No Drought
  misc_feature: MA Experiment ID: 20000438 Result: Up-regulated in Transcription
  misc_feature: MA Experiment 20000438 PARAMETER Experiment Name: At_Shoots__P Parameter: Age (day) Value: 14
  misc_feature: MA Experiment 20000438 PARAMETER Experiment Name: At_Shoots__P Parameter: Tissue Value: Shoots vs. Whole Plant
  misc_feature: MA Experiment ID: 20000439 Result: Down-regulated in Transcription
  misc_feature: MA Experiment 20000439 PARAMETER Experiment Name: At_Roots__P Parameter: Age (day) Value: 14 vs. 21
  misc_feature: MA Experiment 20000439 PARAMETER Experiment Name: At_Roots__P Parameter: Organism Value: A. thaliana
  misc_feature: MA Experiment 20000439 PARAMETER Experiment Name: At_Roots__P Parameter: Tissue Value: Roots vs. Whole Plant

SEQ ID NO: 41386 - protein, 335 aa, Arabidopsis thaliana; identical to SEQ ID NO: 21341
  peptide (1)..(335): Ceres Seq. ID no. 12337387
  misc_feature (200)..(335): Homolog of NCBI NO: 13937167 NR Description: At1g19350/F18O14_4 [Arabidopsis thaliana]
  misc_feature (9)..(273): Homolog of NCBI NO: 33146833 NR Description: putative mature anther-specific protein LAT61
  misc_feature (21)..(280): Homolog of NCBI NO: 14626761 NR Description: mature anther-specific protein LAT61
  misc_feature (22)..(333): Homolog of NCBI NO: 15215731 NR Description: AT4g36780/C7A10_580 [Arabidopsis thaliana]
  misc_feature (1)..(333): Homolog of NCBI NO: 25352558 NR Description: unknown protein F9E10.7 [imported] - Arabidopsis
  misc_feature (1)..(333): Homolog of NCBI NO: 18086461 NR Description: At1g75080/F9E10_7 [Arabidopsis thaliana]
  misc_feature (1)..(333): Homolog of NCBI NO: 18410764 NR Description: expressed protein
  misc_feature (1)..(335): Homolog of NCBI NO: 21592457 NR Description: unknown [Arabidopsis thaliana]
  misc_feature (1)..(335): Homolog of NCBI NO: 6651069 NR Description: 107 protein [Arabidopsis thaliana]
  misc_feature (1)..(335): Homolog of NCBI NO: 18394728 NR Description: expressed protein
  misc_feature (200)..(335): Homolog of NCBI NO: 13937167 NR Description: At1g19350/F18O14_4 [Arabidopsis thaliana]
  misc_feature (9)..(273): Homolog of NCBI NO: 33146833 NR Description: putative mature anther-specific protein LAT61
  misc_feature (21)..(280): Homolog of NCBI NO: 14626761 NR Description: mature anther-specific protein LAT61
  misc_feature (22)..(333): Homolog of NCBI NO: 15215731 NR Description: AT4g36780/C7A10_580 [Arabidopsis thaliana]
  misc_feature (1)..(333): Homolog of NCBI NO: 25352558 NR Description: unknown protein F9E10.7 [imported] - Arabidopsis
  misc_feature (1)..(333): Homolog of NCBI NO: 18086461 NR Description: At1g75080/F9E10_7 [Arabidopsis thaliana]
  misc_feature (1)..(333): Homolog of NCBI NO: 18410764 NR Description: expressed protein
  misc_feature (1)..(335): Homolog of NCBI NO: 21592457 NR Description: unknown [Arabidopsis thaliana]
  misc_feature (1)..(335): Homolog of NCBI NO: 6651069 NR Description: 107 protein [Arabidopsis thaliana]
  misc_feature (1)..(335): Homolog of NCBI NO: 18394728 NR Description: expressed protein

SEQ ID NO: 41387 - protein, 318 aa, Arabidopsis thaliana; identical to SEQ ID NO: 21342
  peptide (1)..(318): Ceres Seq. ID no. 12337388
  misc_feature (183)..(318): Homolog of NCBI NO: 13937167 NR Description: At1g19350/F18O14_4 [Arabidopsis thaliana]
  misc_feature (1)..(256): Homolog of NCBI NO: 33146833 NR Description: putative mature anther-specific protein LAT61
  misc_feature (4)..(263): Homolog of NCBI NO: 14626761 NR Description: mature anther-specific protein LAT61
  misc_feature (5)..(316): Homolog of NCBI NO: 15215731 NR Description: AT4g36780/C7A10_580 [Arabidopsis thaliana]
  misc_feature (1)..(316): Homolog of NCBI NO: 25352558 NR Description: unknown protein F9E10.7 [imported] - Arabidopsis
  misc_feature (1)..(316): Homolog of NCBI NO: 18086461 NR Description: At1g75080/F9E10_7 [Arabidopsis thaliana]
  misc_feature (1)..(316): Homolog of NCBI NO: 18410764 NR Description: expressed protein
  misc_feature (1)..(318): Homolog of NCBI NO: 21592457 NR Description: unknown [Arabidopsis thaliana]
  misc_feature (1)..(318): Homolog of NCBI NO: 6651069 NR Description: 107 protein [Arabidopsis thaliana]
  misc_feature (1)..(318): Homolog of NCBI NO: 18394728 NR Description: expressed protein
  misc_feature (183)..(318): Homolog of NCBI NO: 13937167 NR Description: At1g19350/F18O14_4 [Arabidopsis thaliana]
  misc_feature (1)..(256): Homolog of NCBI NO: 33146833 NR Description: putative mature anther-specific protein LAT61
  misc_feature (4)..(263): Homolog of NCBI NO: 14626761 NR Description: mature anther-specific protein LAT61
  misc_feature (5)..(316): Homolog of NCBI NO: 15215731 NR Description: AT4g36780/C7A10_580 [Arabidopsis thaliana]
  misc_feature (1)..(316): Homolog of NCBI NO: 25352558 NR Description: unknown protein F9E10.7 [imported] - Arabidopsis
  misc_feature (1)..(316): Homolog of NCBI NO: 18086461 NR Description: At1g75080/F9E10_7 [Arabidopsis thaliana]
  misc_feature (1)..(316): Homolog of NCBI NO: 18410764 NR Description: expressed protein
  misc_feature (1)..(318): Homolog of NCBI NO: 21592457 NR Description: unknown [Arabidopsis thaliana]
  misc_feature (1)..(318): Homolog of NCBI NO: 6651069 NR Description: 107 protein [Arabidopsis thaliana]
  misc_feature (1)..(318): Homolog of NCBI NO: 18394728 NR Description: expressed protein

SEQ ID NO: 41388 - protein, 239 aa, Arabidopsis thaliana; identical to SEQ ID NO: 21343
  peptide (1)..(239): Ceres Seq. ID no. 12337389
  misc_feature (104)..(239): Homolog of NCBI NO: 13937167 NR Description: At1g19350/F18O14_4 [Arabidopsis thaliana]
  misc_feature (1)..(177): Homolog of NCBI NO: 33146833 NR Description: putative mature anther-specific protein LAT61
  misc_feature (1)..(184): Homolog of NCBI NO: 14626761 NR Description: mature anther-specific protein LAT61
  misc_feature (1)..(237): Homolog of NCBI NO: 15215731 NR Description: AT4g36780/C7A10_580 [Arabidopsis thaliana]
  misc_feature (1)..(237): Homolog of NCBI NO: 25352558 NR Description: unknown protein F9E10.7 [imported] - Arabidopsis
  misc_feature (1)..(237): Homolog of NCBI NO: 18086461 NR Description: At1g75080/F9E10_7 [Arabidopsis thaliana]
  misc_feature (1)..(237): Homolog of NCBI NO: 18410764 NR Description: expressed protein
  misc_feature (1)..(239): Homolog of NCBI NO: 21592457 NR Description: unknown [Arabidopsis thaliana]
  misc_feature (1)..(239): Homolog of NCBI NO: 6651069 NR Description: 107 protein [Arabidopsis thaliana]
  misc_feature (1)..(239): Homolog of NCBI NO: 18394728 NR Description: expressed protein
  misc_feature (104)..(239): Homolog of NCBI NO: 13937167 NR Description: At1g19350/F18O14_4 [Arabidopsis thaliana]
  misc_feature (1)..(177): Homolog of NCBI NO: 33146833 NR Description: putative mature anther-specific protein LAT61
  misc_feature (1)..(184): Homolog of NCBI NO: 14626761 NR Description: mature anther-specific protein LAT61
  misc_feature (1)..(237): Homolog of NCBI NO: 15215731 NR Description: AT4g36780/C7A10_580 [Arabidopsis thaliana]
  misc_feature (1)..(237): Homolog of NCBI NO: 25352558 NR Description: unknown protein F9E10.7 [imported] - Arabidopsis
  misc_feature (1)..(237): Homolog of NCBI NO: 18086461 NR Description: At1g75080/F9E10_7 [Arabidopsis thaliana]
  misc_feature (1)..(237): Homolog of NCBI NO: 18410764 NR Description: expressed protein
  misc_feature (1)..(239): Homolog of NCBI NO: 21592457 NR Description: unknown [Arabidopsis thaliana]
  misc_feature (1)..(239): Homolog of NCBI NO: 6651069 NR Description: 107 protein [Arabidopsis thaliana]
  misc_feature (1)..(239): Homolog of NCBI NO: 18394728 NR Description: expressed protein

SEQ ID NO: 41389 - DNA, 1199 bp, Arabidopsis thaliana
  misc_feature (1)..(1199): Ceres Seq. ID no. 12330750
  misc_feature: MA Experiment ID: 108501 Result: Down-regulated in Transcription
  misc_feature: MA Experiment 108501 PARAMETER Experiment Name: At_ap2_floral_buds_cDNA_P Parameter: Plant Line Value: ap2 (Ler.)
  misc_feature: MA Experiment 108501 PARAMETER Experiment Name: At_ap2_floral_buds_cDNA_P Parameter: Tissue Value: Closed Flower
  misc_feature: MA Experiment ID: 108594 Result: Down-regulated in Transcription
  misc_feature: MA Experiment 108594 PARAMETER Experiment Name: At_Ler-rhl_Root_cDNA_P Parameter: Plant Line Value: null
  misc_feature: MA Experiment ID: 20000227 Result: Up-regulated in Transcription
  misc_feature: MA Experiment 20000227 PARAMETER Experiment Name: At_Root-Tips-vs-Tops_P Parameter: Tissue Value: Root Tips vs. Root Tops
aaatccaccaaaaacaaaaaatgtcgacttctaaagccataaccttaactctcttcattgcaacaacattactagcgccctgcaacgcagccacaaacgcaacaacgaagccgctcttcccagcgattctaatcttcggtgattcaaccgtcgatacaggaaacaacaactaccctttaccaacaatcttcagagctgaacactttccttacggcatggatcttccagacggaaaagctaacggaagattctcaaacggaaaacttatctccgacataatcgcaaccaaactcaacatcaaagagtttattcctcctttcttacaaccaaatctctccgaccaagacattctaaccggagtctgtttcgcatcagctggtgccggttacgacgacctgaccagtctctcgacacaagccattcgtgtctcggaacaaccaaacatgttcaagagttacattgctcgtctcaaaggtatcgtgggagacaagaaagcgatggagatcataaacaatgccttcgtggttgtgagtgcagggcctaacgatttcattttgaactattacgaaattccctcaaggcgtctcgagtatcctttcatttctggttaccaagactttattcttaagaggcttgaaaatttcgtgcgggagctttacagtttaggtgtccggaatgttttggttggaggtttaccgccaatggggtgtttaccgatccatatgactgctaaattccgcaacatttttagattctgcttggaacaccataacaaagactctgttttatacaatgagaaacttcagaatctcttgccccaaatcgaagcatctcttccaggaagcaaattcctttacgccgatgtctataatcctatgatggagatgatccaaaaccctagcaaatacgggttcaaagagacgaagagaggatgttgtggaacagggttcttggagacgggcttcatgtgtaatgtcttttctcctgtgtgtcaaaatcggtcggagtttatgttctttgactcgattcatccatcggaagctacctataatgtcataggcaatcgtctggatcctctaattcgtggaaagttccaggcttaagtcatcacgagttgcaaaactgacacaattaattttcttgtttctttaatgcgactagttgtggactttcgtttatgaatcaaatgtaactttggc

SEQ ID NO: 41390 - protein, 366 aa, Arabidopsis thaliana
  peptide (1)..(366): Ceres Seq. ID no. 12330751
  misc_feature (42)..(356): Pfam Name: GDSL-like Lipase/Acylhydrolase Pfam Description: GDSL-like Lipase/Acylhydrolase
  misc_feature (7)..(361): Homolog of NCBI NO: 15227723 NR Description: putative GDSL-motif lipase hydrolase; protein id:
  misc_feature (7)..(307): Homolog of NCBI NO: 15224162 NR Description: putative GDSL-motif lipase/hydrolase; protein id:
  misc_feature (7)..(366): Homolog of NCBI NO: 15227734 NR Description: putative GDSL-motif lipase/hydrolase; protein id:
  misc_feature (7)..(366): Homolog of NCBI NO: 21592974 NR Description: proline-rich protein, putative [Arabidopsis
  misc_feature (7)..(366): Homolog of NCBI NO: 25336283 NR Description: hypothetical protein RXF26 [imported] -
  misc_feature (7)..(366): Homolog of NCBI NO: 15217963 NR Description: proline-rich protein, putative; protein id:
  misc_feature (7)..(149): Homolog of NCBI NO: 25336273 NR Description: probable GDSL-motif lipase/hydrolase
  misc_feature (158)..(366): Homolog of NCBI NO: 25336273 NR Description: probable GDSL-motif lipase/hydrolase
  misc_feature (7)..(366): Homolog of NCBI NO: 15225096 NR Description: putative GDSL-motif lipase/hydrolase
  misc_feature (7)..(366): Homolog of NCBI NO: 21537117 NR Description: putative GDSL-motif lipase/hydrolase [Arabidopsis
IHQKQKMSTSKAITLTLFIATTLLAPCNAATNATTKPLFPAILIFGDSTVDTGNNNYPLPTIFRAEHFPYGMDLPDGKANGRFSNGKLISDIIATKLNIKEFIPPFLQPNLSDQDILTGVCFASAGAGYDDLTSLSTQAIRVSEQPNMFKSYIARLKGIVGDKKAMEIINNAFVVVSAGPNDFILNYYEIPSRRLEYPFISGYQDFILKRLENFVRELYSLGVRNVLVGGLPPMGCLPIHMTAKFRNIFRFCLEHHNKDSVLYNEKLQNLLPQIEASLPGSKFLYADVYNPMMEMIQNPSKYGFKETKRGCCGTGFLETGFMCNVFSPVCQNRSEFMFFDSIHPSEATYNVIGNRLDPLIRGKFQA

SEQ ID NO: 41391 - protein, 360 aa, Arabidopsis thaliana
  peptide (1)..(360): Ceres Seq. ID no. 12330752
  misc_feature (36)..(350): Pfam Name: GDSL-like Lipase/Acylhydrolase Pfam Description: GDSL-like Lipase/Acylhydrolase
  misc_feature (1)..(355): Homolog of NCBI NO: 15227723 NR Description: putative GDSL-motif lipase hydrolase; protein id:
  misc_feature (1)..(301): Homolog of NCBI NO: 15224162 NR Description: putative GDSL-motif lipase/hydrolase; protein id:
  misc_feature (1)..(360): Homolog of NCBI NO: 15227734 NR Description: putative GDSL-motif lipase/hydrolase; protein id:
  misc_feature (1)..(360): Homolog of NCBI NO: 21592974 NR Description: proline-rich protein, putative [Arabidopsis
  misc_feature (1)..(360): Homolog of NCBI NO: 25336283 NR Description: hypothetical protein RXF26 [imported] -
  misc_feature (1)..(360): Homolog of NCBI NO: 15217963 NR Description: proline-rich protein, putative; protein id:
  misc_feature (1)..(143): Homolog of NCBI NO: 25336273 NR Description: probable GDSL-motif lipase/hydrolase
  misc_feature (152)..(360): Homolog of NCBI NO: 25336273 NR Description: probable GDSL-motif lipase/hydrolase
  misc_feature (1)..(360): Homolog of NCBI NO: 15225096 NR Description: putative GDSL-motif lipase/hydrolase
  misc_feature (1)..(360): Homolog of NCBI NO: 21537117 NR Description: putative GDSL-motif lipase/hydrolase [Arabidopsis
MSTSKAITLTLFIATTLLAPCNAATNATTKPLFPAILIFGDSTVDTGNNNYPLPTIFRAEHFPYGMDLPDGKANGRFSNGKLISDIIATKLNIKEFIPPFLQPNLSDQDILTGVCFASAGAGYDDLTSLSTQAIRVSEQPNMFKSYIARLKGIVGDKKAMEIINNAFVVVSAGPNDFILNYYEIPSRRLEYPFISGYQDFILKRLENFVRELYSLGVRNVLVGGLPPMGCLPIHMTAKFRNIFRFCLEHHNKDSVLYNEKLQNLLPQIEASLPGSKFLYADVYNPMMEMIQNPSKYGFKETKRGCCGTGFLETGFMCNVFSPVCQNRSEFMFFDSIHPSEATYNVIGNRLDPLIRGKFQA

SEQ ID NO: 41392 - protein, 295 aa, Arabidopsis thaliana
  peptide (1)..(295): Ceres Seq. ID no. 12330753
  misc_feature (1)..(285): Pfam Name: GDSL-like Lipase/Acylhydrolase Pfam Description: GDSL-like Lipase/Acylhydrolase
  misc_feature (1)..(290): Homolog of NCBI NO: 15227723 NR Description: putative GDSL-motif lipase hydrolase; protein id:
  misc_feature (1)..(236): Homolog of NCBI NO: 15224162 NR Description: putative GDSL-motif lipase/hydrolase; protein id:
  misc_feature (1)..(295): Homolog of NCBI NO: 15227734 NR Description: putative GDSL-motif lipase/hydrolase; protein id:
  misc_feature (1)..(295): Homolog of NCBI NO: 21592974 NR Description: proline-rich protein, putative [Arabidopsis
  misc_feature (1)..(295): Homolog of NCBI NO: 25336283 NR Description: hypothetical protein RXF26 [imported] -
  misc_feature (1)..(295): Homolog of NCBI NO: 15217963 NR Description: proline-rich protein, putative; protein id:
  misc_feature (1)..(78): Homolog of NCBI NO: 25336273 NR Description: probable GDSL-motif lipase/hydrolase
  misc_feature (87)..(295): Homolog of NCBI NO: 25336273 NR Description: probable GDSL-motif lipase/hydrolase
  misc_feature (1)..(295): Homolog of NCBI NO: 15225096 NR Description: putative GDSL-motif lipase/hydrolase
  misc_feature (1)..(295): Homolog of NCBI NO: 21537117 NR Description: putative GDSL-motif lipase/hydrolase [Arabidopsis
MDLPDGKANGRFSNGKLISDIIATKLNIKEFIPPFLQPNLSDQDILTGVCFASAGAGYDDLTSLSTQAIRVSEQPNMFKSYIARLKGIVGDKKAMEIINNAFVVVSAGPNDFILNYYEIPSRRLEYPFISGYQDFILKRLENFVRELYSLGVRNVLVGGLPPMGCLPIHMTAKFRNIFRFCLEHHNKDSVLYNEKLQNLLPQIEASLPGSKFLYADVYNPMMEMIQNPSKYGFKETKRGCCGTGFLETGFMCNVFSPVCQNRSEFMFFDSIHPSEATYNVIGNRLDPLIRGKFQA

SEQ ID NO: 41393 - DNA, 1299 bp, Arabidopsis thaliana
  misc_feature (1)..(1299): Ceres Seq. ID no. 12385142
  misc_feature: MA Experiment ID: 108433 Result: Up-regulated in Transcription
  misc_feature: MA Experiment 108433 PARAMETER Experiment Name: At_rhl_Mutant2_cDNA_P Parameter: Age (day) Value: 7
  misc_feature: MA Experiment 108433 PARAMETER Experiment Name: At_rhl_Mutant2_cDNA_P Parameter: Organism Value: A. thaliana
  misc_feature: MA Experiment 108433 PARAMETER Experiment Name: At_rhl_Mutant2_cDNA_P Parameter: Plant Line Value: rhl Mutant vs. wt landsburg
  misc_feature: MA Experiment 108433 PARAMETER Experiment Name: At_rhl_Mutant2_cDNA_P Parameter: Tissue Value: Roots
  misc_feature: MA Experiment ID: 108434 Result: Down-regulated in Transcription
  misc_feature: MA Experiment 108434 PARAMETER Experiment Name: At_Root_Tips_cDNA_P Parameter: Tissue Value: Root Tips
  misc_feature: MA Experiment ID: 108461 Result: Down-regulated in Transcription
  misc_feature: MA Experiment 108461 PARAMETER Experiment Name: At_Germinating_Seeds_cDNA_P Parameter: Age (day) Value: 1 vs. 0
  misc_feature: MA Experiment 108461 PARAMETER Experiment Name: At_Germinating_Seeds_cDNA_P Parameter: Tissue Value: Germinating Seeds
  misc_feature: MA Experiment ID: 108585 Result: Up-regulated in Transcription
  misc_feature: MA Experiment 108585 PARAMETER Experiment Name: At_5mM_NaNP_cDNA_P Parameter: Timepoint (hr) Value: 6
  misc_feature: MA Experiment 108585 PARAMETER Experiment Name: At_5mM_NaNP_cDNA_P Parameter: Tissue Value: Aerial
  misc_feature: MA Experiment 108585 PARAMETER Experiment Name: At_5mM_NaNP_cDNA_P Parameter: Treatment Value: null
  misc_feature: MA Experiment ID: 108594 Result: Down-regulated in Transcription
  misc_feature: MA Experiment 108594 PARAMETER Experiment Name: At_Ler-rhl_Root_cDNA_P Parameter: Plant Line Value: null
  misc_feature: MA Experiment ID: 108668 Result: Up-regulated in Transcription
  misc_feature: MA Experiment 108668 PARAMETER Experiment Name: At_2mM_SA_cDNA_P Parameter: Plant Line Value: WS
  misc_feature: MA Experiment 108668 PARAMETER Experiment Name: At_2mM_SA_cDNA_P Parameter: Timepoint (hr) Value: 6
  misc_feature: MA Experiment 108668 PARAMETER Experiment Name: At_2mM_SA_cDNA_P Parameter: Treatment Value: 2mM SA vs. No Treatment
  misc_feature: MA Experiment ID: 20000070 Result: Up-regulated in Transcription
  misc_feature: MA Experiment 20000070 PARAMETER Experiment Name: At_100uM_ABA_Mutants_cDNA_P Parameter: Plant Line Value: CS24
  misc_feature: MA Experiment 20000070 PARAMETER Experiment Name: At_100uM_ABA_Mutants_cDNA_P Parameter: Timepoint (hr) Value: 6
  misc_feature: MA Experiment 20000070 PARAMETER Experiment Name: At_100uM_ABA_Mutants_cDNA_P Parameter: Tissue Value: Aerial
  misc_feature: MA Experiment 20000070 PARAMETER Experiment Name: At_100uM_ABA_Mutants_cDNA_P Parameter: Treatment Value: 100uM ABA vs. No Treatment
  misc_feature: MA Experiment ID: 20000088 Result: Up-regulated in Transcription
  misc_feature: MA Experiment 20000088 PARAMETER Experiment Name: At_100uM_ABA_Mutants_cDNA_P Parameter: Plant Line Value: Landsberg
  misc_feature: MA Experiment 20000088 PARAMETER Experiment Name: At_100uM_ABA_Mutants_cDNA_P Parameter: Timepoint (hr) Value: 6
  misc_feature: MA Experiment 20000088 PARAMETER Experiment Name: At_100uM_ABA_Mutants_cDNA_P Parameter: Tissue Value: Aerial
  misc_feature: MA Experiment 20000088 PARAMETER Experiment Name: At_100uM_ABA_Mutants_cDNA_P Parameter: Treatment Value: 100uM ABA vs. No Treatment
  misc_feature: MA Experiment ID: 20000090 Result: Up-regulated in Transcription
  misc_feature: MA Experiment ID: 20000307 Result: Down-regulated in Transcription
  misc_feature: MA Experiment 20000307 PARAMETER Experiment Name: At_Germinating_Seeds_Sub_P Parameter: Age (hr) Value: 24 vs. 0
  misc_feature: MA Experiment 20000307 PARAMETER Experiment Name: At_Germinating_Seeds_Sub_P Parameter: Organism Value: A. thaliana
  misc_feature: MA Experiment 20000307 PARAMETER Experiment Name: At_Germinating_Seeds_Sub_P Parameter: Plant Line Value: WS
  misc_feature: MA Experiment 20000307 PARAMETER Experiment Name: At_Germinating_Seeds_Sub_P Parameter: Tissue Value: Germinating Seeds
  misc_feature: MA Experiment ID: 20000347 Result: Up-regulated in Transcription
  misc_feature: MA Experiment 20000347 PARAMETER Experiment Name: At_2mM_SA_Sub_P Parameter: Age (day) Value: 14
  misc_feature: MA Experiment 20000347 PARAMETER Experiment Name: At_2mM_SA_Sub_P Parameter: Organism Value: A. thaliana
  misc_feature: MA Experiment 20000347 PARAMETER Experiment Name: At_2mM_SA_Sub_P Parameter: Plant Line Value: WS
  misc_feature: MA Experiment 20000347 PARAMETER Experiment Name: At_2mM_SA_Sub_P Parameter: Timepoint (hr) Value: 6
  misc_feature: MA Experiment 20000347 PARAMETER Experiment Name: At_2mM_SA_Sub_P Parameter: Tissue Value: Aerial
  misc_feature: MA Experiment 20000347 PARAMETER Experiment Name: At_2mM_SA_Sub_P Parameter: Treatment Value: 2mM SA vs. No Treatment
  misc_feature: MA Experiment ID: 20000355 Result: Down-regulated in Transcription
  misc_feature: MA Experiment 20000355 PARAMETER Experiment Name: At_Siliques_Sub_P Parameter: Age (day) Value: 21
  misc_feature: MA Experiment 20000355 PARAMETER Experiment Name: At_Siliques_Sub_P Parameter: Organism Value: A. thaliana
  misc_feature: MA Experiment 20000355 PARAMETER Experiment Name: At_Siliques_Sub_P Parameter: Plant Line Value: WS
  misc_feature: MA Experiment 20000355 PARAMETER Experiment Name: At_Siliques_Sub_P Parameter: Tissue Value: Less Than 5mm Siliques vs. Whole Plant
  misc_feature: MA Experiment ID: 20000440 Result: Down-regulated in Transcription
  misc_feature: MA Experiment 20000440 PARAMETER Experiment Name: At_Closed-Flower__Sub_P Parameter: Tissue Value: Closed Flower vs. Whole Plant
aaagtttggatatttattgaaccgagtggtttctttcgttgactcgcccaccatggaagctgaaagtacccaagatatcatcatcgtcggagctggaatctccggccttgccactgcacttgggctccacaggcttgggatcagaagcatagtgctggaatcttctgagcagctgagagcaacaggatttgcactttcattatattttaatgcttggaaggccatggaagctctcggtatttctcagcatattcgcagtctcggtgatcgctttcaaggatgggtggtcagacccatttctgcaggagatcctcctaaagaaatgttatttccagaatctgaagaatatgaggttcgatgcatacagaggaagctcttgttagacgctctagcgggcgaattgcctcaagggaccatacggttctcatctaagcttgttcacatcgaattgtccggacactacaagatggttcatctctccgacgggactatacttaaaaccaaggttttggtagggtgtgatggagtgaagtcagtggttggtaagtggctaggcttcaagaatccggttaaaacttcccgtgtagcaatccgcgggatcgctcatttccagacaggccacgaattagggagaaggttctttcagttttatggcaacggtgttcgttccggtttcatctcatgtgaccaaaacactgtctactggttcctaacccacacctctactgatttagataagaaaaatcatcagaagatcaaacagtttgtgctgaccaagatcaaagacttgcctgacaacatcaagagtatcctggagaccactgatcttgatagtttggtgatgaatccactcatgtatcgacctccctgggaacttctttgggcaaacattgcaaaagacaacgtatgtgttgcaggggatgcacttcacccaatgactcctgatattggacaaggtggttgctcggcgatggaggacggagttatcctcgctcgttgtctcggtgaagcaatgaaagctaagaatatgaaaggtgaaacagaagatgagaacgagagttataggcggattgaagatggtttgaagaagtatgcaggatcgaggaaatggagaagcattgatcttataactacatcatatacagtaggtttcatacagcagagcagaggcaagtggatgaccctgtttagagacaagttcatgtcctctttcctttcttggttgcgtgtgaaaaagtctcatttcaactgtggaagacttagccatgaatgattctcaatgagcaagcacaatgttag

SEQ ID NO: 41394 - protein, 423 aa, Arabidopsis thaliana
  peptide (1)..(423): Ceres Seq. ID no. 12385143
  misc_feature (166)..(380): Pfam Name: Monooxygenase Pfam Description: Monooxygenase
  misc_feature (10)..(417): Homolog of NCBI NO: 18403916 NR Description: monooxygenase family
  misc_feature (10)..(417): Homolog of NCBI NO: 25453534 NR Description: CTF2A protein [imported] - Arabidopsis thaliana
  misc_feature (10)..(417): Homolog of NCBI NO: 4164576 NR Description: CTF2A [Arabidopsis thaliana]
  misc_feature (10)..(99): Homolog of NCBI NO: 25408403 NR Description: probable monooxygenase [imported] - Arabidopsis
  misc_feature (93)..(417): Homolog of NCBI NO: 25408403 NR Description: probable monooxygenase [imported] - Arabidopsis
  misc_feature (279)..(420): Homolog of NCBI NO: 14335042 NR Description: AT4g38540/F20M13_100 [Arabidopsis thaliana]
  misc_feature (71)..(421): Homolog of NCBI NO: 24745927 NR Description: monooxygenase [Solanum tuberosum]
  misc_feature (18)..(420): Homolog of NCBI NO: 15233923 NR Description: monooxygenase 2 (MO2); protein id: At4g38540.1
  misc_feature (18)..(409): Homolog of NCBI NO: 21537119 NR Description: monooxygenase [Arabidopsis thaliana]
  misc_feature (18)..(423): Homolog of NCBI NO: 15239070 NR Description: monooxygenase 2 (MO2), putative
KFGYLLNRVVSFVDSPTMEAESTQDIIIVGAGISGLATALGLHRLGIRSIVLESSEQLRATGFALSLYFNAWKAMEALGISQHIRSLGDRFQGWVVRPISAGDPPKEMLFPESEEYEVRCIQRKLLLDALAGELPQGTIRFSSKLVHIELSGHYKMVHLSDGTILKTKVLVGCDGVKSVVGKWLGFKNPVKTSRVAIRGIAHFQTGHELGRRFFQFYGNGVRSGFISCDQNTVYWFLTHTSTDLDKKNHQKIKQFVLTKIKDLPDNIKSILETTDLDSLVMNPLMYRPPWELLWANIAKDNVCVAGDALHPMTPDIGQGGCSAMEDGVILARCLGEAMKAKNMKGETEDENESYRRIEDGLKKYAGSRKWRSIDLITTSYTVGFIQQSRGKWMTLFRDKFMSSFLSWLRVKKSHFNCGRLSHE

SEQ ID NO: 41395 - protein, 406 aa, Arabidopsis thaliana
  peptide (1)..(406): Ceres Seq. ID no. 12385144
  misc_feature (149)..(363): Pfam Name: Monooxygenase Pfam Description: Monooxygenase
  misc_feature (1)..(400): Homolog of NCBI NO: 18403916 NR Description: monooxygenase family
  misc_feature (1)..(400): Homolog of NCBI NO: 25453534 NR Description: CTF2A protein [imported] - Arabidopsis thaliana
  misc_feature (1)..(400): Homolog of NCBI NO: 4164576 NR Description: CTF2A [Arabidopsis thaliana]
  misc_feature (1)..(82): Homolog of NCBI NO: 25408403 NR Description: probable monooxygenase [imported] - Arabidopsis
  misc_feature (76)..(400): Homolog of NCBI NO: 25408403 NR Description: probable monooxygenase [imported] - Arabidopsis
  misc_feature (262)..(403): Homolog of NCBI NO: 14335042 NR Description: AT4g38540/F20M13_100 [Arabidopsis thaliana]
  misc_feature (54)..(404): Homolog of NCBI NO: 24745927 NR Description: monooxygenase [Solanum tuberosum]
  misc_feature (1)..(403): Homolog of NCBI NO: 15233923 NR Description: monooxygenase 2 (MO2); protein id: At4g38540.1
  misc_feature (1)..(392): Homolog of NCBI NO: 21537119 NR Description: monooxygenase [Arabidopsis thaliana]
  misc_feature (1)..(406): Homolog of NCBI NO: 15239070 NR Description: monooxygenase 2 (MO2), putative
MEAESTQDIIIVGAGISGLATALGLHRLGIRSIVLESSEQLRATGFALSLYFNAWKAMEALGISQHIRSLGDRFQGWVVRPISAGDPPKEMLFPESEEYEVRCIQRKLLLDALAGELPQGTIRFSSKLVHIELSGHYKMVHLSDGTILKTKVLVGCDGVKSVVGKWLGFKNPVKTSRVAIRGIAHFQTGHELGRRFFQFYGNGVRSGFISCDQNTVYWFLTHTSTDLDKKNHQKIKQFVLTKIKDLPDNIKSILETTDLDSLVMNPLMYRPPWELLWANIAKDNVCVAGDALHPMTPDIGQGGCSAMEDGVILARCLGEAMKAKNMKGETEDENESYRRIEDGLKKYAGSRKWRSIDLITTSYTVGFIQQSRGKWMTLFRDKFMSSFLSWLRVKKSHFNCGRLSHE

SEQ ID NO: 41396 - protein, 349 aa, Arabidopsis thaliana
  peptide (1)..(349): Ceres Seq. ID no. 12385145
  misc_feature (92)..(306): Pfam Name: Monooxygenase Pfam Description: Monooxygenase
  misc_feature (1)..(343): Homolog of NCBI NO: 18403916 NR Description: monooxygenase family
  misc_feature (1)..(343): Homolog of NCBI NO: 25453534 NR Description: CTF2A protein [imported] - Arabidopsis thaliana
  misc_feature (1)..(343): Homolog of NCBI NO: 4164576 NR Description: CTF2A [Arabidopsis thaliana]
  misc_feature (1)..(25): Homolog of NCBI NO: 25408403 NR Description: probable monooxygenase [imported] - Arabidopsis
  misc_feature (19)..(343): Homolog of NCBI NO: 25408403 NR Description: probable monooxygenase [imported] - Arabidopsis
  misc_feature (205)..(346): Homolog of NCBI NO: 14335042 NR Description: AT4g38540/F20M13_100 [Arabidopsis thaliana]
  misc_feature (1)..(347): Homolog of NCBI NO: 24745927 NR Description: monooxygenase [Solanum tuberosum]
  misc_feature (1)..(346): Homolog of NCBI NO: 15233923 NR Description: monooxygenase 2 (MO2); protein id: At4g38540.1
  misc_feature (1)..(335): Homolog of NCBI NO: 21537119 NR Description: monooxygenase [Arabidopsis thaliana]
  misc_feature (1)..(349): Homolog of NCBI NO: 15239070 NR Description: monooxygenase 2 (MO2), putative
MEALGISQHIRSLGDRFQGWVVRPISAGDPPKEMLFPESEEYEVRCIQRKLLLDALAGELPQGTIRFSSKLVHIELSGHYKMVHLSDGTILKTKVLVGCDGVKSVVGKWLGFKNPVKTSRVAIRGIAHFQTGHELGRRFFQFYGNGVRSGFISCDQNTVYWFLTHTSTDLDKKNHQKIKQFVLTKIKDLPDNIKSILETTDLDSLVMNPLMYRPPWELLWANIAKDNVCVAGDALHPMTPDIGQGGCSAMEDGVILARCLGEAMKAKNMKGETEDENESYRRIEDGLKKYAGSRKWRSIDLITTSYTVGFIQQSRGKWMTLFRDKFMSSFLSWLRVKKSHFNCGRLSHE

SEQ ID NO: 41397 - DNA, 2190 bp, Arabidopsis thaliana
  misc_feature (1)..(2190): Ceres Seq. ID no. 12395334
  misc_feature: MA Experiment ID: 108573 Result: Up-regulated in Transcription
  misc_feature: MA Experiment 108573 PARAMETER Experiment Name: At_Drought_cDNA_P Parameter: Timepoint (hr) Value: 6
  misc_feature: MA Experiment 108573 PARAMETER Experiment Name: At_Drought_cDNA_P Parameter: Tissue Value: Aerial
  misc_feature: MA Experiment 108573 PARAMETER Experiment Name: At_Drought_cDNA_P Parameter: Treatment Value: Drought vs. No Drought
  misc_feature: MA Experiment ID: 108585 Result: Up-regulated in Transcription
  misc_feature: MA Experiment 108585 PARAMETER Experiment Name: At_5mM_NaNP_cDNA_P Parameter: Timepoint (hr) Value: 6
  misc_feature: MA Experiment 108585 PARAMETER Experiment Name: At_5mM_NaNP_cDNA_P Parameter: Tissue Value: Aerial
  misc_feature: MA Experiment 108585 PARAMETER Experiment Name: At_5mM_NaNP_cDNA_P Parameter: Treatment Value: null
  misc_feature: MA Experiment ID: 108595 Result: Down-regulated in Transcription
  misc_feature: MA Experiment 108595 PARAMETER Experiment Name: At_Ler-pi_Ovule_cDNA_P Parameter: Plant Line Value: null
  misc_feature: MA Experiment ID: 20000087 Result: Down-regulated in Transcription
  misc_feature: MA Experiment 20000087 PARAMETER Experiment Name: At_100uM_ABA_Mutants_cDNA_P Parameter: Plant Line Value: WS
  misc_feature: MA Experiment 20000087 PARAMETER Experiment Name: At_100uM_ABA_Mutants_cDNA_P Parameter: Timepoint (hr) Value: 6
  misc_feature: MA Experiment 20000087 PARAMETER Experiment Name: At_100uM_ABA_Mutants_cDNA_P Parameter: Tissue Value: Aerial
  misc_feature: MA Experiment 20000087 PARAMETER Experiment Name: At_100uM_ABA_Mutants_cDNA_P Parameter: Treatment Value: 100uM ABA vs. No Treatment
  misc_feature: MA Experiment ID: 20000113 Result: Down-regulated in Transcription
  misc_feature: MA Experiment 20000113 PARAMETER Experiment Name: At_42deg_Heat_cDNA_P Parameter: Temperature (deg C) Value: 42 vs. 22
  misc_feature: MA Experiment 20000113 PARAMETER Experiment Name: At_42deg_Heat_cDNA_P Parameter: Timepoint (hr) Value: 8
  misc_feature: MA Experiment 20000113 PARAMETER Experiment Name: At_42deg_Heat_cDNA_P Parameter: Tissue Value: Aerial
  misc_feature: MA Experiment ID: 20000314 Result: Down-regulated in Transcription
  misc_feature: MA Experiment 20000314 PARAMETER Experiment Name: At_14day_Shoots-Roots_Sub_P Parameter: Age (day) Value: 14
  misc_feature: MA Experiment 20000314 PARAMETER Experiment Name: At_14day_Shoots-Roots_Sub_P Parameter: Organism Value: A. thaliana
  misc_feature: MA Experiment 20000314 PARAMETER Experiment Name: At_14day_Shoots-Roots_Sub_P Parameter: Plant Line Value: WS
  misc_feature: MA Experiment 20000314 PARAMETER Experiment Name: At_14day_Shoots-Roots_Sub_P Parameter: Tissue Value: Roots vs. Whole Plant
  misc_feature: MA Experiment ID: 20000355 Result: Down-regulated in Transcription
  misc_feature: MA Experiment 20000355 PARAMETER Experiment Name: At_Siliques_Sub_P Parameter: Age (day) Value: 21
  misc_feature: MA Experiment 20000355 PARAMETER Experiment Name: At_Siliques_Sub_P Parameter: Organism Value: A. thaliana
  misc_feature: MA Experiment 20000355 PARAMETER Experiment Name: At_Siliques_Sub_P Parameter: Plant Line Value: WS
  misc_feature: MA Experiment 20000355 PARAMETER Experiment Name: At_Siliques_Sub_P Parameter: Tissue Value: Less Than 5mm Siliques vs. Whole Plant
  misc_feature: MA Experiment ID: 20000440 Result: Down-regulated in Transcription
  misc_feature: MA Experiment 20000440 PARAMETER Experiment Name: At_Closed-Flower__Sub_P Parameter: Tissue Value: Closed Flower vs. Whole Plant
  misc_feature: MA Experiment ID: 20000634 Result: Up-regulated in Transcription
  misc_feature: MA Experiment 20000634 PARAMETER Experiment Name: At_10percent_PEG_Sub_P Parameter: Age (day) Value: 12
  misc_feature: MA Experiment 20000634 PARAMETER Experiment Name: At_10percent_PEG_Sub_P Parameter: Organism Value: A. thaliana
  misc_feature: MA Experiment 20000634 PARAMETER Experiment Name: At_10percent_PEG_Sub_P Parameter: Plant Line Value: WS
  misc_feature: MA Experiment 20000634 PARAMETER Experiment Name: At_10percent_PEG_Sub_P Parameter: Timepoint (day) Value: 12
  misc_feature: MA Experiment 20000634 PARAMETER Experiment Name: At_10percent_PEG_Sub_P Parameter: Tissue Value: Whole Plant
  misc_feature: MA Experiment 20000634 PARAMETER Experiment Name: At_10percent_PEG_Sub_P Parameter: Treatment Value: 10% PEG vs. No Treatment
gattcccttccttgcttctttccccgtcgatctcgctgtgtgacctttttatttagtgactcgagattacataaaatcttctatacactggttccacatctgtttcaatcatggcggagaatggtgaagagaagttacttgctgttgcgcgtcacatagccaaaacacttggccacaatgaatccatggccgatgatatcttacagatcttctccaacttcgacggcagattttctcgcgagaagctcgccgaaggtcaagctggagaagatggatccggagtcgccacactcgagcgagctctaaattcaatagacggtcagatctctcgctttgttgctgcggaccaaccaatttgggctgatcctgcagattcagctgctttcctcgacacaatcgatgagctcgttgcaatcattagagagtggagtcccatggcttcagagaaacctatcggcatctgtctaacacgcgccgacgatatgatgcagcaagctatgttccgcatcgaagaagagttcaggtcgcttatggagcgtggagctgagtctttcggacttaatcctcagggagacgctggtgcgatgaatcatcgtttcgattctgaggaagaagaagatgatgacagagacttcaacaacggtgatgatattcagatcccagtggcacagccactcactgactacgatcttatcattgatgctctcccttcggcgacaattaacgatctacacgagatggctaagcgaatgcttggcgctggatttggtaaggcgtgttctcatgtttatagttcttgtaggagagagtttctggaagaaagtatgtcaaggttagggttacagaagctgagtattgaagaagttcataagatgccgtggcaggagttagaagatgagatagataggtggatcaaagctgctaacgttgctctaagaatcctgtttcctagcgaacgtagactctgtgaccgtgtcttcttcggtttctcctctgctgctgatctttcgtttatggaggtttgtcgtggctctaccattcagcttctgaatttcgcagacgcgattgctattggaagcagatcgcctgagagattgtttaaagtgcttgatgtgtttgagacaatgagggatttgatgcctgaatttgagtctgtgttctcggatcagttttgctcagttcttagaaatgaagcagtaactatttggaaacggttgggagaggcgataagaggtatatttatggagcttgagaatttgatccggcgagacccggctaaagctgcggttccgggcggtggtctccacccgatcactcgttatgtgatgaattacctccgtgcggcttgtagatcccggcaaaccttagagcaagtgtttgaggaaagcaatggtgtcccttctaaagattcaactctgttgactgtacagatgtcttggatcatggagcttctagagagtaacttggaagtaaaatctaaagtgtacaaagatccagctttgtgctatgtgtttctgatgaataatgggagatacattgttcagaaagtcaaagatggagacctaggattgctgttaggagatgattggattcggaaacacaatgtcaaagtgaaacaataccatatgaattatcagagaagctcatggaataagatgctggggttgctgaaggtggataatactgcagcaggcatgaacggtttggggaagaccatgaaggagaagctgaagcagttcaatattcagtttgatgagatatgtaaagtgcattcgacgtgggtagtgtttgacgagcagctgaaagaagagctaaagatctcactggccaggcttttggtaccggcatacgggagcttcatcggcaggttccaaaaccttggagacatagggaaaaacgcagacaagtacatcaagtatggagttgaggacatagaggcgcgtattaacgagctgttcaaagggactaccacgggaagaaaatgaaggtaacgaacacaaaaatagcctcttgtaacatcttcgtaacgaaccacctgctaaatgaccaatagcgaagtcttgcagggaggatttgtaacatgtattgtgtatccttttagacagttagctcagctctgttgtgttgttgtgtaatgttgtattgtaactggatcactttttttgtcattgtaaaaagagaaaacagttg

SEQ ID NO: 41398 - protein, 624 aa, Arabidopsis thaliana
  peptide (1)..(624): Ceres Seq. ID no. 12395335
  misc_feature (31)..(617): Pfam Name: Exo70 exocyst complex subunit Pfam Description: Exo70 exocyst complex subunit
  misc_feature (437)..(621): Homolog of NCBI NO: 15221040 NR Description: hypothetical protein
  misc_feature (196)..(481): Homolog of NCBI NO: 15221040 NR Description: hypothetical protein
  misc_feature (5)..(618): Homolog of NCBI NO: 19386798 NR Description: putative leucine zipper protein
  misc_feature (58)..(173): Homolog of NCBI NO: 34907920 NR Description: putative leucine zipper protein
  misc_feature (117)..(620): Homolog of NCBI NO: 34907920 NR Description: putative leucine zipper protein
  misc_feature (1)..(621): Homolog of NCBI NO: 15240761 NR Description: leucine zipper protein-like; protein id:
  misc_feature (1)..(104): Homolog of NCBI NO: 34907918 NR Description: putative leucine zipper protein
  misc_feature (58)..(620): Homolog of NCBI NO: 34907918 NR Description: putative leucine zipper protein
  misc_feature (1)..(621): Homolog of NCBI NO: 15222266 NR Description: leucine zipper protein, putative
  misc_feature (1)..(624): Homolog of NCBI NO: 100226 NR Description: tomato leucine zipper-containing protein - tomato
MAENGEEKLLAVARHIAKTLGHNESMADDILQIFSNFDGRFSREKLAEGQAGEDGSGVATLERALNSIDGQISRFVAADQPIWADPADSAAFLDTIDELVAIIREWSPMASEKPIGICLTRADDMMQQAMFRIEEEFRSLMERGAESFGLNPQGDAGAMNHRFDSEEEEDDDRDFNNGDDIQIPVAQPLTDYDLIIDALPSATINDLHEMAKRMLGAGFGKACSHVYSSCRREFLEESMSRLGLQKLSIEEVHKMPWQELEDEIDRWIKAANVALRILFPSERRLCDRVFFGFSSAADLSFMEVCRGSTIQLLNFADAIAIGSRSPERLFKVLDVFETMRDLMPEFESVFSDQFCSVLRNEAVTIWKRLGEAIRGIFMELENLIRRDPAKAAVPGGGLHPITRYVMNYLRAACRSRQTLEQVFEESNGVPSKDSTLLTVQMSWIMELLESNLEVKSKVYKDPALCYVFLMNNGRYIVQKVKDGDLGLLLGDDWIRKHNVKVKQYHMNYQRSSWNKMLGLLKVDNTAAGMNGLGKTMKEKLKQFNIQFDEICKVHSTWVVFDEQLKEELKISLARLLVPAYGSFIGRFQNLGDIGKNADKYIKYGVEDIEARINELFKGTTTGRK

SEQ ID NO: 41399 - protein, 599 aa, Arabidopsis thaliana
  peptide (1)..(599): Ceres Seq. ID no. 12395336
  misc_feature (6)..(592): Pfam Name: Exo70 exocyst complex subunit Pfam Description: Exo70 exocyst complex subunit
  misc_feature (412)..(596): Homolog of NCBI NO: 15221040 NR Description: hypothetical protein
  misc_feature (171)..(456): Homolog of NCBI NO: 15221040 NR Description: hypothetical protein
  misc_feature (1)..(593): Homolog of NCBI NO: 19386798 NR Description: putative leucine zipper protein
  misc_feature (33)..(148): Homolog of NCBI NO: 34907920 NR Description: putative leucine zipper protein
  misc_feature (92)..(595): Homolog of NCBI NO: 34907920 NR Description: putative leucine zipper protein
  misc_feature (1)..(596): Homolog of NCBI NO: 15240761 NR Description: leucine zipper protein-like; protein id:
  misc_feature (1)..(79): Homolog of NCBI NO: 34907918 NR Description: putative leucine zipper protein
  misc_feature (33)..(595): Homolog of NCBI NO: 34907918 NR Description: putative leucine zipper protein
  misc_feature (1)..(596): Homolog of NCBI NO: 15222266 NR Description: leucine zipper protein, putative
  misc_feature (1)..(599): Homolog of NCBI NO: 100226 NR Description: tomato leucine zipper-containing protein - tomato
MADDILQIFSNFDGRFSREKLAEGQAGEDGSGVATLERALNSIDGQISRFVAADQPIWADPADSAAFLDTIDELVAIIREWSPMASEKPIGICLTRADDMMQQAMFRIEEEFRSLMERGAESFGLNPQGDAGAMNHRFDSEEEEDDDRDFNNGDDIQIPVAQPLTDYDLIIDALPSATINDLHEMAKRMLGAGFGKACSHVYSSCRREFLEESMSRLGLQKLSIEEVHKMPWQELEDEIDRWIKAANVALRILFPSERRLCDRVFFGFSSAADLSFMEVCRGSTIQLLNFADAIAIGSRSPERLFKVLDVFETMRDLMPEFESVFSDQFCSVLRNEAVTIWKRLGEAIRGIFMELENLIRRDPAKAAVPGGGLHPITRYVMNYLRAACRSRQTLEQVFEESNGVPSKDSTLLTVQMSWIMELLESNLEVKSKVYKDPALCYVFLMNNGRYIVQKVKDGDLGLLLGDDWIRKHNVKVKQYHMNYQRSSWNKMLGLLKVDNTAAGMNGLGKTMKEKLKQFNIQFDEICKVHSTWVVFDEQLKEELKISLARLLVPAYGSFIGRFQNLGDIGKNADKYIKYGVEDIEARINELFKGTTTGRK

SEQ ID NO: 41400 - protein, 516 aa, Arabidopsis thaliana
  peptide (1)..(516): Ceres Seq. ID no. 12395337
  misc_feature (1)..(509): Pfam Name: Exo70 exocyst complex subunit Pfam Description: Exo70 exocyst complex subunit
  misc_feature (1)..(510): Homolog of NCBI NO: 9758920 NR Description: gb|AAD25781.1~gene_id:MXI22.10~strong similarity
  misc_feature (329)..(513): Homolog of NCBI NO: 15221040 NR Description: hypothetical protein
  misc_feature (88)..(373): Homolog of NCBI NO: 15221040 NR Description: hypothetical protein
  misc_feature (1)..(510): Homolog of NCBI NO: 19386798 NR Description: putative leucine zipper protein
  misc_feature (1)..(65): Homolog of NCBI NO: 34907920 NR Description: putative leucine zipper protein
  misc_feature (9)..(512): Homolog of NCBI NO: 34907920 NR Description: putative leucine zipper protein
  misc_feature (1)..(513): Homolog of NCBI NO: 15240761 NR Description: leucine zipper protein-like; protein id:
  misc_feature (1)..(512): Homolog of NCBI NO: 34907918 NR Description: putative leucine zipper protein
  misc_feature (1)..(513): Homolog of NCBI NO: 15222266 NR Description: leucine zipper protein, putative
  misc_feature (1)..(516): Homolog of NCBI NO: 100226 NR Description: tomato leucine zipper-containing protein - tomato
MASEKPIGICLTRADDMMQQAMFRIEEEFRSLMERGAESFGLNPQGDAGAMNHRFDSEEEEDDDRDFNNGDDIQIPVAQPLTDYDLIIDALPSATINDLHEMAKRMLGAGFGKACSHVYSSCRREFLEESMSRLGLQKLSIEEVHKMPWQELEDEIDRWIKAANVALRILFPSERRLCDRVFFGFSSAADLSFMEVCRGSTIQLLNFADAIAIGSRSPERLFKVLDVFETMRDLMPEFESVFSDQFCSVLRNEAVTIWKRLGEAIRGIFMELENLIRRDPAKAAVPGGGLHPITRYVMNYLRAACRSRQTLEQVFEESNGVPSKDSTLLTVQMSWIMELLESNLEVKSKVYKDPALCYVFLMNNGRYIVQKVKDGDLGLLLGDDWIRKHNVKVKQYHMNYQRSSWNKMLGLLKVDNTAAGMNGLGKTMKEKLKQFNIQFDEICKVHSTWVVFDEQLKEELKISLARLLVPAYGSFIGRFQNLGDIGKNADKYIKYGVEDIEARINELFKGTTTGRK

SEQ ID NO: 41401 - DNA, 1250 bp, Arabidopsis thaliana
  misc_feature (1)..(1250): Ceres Seq. ID no. 12602683
  misc_feature: MA Experiment ID: 20000171 Result: Up-regulated in Transcription
  misc_feature: MA Experiment 20000171 PARAMETER Experiment Name: At_42deg_Heat_P Parameter: Age (day) Value: 14
  misc_feature: MA Experiment 20000171 PARAMETER Experiment Name: At_42deg_Heat_P Parameter: Organism Value: A. thaliana
  misc_feature: MA Experiment 20000171 PARAMETER Experiment Name: At_42deg_Heat_P Parameter: Plant Line Value: WS
  misc_feature: MA Experiment 20000171 PARAMETER Experiment Name: At_42deg_Heat_P Parameter: Temperature (deg C) Value: 42 vs. 22
  misc_feature: MA Experiment 20000171 PARAMETER Experiment Name: At_42deg_Heat_P Parameter: Timepoint (hr) Value: 1
  misc_feature: MA Experiment 20000171 PARAMETER Experiment Name: At_42deg_Heat_P Parameter: Tissue Value: Aerial
  misc_feature: MA Experiment ID: 20000173 Result: Up-regulated in Transcription
  misc_feature: MA Experiment 20000173 PARAMETER Experiment Name: At_42deg_Heat_P Parameter: Age (day) Value: 14
  misc_feature: MA Experiment 20000173 PARAMETER Experiment Name: At_42deg_Heat_P Parameter: Organism Value: A. thaliana
  misc_feature: MA Experiment 20000173 PARAMETER Experiment Name: At_42deg_Heat_P Parameter: Plant Line Value: WS
  misc_feature: MA Experiment 20000173 PARAMETER Experiment Name: At_42deg_Heat_P Parameter: Temperature (deg C) Value: 42 vs. 22
  misc_feature: MA Experiment 20000173 PARAMETER Experiment Name: At_42deg_Heat_P Parameter: Timepoint (hr) Value: 6
  misc_feature: MA Experiment 20000173 PARAMETER Experiment Name: At_42deg_Heat_P Parameter: Tissue Value: Aerial
  misc_feature: MA Experiment ID: 20000234 Result: Up-regulated in Transcription
  misc_feature: MA Experiment 20000234 PARAMETER Experiment Name: At_Siliques_P Parameter: Age (day) Value: 21
  misc_feature: MA Experiment 20000234 PARAMETER Experiment Name: At_Siliques_P Parameter: Organism Value: A. thaliana
  misc_feature: MA Experiment 20000234 PARAMETER Experiment Name: At_Siliques_P Parameter: Plant Line Value: WS
  misc_feature: MA Experiment 20000234 PARAMETER Experiment Name: At_Siliques_P Parameter: Tissue Value: Less Than 5mm Siliques vs. Whole Plant
  misc_feature: MA Experiment ID: 20000437 Result: Up-regulated in Transcription
  misc_feature: MA Experiment 20000437 PARAMETER Experiment Name: At_Drought_P Parameter: Age (day) Value: 8
  misc_feature: MA Experiment 20000437 PARAMETER Experiment Name: At_Drought_P Parameter: Organism Value: A. thaliana
  misc_feature: MA Experiment 20000437 PARAMETER Experiment Name: At_Drought_P Parameter: Plant Line Value: WS
  misc_feature: MA Experiment 20000437 PARAMETER Experiment Name: At_Drought_P Parameter: Timepoint (hr) Value: 24
  misc_feature: MA Experiment 20000437 PARAMETER Experiment Name: At_Drought_P Parameter: Tissue Value: Whole Plant
  misc_feature: MA Experiment 20000437 PARAMETER Experiment Name: At_Drought_P Parameter: Treatment Value: Drought vs. No Drought
  misc_feature: MA Experiment ID: 20000443 Result: Up-regulated in Transcription
  misc_feature: MA Experiment 20000443 PARAMETER Experiment Name: At_1uM_BR-BRZ__P Parameter: Tissue Value: Shoot Apices
  misc_feature: MA Experiment 20000443 PARAMETER Experiment Name: At_1uM_BR-BRZ__P Parameter: Treatment Value: 1uM BRZ vs. No Treatment
  misc_feature: MA Experiment ID: 20000794 Result: Down-regulated in Transcription
  misc_feature: MA Experiment 20000794 PARAMETER Experiment Name: At_Petals_P Parameter: Age (day) Value: 23-25 days
  misc_feature: MA Experiment 20000794 PARAMETER Experiment Name: At_Petals_P Parameter: Plant Line Value: WS
  misc_feature: MA Experiment 20000794 PARAMETER Experiment Name: At_Petals_P Parameter: Tissue Value: Petals vs. Whole plant
  misc_feature: MA Experiment ID: 20001247 Result: Down-regulated in Transcription
  misc_feature: MA Experiment 20001247 PARAMETER Experiment Name: At_Far-red-induction_P Parameter: Age (day) Value: 7
  misc_feature: MA Experiment 20001247 PARAMETER Experiment Name: At_Far-red-induction_P Parameter: Light Value: Far-red vs. White
  misc_feature: MA Experiment 20001247 PARAMETER Experiment Name: At_Far-red-induction_P Parameter: Organism Value: A. thaliana
  misc_feature: MA Experiment 20001247 PARAMETER Experiment Name: At_Far-red-induction_P Parameter: Plant Line Value: Columbia
  misc_feature: MA Experiment 20001247 PARAMETER Experiment Name: At_Far-red-induction_P Parameter: Timepoint (hr) Value: 1
  misc_feature: MA Experiment 20001247 PARAMETER Experiment Name: At_Far-red-induction_P Parameter: Tissue Value: Whole Plant
  misc_feature: MA Experiment ID: 20001248 Result: Down-regulated in Transcription
  misc_feature: MA Experiment 20001248 PARAMETER Experiment Name: At_Far-red-induction_P Parameter: Age (day) Value: 7
  misc_feature: MA Experiment 20001248 PARAMETER Experiment Name: At_Far-red-induction_P Parameter: Light Value: Far-red vs. White
  misc_feature: MA Experiment 20001248 PARAMETER Experiment Name: At_Far-red-induction_P Parameter: Organism Value: A. thaliana
  misc_feature: MA Experiment 20001248 PARAMETER Experiment Name: At_Far-red-induction_P Parameter: Plant Line Value: Columbia
  misc_feature: MA Experiment 20001248 PARAMETER Experiment Name: At_Far-red-induction_P Parameter: Timepoint (hr) Value: 4
  misc_feature: MA Experiment 20001248 PARAMETER Experiment Name: At_Far-red-induction_P Parameter: Tissue Value: Whole Plant
  misc_feature: MA Experiment ID: 20001450 Result: Down-regulated in Transcription
  misc_feature: MA Experiment 20001450 PARAMETER Experiment Name: At_Far-red-induction_P Parameter: Age (day) Value: 7
  misc_feature: MA Experiment 20001450 PARAMETER Experiment Name: At_Far-red-induction_P Parameter: Light Value: Far-red vs. White
  misc_feature: MA Experiment 20001450 PARAMETER Experiment Name: At_Far-red-induction_P Parameter: Organism Value: A. thaliana
  misc_feature: MA Experiment 20001450 PARAMETER Experiment Name: At_Far-red-induction_P Parameter: Plant Line Value: Columbia
  misc_feature: MA Experiment 20001450 PARAMETER Experiment Name: At_Far-red-induction_P Parameter: Timepoint (hr) Value: 8
  misc_feature: MA Experiment 20001450 PARAMETER Experiment Name: At_Far-red-induction_P Parameter: Tissue Value: Whole Plant
  misc_feature: MA Experiment ID: 20001557 Result: Up-regulated in Transcription
  misc_feature: MA Experiment 20001557 PARAMETER Experiment Name: At_Drought_Soil_Dry_P Parameter: Age (day) Value: 27
  misc_feature: MA Experiment 20001557 PARAMETER Experiment Name: At_Drought_Soil_Dry_P Parameter: Organism Value: A. thaliana
  misc_feature: MA Experiment 20001557 PARAMETER Experiment Name: At_Drought_Soil_Dry_P Parameter: Plant Line Value: WS
  misc_feature: MA Experiment 20001557 PARAMETER Experiment Name: At_Drought_Soil_Dry_P Parameter: Post Timepoint (hr) Value: 3
  misc_feature: MA Experiment 20001557 PARAMETER Experiment Name: At_Drought_Soil_Dry_P Parameter: Post-Treatment Value: Re-Water vs. No Drought
  misc_feature: MA Experiment 20001557 PARAMETER Experiment Name: At_Drought_Soil_Dry_P Parameter: Timepoint (day) Value: 13
  misc_feature: MA Experiment 20001557 PARAMETER Experiment Name: At_Drought_Soil_Dry_P Parameter: Treatment Value: Drought vs. No Drought
  misc_feature: MA Experiment ID: 20001560 Result: Up-regulated in Transcription
  misc_feature: MA Experiment 20001560 PARAMETER Experiment Name: At_Drought_Soil_Dry_P Parameter: Age (day) Value: 28
  misc_feature: MA Experiment 20001560 PARAMETER Experiment Name: At_Drought_Soil_Dry_P Parameter: Organism Value: A. thaliana
  misc_feature: MA Experiment 20001560 PARAMETER Experiment Name: At_Drought_Soil_Dry_P Parameter: Plant Line Value: WS
  misc_feature: MA Experiment 20001560 PARAMETER Experiment Name: At_Drought_Soil_Dry_P Parameter: Post Timepoint (hr) Value: None
  misc_feature: MA Experiment 20001560 PARAMETER Experiment Name: At_Drought_Soil_Dry_P Parameter: Post-Treatment Value: None
  misc_feature: MA Experiment 20001560 PARAMETER Experiment Name: At_Drought_Soil_Dry_P Parameter: Timepoint (day) Value: 14
  misc_feature: MA Experiment 20001560 PARAMETER Experiment Name: At_Drought_Soil_Dry_P Parameter: Treatment Value: Drought vs. No Drought
  misc_feature: MA Experiment ID: 20001905 Result: Up-regulated in Transcription
  misc_feature: MA Experiment 20001905 PARAMETER Experiment Name: At_Drought_Reproduction_P Parameter: Age (day) Value: 40
  misc_feature: MA Experiment 20001905 PARAMETER Experiment Name: At_Drought_Reproduction_P Parameter: Organism Value: A. thaliana
  misc_feature: MA Experiment 20001905 PARAMETER Experiment Name: At_Drought_Reproduction_P Parameter: Plant Line Value: WS
  misc_feature: MA Experiment 20001905 PARAMETER Experiment Name: At_Drought_Reproduction_P Parameter: Timepoint (day) Value: 10
  misc_feature: MA Experiment 20001905 PARAMETER Experiment Name: At_Drought_Reproduction_P Parameter: Tissue Value: Rosettes
  misc_feature: MA Experiment 20001905 PARAMETER Experiment Name: At_Drought_Reproduction_P Parameter: Treatment Value: Drought vs. No Drought
aaaaccacactcttcttcgtcttctccgttctctctatatttctcctcaccttcaacgcagctttctcgttctcgtctcagatcgtgttactaacaaacaccgtttctccggcgaaaagctctctgttactaaaaactcacagaacctaaaaatggcggatcaagctatgacggatcaagatcaaggagctgttactctctacagcggcacagccattaccgacgcgaagaaaaaccatccgttctctgttaaggtcggattagctcaggtacttcgtggcggcgccattgttgaagtttcctcggttaaccaagctaagctcgctgaatccgccggcgcatgttctgtaatcgtctcagatccggttcgatctcgcggcggtgttcgtcgtatgccggatccggttctcatcaaagaggtaaaacgagctgtgtctgtacctgtgatggcacgagctcgcgttggtcattttgttgaggctcagatcttggaatctcttgcggntgattacattgacgagagcgagattatctctgttgcggatgatgatcatttcatcaacaaacataatttccgatctccgttcatttgtgggtgccggggatacaaggagaagctttgaggagaatcagaagaaaggtgctgctatgattaggatccaaggagatttaaccgcaacaggtaaacaattgcagagactgtgaagaacgttaggtcattgatgggtgaagttagagtcttgaacaacatggatgatgatgaggtgttcacgtttgctaagaagatttcagcaccgtatgatcttgtggctcagactaagcagatgggtagggttccggttgttcagtttgcatcaggtgggatcacgactcctgctgatgcagctttgatgatgcagctaggttgtgatggggtttttgtgggttctgaggtttttgatggtcctgatccgtttaagaaacttaggagcattgttcaagctgttcaacattacaatgatcctcatgtgttggctgagatgagttctggattggagaatgcaatggagagcttaaatgttcgtggtgacaggattcaagactttggccaaggcagtgtttgatgaaaaggttcgaagctgcaaactttttgggacttctaaagtcgtaatcttttttggttttgagtctcaaaatatcggttgttttttgttaatgctggtgcatatgatccgtttggtttaatcgaaacttgcaacaactaaaacctc

SEQ ID NO: 41402 - protein, 206 aa, Arabidopsis thaliana
  peptide (1)..(206): Ceres Seq. ID no. 12602684
  misc_feature (80)..(206): Pfam Name: SOR/SNZ family Pfam Description: SOR/SNZ family
  misc_feature (81)..(206): Homolog of NCBI NO: 22970419 NR Description: hypothetical protein [Chloroflexus aurantiacus]
  misc_feature (56)..(206): Homolog of NCBI NO: 37530308 NR Description: putative pyridoxine/pyridoxal 5-phosphate
  misc_feature (62)..(206): Homolog of NCBI NO: 15224470 NR Description: similar to SOR1 from the fungus Cercospora
  misc_feature (62)..(206): Homolog of NCBI NO: 13310484 NR Description: Sor-like protein [Ginkgo biloba]
  misc_feature (56)..(206): Homolog of NCBI NO: 34394152 NR Description: putative ethylene-inducible protein
  misc_feature (62)..(206): Homolog of NCBI NO: 2501578 NR Description: ETHYLENE-INDUCIBLE PROTEIN HEVER
  misc_feature (56)..(206): Homolog of NCBI NO: 10719739 NR Description: putative pyridoxine biosynthetic enzyme
  misc_feature (62)..(206): Homolog of NCBI NO: 21617922 NR Description: pyridoxine biosynthesis protein-like [Arabidopsis
  misc_feature (62)..(206): Homolog of NCBI NO: 15240972 NR Description: pyridoxine biosynthesis protein - like
  misc_feature (51)..(206): Homolog of NCBI NO: 15233273 NR Description: putative ethylene-inducible protein
  misc_feature (168)..(168): Xaa is any aa, unknown or other
NHTLLRLLRSLYISPHLQRSFLVLVSDRVTNKHRFSGEKLSVTKNSQNLKMADQAMTDQDQGAVTLYSGTAITDAKKNHPFSVKVGLAQVLRGGAIVEVSSVNQAKLAESAGACSVIVSDPVRSRGGVRRMPDPVLIKEVKRAVSVPVMARARVGHFVEAQILESLAXDYIDESEIISVADDDHFINKHNFRSPFICGCRGYKEKL

SEQ ID NO: 41403 - protein, 156 aa, Arabidopsis thaliana
  peptide (1)..(156): Ceres Seq. ID no. 12602685
  misc_feature (30)..(156): Pfam Name: SOR/SNZ family Pfam Description: SOR/SNZ family
  misc_feature (31)..(156): Homolog of NCBI NO: 22970419 NR Description: hypothetical protein [Chloroflexus aurantiacus]
  misc_feature (6)..(156): Homolog of NCBI NO: 37530308 NR Description: putative pyridoxine/pyridoxal 5-phosphate
  misc_feature (12)..(156): Homolog of NCBI NO: 15224470 NR Description: similar to SOR1 from the fungus Cercospora
  misc_feature (12)..(156): Homolog of NCBI NO: 13310484 NR Description: Sor-like protein [Ginkgo biloba]
  misc_feature (6)..(156): Homolog of NCBI NO: 34394152 NR Description: putative ethylene-inducible protein
  misc_feature (12)..(156): Homolog of NCBI NO: 2501578 NR Description: ETHYLENE-INDUCIBLE PROTEIN HEVER
  misc_feature (6)..(156): Homolog of NCBI NO: 10719739 NR Description: putative pyridoxine biosynthetic enzyme
  misc_feature (12)..(156): Homolog of NCBI NO: 21617922 NR Description: pyridoxine biosynthesis protein-like [Arabidopsis
  misc_feature (12)..(156): Homolog of NCBI NO: 15240972 NR Description: pyridoxine biosynthesis protein - like
  misc_feature (1)..(156): Homolog of NCBI NO: 15233273 NR Description: putative ethylene-inducible protein
  misc_feature (118)..(118): Xaa is any aa, unknown or other
MADQAMTDQDQGAVTLYSGTAITDAKKNHPFSVKVGLAQVLRGGAIVEVSSVNQAKLAESAGACSVIVSDPVRSRGGVRRMPDPVLIKEVKRAVSVPVMARARVGHFVEAQILESLAXDYIDESEIISVADDDHFINKHNFRSPFICGCRGYKEKL

SEQ ID NO: 41404 - protein, 151 aa, Arabidopsis thaliana
  peptide (1)..(151): Ceres Seq. ID no. 12602686
  misc_feature (25)..(151): Pfam Name: SOR/SNZ family Pfam Description: SOR/SNZ family
  misc_feature (26)..(151): Homolog of NCBI NO: 22970419 NR Description: hypothetical protein [Chloroflexus aurantiacus]
  misc_feature (1)..(151): Homolog of NCBI NO: 37530308 NR Description: putative pyridoxine/pyridoxal 5-phosphate
  misc_feature (7)..(151): Homolog of NCBI NO: 15224470 NR Description: similar to SOR1 from the fungus Cercospora
  misc_feature (7)..(151): Homolog of NCBI NO: 13310484 NR Description: Sor-like protein [Ginkgo biloba]
  misc_feature (1)..(151): Homolog of NCBI NO: 34394152 NR Description: putative ethylene-inducible protein
  misc_feature (7)..(151): Homolog of NCBI NO: 2501578 NR Description: ETHYLENE-INDUCIBLE PROTEIN HEVER
  misc_feature (1)..(151): Homolog of NCBI NO: 10719739 NR Description: putative pyridoxine biosynthetic enzyme
  misc_feature (7)..(151): Homolog of NCBI NO: 21617922 NR Description: pyridoxine biosynthesis protein-like [Arabidopsis
  misc_feature (7)..(151): Homolog of NCBI NO: 15240972 NR Description: pyridoxine biosynthesis protein - like
  misc_feature (1)..(151): Homolog of NCBI NO: 15233273 NR Description: putative ethylene-inducible protein
  misc_feature (113)..(113): Xaa is any aa, unknown or other
MTDQDQGAVTLYSGTAITDAKKNHPFSVKVGLAQVLRGGAIVEVSSVNQAKLAESAGACSVIVSDPVRSRGGVRRMPDPVLIKEVKRAVSVPVMARARVGHFVEAQILESLAXDYIDESEIISVADDDHFINKHNFRSPFICGCRGYKEKL

SEQ ID NO: 41405 - DNA, 1398 bp, Arabidopsis thaliana
  misc_feature (1)..(1398): Ceres Seq. ID no. 12329358
  misc_feature: MA Experiment ID: 108573 Result: Up-regulated in Transcription
  misc_feature: MA Experiment 108573 PARAMETER Experiment Name: At_Drought_cDNA_P Parameter: Timepoint (hr) Value: 6
  misc_feature: MA Experiment 108573 PARAMETER Experiment Name: At_Drought_cDNA_P Parameter: Tissue Value: Aerial
  misc_feature: MA Experiment 108573 PARAMETER Experiment Name: At_Drought_cDNA_P Parameter: Treatment Value: Drought vs. No Drought
  misc_feature: MA Experiment ID: 20000069 Result: Up-regulated in Transcription
  misc_feature: MA Experiment 20000069 PARAMETER Experiment Name: At_100uM_ABA_Mutants_cDNA_P Parameter: Plant Line Value: CS23
  misc_feature: MA Experiment 20000069 PARAMETER Experiment Name: At_100uM_ABA_Mutants_cDNA_P Parameter: Timepoint (hr) Value: 6
  misc_feature: MA Experiment 20000069 PARAMETER Experiment Name: At_100uM_ABA_Mutants_cDNA_P Parameter: Tissue Value: Aerial
  misc_feature: MA Experiment 20000069 PARAMETER Experiment Name: At_100uM_ABA_Mutants_cDNA_P Parameter: Treatment Value: 100uM ABA vs. No Treatment
  misc_feature: MA Experiment ID: 20000070 Result: Up-regulated in Transcription
  misc_feature: MA Experiment 20000070 PARAMETER Experiment Name: At_100uM_ABA_Mutants_cDNA_P Parameter: Plant Line Value: CS24
  misc_feature: MA Experiment 20000070 PARAMETER Experiment Name: At_100uM_ABA_Mutants_cDNA_P Parameter: Timepoint (hr) Value: 6
  misc_feature: MA Experiment 20000070 PARAMETER Experiment Name: At_100uM_ABA_Mutants_cDNA_P Parameter: Tissue Value: Aerial
  misc_feature: MA Experiment 20000070 PARAMETER Experiment Name: At_100uM_ABA_Mutants_cDNA_P Parameter: Treatment Value: 100uM ABA vs. No Treatment
  misc_feature: MA Experiment ID: 20000071 Result: Up-regulated in Transcription
  misc_feature: MA Experiment 20000071 PARAMETER Experiment Name: At_100uM_ABA_Mutants_cDNA_P Parameter: Plant Line Value: CS8104
  misc_feature: MA Experiment 20000071 PARAMETER Experiment Name: At_100uM_ABA_Mutants_cDNA_P Parameter: Timepoint (hr) Value: 6
  misc_feature: MA Experiment 20000071 PARAMETER Experiment Name: At_100uM_ABA_Mutants_cDNA_P Parameter: Tissue Value: Aerial
  misc_feature: MA Experiment 20000071 PARAMETER Experiment Name: At_100uM_ABA_Mutants_cDNA_P Parameter: Treatment Value: 100uM ABA vs. No Treatment
  misc_feature: MA Experiment ID: 20000090 Result: Up-regulated in Transcription
  misc_feature: MA Experiment ID: 20000113 Result: Down-regulated in Transcription
  misc_feature: MA Experiment 20000113 PARAMETER Experiment Name: At_42deg_Heat_cDNA_P Parameter: Temperature (deg C) Value: 42 vs. 22
  misc_feature: MA Experiment 20000113 PARAMETER Experiment Name: At_42deg_Heat_cDNA_P Parameter: Timepoint (hr) Value: 8
  misc_feature: MA Experiment 20000113 PARAMETER Experiment Name: At_42deg_Heat_cDNA_P Parameter: Tissue Value: Aerial
  misc_feature: MA Experiment ID: 20000117 Result: Up-regulated in Transcription
  misc_feature: MA Experiment 20000117 PARAMETER Experiment Name: At_100uM_ABA_Mutants_cDNA_P Parameter: Plant Line Value: Columbia
  misc_feature: MA Experiment 20000117 PARAMETER Experiment Name: At_100uM_ABA_Mutants_cDNA_P Parameter: Timepoint (hr) Value: 6
  misc_feature: MA Experiment 20000117 PARAMETER Experiment Name: At_100uM_ABA_Mutants_cDNA_P Parameter: Tissue Value: Aerial
  misc_feature: MA Experiment 20000117 PARAMETER Experiment Name: At_100uM_ABA_Mutants_cDNA_P Parameter: Treatment Value: 100uM ABA vs. No Treatment
  misc_feature: MA Experiment ID: 20000179 Result: Up-regulated in Transcription
  misc_feature: MA Experiment 20000179 PARAMETER Experiment Name: At_Germinating_Seeds_P Parameter: Age (hr) Value: 6 vs. 0
  misc_feature: MA Experiment 20000179 PARAMETER Experiment Name: At_Germinating_Seeds_P Parameter: Tissue Value: Germinating Seeds
  misc_feature: MA Experiment ID: 20000184 Result: Down-regulated in Transcription
  misc_feature: MA Experiment 20000184 PARAMETER Experiment Name: At_Shoots__P Parameter: Age (day) Value: 7
  misc_feature: MA Experiment 20000184 PARAMETER Experiment Name: At_Shoots__P Parameter: Tissue Value: Shoots vs. Whole Plant
  misc_feature: MA Experiment ID: 20000264 Result: Down-regulated in Transcription
  misc_feature: MA Experiment 20000264 PARAMETER Experiment Name: At_Open_Flower_P Parameter: Age (day) Value: 21
  misc_feature: MA Experiment 20000264 PARAMETER Experiment Name: At_Open_Flower_P Parameter: Plant Line Value: WS
  misc_feature: MA Experiment 20000264 PARAMETER Experiment Name: At_Open_Flower_P Parameter: Tissue Value: Open Flower vs. Whole Plant
  misc_feature: MA Experiment ID: 20000265 Result: Down-regulated in Transcription
  misc_feature: MA Experiment 20000265 PARAMETER Experiment Name: At_Open_Flower_P Parameter: Age (day) Value: 21
  misc_feature: MA Experiment 20000265 PARAMETER Experiment Name: At_Open_Flower_P Parameter: Plant Line Value: WS
  misc_feature: MA Experiment 20000265 PARAMETER Experiment Name: At_Open_Flower_P Parameter: Tissue Value: Closed Flower vs. Whole Plant
  misc_feature: MA Experiment ID: 20000286 Result: Down-regulated in Transcription
  misc_feature: MA Experiment 20000286 PARAMETER Experiment Name: At_Open_Flower_P Parameter: Age (day) Value: 21
  misc_feature: MA Experiment 20000286 PARAMETER Experiment Name: At_Open_Flower_P Parameter: Plant Line Value: WS
  misc_feature: MA Experiment 20000286 PARAMETER Experiment Name: At_Open_Flower_P Parameter: Tissue Value: Half Open vs. Whole Plant
  misc_feature: MA Experiment ID: 20000438 Result: Down-regulated in Transcription
  misc_feature: MA Experiment 20000438 PARAMETER Experiment Name: At_Shoots__P Parameter: Age (day) Value: 14
  misc_feature: MA Experiment 20000438 PARAMETER Experiment Name: At_Shoots__P Parameter: Tissue Value: Shoots vs. Whole Plant
  misc_feature: MA Experiment ID: 20000794 Result: Down-regulated in Transcription
  misc_feature: MA Experiment 20000794 PARAMETER Experiment Name: At_Petals_P Parameter: Age (day) Value: 23-25 days
  misc_feature: MA Experiment 20000794 PARAMETER Experiment Name: At_Petals_P Parameter: Plant Line Value: WS
  misc_feature: MA Experiment 20000794 PARAMETER Experiment Name: At_Petals_P Parameter: Tissue Value: Petals vs. Whole plant
  misc_feature: MA Experiment ID: 20001451 Result: Down-regulated in Transcription
  misc_feature: MA Experiment 20001451 PARAMETER Experiment Name: At_Far-red-induction_P Parameter: Age (day) Value: 7
  misc_feature: MA Experiment 20001451 PARAMETER Experiment Name: At_Far-red-induction_P Parameter: Light Value: Far-red vs. White
  misc_feature: MA Experiment 20001451 PARAMETER Experiment Name: At_Far-red-induction_P Parameter: Organism Value: A. thaliana
  misc_feature: MA Experiment 20001451 PARAMETER Experiment Name: At_Far-red-induction_P Parameter: Plant Line Value: Columbia
  misc_feature: MA Experiment 20001451 PARAMETER Experiment Name: At_Far-red-induction_P Parameter: Timepoint (hr) Value: 24
  misc_feature: MA Experiment 20001451 PARAMETER Experiment Name: At_Far-red-induction_P Parameter: Tissue Value: Whole Plant
  misc_feature: MA Experiment ID: 20001905 Result: Up-regulated in Transcription
  misc_feature: MA Experiment 20001905 PARAMETER Experiment Name: At_Drought_Reproduction_P Parameter: Age (day) Value: 40
  misc_feature: MA Experiment 20001905 PARAMETER Experiment Name: At_Drought_Reproduction_P Parameter: Organism Value: A. thaliana
  misc_feature: MA Experiment 20001905 PARAMETER Experiment Name: At_Drought_Reproduction_P Parameter: Plant Line Value: WS
  misc_feature: MA Experiment 20001905 PARAMETER Experiment Name: At_Drought_Reproduction_P Parameter: Timepoint (day) Value: 10
  misc_feature: MA Experiment 20001905 PARAMETER Experiment Name: At_Drought_Reproduction_P Parameter: Tissue Value: Rosettes
  misc_feature: MA Experiment 20001905 PARAMETER Experiment Name: At_Drought_Reproduction_P Parameter: Treatment Value: Drought vs. No Drought
atctaacttttccagataatatattcaaaattttacagagaggaagaagaagttcccgacacttgtgagagactataaaactatacgatctcctcctctcgctctcttcagatcacaaagttttcgtttttagggttctctcatcgatctcggtttgtgatcttcttcttcatcaatggcgtctagtgataaacaaacaagcccaaagcctccaccttcaccgtctcctctccgtaattccaagttttgtcagtcaaatatgagaattttgatctcaggaggagctggattcattggctctcaccttgttgataagctgatggaaaacgaaaagaatgaggtgattgttgctgataactatttcaccggttcaaaggacaatctcaagaagtggattggtcatccgagatttgaggcttatccgtcatgatgtcacagagccacttctgatcgaggttgatcagatttaccatcttgcatgtcctgcttctcctatcttctacaagtacaaccctgtgaagacaatcaagaccaatgtcattggcacactgaacatgctaggtcttgccaagcgtgttggagcaaggattttgcttacctcaacctcggaggtatatggagatcctcttatccatccccagcccgagagctattggggaaatgtcaacccaattggtgttaggagctgttatgatgaaggcaagcgtgttgctgagaccttgatgtttgactaccacaggcagcatggaattgaaatccgcattgccagaatcttcaacacttatggtccacgcatgaacattgatgatggacgtgttgtaagcaacttcattgctcaagcactccgtggtgaggcattgactgttcagaaaccagggacacagactcgcagtttctgttatgtatctgacatggttgatggacttatgcgcctcatggaaggagatgacactggtcccatcaacatcggtaacccaggtgagtttacaatggtggagttggctgagacagtgaaagagctgattaacccgagcatagagataaagatggttgagaacacaccggatgatccaagacagaggaagccatgacatcacaaaggctataagaagttttgggatgggaaccaaaggtgaagcttcgtgaaggcctgccccttatggaagaagacttcaggctaaggctcggagtccacaagaactaaaactccatcaccgatgatcacacgcaaacgtgaatgcactacataacccagttctacacttttcatattccttggtgcaagtggtttgtttcataaaatatgtttctactttccacagtcagaaattattcctagagaaaaataaagattatgaacgaatgctttttatatttaaggaagataaaaattacttt

SEQ ID NO: 41406 - protein, 178 aa, Arabidopsis thaliana
  peptide (1)..(178): Ceres Seq. ID no. 12329359
  misc_feature (1)..(178): Pfam Name: NAD dependent epimerase/dehydratase family Pfam Description: NAD dependent epimerase/dehydratase family
  misc_feature (1)..(178): Homolog of NCBI NO: 15227109 NR Description: putative dTDP-glucose 4-6-dehydratase; protein
  misc_feature (1)..(178): Homolog of NCBI NO: 2351580 NR Description: thymidine diphospho-glucose 4-6-dehydratase
  misc_feature (1)..(178): Homolog of NCBI NO: 11121508 NR Description: d-TDP-glucose dehydratase [Phragmites australis]
  misc_feature (1)..(178): Homolog of NCBI NO: 18447934 NR Description: UDP-glucuronic acid decarboxylase
  misc_feature (1)..(178): Homolog of NCBI NO: 11270075 NR Description: dTDPglucose 4,6-dehydratase (EC 4.2.1.46)
  misc_feature (1)..(178): Homolog of NCBI NO: 13591616 NR Description: UDP-D-glucuronate carboxy-lyase [Pisum sativum]
  misc_feature (1)..(178): Homolog of NCBI NO: 15226950 NR Description: putative nucleotide-sugar dehydratase
  misc_feature (1)..(178): Homolog of NCBI NO: 14030703 NR Description: AT5g59290/mnc17_180 [Arabidopsis thaliana]
  misc_feature (1)..(178): Homolog of NCBI NO: 15237853 NR Description: dTDP-glucose 4-6-dehydratase - like protein
  misc_feature (1)..(178): Homolog of NCBI NO: 15231432 NR Description: dTDP-glucose 4-6-dehydratases-like protein
MLGLAKRVGARILLTSTSEVYGDPLIHPQPESYWGNVNPIGVRSCYDEGKRVAETLMFDYHRQHGIEIRIARIFNTYGPRMNIDDGRVVSNFIAQALRGEALTVQKPGTQTRSFCYVSDMVDGLMRLMEGDDTGPINIGNPGEFTMVELAETVKELINPSIEIKMVENTPDDPRQRKP

SEQ ID NO: 41407 - protein, 122 aa, Arabidopsis thaliana
  peptide (1)..(122): Ceres Seq. ID no. 12329360
  misc_feature (1)..(122): Pfam Name: NAD dependent epimerase/dehydratase family Pfam Description: NAD dependent epimerase/dehydratase family
  misc_feature (1)..(122): Homolog of NCBI NO: 15227109 NR Description: putative dTDP-glucose 4-6-dehydratase; protein
  misc_feature (1)..(122): Homolog of NCBI NO: 2351580 NR Description: thymidine diphospho-glucose 4-6-dehydratase
  misc_feature (1)..(122): Homolog of NCBI NO: 11121508 NR Description: d-TDP-glucose dehydratase [Phragmites australis]
  misc_feature (1)..(122): Homolog of NCBI NO: 18447934 NR Description: UDP-glucuronic acid decarboxylase
  misc_feature (1)..(122): Homolog of NCBI NO: 11270075 NR Description: dTDPglucose 4,6-dehydratase (EC 4.2.1.46)
  misc_feature (1)..(122): Homolog of NCBI NO: 13591616 NR Description: UDP-D-glucuronate carboxy-lyase [Pisum sativum]
  misc_feature (1)..(122): Homolog of NCBI NO: 15226950 NR Description: putative nucleotide-sugar dehydratase
  misc_feature (1)..(122): Homolog of NCBI NO: 14030703 NR Description: AT5g59290/mnc17_180 [Arabidopsis thaliana]
  misc_feature (1)..(122): Homolog of NCBI NO: 15237853 NR Description: dTDP-glucose 4-6-dehydratase - like protein
  misc_feature (1)..(122): Homolog of NCBI NO: 15231432 NR Description: dTDP-glucose 4-6-dehydratases-like protein
MFDYHRQHGIEIRIARIFNTYGPRMNIDDGRVVSNFIAQALRGEALTVQKPGTQTRSFCYVSDMVDGLMRLMEGDDTGPINIGNPGEFTMVELAETVKELINPSIEIKMVENTPDDPRQRKP

SEQ ID NO: 41408 - protein, 98 aa, Arabidopsis thaliana
  peptide (1)..(98): Ceres Seq. ID no. 12329361
  misc_feature (1)..(98): Pfam Name: NAD dependent epimerase/dehydratase family Pfam Description: NAD dependent epimerase/dehydratase family
  misc_feature (1)..(98): Homolog of NCBI NO: 15227109 NR Description: putative dTDP-glucose 4-6-dehydratase; protein
  misc_feature (1)..(98): Homolog of NCBI NO: 2351580 NR Description: thymidine diphospho-glucose 4-6-dehydratase
  misc_feature (1)..(98): Homolog of NCBI NO: 11121508 NR Description: d-TDP-glucose dehydratase [Phragmites australis]
  misc_feature (1)..(98): Homolog of NCBI NO: 18447934 NR Description: UDP-glucuronic acid decarboxylase
  misc_feature (1)..(98): Homolog of NCBI NO: 11270075 NR Description: dTDPglucose 4,6-dehydratase (EC 4.2.1.46)
  misc_feature (1)..(98): Homolog of NCBI NO: 13591616 NR Description: UDP-D-glucuronate carboxy-lyase [Pisum sativum]
  misc_feature (1)..(98): Homolog of NCBI NO: 15226950 NR Description: putative nucleotide-sugar dehydratase
  misc_feature (1)..(98): Homolog of NCBI NO: 14030703 NR Description: AT5g59290/mnc17_180 [Arabidopsis thaliana]
  misc_feature (1)..(98): Homolog of NCBI NO: 15237853 NR Description: dTDP-glucose 4-6-dehydratase - like protein
  misc_feature (1)..(98): Homolog of NCBI NO: 15231432 NR Description: dTDP-glucose 4-6-dehydratases-like protein
MNIDDGRVVSNFIAQALRGEALTVQKPGTQTRSFCYVSDMVDGLMRLMEGDDTGPINIGNPGEFTMVELAETVKELINPSIEIKMVENTPDDPRQRKP

SEQ ID NO: 41409 - DNA, 1401 bp, Arabidopsis thaliana
  misc_feature (1)..(1401): Ceres Seq. ID no. 12574498
  misc_feature: MA Experiment ID: 20000306 Result: Up-regulated in Transcription
  misc_feature: MA Experiment 20000306 PARAMETER Experiment Name: At_Germinating_Seeds_Sub_P Parameter: Age (hr) Value: 6 vs. 0
  misc_feature: MA Experiment 20000306 PARAMETER Experiment Name: At_Germinating_Seeds_Sub_P Parameter: Organism Value: A. thaliana
  misc_feature: MA Experiment 20000306 PARAMETER Experiment Name: At_Germinating_Seeds_Sub_P Parameter: Plant Line Value: WS
  misc_feature: MA Experiment 20000306 PARAMETER Experiment Name: At_Germinating_Seeds_Sub_P Parameter: Tissue Value: Germinating Seeds
  misc_feature: MA Experiment ID: 20000307 Result: Up-regulated in Transcription
  misc_feature: MA Experiment 20000307 PARAMETER Experiment Name: At_Germinating_Seeds_Sub_P Parameter: Age (hr) Value: 24 vs. 0
  misc_feature: MA Experiment 20000307 PARAMETER Experiment Name: At_Germinating_Seeds_Sub_P Parameter: Organism Value: A. thaliana
  misc_feature: MA Experiment 20000307 PARAMETER Experiment Name: At_Germinating_Seeds_Sub_P Parameter: Plant Line Value: WS
  misc_feature: MA Experiment 20000307 PARAMETER Experiment Name: At_Germinating_Seeds_Sub_P Parameter: Tissue Value: Germinating Seeds
  misc_feature: MA Experiment ID: 20000355 Result: Down-regulated in Transcription
  misc_feature: MA Experiment 20000355 PARAMETER Experiment Name: At_Siliques_Sub_P Parameter: Age (day) Value: 21
  misc_feature: MA Experiment 20000355 PARAMETER Experiment Name: At_Siliques_Sub_P Parameter: Organism Value: A. thaliana
  misc_feature: MA Experiment 20000355 PARAMETER Experiment Name: At_Siliques_Sub_P Parameter: Plant Line Value: WS
  misc_feature: MA Experiment 20000355 PARAMETER Experiment Name: At_Siliques_Sub_P Parameter: Tissue Value: Less Than 5mm Siliques vs. Whole Plant
aaagaaccagagagaagccatgtctgtgaaactaaacctatcttcctcaatcctattgattctctttgcggcggcggcgagtaaagagatcggattcgatgaatctaatccaatcaaaatggtctccgacaatctccatgagcttgaagacaccgtcgtccagatcctaggacagtcccgtcatgttctatccttttctcgcttcactcacaggtatgggaagaagtatcagagtgtggaggagatgaagttaagattctctgtttttaaggagaatcttgatttaatcagatccactaataagaaaggcttatcctataaactctctcttaatcagtttgctgacttgacatggcaagagtttcaaagatacaagcttggagctgctcaaaactgttctgctactttaaagggtagccacaagatcactgaagctacagttccagacacaaaagattggagagaagatggtattgttagccctgtgaaagaacagggacattgtggatcttgttggacatttagcacaactggagctcttgaagcagcttaccatcaagcatttggaaaaggaatatctttgtccgagcaacagcttgtggattgtgctggtactttcaataactttggttgtcatggtggacttccttctcaagcctttgaatacattaaatacaacggtgggctcgacacggaggaggcttatccttacaccggaaaagacggtggctgcaaattttcagcgaaaaacatcggtgtacaagtccgtgactctgtcaacattaccctgggtgcagaagatgaactgaagcacgcggtcgggttggtaaggccagtgagtgtggcgtttgaggttgtacatgaattcaggttttataagaagggagtttttactagcaatacatgtggtaacactccaatggatgtaaaccatgcagtgttagcagttggttatggagttgaagacgacgtcccgtactggcttataaagaactcatggggaggtgaatggggagacaatggctacttcaagatggaaatgggaaagaacatgtgtggtgttgcaacatgttcatcgtatccggttgtagcctgaggctgatgtttaaacccgtttacaccttacaagggactgaggcttttggttacttgggatgaatggttgaattgttgtgaatttatatcactagggacttcggagtaattgttttttatacttgtatggttatgtttccaaataatatggttgacactcaatagtcgacagaaaaaagaaaactatttccagataatgtcaagaggcctgactgcctgagactgatgtttaagcccgttaacttacaagggactgaggcttttggttatttgggatgaatggttgaatacttgaattgttataga

SEQ ID NO: 41410 - protein, 364 aa, Arabidopsis thaliana
  peptide (1)..(364): Ceres Seq. ID no. 12574499
  misc_feature (147)..(362): Pfam Name: Papain family cysteine protease Pfam Description: Papain family cysteine protease
  misc_feature (21)..(364): Homolog of NCBI NO: 28192371 NR Description: NTCP23-like cysteine proteinase [Nicotiana
  misc_feature (16)..(364): Homolog of NCBI NO: 14422331 NR Description: early leaf senescence abundant cysteine protease
  misc_feature (16)..(364): Homolog of NCBI NO: 7435779 NR Description: cysteine proteinase (EC 3.4.22.-) - garden pea
  misc_feature (21)..(364): Homolog of NCBI NO: 8347420 NR Description: cysteine protease [Nicotiana tabacum]
  misc_feature (9)..(364): Homolog of NCBI NO: 2677828 NR Description: cysteine protease [Prunus armeniaca]
  misc_feature (7)..(364): Homolog of NCBI NO: 18141289 NR Description: senescence-associated cysteine protease [Brassica
  misc_feature (7)..(364): Homolog of NCBI NO: 18424347 NR Description: cysteine proteinase AALP
  misc_feature (7)..(364): Homolog of NCBI NO: 23397070 NR Description: putative cysteine proteinase AALP [Arabidopsis
  misc_feature (7)..(364): Homolog of NCBI NO: 18407961 NR Description: cysteine proteinase AALP, putative
  misc_feature (7)..(352): Homolog of NCBI NO: 11265612 NR Description: cysteine proteinase (EC 3.4.22.-) F18N11.70
KNQREAMSVKLNLSSSILLILFAAAASKEIGFDESNPIKMVSDNLHELEDTVVQILGQSRHVLSFSRFTHRYGKKYQSVEEMKLRFSVFKENLDLIRSTNKKGLSYKLSLNQFADLTWQEFQRYKLGAAQNCSATLKGSHKITEATVPDTKDWREDGIVSPVKEQGHCGSCWTFSTTGALEAAYHQAFGKGISLSEQQLVDCAGTFNNFGCHGGLPSQAFEYIKYNGGLDTEEAYPYTGKDGGCKFSAKNIGVQVRDSVNITLGAEDELKHAVGLVRPVSVAFEVVHEFRFYKKGVFTSNTCGNTPMDVNHAVLAVGYGVEDDVPYWLIKNSWGGEWGDNGYFKMEMGKNMCGVATCSSYPVVA

SEQ ID NO: 41411 - protein, 358 aa, Arabidopsis thaliana
  peptide (1)..(358): Ceres Seq. ID no. 12574500
  misc_feature (141)..(356): Pfam Name: Papain family cysteine protease Pfam Description: Papain family cysteine protease
  misc_feature (15)..(358): Homolog of NCBI NO: 28192371 NR Description: NTCP23-like cysteine proteinase [Nicotiana
  misc_feature (10)..(358): Homolog of NCBI NO: 14422331 NR Description: early leaf senescence abundant cysteine protease
  misc_feature (10)..(358): Homolog of NCBI NO: 7435779 NR Description: cysteine proteinase (EC 3.4.22.-) - garden pea
  misc_feature (15)..(358): Homolog of NCBI NO: 8347420 NR Description: cysteine protease [Nicotiana tabacum]
  misc_feature (3)..(358): Homolog of NCBI NO: 2677828 NR Description: cysteine protease [Prunus armeniaca]
  misc_feature (1)..(358): Homolog of NCBI NO: 18141289 NR Description: senescence-associated cysteine protease [Brassica
  misc_feature (1)..(358): Homolog of NCBI NO: 18424347 NR Description: cysteine proteinase AALP
  misc_feature (1)..(358): Homolog of NCBI NO: 23397070 NR Description: putative cysteine proteinase AALP [Arabidopsis
  misc_feature (1)..(358): Homolog of NCBI NO: 18407961 NR Description: cysteine proteinase AALP, putative
  misc_feature (1)..(346): Homolog of NCBI NO: 11265612 NR Description: cysteine proteinase (EC 3.4.22.-) F18N11.70
MSVKLNLSSSILLILFAAAASKEIGFDESNPIKMVSDNLHELEDTVVQILGQSRHVLSFSRFTHRYGKKYQSVEEMKLRFSVFKENLDLIRSTNKKGLSYKLSLNQFADLTWQEFQRYKLGAAQNCSATLKGSHKITEATVPDTKDWREDGIVSPVKEQGHCGSCWTFSTTGALEAAYHQAFGKGISLSEQQLVDCAGTFNNFGCHGGLPSQAFEYIKYNGGLDTEEAYPYTGKDGGCKFSAKNIGVQVRDSVNITLGAEDELKHAVGLVRPVSVAFEVVHEFRFYKKGVFTSNTCGNTPMDVNHAVLAVGYGVEDDVPYWLIKNSWGGEWGDNGYFKMEMGKNMCGVATCSSYPVVA

SEQ ID NO: 41412 - protein, 325 aa, Arabidopsis thaliana
  peptide (1)..(325): Ceres Seq. ID no. 12574501
  misc_feature (108)..(323): Pfam Name: Papain family cysteine protease Pfam Description: Papain family cysteine protease
  misc_feature (1)..(325): Homolog of NCBI NO: 28192371 NR Description: NTCP23-like cysteine proteinase [Nicotiana
  misc_feature (1)..(325): Homolog of NCBI NO: 14422331 NR Description: early leaf senescence abundant cysteine protease
  misc_feature (1)..(325): Homolog of NCBI NO: 7435779 NR Description: cysteine proteinase (EC 3.4.22.-) - garden pea
  misc_feature (1)..(325): Homolog of NCBI NO: 8347420 NR Description: cysteine protease [Nicotiana tabacum]
  misc_feature (1)..(325): Homolog of NCBI NO: 2677828 NR Description: cysteine protease [Prunus armeniaca]
  misc_feature (1)..(325): Homolog of NCBI NO: 18141289 NR Description: senescence-associated cysteine protease [Brassica
  misc_feature (1)..(325): Homolog of NCBI NO: 18424347 NR Description: cysteine proteinase AALP
  misc_feature (1)..(325): Homolog of NCBI NO: 23397070 NR Description: putative cysteine proteinase AALP [Arabidopsis
  misc_feature (1)..(325): Homolog of NCBI NO: 18407961 NR Description: cysteine proteinase AALP, putative
  misc_feature (1)..(313): Homolog of NCBI NO: 11265612 NR Description: cysteine proteinase (EC 3.4.22.-) F18N11.70
MVSDNLHELEDTVVQILGQSRHVLSFSRFTHRYGKKYQSVEEMKLRFSVFKENLDLIRSTNKKGLSYKLSLNQFADLTWQEFQRYKLGAAQNCSATLKGSHKITEATVPDTKDWREDGIVSPVKEQGHCGSCWTFSTTGALEAAYHQAFGKGISLSEQQLVDCAGTFNNFGCHGGLPSQAFEYIKYNGGLDTEEAYPYTGKDGGCKFSAKNIGVQVRDSVNITLGAEDELKHAVGLVRPVSVAFEVVHEFRFYKKGVFTSNTCGNTPMDVNHAVLAVGYGVEDDVPYWLIKNSWGGEWGDNGYFKMEMGKNMCGVATCSSYPVVA

SEQ ID NO: 41413 - DNA, 964 bp, Arabidopsis thaliana; identical to SEQ ID NO: 20500
  misc_feature (1)..(964): Ceres Seq. ID no. 13491587
  misc_feature: MA Experiment ID: 108595 Result: Up-regulated in Transcription
  misc_feature: MA Experiment 108595 PARAMETER Experiment Name: At_Ler-pi_Ovule_cDNA_P Parameter: Plant Line Value: null
  misc_feature: MA Experiment ID: 20000171 Result: Up-regulated in Transcription
  misc_feature: MA Experiment 20000171 PARAMETER Experiment Name: At_42deg_Heat_P Parameter: Age (day) Value: 14
  misc_feature: MA Experiment 20000171 PARAMETER Experiment Name: At_42deg_Heat_P Parameter: Organism Value: A. thaliana
  misc_feature: MA Experiment 20000171 PARAMETER Experiment Name: At_42deg_Heat_P Parameter: Plant Line Value: WS
  misc_feature: MA Experiment 20000171 PARAMETER Experiment Name: At_42deg_Heat_P Parameter: Temperature (deg C) Value: 42 vs. 22
  misc_feature: MA Experiment 20000171 PARAMETER Experiment Name: At_42deg_Heat_P Parameter: Timepoint (hr) Value: 1
  misc_feature: MA Experiment 20000171 PARAMETER Experiment Name: At_42deg_Heat_P Parameter: Tissue Value: Aerial
  misc_feature: MA Experiment ID: 20000173 Result: Up-regulated in Transcription
  misc_feature: MA Experiment 20000173 PARAMETER Experiment Name: At_42deg_Heat_P Parameter: Age (day) Value: 14
  misc_feature: MA Experiment 20000173 PARAMETER Experiment Name: At_42deg_Heat_P Parameter: Organism Value: A. thaliana
  misc_feature: MA Experiment 20000173 PARAMETER Experiment Name: At_42deg_Heat_P Parameter: Plant Line Value: WS
  misc_feature: MA Experiment 20000173 PARAMETER Experiment Name: At_42deg_Heat_P Parameter: Temperature (deg C) Value: 42 vs. 22
  misc_feature: MA Experiment 20000173 PARAMETER Experiment Name: At_42deg_Heat_P Parameter: Timepoint (hr) Value: 6
  misc_feature: MA Experiment 20000173 PARAMETER Experiment Name: At_42deg_Heat_P Parameter: Tissue Value: Aerial
  misc_feature: MA Experiment ID: 20000234 Result: Down-regulated in Transcription
  misc_feature: MA Experiment 20000234 PARAMETER Experiment Name: At_Siliques_P Parameter: Age (day) Value: 21
  misc_feature: MA Experiment 20000234 PARAMETER Experiment Name: At_Siliques_P Parameter: Organism Value: A. thaliana
  misc_feature: MA Experiment 20000234 PARAMETER Experiment Name: At_Siliques_P Parameter: Plant Line Value: WS
  misc_feature: MA Experiment 20000234 PARAMETER Experiment Name: At_Siliques_P Parameter: Tissue Value: Less Than 5mm Siliques vs. Whole Plant
  misc_feature: MA Experiment ID: 20000264 Result: Down-regulated in Transcription
  misc_feature: MA Experiment 20000264 PARAMETER Experiment Name: At_Open_Flower_P Parameter: Age (day) Value: 21
  misc_feature: MA Experiment 20000264 PARAMETER Experiment Name: At_Open_Flower_P Parameter: Plant Line Value: WS
  misc_feature: MA Experiment 20000264 PARAMETER Experiment Name: At_Open_Flower_P Parameter: Tissue Value: Open Flower vs. Whole Plant
  misc_feature: MA Experiment ID: 20000286 Result: Down-regulated in Transcription
  misc_feature: MA Experiment 20000286 PARAMETER Experiment Name: At_Open_Flower_P Parameter: Age (day) Value: 21
  misc_feature: MA Experiment 20000286 PARAMETER Experiment Name: At_Open_Flower_P Parameter: Plant Line Value: WS
  misc_feature: MA Experiment 20000286 PARAMETER Experiment Name: At_Open_Flower_P Parameter: Tissue Value: Half Open vs. Whole Plant
  misc_feature: MA Experiment ID: 20000794 Result: Down-regulated in Transcription
  misc_feature: MA Experiment 20000794 PARAMETER Experiment Name: At_Petals_P Parameter: Age (day) Value: 23-25 days
  misc_feature: MA Experiment 20000794 PARAMETER Experiment Name: At_Petals_P Parameter: Plant Line Value: WS
  misc_feature: MA Experiment 20000794 PARAMETER Experiment Name: At_Petals_P Parameter: Tissue Value: Petals vs. Whole plant

SEQ ID NO: 41414 - protein, 244 aa, Arabidopsis thaliana; identical to SEQ ID NO: 20501
  peptide (1)..(244): Ceres Seq. ID no. 13491588
  misc_feature (63)..(183): Pfam Name: RanBP1 domain Pfam Description: RanBP1 domain
  misc_feature (63)..(183): Pfam Name: RanBP1 domain Pfam Description: RanBP1 domain
  misc_feature (30)..(232): Homolog of NCBI NO: 38174136 NR Description: Unknown (protein for MGC:76028) [Silurana
  misc_feature (31)..(238): Homolog of NCBI NO: 14091665 NR Description: Ran binding protein-1 [Lycopersicon esculentum]
  misc_feature (31)..(244): Homolog of NCBI NO: 5106769 NR Description: Ran-binding protein siRanBP [Arabidopsis thaliana]
  misc_feature (31)..(243): Homolog of NCBI NO: 2058282 NR Description: atranbp1a [Arabidopsis thaliana]
  misc_feature (31)..(243): Homolog of NCBI NO: 15222310 NR Description: Ran-binding protein (atranbp1a) [Arabidopsis
  misc_feature (30)..(232): Homolog of NCBI NO: 38174136 NR Description: Unknown (protein for MGC:76028) [Silurana
  misc_feature (31)..(244): Homolog of NCBI NO: 5106769 NR Description: Ran-binding protein siRanBP [Arabidopsis thaliana]
  misc_feature (31)..(243): Homolog of NCBI NO: 15222310 NR Description: Ran-binding protein (atranbp1a) [Arabidopsis
  misc_feature (30)..(244): Homolog of NCBI NO: 8843780 NR Description: contains similarity to small GTPase Ran binding
  misc_feature (30)..(244): Homolog of NCBI NO: 30697102 NR Description: Ran binding protein 1 homolog - like [Arabidopsis
  misc_feature (31)..(243): Homolog of NCBI NO: 15227700 NR Description: Ran binding protein (AtRanBP1b) [Arabidopsis
  misc_feature (31)..(243): Homolog of NCBI NO: 20260400 NR Description: Ran binding protein [Arabidopsis thaliana]
  misc_feature (31)..(243): Homolog of NCBI NO: 2058284 NR Description: atranbp1b [Arabidopsis thaliana]
  misc_feature (31)..(243): Homolog of NCBI NO: 2058282 NR Description: atranbp1a [Arabidopsis thaliana]
  misc_feature (31)..(238): Homolog of NCBI NO: 14091665 NR Description: Ran binding protein-1 [Lycopersicon esculentum]
  misc_feature (31)..(243): Homolog of NCBI NO: 2058284 NR Description: atranbp1b [Arabidopsis thaliana]
  misc_feature (31)..(243): Homolog of NCBI NO: 20260400 NR Description: Ran binding protein [Arabidopsis thaliana]
  misc_feature (31)..(243): Homolog of NCBI NO: 15227700 NR Description: Ran binding protein (AtRanBP1b) [Arabidopsis
  misc_feature (30)..(244): Homolog of NCBI NO: 30697102 NR Description: Ran binding protein 1 homolog - like [Arabidopsis
  misc_feature (30)..(244): Homolog of NCBI NO: 8843780 NR Description: contains similarity to small GTPase Ran binding

SEQ ID NO: 41415 - protein, 164 aa, Arabidopsis thaliana; identical to SEQ ID NO: 20502
  peptide (1)..(164): Ceres Seq. ID no. 13491589
  misc_feature (1)..(103): Pfam Name: RanBP1 domain Pfam Description: RanBP1 domain
  misc_feature (1)..(103): Pfam Name: RanBP1 domain Pfam Description: RanBP1 domain
  misc_feature (1)..(152): Homolog of NCBI NO: 38174136 NR Description: Unknown (protein for MGC:76028) [Silurana
  misc_feature (1)..(158): Homolog of NCBI NO: 14091665 NR Description: Ran binding protein-1 [Lycopersicon esculentum]
  misc_feature (1)..(164): Homolog of NCBI NO: 5106769 NR Description: Ran-binding protein siRanBP [Arabidopsis thaliana]
  misc_feature (1)..(163): Homolog of NCBI NO: 2058282 NR Description: atranbp1a [Arabidopsis thaliana]
  misc_feature (1)..(163): Homolog of NCBI NO: 15222310 NR Description: Ran-binding protein (atranbp1a) [Arabidopsis
  misc_feature (1)..(152): Homolog of NCBI NO: 38174136 NR Description: Unknown (protein for MGC:76028) [Silurana
  misc_feature (1)..(164): Homolog of NCBI NO: 5106769 NR Description: Ran-binding protein siRanBP [Arabidopsis thaliana]
  misc_feature (1)..(163): Homolog of NCBI NO: 15222310 NR Description: Ran-binding protein (atranbp1a) [Arabidopsis
  misc_feature (1)..(164): Homolog of NCBI NO: 8843780 NR Description: contains similarity to small GTPase Ran binding
  misc_feature (1)..(164): Homolog of NCBI NO: 30697102 NR Description: Ran binding protein 1 homolog - like [Arabidopsis
  misc_feature (1)..(163): Homolog of NCBI NO: 15227700 NR Description: Ran binding protein (AtRanBP1b) [Arabidopsis
  misc_feature (1)..(163): Homolog of NCBI NO: 20260400 NR Description: Ran binding protein [Arabidopsis thaliana]
  misc_feature (1)..(163): Homolog of NCBI NO: 2058284 NR Description: atranbp1b [Arabidopsis thaliana]
  misc_feature (1)..(163): Homolog of NCBI NO: 2058282 NR Description: atranbp1a [Arabidopsis thaliana]
  misc_feature (1)..(158): Homolog of NCBI NO: 14091665 NR Description: Ran binding protein-1 [Lycopersicon esculentum]
  misc_feature (1)..(163): Homolog of NCBI NO: 2058284 NR Description: atranbp1b [Arabidopsis thaliana]
  misc_feature (1)..(163): Homolog of NCBI NO: 20260400 NR Description: Ran binding protein [Arabidopsis thaliana]
  misc_feature (1)..(163): Homolog of NCBI NO: 15227700 NR Description: Ran binding protein (AtRanBP1b) [Arabidopsis
  misc_feature (1)..(164): Homolog of NCBI NO: 30697102 NR Description: Ran binding protein 1 homolog - like [Arabidopsis
  misc_feature (1)..(164): Homolog of NCBI NO: 8843780 NR Description: contains similarity to small GTPase Ran binding

SEQ ID NO: 41416 - protein, 132 aa, Arabidopsis thaliana; identical to SEQ ID NO: 20503
  peptide (1)..(132): Ceres Seq. ID no. 13491590
  misc_feature (1)..(71): Pfam Name: RanBP1 domain Pfam Description: RanBP1 domain
  misc_feature (1)..(71): Pfam Name: RanBP1 domain Pfam Description: RanBP1 domain
  misc_feature (1)..(120): Homolog of NCBI NO: 38174136 NR Description: Unknown (protein for MGC:76028) [Silurana
  misc_feature (1)..(126): Homolog of NCBI NO: 14091665 NR Description: Ran binding protein-1 [Lycopersicon esculentum]
  misc_feature (1)..(132): Homolog of NCBI NO: 5106769 NR Description: Ran-binding protein siRanBP [Arabidopsis thaliana]
  misc_feature (1)..(131): Homolog of NCBI NO: 2058282 NR Description: atranbp1a [Arabidopsis thaliana]
  misc_feature (1)..(131): Homolog of NCBI NO: 15222310 NR Description: Ran-binding protein (atranbp1a) [Arabidopsis
  misc_feature (1)..(120): Homolog of NCBI NO: 38174136 NR Description: Unknown (protein for MGC:76028) [Silurana
  misc_feature (1)..(132): Homolog of NCBI NO: 5106769 NR Description: Ran-binding protein siRanBP [Arabidopsis thaliana]
  misc_feature (1)..(131): Homolog of NCBI NO: 15222310 NR Description: Ran-binding protein (atranbp1a) [Arabidopsis
  misc_feature (1)..(132): Homolog of NCBI NO: 8843780 NR Description: contains similarity to small GTPase Ran binding
  misc_feature (1)..(132): Homolog of NCBI NO: 30697102 NR Description: Ran binding protein 1 homolog - like [Arabidopsis
  misc_feature (1)..(131): Homolog of NCBI NO: 15227700 NR Description: Ran binding protein (AtRanBP1b) [Arabidopsis
  misc_feature (1)..(131): Homolog of NCBI NO: 20260400 NR Description: Ran binding protein [Arabidopsis thaliana]
  misc_feature (1)..(131): Homolog of NCBI NO: 2058284 NR Description: atranbp1b [Arabidopsis thaliana]
  misc_feature (1)..(131): Homolog of NCBI NO: 2058282 NR Description: atranbp1a [Arabidopsis thaliana]
  misc_feature (1)..(126): Homolog of NCBI NO: 14091665 NR Description: Ran binding protein-1 [Lycopersicon esculentum]
  misc_feature (1)..(131): Homolog of NCBI NO: 2058284 NR Description: atranbp1b [Arabidopsis thaliana]
  misc_feature (1)..(131): Homolog of NCBI NO: 20260400 NR Description: Ran binding protein [Arabidopsis thaliana]
  misc_feature (1)..(131): Homolog of NCBI NO: 15227700 NR Description: Ran binding protein (AtRanBP1b) [Arabidopsis
  misc_feature (1)..(132): Homolog of NCBI NO: 30697102 NR Description: Ran binding protein 1 homolog - like [Arabidopsis
  misc_feature (1)..(132): Homolog of NCBI NO: 8843780 NR Description: contains similarity to small GTPase Ran binding

SEQ ID NO: 41417 - DNA, 1305 bp, Arabidopsis thaliana; identical to SEQ ID NO: 22202
  misc_feature (1)..(1305): Ceres Seq. ID no. 12334870
  misc_feature: MA Experiment ID: 108461 Result: Up-regulated in Transcription
  misc_feature: MA Experiment 108461 PARAMETER Experiment Name: At_Germinating_Seeds_cDNA_P Parameter: Age (day) Value: 1 vs. 0
  misc_feature: MA Experiment 108461 PARAMETER Experiment Name: At_Germinating_Seeds_cDNA_P Parameter: Tissue Value: Germinating Seeds
  misc_feature: MA Experiment ID: 108462 Result: Up-regulated in Transcription
  misc_feature: MA Experiment 108462 PARAMETER Experiment Name: At_Germinating_Seeds_cDNA_P Parameter: Age (day) Value: 2 vs. 0
  misc_feature: MA Experiment 108462 PARAMETER Experiment Name: At_Germinating_Seeds_cDNA_P Parameter: Tissue Value: Germinating Seeds
  misc_feature: MA Experiment ID: 108463 Result: Up-regulated in Transcription
  misc_feature: MA Experiment 108463 PARAMETER Experiment Name: At_Germinating_Seeds_cDNA_P Parameter: Age (day) Value: 3 vs. 0
  misc_feature: MA Experiment 108463 PARAMETER Experiment Name: At_Germinating_Seeds_cDNA_P Parameter: Tissue Value: Germinating Seeds
  misc_feature: MA Experiment ID: 108464 Result: Up-regulated in Transcription
  misc_feature: MA Experiment 108464 PARAMETER Experiment Name: At_Germinating_Seeds_cDNA_P Parameter: Age (day) Value: 4 vs. 0
  misc_feature: MA Experiment 108464 PARAMETER Experiment Name: At_Germinating_Seeds_cDNA_P Parameter: Tissue Value: Germinating Seeds
  misc_feature: MA Experiment ID: 108577 Result: Up-regulated in Transcription
  misc_feature: MA Experiment 108577 PARAMETER Experiment Name: At_42deg_Heat_cDNA_P Parameter: Temperature (deg C) Value: 42 vs. 22
  misc_feature: MA Experiment 108577 PARAMETER Experiment Name: At_42deg_Heat_cDNA_P Parameter: Timepoint (hr) Value: 6
  misc_feature: MA Experiment 108577 PARAMETER Experiment Name: At_42deg_Heat_cDNA_P Parameter: Tissue Value: Aerial
  misc_feature: MA Experiment ID: 108594 Result: Up-regulated in Transcription
  misc_feature: MA Experiment 108594 PARAMETER Experiment Name: At_Ler-rhl_Root_cDNA_P Parameter: Plant Line Value: null
  misc_feature: MA Experiment ID: 20000166 Result: Down-regulated in Transcription
  misc_feature: MA Experiment 20000166 PARAMETER Experiment Name: At_100uM_ABA_P Parameter: Age (day) Value: 14
  misc_feature: MA Experiment 20000166 PARAMETER Experiment Name: At_100uM_ABA_P Parameter: Organism Value: A. thaliana
  misc_feature: MA Experiment 20000166 PARAMETER Experiment Name: At_100uM_ABA_P Parameter: Plant Line Value: WS
  misc_feature: MA Experiment 20000166 PARAMETER Experiment Name: At_100uM_ABA_P Parameter: Timepoint (hr) Value: 1
  misc_feature: MA Experiment 20000166 PARAMETER Experiment Name: At_100uM_ABA_P Parameter: Tissue Value: Aerial
  misc_feature: MA Experiment 20000166 PARAMETER Experiment Name: At_100uM_ABA_P Parameter: Treatment Value: 100uM ABA vs. No Treatment
  misc_feature: MA Experiment ID: 20000184 Result: Up-regulated in Transcription
  misc_feature: MA Experiment 20000184 PARAMETER Experiment Name: At_Shoots__P Parameter: Age (day) Value: 7
  misc_feature: MA Experiment 20000184 PARAMETER Experiment Name: At_Shoots__P Parameter: Tissue Value: Shoots vs. Whole Plant
  misc_feature: MA Experiment ID: 20000213 Result: Down-regulated in Transcription
  misc_feature: MA Experiment 20000213 PARAMETER Experiment Name: At_4deg_Cold_P Parameter: Timepoint (hr) Value: 2
  misc_feature: MA Experiment ID: 20000224 Result: Down-regulated in Transcription
  misc_feature: MA Experiment ID: 20000227 Result: Up-regulated in Transcription
  misc_feature: MA Experiment 20000227 PARAMETER Experiment Name: At_Root-Tips-vs-Tops_P Parameter: Tissue Value: Root Tips vs. Root Tops
  misc_feature: MA Experiment ID: 20000234 Result: Down-regulated in Transcription
  misc_feature: MA Experiment 20000234 PARAMETER Experiment Name: At_Siliques_P Parameter: Age (day) Value: 21
  misc_feature: MA Experiment 20000234 PARAMETER Experiment Name: At_Siliques_P Parameter: Organism Value: A. thaliana
  misc_feature: MA Experiment 20000234 PARAMETER Experiment Name: At_Siliques_P Parameter: Plant Line Value: WS
  misc_feature: MA Experiment 20000234 PARAMETER Experiment Name: At_Siliques_P Parameter: Tissue Value: Less Than 5mm Siliques vs. Whole Plant
  misc_feature: MA Experiment ID: 20000308 Result: Down-regulated in Transcription
  misc_feature: MA Experiment 20000308 PARAMETER Experiment Name: At_100mM_NaCl__P Parameter: Age (day) Value: 17
  misc_feature: MA Experiment 20000308 PARAMETER Experiment Name: At_100mM_NaCl__P Parameter: Organism Value: A. thaliana
  misc_feature: MA Experiment 20000308 PARAMETER Experiment Name: At_100mM_NaCl__P Parameter: Plant Line Value: WS
  misc_feature: MA Experiment 20000308 PARAMETER Experiment Name: At_100mM_NaCl__P Parameter: Timepoint (hr) Value: 72
  misc_feature: MA Experiment 20000308 PARAMETER Experiment Name: At_100mM_NaCl__P Parameter: Tissue Value: Whole Plant
  misc_feature: MA Experiment 20000308 PARAMETER Experiment Name: At_100mM_NaCl__P Parameter: Treatment Value: 100mM NaCl vs. No Treatment
  misc_feature: MA Experiment ID: 20000576 Result: Down-regulated in Transcription
  misc_feature: MA Experiment 20000576 PARAMETER Experiment Name: At_100uM_ABA_Mutants__P Parameter: Organism Value: A. thaliana
  misc_feature: MA Experiment 20000576 PARAMETER Experiment Name: At_100uM_ABA_Mutants__P Parameter: Plant Line Value: CS23
  misc_feature: MA Experiment 20000576 PARAMETER Experiment Name: At_100uM_ABA_Mutants__P Parameter: Timepoint (hr) Value: 6
  misc_feature: MA Experiment 20000576 PARAMETER Experiment Name: At_100uM_ABA_Mutants__P Parameter: Tissue Value: Whole Plant
  misc_feature: MA Experiment 20000576 PARAMETER Experiment Name: At_100uM_ABA_Mutants__P Parameter: Treatment Value: 1uM ABA vs. No Treatment
  misc_feature: MA Experiment ID: 20000794 Result: Up-regulated in Transcription
  misc_feature: MA Experiment 20000794 PARAMETER Experiment Name: At_Petals_P Parameter: Age (day) Value: 23-25 days
  misc_feature: MA Experiment 20000794 PARAMETER Experiment Name: At_Petals_P Parameter: Plant Line Value: WS
  misc_feature: MA Experiment 20000794 PARAMETER Experiment Name: At_Petals_P Parameter: Tissue Value: Petals vs. Whole plant
  misc_feature: MA Experiment ID: 20001247 Result: Up-regulated in Transcription
  misc_feature: MA Experiment 20001247 PARAMETER Experiment Name: At_Far-red-induction_P Parameter: Age (day) Value: 7
  misc_feature: MA Experiment 20001247 PARAMETER Experiment Name: At_Far-red-induction_P Parameter: Light Value: Far-red vs. White
  misc_feature: MA Experiment 20001247 PARAMETER Experiment Name: At_Far-red-induction_P Parameter: Organism Value: A. thaliana
  misc_feature: MA Experiment 20001247 PARAMETER Experiment Name: At_Far-red-induction_P Parameter: Plant Line Value: Columbia
  misc_feature: MA Experiment 20001247 PARAMETER Experiment Name: At_Far-red-induction_P Parameter: Timepoint (hr) Value: 1
  misc_feature: MA Experiment 20001247 PARAMETER Experiment Name: At_Far-red-induction_P Parameter: Tissue Value: Whole Plant
  misc_feature: MA Experiment ID: 20001248 Result: Up-regulated in Transcription
  misc_feature: MA Experiment 20001248 PARAMETER Experiment Name: At_Far-red-induction_P Parameter: Age (day) Value: 7
  misc_feature: MA Experiment 20001248 PARAMETER Experiment Name: At_Far-red-induction_P Parameter: Light Value: Far-red vs. White
  misc_feature: MA Experiment 20001248 PARAMETER Experiment Name: At_Far-red-induction_P Parameter: Organism Value: A. thaliana
  misc_feature: MA Experiment 20001248 PARAMETER Experiment Name: At_Far-red-induction_P Parameter: Plant Line Value: Columbia
  misc_feature: MA Experiment 20001248 PARAMETER Experiment Name: At_Far-red-induction_P Parameter: Timepoint (hr) Value: 4
  misc_feature: MA Experiment 20001248 PARAMETER Experiment Name: At_Far-red-induction_P Parameter: Tissue Value: Whole Plant
  misc_feature: MA Experiment ID: 20001450 Result: Up-regulated in Transcription
  misc_feature: MA Experiment 20001450 PARAMETER Experiment Name: At_Far-red-induction_P Parameter: Age (day) Value: 7
  misc_feature: MA Experiment 20001450 PARAMETER Experiment Name: At_Far-red-induction_P Parameter: Light Value: Far-red vs. White
  misc_feature: MA Experiment 20001450 PARAMETER Experiment Name: At_Far-red-induction_P Parameter: Organism Value: A. thaliana
  misc_feature: MA Experiment 20001450 PARAMETER Experiment Name: At_Far-red-induction_P Parameter: Plant Line Value: Columbia
  misc_feature: MA Experiment 20001450 PARAMETER Experiment Name: At_Far-red-induction_P Parameter: Timepoint (hr) Value: 8
  misc_feature: MA Experiment 20001450 PARAMETER Experiment Name: At_Far-red-induction_P Parameter: Tissue Value: Whole Plant
  misc_feature: MA Experiment ID: 20001451 Result: Up-regulated in Transcription
  misc_feature: MA Experiment 20001451 PARAMETER Experiment Name: At_Far-red-induction_P Parameter: Age (day) Value: 7
  misc_feature: MA Experiment 20001451 PARAMETER Experiment Name: At_Far-red-induction_P Parameter: Light Value: Far-red vs. White
  misc_feature: MA Experiment 20001451 PARAMETER Experiment Name: At_Far-red-induction_P Parameter: Organism Value: A. thaliana
  misc_feature: MA Experiment 20001451 PARAMETER Experiment Name: At_Far-red-induction_P Parameter: Plant Line Value: Columbia
  misc_feature: MA Experiment 20001451 PARAMETER Experiment Name: At_Far-red-induction_P Parameter: Timepoint (hr) Value: 24
  misc_feature: MA Experiment 20001451 PARAMETER Experiment Name: At_Far-red-induction_P Parameter: Tissue Value: Whole Plant
  misc_feature: MA Experiment ID: 20001557 Result: Up-regulated in Transcription
  misc_feature: MA Experiment 20001557 PARAMETER Experiment Name: At_Drought_Soil_Dry_P Parameter: Age (day) Value: 27
  misc_feature: MA Experiment 20001557 PARAMETER Experiment Name: At_Drought_Soil_Dry_P Parameter: Organism Value: A. thaliana
  misc_feature: MA Experiment 20001557 PARAMETER Experiment Name: At_Drought_Soil_Dry_P Parameter: Plant Line Value: WS
  misc_feature: MA Experiment 20001557 PARAMETER Experiment Name: At_Drought_Soil_Dry_P Parameter: Post Timepoint (hr) Value: 3
  misc_feature: MA Experiment 20001557 PARAMETER Experiment Name: At_Drought_Soil_Dry_P Parameter: Post-Treatment Value: Re-Water vs. No Drought
  misc_feature: MA Experiment 20001557 PARAMETER Experiment Name: At_Drought_Soil_Dry_P Parameter: Timepoint (day) Value: 13
  misc_feature: MA Experiment 20001557 PARAMETER Experiment Name: At_Drought_Soil_Dry_P Parameter: Treatment Value: Drought vs. No Drought
  misc_feature: MA Experiment ID: 20001904 Result: Up-regulated in Transcription
  misc_feature: MA Experiment 20001904 PARAMETER Experiment Name: At_Drought_Reproduction_P Parameter: Age (day) Value: 37
  misc_feature: MA Experiment 20001904 PARAMETER Experiment Name: At_Drought_Reproduction_P Parameter: Organism Value: A. thaliana
  misc_feature: MA Experiment 20001904 PARAMETER Experiment Name: At_Drought_Reproduction_P Parameter: Plant Line Value: WS
  misc_feature: MA Experiment 20001904 PARAMETER Experiment Name: At_Drought_Reproduction_P Parameter: Timepoint (day) Value: 7
  misc_feature: MA Experiment 20001904 PARAMETER Experiment Name: At_Drought_Reproduction_P Parameter: Tissue Value: Rosettes
  misc_feature: MA Experiment 20001904 PARAMETER Experiment Name: At_Drought_Reproduction_P Parameter: Treatment Value: Drought vs. No Drought
  misc_feature: MA Experiment ID: 20001905 Result: Up-regulated in Transcription
  misc_feature: MA Experiment 20001905 PARAMETER Experiment Name: At_Drought_Reproduction_P Parameter: Age (day) Value: 40
  misc_feature: MA Experiment 20001905 PARAMETER Experiment Name: At_Drought_Reproduction_P Parameter: Organism Value: A. thaliana
  misc_feature: MA Experiment 20001905 PARAMETER Experiment Name: At_Drought_Reproduction_P Parameter: Plant Line Value: WS
  misc_feature: MA Experiment 20001905 PARAMETER Experiment Name: At_Drought_Reproduction_P Parameter: Timepoint (day) Value: 10
  misc_feature: MA Experiment 20001905 PARAMETER Experiment Name: At_Drought_Reproduction_P Parameter: Tissue Value: Rosettes
  misc_feature: MA Experiment 20001905 PARAMETER Experiment Name: At_Drought_Reproduction_P Parameter: Treatment Value: Drought vs. No Drought

SEQ ID NO: 41418 - protein, 385 aa, Arabidopsis thaliana; identical to SEQ ID NO: 22203
  peptide (1)..(385): Ceres Seq. ID no. 12334871
  misc_feature (341)..(381): Pfam Name: WD domain, G-beta repeat Pfam Description: WD domain, G-beta repeat
  misc_feature (341)..(381): Pfam Name: WD domain, G-beta repeat Pfam Description: WD domain, G-beta repeat
  misc_feature (71)..(379): Homolog of NCBI NO: 15029364 NR Description: photoregulatory zinc-finger protein COP1 [Rosa
  misc_feature (71)..(379): Homolog of NCBI NO: 34910754 NR Description: P0042A10.6 [Oryza sativa (japonica
  misc_feature (71)..(379): Homolog of NCBI NO: 4090943 NR Description: COP1 homolog [Lycopersicon esculentum]
  misc_feature (71)..(379): Homolog of NCBI NO: 15219179 NR Description: phytochrome A supressor spa1, putative; protein
  misc_feature (71)..(379): Homolog of NCBI NO: 11127996 NR Description: COP1 [Ipomoea nil]
  misc_feature (71)..(379): Homolog of NCBI NO: 15029364 NR Description: photoregulatory zinc-finger protein COP1 [Rosa
  misc_feature (71)..(379): Homolog of NCBI NO: 4090943 NR Description: COP1 homolog [Lycopersicon esculentum]
  misc_feature (71)..(379): Homolog of NCBI NO: 11127996 NR Description: COP1 [Ipomoea nil]
  misc_feature (1)..(385): Homolog of NCBI NO: 21592812 NR Description: contains similarity to photomorphogenesis
  misc_feature (1)..(385): Homolog of NCBI NO: 15242945 NR Description: G-protein beta-subunit (transducin) family
  misc_feature (53)..(384): Homolog of NCBI NO: 10176840 NR Description: contains similarity to photomorphogenesis
  misc_feature (149)..(384): Homolog of NCBI NO: 18420709 NR Description: G-protein beta-subunit (transducin) family
  misc_feature (71)..(379): Homolog of NCBI NO: 9294263 NR Description: photomorphogenesis repressor protein-like
  misc_feature (71)..(379): Homolog of NCBI NO: 15219179 NR Description: phytochrome A supressor spa1, putative; protein
  misc_feature (71)..(379): Homolog of NCBI NO: 34910754 NR Description: P0042A10.6 [Oryza sativa (japonica
  misc_feature (71)..(379): Homolog of NCBI NO: 9294263 NR Description: photomorphogenesis repressor protein-like
  misc_feature (149)..(384): Homolog of NCBI NO: 18420709 NR Description: G-protein beta-subunit (transducin) family
  misc_feature (53)..(384): Homolog of NCBI NO: 10176840 NR Description: contains similarity to photomorphogenesis
  misc_feature (1)..(385): Homolog of NCBI NO: 15242945 NR Description: G-protein beta-subunit (transducin) family
  misc_feature (1)..(385): Homolog of NCBI NO: 21592812 NR Description: contains similarity to photomorphogenesis

SEQ ID NO: 41419 - protein, 355 aa, Arabidopsis thaliana; identical to SEQ ID NO: 22204
  peptide (1)..(355): Ceres Seq. ID no. 12334872
  misc_feature (311)..(351): Pfam Name: WD domain, G-beta repeat Pfam Description: WD domain, G-beta repeat
  misc_feature (311)..(351): Pfam Name: WD domain, G-beta repeat Pfam Description: WD domain, G-beta repeat
  misc_feature (41)..(349): Homolog of NCBI NO: 15029364 NR Description: photoregulatory zinc-finger protein COP1 [Rosa
  misc_feature (41)..(349): Homolog of NCBI NO: 34910754 NR Description: P0042A10.6 [Oryza sativa (japonica
  misc_feature (41)..(349): Homolog of NCBI NO: 4090943 NR Description: COP1 homolog [Lycopersicon esculentum]
  misc_feature (41)..(349): Homolog of NCBI NO: 15219179 NR Description: phytochrome A supressor spa1, putative; protein
  misc_feature (41)..(349): Homolog of NCBI NO: 11127996 NR Description: COP1 [Ipomoea nil]
  misc_feature (41)..(349): Homolog of NCBI NO: 15029364 NR Description: photoregulatory zinc-finger protein COP1 [Rosa
  misc_feature (41)..(349): Homolog of NCBI NO: 4090943 NR Description: COP1 homolog [Lycopersicon esculentum]
  misc_feature (41)..(349): Homolog of NCBI NO: 11127996 NR Description: COP1 [Ipomoea nil]
  misc_feature (1)..(355): Homolog of NCBI NO: 21592812 NR Description: contains similarity to photomorphogenesis
  misc_feature (1)..(355): Homolog of NCBI NO: 15242945 NR Description: G-protein beta-subunit (transducin) family
  misc_feature (23)..(354): Homolog of NCBI NO: 10176840 NR Description: contains similarity to photomorphogenesis
  misc_feature (119)..(354): Homolog of NCBI NO: 18420709 NR Description: G-protein beta-subunit (transducin) family
  misc_feature (41)..(349): Homolog of NCBI NO: 9294263 NR Description: photomorphogenesis repressor protein-like
  misc_feature (41)..(349): Homolog of NCBI NO: 15219179 NR Description: phytochrome A supressor spa1, putative; protein
  misc_feature (41)..(349): Homolog of NCBI NO: 34910754 NR Description: P0042A10.6 [Oryza sativa (japonica
  misc_feature (41)..(349): Homolog of NCBI NO: 9294263 NR Description: photomorphogenesis repressor protein-like
  misc_feature (119)..(354): Homolog of NCBI NO: 18420709 NR Description: G-protein beta-subunit (transducin) family
  misc_feature (23)..(354): Homolog of NCBI NO: 10176840 NR Description: contains similarity to photomorphogenesis
  misc_feature (1)..(355): Homolog of NCBI NO: 15242945 NR Description: G-protein beta-subunit (transducin) family
  misc_feature (1)..(355): Homolog of NCBI NO: 21592812 NR Description: contains similarity to photomorphogenesis

SEQ ID NO: 41420 - protein, 353 aa, Arabidopsis thaliana; identical to SEQ ID NO: 22205
  peptide (1)..(353): Ceres Seq. ID no. 12334873
  misc_feature (309)..(349): Pfam Name: WD domain, G-beta repeat Pfam Description: WD domain, G-beta repeat
  misc_feature (309)..(349): Pfam Name: WD domain, G-beta repeat Pfam Description: WD domain, G-beta repeat
  misc_feature (39)..(347): Homolog of NCBI NO: 15029364 NR Description: photoregulatory zinc-finger protein COP1 [Rosa
  misc_feature (39)..(347): Homolog of NCBI NO: 34910754 NR Description: P0042A10.6 [Oryza sativa (japonica
  misc_feature (39)..(347): Homolog of NCBI NO: 4090943 NR Description: COP1 homolog [Lycopersicon esculentum]
  misc_feature (39)..(347): Homolog of NCBI NO: 15219179 NR Description: phytochrome A supressor spa1, putative; protein
  misc_feature (39)..(347): Homolog of NCBI NO: 11127996 NR Description: COP1 [Ipomoea nil]
  misc_feature (39)..(347): Homolog of NCBI NO: 15029364 NR Description: photoregulatory zinc-finger protein COP1 [Rosa
  misc_feature (39)..(347): Homolog of NCBI NO: 4090943 NR Description: COP1 homolog [Lycopersicon esculentum]
  misc_feature (39)..(347): Homolog of NCBI NO: 11127996 NR Description: COP1 [Ipomoea nil]
  misc_feature (1)..(353): Homolog of NCBI NO: 21592812 NR Description: contains similarity to photomorphogenesis
  misc_feature (1)..(353): Homolog of NCBI NO: 15242945 NR Description: G-protein beta-subunit (transducin) family
  misc_feature (21)..(352): Homolog of NCBI NO: 10176840 NR Description: contains similarity to photomorphogenesis
  misc_feature (117)..(352): Homolog of NCBI NO: 18420709 NR Description: G-protein beta-subunit (transducin) family
  misc_feature (39)..(347): Homolog of NCBI NO: 9294263 NR Description: photomorphogenesis repressor protein-like
  misc_feature (39)..(347): Homolog of NCBI NO: 15219179 NR Description: phytochrome A supressor spa1, putative; protein
  misc_feature (39)..(347): Homolog of NCBI NO: 34910754 NR Description: P0042A10.6 [Oryza sativa (japonica
  misc_feature (39)..(347): Homolog of NCBI NO: 9294263 NR Description: photomorphogenesis repressor protein-like
  misc_feature (117)..(352): Homolog of NCBI NO: 18420709 NR Description: G-protein beta-subunit (transducin) family
  misc_feature (21)..(352): Homolog of NCBI NO: 10176840 NR Description: contains similarity to photomorphogenesis
  misc_feature (1)..(353): Homolog of NCBI NO: 15242945 NR Description: G-protein beta-subunit (transducin) family
  misc_feature (1)..(353): Homolog of NCBI NO: 21592812 NR Description: contains similarity to photomorphogenesis

SEQ ID NO: 41421 - DNA, 1307 bp, Arabidopsis thaliana
  misc_feature (1)..(1307): Ceres Seq. ID no. 13580557
  misc_feature: MA Experiment ID: 20000179 Result: Up-regulated in Transcription
  misc_feature: MA Experiment 20000179 PARAMETER Experiment Name: At_Germinating_Seeds_P Parameter: Age (hr) Value: 6 vs. 0
  misc_feature: MA Experiment 20000179 PARAMETER Experiment Name: At_Germinating_Seeds_P Parameter: Tissue Value: Germinating Seeds
  misc_feature: Pfam Name: Mito_carr Pfam Description: Mitochondrial carrier protein
attttcgtagcgcgcagagagagagagagagggacgatcttttctataactgaaacactactcgaggccaagttgctttagccgtaatcgtcgtcgtccctcttcccgatattatctcttctctgttcttcgatttcgaaaccctaacctcctctctttaattcgcgttttctggatcgaagatggtggcggctggtaaatccgacctttccttgcccaaaactttcgcctgcagtgccttcgctgcttgcgtcggcgaggtatgcacaattccattggacactgctaaagttaggcttcagctccaaaagtctgctcttgctggtgatgttactctgcctaaatatcgaggattgttgggaactgttggtaccatagcaagggaagaagggttacgttcactatggaaaggtgttgtacctggattgcatcgtcaatgcctatttggaggtcttaggattggaatgtatgagccggtgaaaaacttgtatgttggaaaagactttgtaggtgatgttccattgagcaagaaaattcttgctggtttgacaacaggtgcactgggtatcatggtagcaaatcccactgatcttgtgaaagttaggcttcaggcggaaggaaaattagctgcaggtgcgccaagacggtactctggagcgctgaatgcgtattcaacaattgtgagacaggaaggagtccgagctctttggactggtcttggacctaacgtagcaagaaacgctattatcaatgctgctgaattagcgagttacgatcaagtgaaagagactatcttgaagattccagggttcactgacaacgttgtcacacatattctatctggactgggggcaggattctttgctgtttgcatcggttctcctgttgacgtggttaagtcaagaatgatgggagattctggtgcttacaagggcaccattgattgcttcgtcaaaactctgaagagcgacggtcctatggcattttacaagggtttcatccccaactttggacgccttggctcatggaacgtaatcatgtttttgaccctcgaacaggcaaagaagtatgtccgggaactcgatgcgtccaaaagaaactgagacacaaagttttaagcagagggaataagagcaacattgttttcttcttcattttcggtgattgagagaggccagaacttggtcgaatattgttttcggaatagagattcagttttcgagtaaaactgtgaaataaaatttctgtggattgctcatatattggctgtaccatccaacatttatcaaaaatcatacatttttccc

SEQ ID NO: 41422 - protein, 306 aa, Arabidopsis thaliana
  peptide (1)..(306): Ceres Seq. ID no. 15222731
  misc_feature: Pfam Name: Mito_carr Pfam Description: Mitochondrial carrier protein
  misc_feature (38)..(279): Homolog of NCBI NO: 14599482 NR Description: putative mitochondrial uncoupling protein
  misc_feature (8)..(300): Homolog of NCBI NO: 18424178 NR Description: uncoupling protein (AtUCP2) [Arabidopsis
  misc_feature (6)..(299): Homolog of NCBI NO: 13537347 NR Description: uncoupling protein [Oryza sativa (japonica
  misc_feature (6)..(299): Homolog of NCBI NO: 19401698 NR Description: uncoupling protein [Zea mays]
  misc_feature (18)..(300): Homolog of NCBI NO: 7106157 NR Description: SfUCPa [Symplocarpus foetidus]
  misc_feature (4)..(299): Homolog of NCBI NO: 22002462 NR Description: mitochondrial uncoupling protein [Helicodiceros
  misc_feature (5)..(302): Homolog of NCBI NO: 18921040 NR Description: putative uncoupling protein [Lycopersicon
  misc_feature (5)..(302): Homolog of NCBI NO: 7489287 NR Description: uncoupling protein (clone StUCP7), mitochonrial -
  misc_feature (1)..(306): Homolog of NCBI NO: 25295878 NR Description: uncoupling protein [imported] - Arabidopsis
  misc_feature (1)..(306): Homolog of NCBI NO: 15232420 NR Description: uncoupling protein (ucp/PUMP) [Arabidopsis
  misc_feature (38)..(279): Homolog of NCBI NO: 14599482 NR Description: putative mitochondrial uncoupling protein
  misc_feature (8)..(300): Homolog of NCBI NO: 18424178 NR Description: uncoupling protein (AtUCP2) [Arabidopsis
  misc_feature (6)..(299): Homolog of NCBI NO: 13537347 NR Description: uncoupling protein [Oryza sativa (japonica
  misc_feature (6)..(299): Homolog of NCBI NO: 19401698 NR Description: uncoupling protein [Zea mays]
  misc_feature (18)..(300): Homolog of NCBI NO: 7106157 NR Description: SfUCPa [Symplocarpus foetidus]
  misc_feature (4)..(299): Homolog of NCBI NO: 22002462 NR Description: mitochondrial uncoupling protein [Helicodiceros
  misc_feature (5)..(302): Homolog of NCBI NO: 18921040 NR Description: putative uncoupling protein [Lycopersicon
  misc_feature (5)..(302): Homolog of NCBI NO: 7489287 NR Description: uncoupling protein (clone StUCP7), mitochonrial -
  misc_feature (1)..(306): Homolog of NCBI NO: 25295878 NR Description: uncoupling protein [imported] - Arabidopsis
  misc_feature (1)..(306): Homolog of NCBI NO: 15232420 NR Description: uncoupling protein (ucp/PUMP) [Arabidopsis
MVAAGKSDLSLPKTFACSAFAACVGEVCTIPLDTAKVRLQLQKSALAGDVTLPKYRGLLGTVGTIAREEGLRSLWKGVVPGLHRQCLFGGLRIGMYEPVKNLYVGKDFVGDVPLSKKILAGLTTGALGIMVANPTDLVKVRLQAEGKLAAGAPRRYSGALNAYSTIVRQEGVRALWTGLGPNVARNAIINAAELASYDQVKETILKIPGFTDNVVTHILSGLGAGFFAVCIGSPVDVVKSRMMGDSGAYKGTIDCFVKTLKSDGPMAFYKGFIPNFGRLGSWNVIMFLTLEQAKKYVRELDASKRN

SEQ ID NO: 41423 - protein, 212 aa, Arabidopsis thaliana
  peptide (1)..(212): Ceres Seq. ID no. 15222732
  misc_feature: Pfam Name: Mito_carr Pfam Description: Mitochondrial carrier protein
  misc_feature (1)..(185): Homolog of NCBI NO: 14599482 NR Description: putative mitochondrial uncoupling protein
  misc_feature (1)..(206): Homolog of NCBI NO: 18424178 NR Description: uncoupling protein (AtUCP2) [Arabidopsis
  misc_feature (1)..(205): Homolog of NCBI NO: 13537347 NR Description: uncoupling protein [Oryza sativa (japonica
  misc_feature (1)..(205): Homolog of NCBI NO: 19401698 NR Description: uncoupling protein [Zea mays]
  misc_feature (1)..(206): Homolog of NCBI NO: 7106157 NR Description: SfUCPa [Symplocarpus foetidus]
  misc_feature (1)..(205): Homolog of NCBI NO: 22002462 NR Description: mitochondrial uncoupling protein [Helicodiceros
  misc_feature (1)..(208): Homolog of NCBI NO: 18921040 NR Description: putative uncoupling protein [Lycopersicon
  misc_feature (1)..(208): Homolog of NCBI NO: 7489287 NR Description: uncoupling protein (clone StUCP7), mitochonrial -
  misc_feature (1)..(212): Homolog of NCBI NO: 25295878 NR Description: uncoupling protein [imported] - Arabidopsis
  misc_feature (1)..(212): Homolog of NCBI NO: 15232420 NR Description: uncoupling protein (ucp/PUMP) [Arabidopsis
  misc_feature (1)..(185): Homolog of NCBI NO: 14599482 NR Description: putative mitochondrial uncoupling protein
  misc_feature (1)..(206): Homolog of NCBI NO: 18424178 NR Description: uncoupling protein (AtUCP2) [Arabidopsis
  misc_feature (1)..(205): Homolog of NCBI NO: 13537347 NR Description: uncoupling protein [Oryza sativa (japonica
  misc_feature (1)..(205): Homolog of NCBI NO: 19401698 NR Description: uncoupling protein [Zea mays]
  misc_feature (1)..(206): Homolog of NCBI NO: 7106157 NR Description: SfUCPa [Symplocarpus foetidus]
  misc_feature (1)..(205): Homolog of NCBI NO: 22002462 NR Description: mitochondrial uncoupling protein [Helicodiceros
  misc_feature (1)..(208): Homolog of NCBI NO: 18921040 NR Description: putative uncoupling protein [Lycopersicon
  misc_feature (1)..(208): Homolog of NCBI NO: 7489287 NR Description: uncoupling protein (clone StUCP7), mitochonrial -
  misc_feature (1)..(212): Homolog of NCBI NO: 25295878 NR Description: uncoupling protein [imported] - Arabidopsis
  misc_feature (1)..(212): Homolog of NCBI NO: 15232420 NR Description: uncoupling protein (ucp/PUMP) [Arabidopsis
MYEPVKNLYVGKDFVGDVPLSKKILAGLTTGALGIMVANPTDLVKVRLQAEGKLAAGAPRRYSGALNAYSTIVRQEGVRALWTGLGPNVARNAIINAAELASYDQVKETILKIPGFTDNVVTHILSGLGAGFFAVCIGSPVDVVKSRMMGDSGAYKGTIDCFVKTLKSDGPMAFYKGFIPNFGRLGSWNVIMFLTLEQAKKYVRELDASKRN

SEQ ID NO: 41424 - protein, 177 aa, Arabidopsis thaliana
  peptide (1)..(177): Ceres Seq. ID no. 15222733
  misc_feature: Pfam Name: Mito_carr Pfam Description: Mitochondrial carrier protein
  misc_feature (1)..(150): Homolog of NCBI NO: 14599482 NR Description: putative mitochondrial uncoupling protein
  misc_feature (1)..(171): Homolog of NCBI NO: 18424178 NR Description: uncoupling protein (AtUCP2) [Arabidopsis
  misc_feature (1)..(170): Homolog of NCBI NO: 13537347 NR Description: uncoupling protein [Oryza sativa (japonica
  misc_feature (1)..(170): Homolog of NCBI NO: 19401698 NR Description: uncoupling protein [Zea mays]
  misc_feature (1)..(171): Homolog of NCBI NO: 7106157 NR Description: SfUCPa [Symplocarpus foetidus]
  misc_feature (1)..(170): Homolog of NCBI NO: 22002462 NR Description: mitochondrial uncoupling protein [Helicodiceros
  misc_feature (1)..(173): Homolog of NCBI NO: 18921040 NR Description: putative uncoupling protein [Lycopersicon
  misc_feature (1)..(173): Homolog of NCBI NO: 7489287 NR Description: uncoupling protein (clone StUCP7), mitochonrial -
  misc_feature (1)..(177): Homolog of NCBI NO: 25295878 NR Description: uncoupling protein [imported] - Arabidopsis
  misc_feature (1)..(177): Homolog of NCBI NO: 15232420 NR Description: uncoupling protein (ucp/PUMP) [Arabidopsis
  misc_feature (1)..(150): Homolog of NCBI NO: 14599482 NR Description: putative mitochondrial uncoupling protein
  misc_feature (1)..(171): Homolog of NCBI NO: 18424178 NR Description: uncoupling protein (AtUCP2) [Arabidopsis
  misc_feature (1)..(170): Homolog of NCBI NO: 13537347 NR Description: uncoupling protein [Oryza sativa (japonica
  misc_feature (1)..(170): Homolog of NCBI NO: 19401698 NR Description: uncoupling protein [Zea mays]
  misc_feature (1)..(171): Homolog of NCBI NO: 7106157 NR Description: SfUCPa [Symplocarpus foetidus]
  misc_feature (1)..(170): Homolog of NCBI NO: 22002462 NR Description: mitochondrial uncoupling protein [Helicodiceros
  misc_feature (1)..(173): Homolog of NCBI NO: 18921040 NR Description: putative uncoupling protein [Lycopersicon
  misc_feature (1)..(173): Homolog of NCBI NO: 7489287 NR Description: uncoupling protein (clone StUCP7), mitochonrial -
  misc_feature (1)..(177): Homolog of NCBI NO: 25295878 NR Description: uncoupling protein [imported] - Arabidopsis
  misc_feature (1)..(177): Homolog of NCBI NO: 15232420 NR Description: uncoupling protein (ucp/PUMP) [Arabidopsis
MVANPTDLVKVRLQAEGKLAAGAPRRYSGALNAYSTIVRQEGVRALWTGLGPNVARNAIINAAELASYDQVKETILKIPGFTDNVVTHILSGLGAGFFAVCIGSPVDVVKSRMMGDSGAYKGTIDCFVKTLKSDGPMAFYKGFIPNFGRLGSWNVIMFLTLEQAKKYVRELDASKRN

SEQ ID NO: 41425 - DNA, 1251 bp, Arabidopsis thaliana
  misc_feature (1)..(1251): Ceres Seq. ID no. 12327879
  misc_feature: MA Experiment ID: 108434 Result: Down-regulated in Transcription
  misc_feature: MA Experiment 108434 PARAMETER Experiment Name: At_Root_Tips_cDNA_P Parameter: Tissue Value: Root Tips
  misc_feature: MA Experiment ID: 108435 Result: Up-regulated in Transcription
  misc_feature: MA Experiment 108435 PARAMETER Experiment Name: At_stm_Mutants_cDNA_P Parameter: Plant Line Value: wt Landsburg vs stm
  misc_feature: MA Experiment 108435 PARAMETER Experiment Name: At_stm_Mutants_cDNA_P Parameter: Tissue Value: Shoot Apical Meristem Region
  misc_feature: MA Experiment ID: 108461 Result: Down-regulated in Transcription
  misc_feature: MA Experiment 108461 PARAMETER Experiment Name: At_Germinating_Seeds_cDNA_P Parameter: Age (day) Value: 1 vs. 0
  misc_feature: MA Experiment 108461 PARAMETER Experiment Name: At_Germinating_Seeds_cDNA_P Parameter: Tissue Value: Germinating Seeds
  misc_feature: MA Experiment ID: 108462 Result: Down-regulated in Transcription
  misc_feature: MA Experiment 108462 PARAMETER Experiment Name: At_Germinating_Seeds_cDNA_P Parameter: Age (day) Value: 2 vs. 0
  misc_feature: MA Experiment 108462 PARAMETER Experiment Name: At_Germinating_Seeds_cDNA_P Parameter: Tissue Value: Germinating Seeds
  misc_feature: MA Experiment ID: 108464 Result: Down-regulated in Transcription
  misc_feature: MA Experiment 108464 PARAMETER Experiment Name: At_Germinating_Seeds_cDNA_P Parameter: Age (day) Value: 4 vs. 0
  misc_feature: MA Experiment 108464 PARAMETER Experiment Name: At_Germinating_Seeds_cDNA_P Parameter: Tissue Value: Germinating Seeds
  misc_feature: MA Experiment ID: 108489 Result: Up-regulated in Transcription
  misc_feature: MA Experiment ID: 108585 Result: Up-regulated in Transcription
  misc_feature: MA Experiment 108585 PARAMETER Experiment Name: At_5mM_NaNP_cDNA_P Parameter: Timepoint (hr) Value: 6
  misc_feature: MA Experiment 108585 PARAMETER Experiment Name: At_5mM_NaNP_cDNA_P Parameter: Tissue Value: Aerial
  misc_feature: MA Experiment 108585 PARAMETER Experiment Name: At_5mM_NaNP_cDNA_P Parameter: Treatment Value: null
  misc_feature: MA Experiment ID: 108594 Result: Up-regulated in Transcription
  misc_feature: MA Experiment 108594 PARAMETER Experiment Name: At_Ler-rhl_Root_cDNA_P Parameter: Plant Line Value: null
  misc_feature: MA Experiment ID: 108595 Result: Up-regulated in Transcription
  misc_feature: MA Experiment 108595 PARAMETER Experiment Name: At_Ler-pi_Ovule_cDNA_P Parameter: Plant Line Value: null
  misc_feature: MA Experiment ID: 20000087 Result: Up-regulated in Transcription
  misc_feature: MA Experiment 20000087 PARAMETER Experiment Name: At_100uM_ABA_Mutants_cDNA_P Parameter: Plant Line Value: WS
  misc_feature: MA Experiment 20000087 PARAMETER Experiment Name: At_100uM_ABA_Mutants_cDNA_P Parameter: Timepoint (hr) Value: 6
  misc_feature: MA Experiment 20000087 PARAMETER Experiment Name: At_100uM_ABA_Mutants_cDNA_P Parameter: Tissue Value: Aerial
  misc_feature: MA Experiment 20000087 PARAMETER Experiment Name: At_100uM_ABA_Mutants_cDNA_P Parameter: Treatment Value: 100uM ABA vs. No Treatment
  misc_feature: MA Experiment ID: 20000111 Result: Up-regulated in Transcription
  misc_feature: MA Experiment 20000111 PARAMETER Experiment Name: At_42deg_Heat_cDNA_P Parameter: Temperature (deg C) Value: 42 vs. 22
  misc_feature: MA Experiment 20000111 PARAMETER Experiment Name: At_42deg_Heat_cDNA_P Parameter: Timepoint (hr) Value: 6
  misc_feature: MA Experiment 20000111 PARAMETER Experiment Name: At_42deg_Heat_cDNA_P Parameter: Tissue Value: Aerial
  misc_feature: MA Experiment ID: 20000113 Result: Up-regulated in Transcription
  misc_feature: MA Experiment 20000113 PARAMETER Experiment Name: At_42deg_Heat_cDNA_P Parameter: Temperature (deg C) Value: 42 vs. 22
  misc_feature: MA Experiment 20000113 PARAMETER Experiment Name: At_42deg_Heat_cDNA_P Parameter: Timepoint (hr) Value: 8
  misc_feature: MA Experiment 20000113 PARAMETER Experiment Name: At_42deg_Heat_cDNA_P Parameter: Tissue Value: Aerial
  misc_feature: MA Experiment ID: 20000173 Result: Up-regulated in Transcription
  misc_feature: MA Experiment 20000173 PARAMETER Experiment Name: At_42deg_Heat_P Parameter: Age (day) Value: 14
  misc_feature: MA Experiment 20000173 PARAMETER Experiment Name: At_42deg_Heat_P Parameter: Organism Value: A. thaliana
  misc_feature: MA Experiment 20000173 PARAMETER Experiment Name: At_42deg_Heat_P Parameter: Plant Line Value: WS
  misc_feature: MA Experiment 20000173 PARAMETER Experiment Name: At_42deg_Heat_P Parameter: Temperature (deg C) Value: 42 vs. 22
  misc_feature: MA Experiment 20000173 PARAMETER Experiment Name: At_42deg_Heat_P Parameter: Timepoint (hr) Value: 6
  misc_feature: MA Experiment 20000173 PARAMETER Experiment Name: At_42deg_Heat_P Parameter: Tissue Value: Aerial
  misc_feature: MA Experiment ID: 20000180 Result: Down-regulated in Transcription
  misc_feature: MA Experiment 20000180 PARAMETER Experiment Name: At_Germinating_Seeds_P Parameter: Age (hr) Value: 24 vs. 0
  misc_feature: MA Experiment 20000180 PARAMETER Experiment Name: At_Germinating_Seeds_P Parameter: Tissue Value: Germinating Seeds
  misc_feature: MA Experiment ID: 20000182 Result: Down-regulated in Transcription
  misc_feature: MA Experiment 20000182 PARAMETER Experiment Name: At_2mM_SA_P Parameter: Age (day) Value: 14
  misc_feature: MA Experiment 20000182 PARAMETER Experiment Name: At_2mM_SA_P Parameter: Organism Value: A. thaliana
  misc_feature: MA Experiment 20000182 PARAMETER Experiment Name: At_2mM_SA_P Parameter: Plant Line Value: WS
  misc_feature: MA Experiment 20000182 PARAMETER Experiment Name: At_2mM_SA_P Parameter: Timepoint (hr) Value: 6
  misc_feature: MA Experiment 20000182 PARAMETER Experiment Name: At_2mM_SA_P Parameter: Tissue Value: Aerial
  misc_feature: MA Experiment 20000182 PARAMETER Experiment Name: At_2mM_SA_P Parameter: Treatment Value: 2mM SA vs. No Treatment
  misc_feature: MA Experiment ID: 20000227 Result: Down-regulated in Transcription
  misc_feature: MA Experiment 20000227 PARAMETER Experiment Name: At_Root-Tips-vs-Tops_P Parameter: Tissue Value: Root Tips vs. Root Tops
  misc_feature: MA Experiment ID: 20000234 Result: Up-regulated in Transcription
  misc_feature: MA Experiment 20000234 PARAMETER Experiment Name: At_Siliques_P Parameter: Age (day) Value: 21
  misc_feature: MA Experiment 20000234 PARAMETER Experiment Name: At_Siliques_P Parameter: Organism Value: A. thaliana
  misc_feature: MA Experiment 20000234 PARAMETER Experiment Name: At_Siliques_P Parameter: Plant Line Value: WS
  misc_feature: MA Experiment 20000234 PARAMETER Experiment Name: At_Siliques_P Parameter: Tissue Value: Less Than 5mm Siliques vs. Whole Plant
  misc_feature: MA Experiment ID: 20000264 Result: Up-regulated in Transcription
  misc_feature: MA Experiment 20000264 PARAMETER Experiment Name: At_Open_Flower_P Parameter: Age (day) Value: 21
  misc_feature: MA Experiment 20000264 PARAMETER Experiment Name: At_Open_Flower_P Parameter: Plant Line Value: WS
  misc_feature: MA Experiment 20000264 PARAMETER Experiment Name: At_Open_Flower_P Parameter: Tissue Value: Open Flower vs. Whole Plant
  misc_feature: MA Experiment ID: 20000286 Result: Up-regulated in Transcription
  misc_feature: MA Experiment 20000286 PARAMETER Experiment Name: At_Open_Flower_P Parameter: Age (day) Value: 21
  misc_feature: MA Experiment 20000286 PARAMETER Experiment Name: At_Open_Flower_P Parameter: Plant Line Value: WS
  misc_feature: MA Experiment 20000286 PARAMETER Experiment Name: At_Open_Flower_P Parameter: Tissue Value: Half Open vs. Whole Plant
  misc_feature: MA Experiment ID: 20000437 Result: Up-regulated in Transcription
  misc_feature: MA Experiment 20000437 PARAMETER Experiment Name: At_Drought_P Parameter: Age (day) Value: 8
  misc_feature: MA Experiment 20000437 PARAMETER Experiment Name: At_Drought_P Parameter: Organism Value: A. thaliana
  misc_feature: MA Experiment 20000437 PARAMETER Experiment Name: At_Drought_P Parameter: Plant Line Value: WS
  misc_feature: MA Experiment 20000437 PARAMETER Experiment Name: At_Drought_P Parameter: Timepoint (hr) Value: 24
  misc_feature: MA Experiment 20000437 PARAMETER Experiment Name: At_Drought_P Parameter: Tissue Value: Whole Plant
  misc_feature: MA Experiment 20000437 PARAMETER Experiment Name: At_Drought_P Parameter: Treatment Value: Drought vs. No Drought
  misc_feature: MA Experiment ID: 20000438 Result: Down-regulated in Transcription
  misc_feature: MA Experiment 20000438 PARAMETER Experiment Name: At_Shoots__P Parameter: Age (day) Value: 14
  misc_feature: MA Experiment 20000438 PARAMETER Experiment Name: At_Shoots__P Parameter: Tissue Value: Shoots vs. Whole Plant
  misc_feature: MA Experiment ID: 20000451 Result: Up-regulated in Transcription
  misc_feature: MA Experiment 20000451 PARAMETER Experiment Name: At_CS6879_Shoots-Roots_P Parameter: Age (day) Value: 14
  misc_feature: MA Experiment 20000451 PARAMETER Experiment Name: At_CS6879_Shoots-Roots_P Parameter: Organism Value: A. thaliana
  misc_feature: MA Experiment 20000451 PARAMETER Experiment Name: At_CS6879_Shoots-Roots_P Parameter: Plant Line Value: CS6879 vs. WS
  misc_feature: MA Experiment 20000451 PARAMETER Experiment Name: At_CS6879_Shoots-Roots_P Parameter: Tissue Value: Roots
  misc_feature: MA Experiment ID: 20000453 Result: Up-regulated in Transcription
  misc_feature: MA Experiment 20000453 PARAMETER Experiment Name: At_100uM_ABA_P Parameter: Age (day) Value: 15
  misc_feature: MA Experiment 20000453 PARAMETER Experiment Name: At_100uM_ABA_P Parameter: Organism Value: A. thaliana
  misc_feature: MA Experiment 20000453 PARAMETER Experiment Name: At_100uM_ABA_P Parameter: Plant Line Value: WS
  misc_feature: MA Experiment 20000453 PARAMETER Experiment Name: At_100uM_ABA_P Parameter: Timepoint (hr) Value: 24
  misc_feature: MA Experiment 20000453 PARAMETER Experiment Name: At_100uM_ABA_P Parameter: Tissue Value: Aerial
  misc_feature: MA Experiment 20000453 PARAMETER Experiment Name: At_100uM_ABA_P Parameter: Treatment Value: 100uM ABA vs. No Treatment
  misc_feature: MA Experiment ID: 20000495 Result: Up-regulated in Transcription
  misc_feature: MA Experiment 20000495 PARAMETER Experiment Name: At_Guard_Cells_P Parameter: Harvest Date Value: 8/2/2002
  misc_feature: MA Experiment 20000495 PARAMETER Experiment Name: At_Guard_Cells_P Parameter: Organism Value: A. thaliana
  misc_feature: MA Experiment 20000495 PARAMETER Experiment Name: At_Guard_Cells_P Parameter: Tissue Value: Guard Cells vs. Leaves
  misc_feature: MA Experiment ID: 20000794 Result: Up-regulated in Transcription
  misc_feature: MA Experiment 20000794 PARAMETER Experiment Name: At_Petals_P Parameter: Age (day) Value: 23-25 days
  misc_feature: MA Experiment 20000794 PARAMETER Experiment Name: At_Petals_P Parameter: Plant Line Value: WS
  misc_feature: MA Experiment 20000794 PARAMETER Experiment Name: At_Petals_P Parameter: Tissue Value: Petals vs. Whole plant
  misc_feature: MA Experiment ID: 20001451 Result: Up-regulated in Transcription
  misc_feature: MA Experiment 20001451 PARAMETER Experiment Name: At_Far-red-induction_P Parameter: Age (day) Value: 7
  misc_feature: MA Experiment 20001451 PARAMETER Experiment Name: At_Far-red-induction_P Parameter: Light Value: Far-red vs. White
  misc_feature: MA Experiment 20001451 PARAMETER Experiment Name: At_Far-red-induction_P Parameter: Organism Value: A. thaliana
  misc_feature: MA Experiment 20001451 PARAMETER Experiment Name: At_Far-red-induction_P Parameter: Plant Line Value: Columbia
  misc_feature: MA Experiment 20001451 PARAMETER Experiment Name: At_Far-red-induction_P Parameter: Timepoint (hr) Value: 24
  misc_feature: MA Experiment 20001451 PARAMETER Experiment Name: At_Far-red-induction_P Parameter: Tissue Value: Whole Plant
  misc_feature: MA Experiment ID: 20001904 Result: Up-regulated in Transcription
  misc_feature: MA Experiment 20001904 PARAMETER Experiment Name: At_Drought_Reproduction_P Parameter: Age (day) Value: 37
  misc_feature: MA Experiment 20001904 PARAMETER Experiment Name: At_Drought_Reproduction_P Parameter: Organism Value: A. thaliana
  misc_feature: MA Experiment 20001904 PARAMETER Experiment Name: At_Drought_Reproduction_P Parameter: Plant Line Value: WS
  misc_feature: MA Experiment 20001904 PARAMETER Experiment Name: At_Drought_Reproduction_P Parameter: Timepoint (day) Value: 7
  misc_feature: MA Experiment 20001904 PARAMETER Experiment Name: At_Drought_Reproduction_P Parameter: Tissue Value: Rosettes
  misc_feature: MA Experiment 20001904 PARAMETER Experiment Name: At_Drought_Reproduction_P Parameter: Treatment Value: Drought vs. No Drought
  misc_feature: MA Experiment ID: 20001906 Result: Up-regulated in Transcription
  misc_feature: MA Experiment 20001906 PARAMETER Experiment Name: At_Drought_Reproduction_P Parameter: Age (day) Value: 35
  misc_feature: MA Experiment 20001906 PARAMETER Experiment Name: At_Drought_Reproduction_P Parameter: Organism Value: A. thaliana
  misc_feature: MA Experiment 20001906 PARAMETER Experiment Name: At_Drought_Reproduction_P Parameter: Plant Line Value: WS
  misc_feature: MA Experiment 20001906 PARAMETER Experiment Name: At_Drought_Reproduction_P Parameter: Timepoint (day) Value: 5
  misc_feature: MA Experiment 20001906 PARAMETER Experiment Name: At_Drought_Reproduction_P Parameter: Tissue Value: Siliques
  misc_feature: MA Experiment 20001906 PARAMETER Experiment Name: At_Drought_Reproduction_P Parameter: Treatment Value: Drought vs. No Drought
  misc_feature: MA Experiment ID: 20001907 Result: Up-regulated in Transcription
  misc_feature: MA Experiment 20001907 PARAMETER Experiment Name: At_Drought_Reproduction_P Parameter: Age (day) Value: 37
  misc_feature: MA Experiment 20001907 PARAMETER Experiment Name: At_Drought_Reproduction_P Parameter: Organism Value: A. thaliana
  misc_feature: MA Experiment 20001907 PARAMETER Experiment Name: At_Drought_Reproduction_P Parameter: Plant Line Value: WS
  misc_feature: MA Experiment 20001907 PARAMETER Experiment Name: At_Drought_Reproduction_P Parameter: Timepoint (day) Value: 7
  misc_feature: MA Experiment 20001907 PARAMETER Experiment Name: At_Drought_Reproduction_P Parameter: Tissue Value: Siliques
  misc_feature: MA Experiment 20001907 PARAMETER Experiment Name: At_Drought_Reproduction_P Parameter: Treatment Value: Drought vs. No Drought
  misc_feature: MA Experiment ID: 20001908 Result: Up-regulated in Transcription
  misc_feature: MA Experiment 20001908 PARAMETER Experiment Name: At_Drought_Reproduction_P Parameter: Age (day) Value: 40
  misc_feature: MA Experiment 20001908 PARAMETER Experiment Name: At_Drought_Reproduction_P Parameter: Organism Value: A. thaliana
  misc_feature: MA Experiment 20001908 PARAMETER Experiment Name: At_Drought_Reproduction_P Parameter: Plant Line Value: WS
  misc_feature: MA Experiment 20001908 PARAMETER Experiment Name: At_Drought_Reproduction_P Parameter: Timepoint (day) Value: 10
  misc_feature: MA Experiment 20001908 PARAMETER Experiment Name: At_Drought_Reproduction_P Parameter: Tissue Value: Siliques
  misc_feature: MA Experiment 20001908 PARAMETER Experiment Name: At_Drought_Reproduction_P Parameter: Treatment Value: Drought vs. No Drought
  misc_feature: MA Experiment ID: 20001911 Result: Up-regulated in Transcription
  misc_feature: MA Experiment 20001911 PARAMETER Experiment Name: At_Drought_Reproduction_P Parameter: Age (day) Value: 40
  misc_feature: MA Experiment 20001911 PARAMETER Experiment Name: At_Drought_Reproduction_P Parameter: Organism Value: A. thaliana
  misc_feature: MA Experiment 20001911 PARAMETER Experiment Name: At_Drought_Reproduction_P Parameter: Plant Line Value: WS
  misc_feature: MA Experiment 20001911 PARAMETER Experiment Name: At_Drought_Reproduction_P Parameter: Timepoint (day) Value: 10
  misc_feature: MA Experiment 20001911 PARAMETER Experiment Name: At_Drought_Reproduction_P Parameter: Tissue Value: Flowers
  misc_feature: MA Experiment 20001911 PARAMETER Experiment Name: At_Drought_Reproduction_P Parameter: Treatment Value: Drought vs. No Drought
aaaaatctcagaaataactttcacaacagagaaagagttccaaatcgtttgtttgtattttgtacgatcaaagttgttggtacttgtaagataatcgaaaccaaagatgcggatgagctgtaatggatgcagagttcttcggaaagggtgtagtgaggattgtagtataaggccgtgtttggcttggatcaaatcgcctgaagcgcaagctaacgcaactgtctttctcgccaagttctatggccgtgctggactcatgaacctcatcaacgccggtcccaatcaccttcgtcctggttagtggtttttcttttaaccttttgatggcagttttgaattatactttccaacgatgccgttttgtcttaggtcattttttgaacctaattagatcaaatatttttgcagggattttccgatcgttgttgcacgaagcttgtgggaggattgtgaatccgatctatggttcggtgggtttgttgtggtcggggaattggcagctttgtcaagacgccgtggaggctgtgatgaaaggagaaccgatcaaagagatcgccacagacgctgcgacgatcggccaaggtccgcctcttaagatctacgacatccgacatatctccaaggatgataactctgccgccgcggctactggctcaaccgatttgaaacttgcgaaaactcgccgtgctaagcgggtctccaccgtcgcgatacaggcggaatcggagggaaagtctgacgaggctagtcacgattcgtcgttgagtcatcagtctgaaatagtggctgctcatgaaggagagagcaaggaatccgagagcaatgtctctgaggttttggcattctcgcctccggctgtgaagggctccggcgagataaagcttgacctaactttaaggctcgaaccggtgtcacgtgcgtatcatgtggtacctgttaagaagagaaggatcggcgtgtttggcacgtgtcagaaggagagcacgtgtaagactgagcttatgctctaagctccgttttagctatactcagaagttttgcccccatcagctctattcggctcggctctgatgatcttcaagtcgagccggtaacttttttttaatatatagttctctatttccccctttaatgttcactttccatttgtgacaaaagaatagagtatatgtacaaaattatttacagagattaattcaagaattggctgtagatattatctattttttaacgaataaaggcaaaaaattt

SEQ ID NO: 41426 - protein, 228 aa, Arabidopsis thaliana
  peptide (1)..(228): Ceres Seq. ID no. 12327880
  misc_feature (18)..(79): Homolog of NCBI NO: 15240739 NR Description: putative protein
  misc_feature (18)..(77): Homolog of NCBI NO: 21553886 NR Description: unknown [Arabidopsis thaliana]
  misc_feature (18)..(77): Homolog of NCBI NO: 15229644 NR Description: putative protein
  misc_feature (19)..(144): Homolog of NCBI NO: 15221429 NR Description: expressed protein
  misc_feature (19)..(155): Homolog of NCBI NO: 34895540 NR Description: unnamed protein product [Oryza sativa (japonica
  misc_feature (15)..(111): Homolog of NCBI NO: 15219829 NR Description: hypothetical protein; protein id: At1g67100.1
  misc_feature (19)..(152): Homolog of NCBI NO: 34914608 NR Description: P0520B06.17 [Oryza sativa (japonica
  misc_feature (19)..(228): Homolog of NCBI NO: 32395577 NR Description: seed specific protein Bn15D17A [Brassica napus]
  misc_feature (19)..(228): Homolog of NCBI NO: 18396229 NR Description: expressed protein
  misc_feature (19)..(228): Homolog of NCBI NO: 21554191 NR Description: unknown [Arabidopsis thaliana]
MAVLNYTFQRCRFVLGHFLNLIRSNIFAGIFRSLLHEACGRIVNPIYGSVGLLWSGNWQLCQDAVEAVMKGEPIKEIATDAATIGQGPPLKIYDIRHISKDDNSAAAATGSTDLKLAKTRRAKRVSTVAIQAESEGKSDEASHDSSLSHQSEIVAAHEGESKESESNVSEVLAFSPPAVKGSGEIKLDLTLRLEPVSRAYHVVPVKKRRIGVFGTCQKESTCKTELML

SEQ ID NO: 41427 - protein, 160 aa, Arabidopsis thaliana
  peptide (1)..(160): Ceres Seq. ID no. 12327881
  misc_feature (1)..(63): Homolog of NCBI NO: 21592894 NR Description: unknown [Arabidopsis thaliana]
  misc_feature (1)..(11): Homolog of NCBI NO: 21593577 NR Description: unknown [Arabidopsis thaliana]
  misc_feature (1)..(11): Homolog of NCBI NO: 15240739 NR Description: putative protein
  misc_feature (1)..(76): Homolog of NCBI NO: 15221429 NR Description: expressed protein
  misc_feature (1)..(87): Homolog of NCBI NO: 34895540 NR Description: unnamed protein product [Oryza sativa (japonica
  misc_feature (1)..(43): Homolog of NCBI NO: 15219829 NR Description: hypothetical protein; protein id: At1g67100.1
  misc_feature (1)..(84): Homolog of NCBI NO: 34914608 NR Description: P0520B06.17 [Oryza sativa (japonica
  misc_feature (1)..(160): Homolog of NCBI NO: 32395577 NR Description: seed specific protein Bn15D17A [Brassica napus]
  misc_feature (1)..(160): Homolog of NCBI NO: 18396229 NR Description: expressed protein
  misc_feature (1)..(160): Homolog of NCBI NO: 21554191 NR Description: unknown [Arabidopsis thaliana]
MKGEPIKEIATDAATIGQGPPLKIYDIRHISKDDNSAAAATGSTDLKLAKTRRAKRVSTVAIQAESEGKSDEASHDSSLSHQSEIVAAHEGESKESESNVSEVLAFSPPAVKGSGEIKLDLTLRLEPVSRAYHVVPVKKRRIGVFGTCQKESTCKTELML

SEQ ID NO: 41428 - DNA, 1963 bp, Arabidopsis thaliana
  misc_feature (1)..(1963): Ceres Seq. ID no. 13488683
  misc_feature: MA Experiment ID: 108573 Result: Up-regulated in Transcription
  misc_feature: MA Experiment 108573 PARAMETER Experiment Name: At_Drought_cDNA_P Parameter: Timepoint (hr) Value: 6
  misc_feature: MA Experiment 108573 PARAMETER Experiment Name: At_Drought_cDNA_P Parameter: Tissue Value: Aerial
  misc_feature: MA Experiment 108573 PARAMETER Experiment Name: At_Drought_cDNA_P Parameter: Treatment Value: Drought vs. No Drought
  misc_feature: MA Experiment ID: 108585 Result: Up-regulated in Transcription
  misc_feature: MA Experiment 108585 PARAMETER Experiment Name: At_5mM_NaNP_cDNA_P Parameter: Timepoint (hr) Value: 6
  misc_feature: MA Experiment 108585 PARAMETER Experiment Name: At_5mM_NaNP_cDNA_P Parameter: Tissue Value: Aerial
  misc_feature: MA Experiment 108585 PARAMETER Experiment Name: At_5mM_NaNP_cDNA_P Parameter: Treatment Value: null
  misc_feature: MA Experiment ID: 20000069 Result: Up-regulated in Transcription
  misc_feature: MA Experiment 20000069 PARAMETER Experiment Name: At_100uM_ABA_Mutants_cDNA_P Parameter: Plant Line Value: CS23
  misc_feature: MA Experiment 20000069 PARAMETER Experiment Name: At_100uM_ABA_Mutants_cDNA_P Parameter: Timepoint (hr) Value: 6
  misc_feature: MA Experiment 20000069 PARAMETER Experiment Name: At_100uM_ABA_Mutants_cDNA_P Parameter: Tissue Value: Aerial
  misc_feature: MA Experiment 20000069 PARAMETER Experiment Name: At_100uM_ABA_Mutants_cDNA_P Parameter: Treatment Value: 100uM ABA vs. No Treatment
  misc_feature: MA Experiment ID: 20000070 Result: Up-regulated in Transcription
  misc_feature: MA Experiment 20000070 PARAMETER Experiment Name: At_100uM_ABA_Mutants_cDNA_P Parameter: Plant Line Value: CS24
  misc_feature: MA Experiment 20000070 PARAMETER Experiment Name: At_100uM_ABA_Mutants_cDNA_P Parameter: Timepoint (hr) Value: 6
  misc_feature: MA Experiment 20000070 PARAMETER Experiment Name: At_100uM_ABA_Mutants_cDNA_P Parameter: Tissue Value: Aerial
  misc_feature: MA Experiment 20000070 PARAMETER Experiment Name: At_100uM_ABA_Mutants_cDNA_P Parameter: Treatment Value: 100uM ABA vs. No Treatment
  misc_feature: MA Experiment ID: 20000072 Result: Up-regulated in Transcription
  misc_feature: MA Experiment 20000072 PARAMETER Experiment Name: At_100uM_ABA_Mutants_cDNA_P Parameter: Plant Line Value: CS8105
  misc_feature: MA Experiment 20000072 PARAMETER Experiment Name: At_100uM_ABA_Mutants_cDNA_P Parameter: Timepoint (hr) Value: 6
  misc_feature: MA Experiment 20000072 PARAMETER Experiment Name: At_100uM_ABA_Mutants_cDNA_P Parameter: Tissue Value: Aerial
  misc_feature: MA Experiment 20000072 PARAMETER Experiment Name: At_100uM_ABA_Mutants_cDNA_P Parameter: Treatment Value: 100uM ABA vs. No Treatment
  misc_feature: MA Experiment ID: 20000086 Result: Up-regulated in Transcription
  misc_feature: MA Experiment 20000086 PARAMETER Experiment Name: At_100uM_ABA_Mutants_cDNA_P Parameter: Plant Line Value: CS22
  misc_feature: MA Experiment 20000086 PARAMETER Experiment Name: At_100uM_ABA_Mutants_cDNA_P Parameter: Timepoint (hr) Value: 6
  misc_feature: MA Experiment 20000086 PARAMETER Experiment Name: At_100uM_ABA_Mutants_cDNA_P Parameter: Tissue Value: Aerial
  misc_feature: MA Experiment 20000086 PARAMETER Experiment Name: At_100uM_ABA_Mutants_cDNA_P Parameter: Treatment Value: 100uM ABA vs. No Treatment
  misc_feature: MA Experiment ID: 20000088 Result: Up-regulated in Transcription
  misc_feature: MA Experiment 20000088 PARAMETER Experiment Name: At_100uM_ABA_Mutants_cDNA_P Parameter: Plant Line Value: Landsberg
  misc_feature: MA Experiment 20000088 PARAMETER Experiment Name: At_100uM_ABA_Mutants_cDNA_P Parameter: Timepoint (hr) Value: 6
  misc_feature: MA Experiment 20000088 PARAMETER Experiment Name: At_100uM_ABA_Mutants_cDNA_P Parameter: Tissue Value: Aerial
  misc_feature: MA Experiment 20000088 PARAMETER Experiment Name: At_100uM_ABA_Mutants_cDNA_P Parameter: Treatment Value: 100uM ABA vs. No Treatment
  misc_feature: MA Experiment ID: 20000185 Result: Up-regulated in Transcription
  misc_feature: MA Experiment 20000185 PARAMETER Experiment Name: At_Roots__P Parameter: Age (day) Value: 7 vs. 21
  misc_feature: MA Experiment 20000185 PARAMETER Experiment Name: At_Roots__P Parameter: Organism Value: A. thaliana
  misc_feature: MA Experiment 20000185 PARAMETER Experiment Name: At_Roots__P Parameter: Tissue Value: Roots vs. Whole Plant
  misc_feature: MA Experiment ID: 20001457 Result: Up-regulated in Transcription
  misc_feature: MA Experiment 20001457 PARAMETER Experiment Name: At_50mM_NH4NO3_L-to-H_P Parameter: Age (day) Value: Undefined
  misc_feature: MA Experiment 20001457 PARAMETER Experiment Name: At_50mM_NH4NO3_L-to-H_P Parameter: Organism Value: Undefined
  misc_feature: MA Experiment 20001457 PARAMETER Experiment Name: At_50mM_NH4NO3_L-to-H_P Parameter: Plant Line Value: Undefined
  misc_feature: MA Experiment 20001457 PARAMETER Experiment Name: At_50mM_NH4NO3_L-to-H_P Parameter: Timepoint (hr) Value: 0.5
  misc_feature: MA Experiment 20001457 PARAMETER Experiment Name: At_50mM_NH4NO3_L-to-H_P Parameter: Tissue Value: Siliques
  misc_feature: MA Experiment 20001457 PARAMETER Experiment Name: At_50mM_NH4NO3_L-to-H_P Parameter: Treatment Value: 50mM NH4NO3 vs. 100mM Manitol
  misc_feature: MA Experiment ID: 20001905 Result: Up-regulated in Transcription
  misc_feature: MA Experiment 20001905 PARAMETER Experiment Name: At_Drought_Reproduction_P Parameter: Age (day) Value: 40
  misc_feature: MA Experiment 20001905 PARAMETER Experiment Name: At_Drought_Reproduction_P Parameter: Organism Value: A. thaliana
  misc_feature: MA Experiment 20001905 PARAMETER Experiment Name: At_Drought_Reproduction_P Parameter: Plant Line Value: WS
  misc_feature: MA Experiment 20001905 PARAMETER Experiment Name: At_Drought_Reproduction_P Parameter: Timepoint (day) Value: 10
  misc_feature: MA Experiment 20001905 PARAMETER Experiment Name: At_Drought_Reproduction_P Parameter: Tissue Value: Rosettes
  misc_feature: MA Experiment 20001905 PARAMETER Experiment Name: At_Drought_Reproduction_P Parameter: Treatment Value: Drought vs. No Drought
gccggtcaagcgtatcaaatacccaatcacgcgaacttttctccgcctcttctccactccaaaattcttctccgtctttctcccgtcaccgtcgaataaagcctgagatctccgaattctgatcagcaactatgcattcaagtcatctccttctcgaggaaccgatcaggatgacttcaatcctcgaaccttctaaatcaagtttcttcccggctttgactaagattgttgggactctaggtccgaaatctcgatccgtcgaggtgattgctggttgtctcaaagctggaatgtccgtggctcgattcgatttctcttggtgcgatgctgattatcaccaggagacgctggagaatctgaagatagctgtgaagagcactaagaagctttgtgctgttatgctagacactgtaggacctgagttgcaagttattaacaagactgagaaagctatttctcttaaagctgatggccttgtaactttgactccgagtcaagatcaagaagcctcctctgaagtccttcccattaattttgatgggttagcgaaggcggttaagaaaggagacactatctttgttggacaatacctcttcactggtagtgaaacaacttcagtttggcttgaggttgaagaagttaaaggagatgatgtcatttgtatttcaaggaatgctgctactctgggtggtccgttattcacattgcacgtctctcaagttcacattgatatgccaaccctaactgagaaggataaggaggttataagtacatggggagttcagaataagatcgactttctctcattatcttattgtcgacatgcagaagatgttcgccaggcccgtgagttgcttaacagttgtggtgacctctctcaaacacaaatatttgcgaagattgagaatgaagagggactaacccactttgacgaaattctacaagaagcagatggcattattctttctcgtgggaatttgggtatcgatctacctccggaaaaggtgtttttgttccaaaaggctgctctttacaagtgtaacatggctggaaagcctgccgttcttactcgtgttgtagacagtatgacagacaatctgcggccaactcgtgcagaggcaactgatgttgctaatgctgttttagatggaagtgatgcaattcttcttggtgctgagactcttcgtggattgtaccctgttgaaaccatatcaactgttggtagaatctgttgtgaggcagagaaagttttcaaccaagatttgttctttaagaagactgtcaagtatgttggagaaccaatgactcacttggaatctattgcttcttctgctgtacgggcagcaatcaaggttaaggcatccgtaattatatgcttcacctcgtctggcagagcagcaaggttgattgccaaataccgtccaactatgcccgttctctctgttgtcattccccgacttacgacaaatcagctgaagtggagctttagcggagcctttgaggcaaggcagtcacttattgtcagaggtcttttccccatgcttgctgatcctcgtcaccctgcggaatcaacaagtgcaacaaatgagtcggttcttaaagtggctctagaccatgggaagcaagccggagtgatcaagtcacatgacagagttgtggtctgtcagaaagtgggagatgcgtccgtggtcaaaatcatcgagctagaggattagaagaagcagagtgagtcgttgtctcggtcttttttgttctgttactaatcaattttatttccttcactaaaactcttggtgccgtccaagaaaaatccttgcaatcattgtttctcgccggctatatgctagataccggagtgaaaatatatctcctgggcttttgttttcgtatttaggagattgatgtttccaagttatgatataaaccactttccactttatgcataatatctccatcccctagt

SEQ ID NO: 41429 - protein, 527 aa, Arabidopsis thaliana
  peptide (1)..(527): Ceres Seq. ID no. 13488684
  misc_feature (394)..(524): Pfam Name: Pyruvate kinase, alpha/beta domain Pfam Description: Pyruvate kinase, alpha/beta domain
  misc_feature (37)..(527): Homolog of NCBI NO: 20562907 NR Description: pyruvate kinase-like [Deschampsia antarctica]
  misc_feature (54)..(527): Homolog of NCBI NO: 25287747 NR Description: probable pyruvate kinase [imported] - Arabidopsis
  misc_feature (14)..(527): Homolog of NCBI NO: 11260409 NR Description: pyruvate kinase-like protein - Arabidopsis
  misc_feature (1)..(527): Homolog of NCBI NO: 18409740 NR Description: pyruvate kinase, putative [Arabidopsis thaliana]
  misc_feature (1)..(527): Homolog of NCBI NO: 23308151 NR Description: At2g36580/F1O11.21 [Arabidopsis thaliana]
  misc_feature (1)..(527): Homolog of NCBI NO: 21537122 NR Description: putative pyruvate kinase [Arabidopsis thaliana]
  misc_feature (1)..(527): Homolog of NCBI NO: 18404169 NR Description: pyruvate kinase, putative [Arabidopsis thaliana]
MHSSHLLLEEPIRMTSILEPSKSSFFPALTKIVGTLGPKSRSVEVIAGCLKAGMSVARFDFSWCDADYHQETLENLKIAVKSTKKLCAVMLDTVGPELQVINKTEKAISLKADGLVTLTPSQDQEASSEVLPINFDGLAKAVKKGDTIFVGQYLFTGSETTSVWLEVEEVKGDDVICISRNAATLGGPLFTLHVSQVHIDMPTLTEKDKEVISTWGVQNKIDFLSLSYCRHAEDVRQARELLNSCGDLSQTQIFAKIENEEGLTHFDEILQEADGIILSRGNLGIDLPPEKVFLFQKAALYKCNMAGKPAVLTRVVDSMTDNLRPTRAEATDVANAVLDGSDAILLGAETLRGLYPVETISTVGRICCEAEKVFNQDLFFKKTVKYVGEPMTHLESIASSAVRAAIKVKASVIICFTSSGRAARLIAKYRPTMPVLSVVIPRLTTNQLKWSFSGAFEARQSLIVRGLFPMLADPRHPAESTSATNESVLKVALDHGKQAGVIKSHDRVVVCQKVGDASVVKIIELED

SEQ ID NO: 41430 - protein, 514 aa, Arabidopsis thaliana
  peptide (1)..(514): Ceres Seq. ID no. 13488685
  misc_feature (381)..(511): Pfam Name: Pyruvate kinase, alpha/beta domain Pfam Description: Pyruvate kinase, alpha/beta domain
  misc_feature (24)..(514): Homolog of NCBI NO: 20562907 NR Description: pyruvate kinase-like [Deschampsia antarctica]
  misc_feature (41)..(514): Homolog of NCBI NO: 25287747 NR Description: probable pyruvate kinase [imported] - Arabidopsis
  misc_feature (1)..(514): Homolog of NCBI NO: 11260409 NR Description: pyruvate kinase-like protein - Arabidopsis
  misc_feature (1)..(514): Homolog of NCBI NO: 18409740 NR Description: pyruvate kinase, putative [Arabidopsis thaliana]
  misc_feature (1)..(514): Homolog of NCBI NO: 23308151 NR Description: At2g36580/F1O11.21 [Arabidopsis thaliana]
  misc_feature (1)..(514): Homolog of NCBI NO: 21537122 NR Description: putative pyruvate kinase [Arabidopsis thaliana]
  misc_feature (1)..(514): Homolog of NCBI NO: 18404169 NR Description: pyruvate kinase, putative [Arabidopsis thaliana]
MTSILEPSKSSFFPALTKIVGTLGPKSRSVEVIAGCLKAGMSVARFDFSWCDADYHQETLENLKIAVKSTKKLCAVMLDTVGPELQVINKTEKAISLKADGLVTLTPSQDQEASSEVLPINFDGLAKAVKKGDTIFVGQYLFTGSETTSVWLEVEEVKGDDVICISRNAATLGGPLFTLHVSQVHIDMPTLTEKDKEVISTWGVQNKIDFLSLSYCRHAEDVRQARELLNSCGDLSQTQIFAKIENEEGLTHFDEILQEADGIILSRGNLGIDLPPEKVFLFQKAALYKCNMAGKPAVLTRVVDSMTDNLRPTRAEATDVANAVLDGSDAILLGAETLRGLYPVETISTVGRICCEAEKVFNQDLFFKKTVKYVGEPMTHLESIASSAVRAAIKVKASVIICFTSSGRAARLIAKYRPTMPVLSVVIPRLTTNQLKWSFSGAFEARQSLIVRGLFPMLADPRHPAESTSATNESVLKVALDHGKQAGVIKSHDRVVVCQKVGDASVVKIIELED

SEQ ID NO: 41431 - protein, 474 aa, Arabidopsis thaliana
  peptide (1)..(474): Ceres Seq. ID no. 13488686
  misc_feature (341)..(471): Pfam Name: Pyruvate kinase, alpha/beta domain Pfam Description: Pyruvate kinase, alpha/beta domain
  misc_feature (1)..(474): Homolog of NCBI NO: 20562907 NR Description: pyruvate kinase-like [Deschampsia antarctica]
  misc_feature (1)..(474): Homolog of NCBI NO: 25287747 NR Description: probable pyruvate kinase [imported] - Arabidopsis
  misc_feature (1)..(474): Homolog of NCBI NO: 11260409 NR Description: pyruvate kinase-like protein - Arabidopsis
  misc_feature (1)..(474): Homolog of NCBI NO: 18409740 NR Description: pyruvate kinase, putative [Arabidopsis thaliana]
  misc_feature (1)..(474): Homolog of NCBI NO: 23308151 NR Description: At2g36580/F1O11.21 [Arabidopsis thaliana]
  misc_feature (1)..(474): Homolog of NCBI NO: 21537122 NR Description: putative pyruvate kinase [Arabidopsis thaliana]
  misc_feature (1)..(474): Homolog of NCBI NO: 18404169 NR Description: pyruvate kinase, putative [Arabidopsis thaliana]
MSVARFDFSWCDADYHQETLENLKIAVKSTKKLCAVMLDTVGPELQVINKTEKAISLKADGLVTLTPSQDQEASSEVLPINFDGLAKAVKKGDTIFVGQYLFTGSETTSVWLEVEEVKGDDVICISRNAATLGGPLFTLHVSQVHIDMPTLTEKDKEVISTWGVQNKIDFLSLSYCRHAEDVRQARELLNSCGDLSQTQIFAKIENEEGLTHFDEILQEADGIILSRGNLGIDLPPEKVFLFQKAALYKCNMAGKPAVLTRVVDSMTDNLRPTRAEATDVANAVLDGSDAILLGAETLRGLYPVETISTVGRICCEAEKVFNQDLFFKKTVKYVGEPMTHLESIASSAVRAAIKVKASVIICFTSSGRAARLIAKYRPTMPVLSVVIPRLTTNQLKWSFSGAFEARQSLIVRGLFPMLADPRHPAESTSATNESVLKVALDHGKQAGVIKSHDRVVVCQKVGDASVVKIIELED

SEQ ID NO: 41432 - DNA, 633 bp, Arabidopsis thaliana
  misc_feature (1)..(633): Ceres Seq. ID no. 13488049
  misc_feature: MA Experiment ID: 108434 Result: Down-regulated in Transcription
  misc_feature: MA Experiment 108434 PARAMETER Experiment Name: At_Root_Tips_cDNA_P Parameter: Tissue Value: Root Tips
  misc_feature: MA Experiment ID: 20000184 Result: Down-regulated in Transcription
  misc_feature: MA Experiment 20000184 PARAMETER Experiment Name: At_Shoots__P Parameter: Age (day) Value: 7
  misc_feature: MA Experiment 20000184 PARAMETER Experiment Name: At_Shoots__P Parameter: Tissue Value: Shoots vs. Whole Plant
  misc_feature: MA Experiment ID: 20000224 Result: Up-regulated in Transcription
  misc_feature: MA Experiment ID: 20001557 Result: Down-regulated in Transcription
  misc_feature: MA Experiment 20001557 PARAMETER Experiment Name: At_Drought_Soil_Dry_P Parameter: Age (day) Value: 27
  misc_feature: MA Experiment 20001557 PARAMETER Experiment Name: At_Drought_Soil_Dry_P Parameter: Organism Value: A. thaliana
  misc_feature: MA Experiment 20001557 PARAMETER Experiment Name: At_Drought_Soil_Dry_P Parameter: Plant Line Value: WS
  misc_feature: MA Experiment 20001557 PARAMETER Experiment Name: At_Drought_Soil_Dry_P Parameter: Post Timepoint (hr) Value: 3
  misc_feature: MA Experiment 20001557 PARAMETER Experiment Name: At_Drought_Soil_Dry_P Parameter: Post-Treatment Value: Re-Water vs. No Drought
  misc_feature: MA Experiment 20001557 PARAMETER Experiment Name: At_Drought_Soil_Dry_P Parameter: Timepoint (day) Value: 13
  misc_feature: MA Experiment 20001557 PARAMETER Experiment Name: At_Drought_Soil_Dry_P Parameter: Treatment Value: Drought vs. No Drought
gaatgcgtttccggttctcttctctcgtcggagttctgaggtaaaaaaagaataaggagaagaagaaaagcaaaagcataaaagagagtagcaaagactgagaatggaaagcttggacactaattttcctgtgcgccatagaaaggtctcgtttgaaagtaagggaaacaagacagagattgtgatctgcagctatgaagatcatatccttatcatagcaacacagattggtgccatgggaactatattgcacgcaaggaaggaagaagggatgtctgttgaaccaacatttagtgtttcagtgatattcggaaagcgagacgagccaatgctgacagcaactgctcgaagactcattgaacacataagttctattgttccctcgaagcctctggttctctcacttggtctcaaagatcattcttcggagacgttgaaggaaatagtagcgacagtgattgagaatcgcctttggtaatacatattgttgtccatgttaaaaggagaacgagaagatgttttatgttttagtcttggttgatataattagcatggagttgtggaatcttttcttgtttatactgaaaacattgtttttgagataaaagttaacaacaagtacacatttttttc

SEQ ID NO: 41433 - protein, 124 aa, Arabidopsis thaliana
  peptide (1)..(124): Ceres Seq. ID no. 13488050
  misc_feature (21)..(124): Homolog of NCBI NO: 27662808 NR Description: similar to RIKEN cDNA 1810042K04
  misc_feature (21)..(124): Homolog of NCBI NO: 21313432 NR Description: RIKEN cDNA 1810042K04 [Mus musculus]
  misc_feature (5)..(124): Homolog of NCBI NO: 14150060 NR Description: hypothetical protein MGC10911 [Homo sapiens]
  misc_feature (1)..(124): Homolog of NCBI NO: 37534018 NR Description: hypothetical protein [Oryza sativa (japonica
  misc_feature (1)..(124): Homolog of NCBI NO: 15241480 NR Description: expressed protein [Arabidopsis thaliana]
MESLDTNFPVRHRKVSFESKGNKTEIVICSYEDHILIIATQIGAMGTILHARKEEGMSVEPTFSVSVIFGKRDEPMLTATARRLIEHISSIVPSKPLVLSLGLKDHSSETLKEIVATVIENRLW

SEQ ID NO: 41434 - protein, 80 aa, Arabidopsis thaliana
  peptide (1)..(80): Ceres Seq. ID no. 13488051
  misc_feature (1)..(80): Homolog of NCBI NO: 27662808 NR Description: similar to RIKEN cDNA 1810042K04
  misc_feature (1)..(80): Homolog of NCBI NO: 21313432 NR Description: RIKEN cDNA 1810042K04 [Mus musculus]
  misc_feature (1)..(80): Homolog of NCBI NO: 14150060 NR Description: hypothetical protein MGC10911 [Homo sapiens]
  misc_feature (1)..(80): Homolog of NCBI NO: 37534018 NR Description: hypothetical protein [Oryza sativa (japonica
  misc_feature (1)..(80): Homolog of NCBI NO: 15241480 NR Description: expressed protein [Arabidopsis thaliana]
MGTILHARKEEGMSVEPTFSVSVIFGKRDEPMLTATARRLIEHISSIVPSKPLVLSLGLKDHSSETLKEIVATVIENRLW

SEQ ID NO: 41435 - protein, 68 aa, Arabidopsis thaliana
  peptide (1)..(68): Ceres Seq. ID no. 13488052
  misc_feature (1)..(68): Homolog of NCBI NO: 27662808 NR Description: similar to RIKEN cDNA 1810042K04
  misc_feature (1)..(68): Homolog of NCBI NO: 21313432 NR Description: RIKEN cDNA 1810042K04 [Mus musculus]
  misc_feature (1)..(68): Homolog of NCBI NO: 14150060 NR Description: hypothetical protein MGC10911 [Homo sapiens]
  misc_feature (1)..(68): Homolog of NCBI NO: 37534018 NR Description: hypothetical protein [Oryza sativa (japonica
  misc_feature (1)..(68): Homolog of NCBI NO: 15241480 NR Description: expressed protein [Arabidopsis thaliana]
MSVEPTFSVSVIFGKRDEPMLTATARRLIEHISSIVPSKPLVLSLGLKDHSSETLKEIVATVIENRLW

SEQ ID NO: 41436 - DNA, 1172 bp, Arabidopsis thaliana
  misc_feature (1)..(1172): Ceres Seq. ID no. 13491391
  misc_feature: MA Experiment ID: 108473 Result: Down-regulated in Transcription
  misc_feature: MA Experiment 108473 PARAMETER Experiment Name: At_Drought_Flowers_cDNA_P Parameter: Timepoint (hr) Value: 7 d
  misc_feature: MA Experiment 108473 PARAMETER Experiment Name: At_Drought_Flowers_cDNA_P Parameter: Tissue Value: Flower
  misc_feature: MA Experiment 108473 PARAMETER Experiment Name: At_Drought_Flowers_cDNA_P Parameter: Treatment Value: Drought vs. No Drought
  misc_feature: MA Experiment ID: 108501 Result: Down-regulated in Transcription
  misc_feature: MA Experiment 108501 PARAMETER Experiment Name: At_ap2_floral_buds_cDNA_P Parameter: Plant Line Value: ap2 (Ler.)
  misc_feature: MA Experiment 108501 PARAMETER Experiment Name: At_ap2_floral_buds_cDNA_P Parameter: Tissue Value: Closed Flower
  misc_feature: MA Experiment ID: 20000184 Result: Down-regulated in Transcription
  misc_feature: MA Experiment 20000184 PARAMETER Experiment Name: At_Shoots__P Parameter: Age (day) Value: 7
  misc_feature: MA Experiment 20000184 PARAMETER Experiment Name: At_Shoots__P Parameter: Tissue Value: Shoots vs. Whole Plant
  misc_feature: MA Experiment ID: 20000265 Result: Up-regulated in Transcription
  misc_feature: MA Experiment 20000265 PARAMETER Experiment Name: At_Open_Flower_P Parameter: Age (day) Value: 21
  misc_feature: MA Experiment 20000265 PARAMETER Experiment Name: At_Open_Flower_P Parameter: Plant Line Value: WS
  misc_feature: MA Experiment 20000265 PARAMETER Experiment Name: At_Open_Flower_P Parameter: Tissue Value: Closed Flower vs. Whole Plant
  misc_feature: MA Experiment ID: 20000286 Result: Up-regulated in Transcription
  misc_feature: MA Experiment 20000286 PARAMETER Experiment Name: At_Open_Flower_P Parameter: Age (day) Value: 21
  misc_feature: MA Experiment 20000286 PARAMETER Experiment Name: At_Open_Flower_P Parameter: Plant Line Value: WS
  misc_feature: MA Experiment 20000286 PARAMETER Experiment Name: At_Open_Flower_P Parameter: Tissue Value: Half Open vs. Whole Plant
  misc_feature: MA Experiment ID: 20001771 Result: Up-regulated in Transcription
  misc_feature: MA Experiment 20001771 PARAMETER Experiment Name: At_Far-red-enriched-adult_P Parameter: Age (day) Value: 28
  misc_feature: MA Experiment 20001771 PARAMETER Experiment Name: At_Far-red-enriched-adult_P Parameter: Light Value: Far-red enriched vs. White
  misc_feature: MA Experiment 20001771 PARAMETER Experiment Name: At_Far-red-enriched-adult_P Parameter: Organism Value: A. thaliana
  misc_feature: MA Experiment 20001771 PARAMETER Experiment Name: At_Far-red-enriched-adult_P Parameter: Plant Line Value: Columbia
  misc_feature: MA Experiment 20001771 PARAMETER Experiment Name: At_Far-red-enriched-adult_P Parameter: Timepoint (hr) Value: 16
  misc_feature: MA Experiment 20001771 PARAMETER Experiment Name: At_Far-red-enriched-adult_P Parameter: Tissue Value: Aerial
cagaaaaattttggacttattttcgatatgtttaggggaaaaatatttgtgttatcattattttctatttacgtcctctcatcagcggctgaaaaaaatacatcattttctgcgctttttgcttttggtgattcagtcttagatacgggaaacaataattttcttcttactcttctcaaaggaaattattggccatatggtttgagttttgactataaatttccgacgggaagattcggaaatggaagagttttcaccgatatagttgccgaaggtttacagatcaaaagacttgtaccagcttatagcaagattcgtcgcatcagttctgaagaccttaagactggcgtttgttttgcatcaggtggttcaggaattgacgatcttacatcccgaacactgagagttttatcggcaggtgaccaagtaaaagactttaaagactatttgaagaaactaagaagagtagtgaaacgtaagaaaaaagtaaaagaaatagtttcaaacgctgtgtttcttatttctgaaggaaataatgatcttggatactttgtcgctcccgctcttcttcgattacagtccacaacaacatacaccagtaaaatggttgtttggaccagaaagtttctaaaagatttatatgatcttggagcgagaaaatttgcggtgatgggagtgatgcctgtgggatgtttgcctatccatcgagcctcattcggtggggtattcggatggtgtaacttcctctttaatagagttacggaggacttcaacatgaaattgcagaaaggtcttacaagttacgcagtagaatatgatttcaaagatgcaaagtttgtttacgtcgacatatacggtactcttatggatcttgtcaaaaatcctatggcctatgggtttacagaagcgaaaaaagcttgttgttgtatgccgaatgcaataataccatgcttccatccagataaatacgtcttctatgactttgctcacccttcccagaaagcctacgaagtaatatctaaacctattgtctatcagatagcgaaaggccttgcctagctaattccttatttcctacaatgttttattataatctttgaaaattatcaccatatcgataaatatatgtaaatgtataagattcatgacaatctattcgtttttcttattgc

SEQ ID NO: 41437 - protein, 352 aa, Arabidopsis thaliana
  peptide (1)..(352): Ceres Seq. ID no. 13491392
  misc_feature (39)..(342): Pfam Name: GDSL-like Lipase/Acylhydrolase Pfam Description: GDSL-like Lipase/Acylhydrolase
  misc_feature (209)..(352): Homolog of NCBI NO: 8778580 NR Description: F28C11.13 [Arabidopsis thaliana]
  misc_feature (3)..(214): Homolog of NCBI NO: 8778580 NR Description: F28C11.13 [Arabidopsis thaliana]
  misc_feature (3)..(352): Homolog of NCBI NO: 15220775 NR Description: lipase, putative [Arabidopsis thaliana]
  misc_feature (33)..(352): Homolog of NCBI NO: 25404994 NR Description: protein T4O12.13 [imported] - Arabidopsis
  misc_feature (17)..(352): Homolog of NCBI NO: 15054388 NR Description: family II lipase EXL4 [Arabidopsis thaliana]
  misc_feature (17)..(352): Homolog of NCBI NO: 15222902 NR Description: family II extracellular lipase 4 (EXL4)
  misc_feature (15)..(352): Homolog of NCBI NO: 18410967 NR Description: family II extracellular lipase 5 (EXL5)
  misc_feature (10)..(352): Homolog of NCBI NO: 8778809 NR Description: T4O12.14 [Arabidopsis thaliana]
  misc_feature (10)..(352): Homolog of NCBI NO: 25404995 NR Description: protein T4O12.15 [imported] - Arabidopsis
  misc_feature (10)..(352): Homolog of NCBI NO: 15222904 NR Description: family II extracellular lipase 6 (EXL6)
QKNFGLIFDMFRGKIFVLSLFSIYVLSSAAEKNTSFSALFAFGDSVLDTGNNNFLLTLLKGNYWPYGLSFDYKFPTGRFGNGRVFTDIVAEGLQIKRLVPAYSKIRRISSEDLKTGVCFASGGSGIDDLTSRTLRVLSAGDQVKDFKDYLKKLRRVVKRKKKVKEIVSNAVFLISEGNNDLGYFVAPALLRLQSTTTYTSKMVVWTRKFLKDLYDLGARKFAVMGVMPVGCLPIHRASFGGVFGWCNFLFNRVTEDFNMKLQKGLTSYAVEYDFKDAKFVYVDIYGTLMDLVKNPMAYGFTEAKKACCCMPNAIIPCFHPDKYVFYDFAHPSQKAYEVISKPIVYQIAKGLA

SEQ ID NO: 41438 - protein, 343 aa, Arabidopsis thaliana
  peptide (1)..(343): Ceres Seq. ID no. 13491393
  misc_feature (30)..(333): Pfam Name: GDSL-like Lipase/Acylhydrolase Pfam Description: GDSL-like Lipase/Acylhydrolase
  misc_feature (200)..(343): Homolog of NCBI NO: 8778580 NR Description: F28C11.13 [Arabidopsis thaliana]
  misc_feature (1)..(205): Homolog of NCBI NO: 8778580 NR Description: F28C11.13 [Arabidopsis thaliana]
  misc_feature (1)..(343): Homolog of NCBI NO: 15220775 NR Description: lipase, putative [Arabidopsis thaliana]
  misc_feature (24)..(343): Homolog of NCBI NO: 25404994 NR Description: protein T4O12.13 [imported] - Arabidopsis
  misc_feature (8)..(343): Homolog of NCBI NO: 15054388 NR Description: family II lipase EXL4 [Arabidopsis thaliana]
  misc_feature (8)..(343): Homolog of NCBI NO: 15222902 NR Description: family II extracellular lipase 4 (EXL4)
  misc_feature (6)..(343): Homolog of NCBI NO: 18410967 NR Description: family II extracellular lipase 5 (EXL5)
  misc_feature (1)..(343): Homolog of NCBI NO: 8778809 NR Description: T4O12.14 [Arabidopsis thaliana]
  misc_feature (1)..(343): Homolog of NCBI NO: 25404995 NR Description: protein T4O12.15 [imported] - Arabidopsis
  misc_feature (1)..(343): Homolog of NCBI NO: 15222904 NR Description: family II extracellular lipase 6 (EXL6)
MFRGKIFVLSLFSIYVLSSAAEKNTSFSALFAFGDSVLDTGNNNFLLTLLKGNYWPYGLSFDYKFPTGRFGNGRVFTDIVAEGLQIKRLVPAYSKIRRISSEDLKTGVCFASGGSGIDDLTSRTLRVLSAGDQVKDFKDYLKKLRRVVKRKKKVKEIVSNAVFLISEGNNDLGYFVAPALLRLQSTTTYTSKMVVWTRKFLKDLYDLGARKFAVMGVMPVGCLPIHRASFGGVFGWCNFLFNRVTEDFNMKLQKGLTSYAVEYDFKDAKFVYVDIYGTLMDLVKNPMAYGFTEAKKACCCMPNAIIPCFHPDKYVFYDFAHPSQKAYEVISKPIVYQIAKGLA

SEQ ID NO: 41439 - DNA, 1314 bp, Arabidopsis thaliana
  misc_feature (1)..(1314): Ceres Seq. ID no. 12327768
  misc_feature: MA Experiment ID: 108461 Result: Down-regulated in Transcription
  misc_feature: MA Experiment 108461 PARAMETER Experiment Name: At_Germinating_Seeds_cDNA_P Parameter: Age (day) Value: 1 vs. 0
  misc_feature: MA Experiment 108461 PARAMETER Experiment Name: At_Germinating_Seeds_cDNA_P Parameter: Tissue Value: Germinating Seeds
  misc_feature: MA Experiment ID: 108462 Result: Down-regulated in Transcription
  misc_feature: MA Experiment 108462 PARAMETER Experiment Name: At_Germinating_Seeds_cDNA_P Parameter: Age (day) Value: 2 vs. 0
  misc_feature: MA Experiment 108462 PARAMETER Experiment Name: At_Germinating_Seeds_cDNA_P Parameter: Tissue Value: Germinating Seeds
  misc_feature: MA Experiment ID: 108463 Result: Down-regulated in Transcription
  misc_feature: MA Experiment 108463 PARAMETER Experiment Name: At_Germinating_Seeds_cDNA_P Parameter: Age (day) Value: 3 vs. 0
  misc_feature: MA Experiment 108463 PARAMETER Experiment Name: At_Germinating_Seeds_cDNA_P Parameter: Tissue Value: Germinating Seeds
  misc_feature: MA Experiment ID: 20000573 Result: Up-regulated in Transcription
  misc_feature: MA Experiment 20000573 PARAMETER Experiment Name: At_100uM_ABA_Mutants__P Parameter: Organism Value: A. thaliana
  misc_feature: MA Experiment 20000573 PARAMETER Experiment Name: At_100uM_ABA_Mutants__P Parameter: Plant Line Value: CS22 vs. Ler wt
  misc_feature: MA Experiment 20000573 PARAMETER Experiment Name: At_100uM_ABA_Mutants__P Parameter: Timepoint (hr) Value: N/A
  misc_feature: MA Experiment 20000573 PARAMETER Experiment Name: At_100uM_ABA_Mutants__P Parameter: Tissue Value: Whole Plant
  misc_feature: MA Experiment 20000573 PARAMETER Experiment Name: At_100uM_ABA_Mutants__P Parameter: Treatment Value: None
  misc_feature: MA Experiment ID: 20001554 Result: Up-regulated in Transcription
  misc_feature: MA Experiment 20001554 PARAMETER Experiment Name: At_Drought_Soil_Dry_P Parameter: Age (day) Value: 21
  misc_feature: MA Experiment 20001554 PARAMETER Experiment Name: At_Drought_Soil_Dry_P Parameter: Organism Value: A. thaliana
  misc_feature: MA Experiment 20001554 PARAMETER Experiment Name: At_Drought_Soil_Dry_P Parameter: Plant Line Value: WS
  misc_feature: MA Experiment 20001554 PARAMETER Experiment Name: At_Drought_Soil_Dry_P Parameter: Post Timepoint (hr) Value: None
  misc_feature: MA Experiment 20001554 PARAMETER Experiment Name: At_Drought_Soil_Dry_P Parameter: Post-Treatment Value: None
  misc_feature: MA Experiment 20001554 PARAMETER Experiment Name: At_Drought_Soil_Dry_P Parameter: Timepoint (day) Value: 7
  misc_feature: MA Experiment 20001554 PARAMETER Experiment Name: At_Drought_Soil_Dry_P Parameter: Treatment Value: Drought vs. No Drought
  misc_feature: MA Experiment ID: 20001555 Result: Up-regulated in Transcription
  misc_feature: MA Experiment 20001555 PARAMETER Experiment Name: At_Drought_Soil_Dry_P Parameter: Age (day) Value: 24
  misc_feature: MA Experiment 20001555 PARAMETER Experiment Name: At_Drought_Soil_Dry_P Parameter: Organism Value: A. thaliana
  misc_feature: MA Experiment 20001555 PARAMETER Experiment Name: At_Drought_Soil_Dry_P Parameter: Plant Line Value: WS
  misc_feature: MA Experiment 20001555 PARAMETER Experiment Name: At_Drought_Soil_Dry_P Parameter: Post Timepoint (hr) Value: None
  misc_feature: MA Experiment 20001555 PARAMETER Experiment Name: At_Drought_Soil_Dry_P Parameter: Post-Treatment Value: None
  misc_feature: MA Experiment 20001555 PARAMETER Experiment Name: At_Drought_Soil_Dry_P Parameter: Timepoint (day) Value: 10
  misc_feature: MA Experiment 20001555 PARAMETER Experiment Name: At_Drought_Soil_Dry_P Parameter: Treatment Value: Drought vs. No Drought
  misc_feature: MA Experiment ID: 20001556 Result: Up-regulated in Transcription
  misc_feature: MA Experiment 20001556 PARAMETER Experiment Name: At_Drought_Soil_Dry_P Parameter: Age (day) Value: 26
  misc_feature: MA Experiment 20001556 PARAMETER Experiment Name: At_Drought_Soil_Dry_P Parameter: Organism Value: A. thaliana
  misc_feature: MA Experiment 20001556 PARAMETER Experiment Name: At_Drought_Soil_Dry_P Parameter: Plant Line Value: WS
  misc_feature: MA Experiment 20001556 PARAMETER Experiment Name: At_Drought_Soil_Dry_P Parameter: Post Timepoint (hr) Value: None
  misc_feature: MA Experiment 20001556 PARAMETER Experiment Name: At_Drought_Soil_Dry_P Parameter: Post-Treatment Value: None
  misc_feature: MA Experiment 20001556 PARAMETER Experiment Name: At_Drought_Soil_Dry_P Parameter: Timepoint (day) Value: 12
  misc_feature: MA Experiment 20001556 PARAMETER Experiment Name: At_Drought_Soil_Dry_P Parameter: Treatment Value: Drought vs. No Drought
agatatgggagaacggtttttccgaaatgagatgccggagtttgtaccggaagatttatccggagaagaagaaactgttaccgaatgtaaagattcgttgacgaaactgctatcacttccgtacaaatcattctcagagaagcttcacagatatgctctaagcatcaaagataaagtagtctgggagacatgggaacgatctggaaaacgtgttcgagattataacttgtatactggagttcttgggacagcttatctcttgttcaaatcttatcaggttactagaaatgaagatgatcttaagctatgcttagagaatgttgaagcttgtgatgtagcttcaagagattctgagcgagtgacatttatatgtggctatgctggtgtatgtgctcttggtgctgttgcagcgaagtgtttaggtgatgaccagttatatgatcgttacttagcccgtttccgaggggcttcctagtgacttgccatatgagttgctatatggtagagcaggatacttgtgggcgtgtttgttcttgaataagcatattggtcaggagatatatcatctgaacgaatgagatcagtggttgaggaaatcttcagggcaggaagacaactcgggaataaaggaacttgtccattgatgtatgagtggcacgggaagaggtactggggggctgcacacggtttagctgggatcatgaatgttttgatgcatacggaacttgaaccagatgaaatcaaagatgtcaaaggtacactaagctatatgatacaaaaccgttttcctagcgggaattacctatctagtgaaggaagcaaatcagatcgccttgttcactggtgtcacggtgctcctggtgttgctctcacacttgtaaaggcagctcaggtttataacactaaggaatttgtagaggcagcaatggaggcaggagaagttgtgtggagccgtggattgcttaaacgagtaggaatctgtcacggtatcagcggaaacacatacgtgtttctttctctataccggttaacaagaaacccaaagtatttgtaccgcgctaaagctttcgcgtctttcctactcgataaatcagagaagttaatctcagaaggtcaaatgcatggaggagatagacccttctctctctttgaaggtatcggaggaatggcctacatgttactcgacatgaatgatccaacacaagctctgtttccaggttatgaactctaaactgtataaaacttacactgtaacaataagcttagatactgaaatgtagaatagctgtctatattaataagattttatacatc

SEQ ID NO: 41440 - protein, 218 aa, Arabidopsis thaliana
  peptide (1)..(218): Ceres Seq. ID no. 12327769
  misc_feature (1)..(218): Pfam Name: Lanthionine synthetase C-like protein Pfam Description: Lanthionine synthetase C-like protein
  misc_feature (1)..(218): Homolog of NCBI NO: 8923911 NR Description: LanC lantibiotic synthetase component C-like 2
  misc_feature (1)..(218): Homolog of NCBI NO: 19526936 NR Description: RIKEN cDNA 1700003F10 [Mus musculus]
  misc_feature (1)..(218): Homolog of NCBI NO: 15451140 NR Description: G protein-coupled receptor-like protein
  misc_feature (1)..(218): Homolog of NCBI NO: 15238395 NR Description: G protein-coupled receptor-like protein
  misc_feature (1)..(218): Homolog of NCBI NO: 8489877 NR Description: putative 7-transmembrane G-protein-coupled
  misc_feature (1)..(218): Homolog of NCBI NO: 25411993 NR Description: hypothetical protein At2g20770 [imported] -
  misc_feature (3)..(218): Homolog of NCBI NO: 21742091 NR Description: OSJNBa0074L08.13 [Oryza sativa (japonica
  misc_feature (1)..(218): Homolog of NCBI NO: 30681129 NR Description: expressed protein [Arabidopsis thaliana]
  misc_feature (1)..(218): Homolog of NCBI NO: 37535720 NR Description: putative lanthionine synthetase
  misc_feature (1)..(218): Homolog of NCBI NO: 15219126 NR Description: putative G protein-coupled receptor; protein id:
MRSVVEEIFRAGRQLGNKGTCPLMYEWHGKRYWGAAHGLAGIMNVLMHTELEPDEIKDVKGTLSYMIQNRFPSGNYLSSEGSKSDRLVHWCHGAPGVALTLVKAAQVYNTKEFVEAAMEAGEVVWSRGLLKRVGICHGISGNTYVFLSLYRLTRNPKYLYRAKAFASFLLDKSEKLISEGQMHGGDRPFSLFEGIGGMAYMLLDMNDPTQALFPGYEL

SEQ ID NO: 41441 - protein, 195 aa, Arabidopsis thaliana
  peptide (1)..(195): Ceres Seq. ID no. 12327770
  misc_feature (1)..(195): Pfam Name: Lanthionine synthetase C-like protein Pfam Description: Lanthionine synthetase C-like protein
  misc_feature (1)..(195): Homolog of NCBI NO: 8923911 NR Description: LanC lantibiotic synthetase component C-like 2
  misc_feature (1)..(195): Homolog of NCBI NO: 19526936 NR Description: RIKEN cDNA 1700003F10 [Mus musculus]
  misc_feature (1)..(195): Homolog of NCBI NO: 15451140 NR Description: G protein-coupled receptor-like protein
  misc_feature (1)..(195): Homolog of NCBI NO: 15238395 NR Description: G protein-coupled receptor-like protein
  misc_feature (1)..(195): Homolog of NCBI NO: 8489877 NR Description: putative 7-transmembrane G-protein-coupled
  misc_feature (1)..(195): Homolog of NCBI NO: 25411993 NR Description: hypothetical protein At2g20770 [imported] -
  misc_feature (1)..(195): Homolog of NCBI NO: 21742091 NR Description: OSJNBa0074L08.13 [Oryza sativa (japonica
  misc_feature (1)..(195): Homolog of NCBI NO: 30681129 NR Description: expressed protein [Arabidopsis thaliana]
  misc_feature (1)..(195): Homolog of NCBI NO: 37535720 NR Description: putative lanthionine synthetase
  misc_feature (1)..(195): Homolog of NCBI NO: 15219126 NR Description: putative G protein-coupled receptor; protein id:
MYEWHGKRYWGAAHGLAGIMNVLMHTELEPDEIKDVKGTLSYMIQNRFPSGNYLSSEGSKSDRLVHWCHGAPGVALTLVKAAQVYNTKEFVEAAMEAGEVVWSRGLLKRVGICHGISGNTYVFLSLYRLTRNPKYLYRAKAFASFLLDKSEKLISEGQMHGGDRPFSLFEGIGGMAYMLLDMNDPTQALFPGYEL

SEQ ID NO: 41442 - protein, 176 aa, Arabidopsis thaliana
  peptide (1)..(176): Ceres Seq. ID no. 12327771
  misc_feature (1)..(176): Pfam Name: Lanthionine synthetase C-like protein Pfam Description: Lanthionine synthetase C-like protein
  misc_feature (1)..(176): Homolog of NCBI NO: 8923911 NR Description: LanC lantibiotic synthetase component C-like 2
  misc_feature (1)..(176): Homolog of NCBI NO: 19526936 NR Description: RIKEN cDNA 1700003F10 [Mus musculus]
  misc_feature (1)..(176): Homolog of NCBI NO: 15451140 NR Description: G protein-coupled receptor-like protein
  misc_feature (1)..(176): Homolog of NCBI NO: 15238395 NR Description: G protein-coupled receptor-like protein
  misc_feature (1)..(176): Homolog of NCBI NO: 8489877 NR Description: putative 7-transmembrane G-protein-coupled
  misc_feature (1)..(176): Homolog of NCBI NO: 25411993 NR Description: hypothetical protein At2g20770 [imported] -
  misc_feature (1)..(176): Homolog of NCBI NO: 21742091 NR Description: OSJNBa0074L08.13 [Oryza sativa (japonica
  misc_feature (1)..(176): Homolog of NCBI NO: 30681129 NR Description: expressed protein [Arabidopsis thaliana]
  misc_feature (1)..(176): Homolog of NCBI NO: 37535720 NR Description: putative lanthionine synthetase
  misc_feature (1)..(176): Homolog of NCBI NO: 15219126 NR Description: putative G protein-coupled receptor; protein id:
MNVLMHTELEPDEIKDVKGTLSYMIQNRFPSGNYLSSEGSKSDRLVHWCHGAPGVALTLVKAAQVYNTKEFVEAAMEAGEVVWSRGLLKRVGICHGISGNTYVFLSLYRLTRNPKYLYRAKAFASFLLDKSEKLISEGQMHGGDRPFSLFEGIGGMAYMLLDMNDPTQALFPGYEL

SEQ ID NO: 41443 - DNA, 2925 bp, Arabidopsis thaliana
  misc_feature (1)..(2925): Ceres Seq. ID no. 12421325
  misc_feature: MA Experiment ID: 108462 Result: Up-regulated in Transcription
  misc_feature: MA Experiment 108462 PARAMETER Experiment Name: At_Germinating_Seeds_cDNA_P Parameter: Age (day) Value: 2 vs. 0
  misc_feature: MA Experiment 108462 PARAMETER Experiment Name: At_Germinating_Seeds_cDNA_P Parameter: Tissue Value: Germinating Seeds
  misc_feature: MA Experiment ID: 108463 Result: Up-regulated in Transcription
  misc_feature: MA Experiment 108463 PARAMETER Experiment Name: At_Germinating_Seeds_cDNA_P Parameter: Age (day) Value: 3 vs. 0
  misc_feature: MA Experiment 108463 PARAMETER Experiment Name: At_Germinating_Seeds_cDNA_P Parameter: Tissue Value: Germinating Seeds
  misc_feature: MA Experiment ID: 108464 Result: Up-regulated in Transcription
  misc_feature: MA Experiment 108464 PARAMETER Experiment Name: At_Germinating_Seeds_cDNA_P Parameter: Age (day) Value: 4 vs. 0
  misc_feature: MA Experiment 108464 PARAMETER Experiment Name: At_Germinating_Seeds_cDNA_P Parameter: Tissue Value: Germinating Seeds
  misc_feature: MA Experiment ID: 108488 Result: Down-regulated in Transcription
  misc_feature: MA Experiment ID: 108561 Result: Up-regulated in Transcription
  misc_feature: MA Experiment 108561 PARAMETER Experiment Name: At_100uM_ABA_cDNA_P Parameter: Timepoint (hr) Value: 6
  misc_feature: MA Experiment 108561 PARAMETER Experiment Name: At_100uM_ABA_cDNA_P Parameter: Tissue Value: Aerial
  misc_feature: MA Experiment 108561 PARAMETER Experiment Name: At_100uM_ABA_cDNA_P Parameter: Treatment Value: 100uM ABA vs. No Treatment
  misc_feature: MA Experiment ID: 108573 Result: Up-regulated in Transcription
  misc_feature: MA Experiment 108573 PARAMETER Experiment Name: At_Drought_cDNA_P Parameter: Timepoint (hr) Value: 6
  misc_feature: MA Experiment 108573 PARAMETER Experiment Name: At_Drought_cDNA_P Parameter: Tissue Value: Aerial
  misc_feature: MA Experiment 108573 PARAMETER Experiment Name: At_Drought_cDNA_P Parameter: Treatment Value: Drought vs. No Drought
  misc_feature: MA Experiment ID: 108605 Result: Up-regulated in Transcription
  misc_feature: MA Experiment 108605 PARAMETER Experiment Name: At_100uM_ABA_cDNA_P Parameter: Timepoint (hr) Value: 6
  misc_feature: MA Experiment 108605 PARAMETER Experiment Name: At_100uM_ABA_cDNA_P Parameter: Tissue Value: Aerial
  misc_feature: MA Experiment 108605 PARAMETER Experiment Name: At_100uM_ABA_cDNA_P Parameter: Treatment Value: 100uM ABA vs. No Treatment
  misc_feature: MA Experiment ID: 108607 Result: Up-regulated in Transcription
  misc_feature: MA Experiment 108607 PARAMETER Experiment Name: At_100uM_ABA_cDNA_P Parameter: Timepoint (hr) Value: 4
  misc_feature: MA Experiment 108607 PARAMETER Experiment Name: At_100uM_ABA_cDNA_P Parameter: Tissue Value: Aerial
  misc_feature: MA Experiment 108607 PARAMETER Experiment Name: At_100uM_ABA_cDNA_P Parameter: Treatment Value: 100uM ABA vs. No Treatment
  misc_feature: MA Experiment ID: 108609 Result: Up-regulated in Transcription
  misc_feature: MA Experiment 108609 PARAMETER Experiment Name: At_100uM_ABA_cDNA_P Parameter: Timepoint (hr) Value: 24
  misc_feature: MA Experiment 108609 PARAMETER Experiment Name: At_100uM_ABA_cDNA_P Parameter: Tissue Value: Aerial
  misc_feature: MA Experiment 108609 PARAMETER Experiment Name: At_100uM_ABA_cDNA_P Parameter: Treatment Value: 100uM ABA vs. No Treatment
  misc_feature: MA Experiment ID: 20000069 Result: Up-regulated in Transcription
  misc_feature: MA Experiment 20000069 PARAMETER Experiment Name: At_100uM_ABA_Mutants_cDNA_P Parameter: Plant Line Value: CS23
  misc_feature: MA Experiment 20000069 PARAMETER Experiment Name: At_100uM_ABA_Mutants_cDNA_P Parameter: Timepoint (hr) Value: 6
  misc_feature: MA Experiment 20000069 PARAMETER Experiment Name: At_100uM_ABA_Mutants_cDNA_P Parameter: Tissue Value: Aerial
  misc_feature: MA Experiment 20000069 PARAMETER Experiment Name: At_100uM_ABA_Mutants_cDNA_P Parameter: Treatment Value: 100uM ABA vs. No Treatment
  misc_feature: MA Experiment ID: 20000070 Result: Up-regulated in Transcription
  misc_feature: MA Experiment 20000070 PARAMETER Experiment Name: At_100uM_ABA_Mutants_cDNA_P Parameter: Plant Line Value: CS24
  misc_feature: MA Experiment 20000070 PARAMETER Experiment Name: At_100uM_ABA_Mutants_cDNA_P Parameter: Timepoint (hr) Value: 6
  misc_feature: MA Experiment 20000070 PARAMETER Experiment Name: At_100uM_ABA_Mutants_cDNA_P Parameter: Tissue Value: Aerial
  misc_feature: MA Experiment 20000070 PARAMETER Experiment Name: At_100uM_ABA_Mutants_cDNA_P Parameter: Treatment Value: 100uM ABA vs. No Treatment
  misc_feature: MA Experiment ID: 20000072 Result: Up-regulated in Transcription
  misc_feature: MA Experiment 20000072 PARAMETER Experiment Name: At_100uM_ABA_Mutants_cDNA_P Parameter: Plant Line Value: CS8105
  misc_feature: MA Experiment 20000072 PARAMETER Experiment Name: At_100uM_ABA_Mutants_cDNA_P Parameter: Timepoint (hr) Value: 6
  misc_feature: MA Experiment 20000072 PARAMETER Experiment Name: At_100uM_ABA_Mutants_cDNA_P Parameter: Tissue Value: Aerial
  misc_feature: MA Experiment 20000072 PARAMETER Experiment Name: At_100uM_ABA_Mutants_cDNA_P Parameter: Treatment Value: 100uM ABA vs. No Treatment
  misc_feature: MA Experiment ID: 20000086 Result: Up-regulated in Transcription
  misc_feature: MA Experiment 20000086 PARAMETER Experiment Name: At_100uM_ABA_Mutants_cDNA_P Parameter: Plant Line Value: CS22
  misc_feature: MA Experiment 20000086 PARAMETER Experiment Name: At_100uM_ABA_Mutants_cDNA_P Parameter: Timepoint (hr) Value: 6
  misc_feature: MA Experiment 20000086 PARAMETER Experiment Name: At_100uM_ABA_Mutants_cDNA_P Parameter: Tissue Value: Aerial
  misc_feature: MA Experiment 20000086 PARAMETER Experiment Name: At_100uM_ABA_Mutants_cDNA_P Parameter: Treatment Value: 100uM ABA vs. No Treatment
  misc_feature: MA Experiment ID: 20000087 Result: Up-regulated in Transcription
  misc_feature: MA Experiment 20000087 PARAMETER Experiment Name: At_100uM_ABA_Mutants_cDNA_P Parameter: Plant Line Value: WS
  misc_feature: MA Experiment 20000087 PARAMETER Experiment Name: At_100uM_ABA_Mutants_cDNA_P Parameter: Timepoint (hr) Value: 6
  misc_feature: MA Experiment 20000087 PARAMETER Experiment Name: At_100uM_ABA_Mutants_cDNA_P Parameter: Tissue Value: Aerial
  misc_feature: MA Experiment 20000087 PARAMETER Experiment Name: At_100uM_ABA_Mutants_cDNA_P Parameter: Treatment Value: 100uM ABA vs. No Treatment
  misc_feature: MA Experiment ID: 20000088 Result: Up-regulated in Transcription
  misc_feature: MA Experiment 20000088 PARAMETER Experiment Name: At_100uM_ABA_Mutants_cDNA_P Parameter: Plant Line Value: Landsberg
  misc_feature: MA Experiment 20000088 PARAMETER Experiment Name: At_100uM_ABA_Mutants_cDNA_P Parameter: Timepoint (hr) Value: 6
  misc_feature: MA Experiment 20000088 PARAMETER Experiment Name: At_100uM_ABA_Mutants_cDNA_P Parameter: Tissue Value: Aerial
  misc_feature: MA Experiment 20000088 PARAMETER Experiment Name: At_100uM_ABA_Mutants_cDNA_P Parameter: Treatment Value: 100uM ABA vs. No Treatment
  misc_feature: MA Experiment ID: 20000111 Result: Down-regulated in Transcription
  misc_feature: MA Experiment 20000111 PARAMETER Experiment Name: At_42deg_Heat_cDNA_P Parameter: Temperature (deg C) Value: 42 vs. 22
  misc_feature: MA Experiment 20000111 PARAMETER Experiment Name: At_42deg_Heat_cDNA_P Parameter: Timepoint (hr) Value: 6
  misc_feature: MA Experiment 20000111 PARAMETER Experiment Name: At_42deg_Heat_cDNA_P Parameter: Tissue Value: Aerial
  misc_feature: MA Experiment ID: 20000113 Result: Down-regulated in Transcription
  misc_feature: MA Experiment 20000113 PARAMETER Experiment Name: At_42deg_Heat_cDNA_P Parameter: Temperature (deg C) Value: 42 vs. 22
  misc_feature: MA Experiment 20000113 PARAMETER Experiment Name: At_42deg_Heat_cDNA_P Parameter: Timepoint (hr) Value: 8
  misc_feature: MA Experiment 20000113 PARAMETER Experiment Name: At_42deg_Heat_cDNA_P Parameter: Tissue Value: Aerial
  misc_feature: MA Experiment ID: 20000117 Result: Up-regulated in Transcription
  misc_feature: MA Experiment 20000117 PARAMETER Experiment Name: At_100uM_ABA_Mutants_cDNA_P Parameter: Plant Line Value: Columbia
  misc_feature: MA Experiment 20000117 PARAMETER Experiment Name: At_100uM_ABA_Mutants_cDNA_P Parameter: Timepoint (hr) Value: 6
  misc_feature: MA Experiment 20000117 PARAMETER Experiment Name: At_100uM_ABA_Mutants_cDNA_P Parameter: Tissue Value: Aerial
  misc_feature: MA Experiment 20000117 PARAMETER Experiment Name: At_100uM_ABA_Mutants_cDNA_P Parameter: Treatment Value: 100uM ABA vs. No Treatment
  misc_feature: MA Experiment ID: 20000169 Result: Up-regulated in Transcription
  misc_feature: MA Experiment 20000169 PARAMETER Experiment Name: At_100uM_ABA_P Parameter: Age (day) Value: 14
  misc_feature: MA Experiment 20000169 PARAMETER Experiment Name: At_100uM_ABA_P Parameter: Organism Value: A. thaliana
  misc_feature: MA Experiment 20000169 PARAMETER Experiment Name: At_100uM_ABA_P Parameter: Plant Line Value: WS
  misc_feature: MA Experiment 20000169 PARAMETER Experiment Name: At_100uM_ABA_P Parameter: Timepoint (hr) Value: 6
  misc_feature: MA Experiment 20000169 PARAMETER Experiment Name: At_100uM_ABA_P Parameter: Tissue Value: Aerial
  misc_feature: MA Experiment 20000169 PARAMETER Experiment Name: At_100uM_ABA_P Parameter: Treatment Value: 100uM ABA vs. No Treatment
  misc_feature: MA Experiment ID: 20000171 Result: Down-regulated in Transcription
  misc_feature: MA Experiment 20000171 PARAMETER Experiment Name: At_42deg_Heat_P Parameter: Age (day) Value: 14
  misc_feature: MA Experiment 20000171 PARAMETER Experiment Name: At_42deg_Heat_P Parameter: Organism Value: A. thaliana
  misc_feature: MA Experiment 20000171 PARAMETER Experiment Name: At_42deg_Heat_P Parameter: Plant Line Value: WS
  misc_feature: MA Experiment 20000171 PARAMETER Experiment Name: At_42deg_Heat_P Parameter: Temperature (deg C) Value: 42 vs. 22
  misc_feature: MA Experiment 20000171 PARAMETER Experiment Name: At_42deg_Heat_P Parameter: Timepoint (hr) Value: 1
  misc_feature: MA Experiment 20000171 PARAMETER Experiment Name: At_42deg_Heat_P Parameter: Tissue Value: Aerial
  misc_feature: MA Experiment ID: 20000267 Result: Up-regulated in Transcription
  misc_feature: MA Experiment 20000267 PARAMETER Experiment Name: At_Drought_P Parameter: Age (day) Value: 7
  misc_feature: MA Experiment 20000267 PARAMETER Experiment Name: At_Drought_P Parameter: Organism Value: A. thaliana
  misc_feature: MA Experiment 20000267 PARAMETER Experiment Name: At_Drought_P Parameter: Plant Line Value: WS
  misc_feature: MA Experiment 20000267 PARAMETER Experiment Name: At_Drought_P Parameter: Timepoint (hr) Value: 6
  misc_feature: MA Experiment 20000267 PARAMETER Experiment Name: At_Drought_P Parameter: Tissue Value: Whole Plant
  misc_feature: MA Experiment 20000267 PARAMETER Experiment Name: At_Drought_P Parameter: Treatment Value: Drought vs. No Drought
  misc_feature: MA Experiment ID: 20000436 Result: Up-regulated in Transcription
  misc_feature: MA Experiment 20000436 PARAMETER Experiment Name: At_Drought_P Parameter: Age (day) Value: 7
  misc_feature: MA Experiment 20000436 PARAMETER Experiment Name: At_Drought_P Parameter: Organism Value: A. thaliana
  misc_feature: MA Experiment 20000436 PARAMETER Experiment Name: At_Drought_P Parameter: Plant Line Value: WS
  misc_feature: MA Experiment 20000436 PARAMETER Experiment Name: At_Drought_P Parameter: Timepoint (hr) Value: 12
  misc_feature: MA Experiment 20000436 PARAMETER Experiment Name: At_Drought_P Parameter: Tissue Value: Whole Plant
  misc_feature: MA Experiment 20000436 PARAMETER Experiment Name: At_Drought_P Parameter: Treatment Value: Drought vs. No Drought
  misc_feature: MA Experiment ID: 20000437 Result: Up-regulated in Transcription
  misc_feature: MA Experiment 20000437 PARAMETER Experiment Name: At_Drought_P Parameter: Age (day) Value: 8
  misc_feature: MA Experiment 20000437 PARAMETER Experiment Name: At_Drought_P Parameter: Organism Value: A. thaliana
  misc_feature: MA Experiment 20000437 PARAMETER Experiment Name: At_Drought_P Parameter: Plant Line Value: WS
  misc_feature: MA Experiment 20000437 PARAMETER Experiment Name: At_Drought_P Parameter: Timepoint (hr) Value: 24
  misc_feature: MA Experiment 20000437 PARAMETER Experiment Name: At_Drought_P Parameter: Tissue Value: Whole Plant
  misc_feature: MA Experiment 20000437 PARAMETER Experiment Name: At_Drought_P Parameter: Treatment Value: Drought vs. No Drought
  misc_feature: MA Experiment ID: 20000453 Result: Up-regulated in Transcription
  misc_feature: MA Experiment 20000453 PARAMETER Experiment Name: At_100uM_ABA_P Parameter: Age (day) Value: 15
  misc_feature: MA Experiment 20000453 PARAMETER Experiment Name: At_100uM_ABA_P Parameter: Organism Value: A. thaliana
  misc_feature: MA Experiment 20000453 PARAMETER Experiment Name: At_100uM_ABA_P Parameter: Plant Line Value: WS
  misc_feature: MA Experiment 20000453 PARAMETER Experiment Name: At_100uM_ABA_P Parameter: Timepoint (hr) Value: 24
  misc_feature: MA Experiment 20000453 PARAMETER Experiment Name: At_100uM_ABA_P Parameter: Tissue Value: Aerial
  misc_feature: MA Experiment 20000453 PARAMETER Experiment Name: At_100uM_ABA_P Parameter: Treatment Value: 100uM ABA vs. No Treatment
  misc_feature: MA Experiment ID: 20001757 Result: Down-regulated in Transcription
  misc_feature: MA Experiment 20001757 PARAMETER Experiment Name: At_50mM_NH4NO3_L-to-H_P Parameter: Timepoint (hr) Value: 6
  misc_feature: MA Experiment 20001757 PARAMETER Experiment Name: At_50mM_NH4NO3_L-to-H_P Parameter: Tissue Value: Leaf
  misc_feature: MA Experiment 20001757 PARAMETER Experiment Name: At_50mM_NH4NO3_L-to-H_P Parameter: Treatment Value: 50mM NH4NO3 vs 100mM Mannitol
  misc_feature: MA Experiment ID: 20001905 Result: Up-regulated in Transcription
  misc_feature: MA Experiment 20001905 PARAMETER Experiment Name: At_Drought_Reproduction_P Parameter: Age (day) Value: 40
  misc_feature: MA Experiment 20001905 PARAMETER Experiment Name: At_Drought_Reproduction_P Parameter: Organism Value: A. thaliana
  misc_feature: MA Experiment 20001905 PARAMETER Experiment Name: At_Drought_Reproduction_P Parameter: Plant Line Value: WS
  misc_feature: MA Experiment 20001905 PARAMETER Experiment Name: At_Drought_Reproduction_P Parameter: Timepoint (day) Value: 10
  misc_feature: MA Experiment 20001905 PARAMETER Experiment Name: At_Drought_Reproduction_P Parameter: Tissue Value: Rosettes
  misc_feature: MA Experiment 20001905 PARAMETER Experiment Name: At_Drought_Reproduction_P Parameter: Treatment Value: Drought vs. No Drought
  misc_feature: MA Experiment ID: 20001906 Result: Up-regulated in Transcription
  misc_feature: MA Experiment 20001906 PARAMETER Experiment Name: At_Drought_Reproduction_P Parameter: Age (day) Value: 35
  misc_feature: MA Experiment 20001906 PARAMETER Experiment Name: At_Drought_Reproduction_P Parameter: Organism Value: A. thaliana
  misc_feature: MA Experiment 20001906 PARAMETER Experiment Name: At_Drought_Reproduction_P Parameter: Plant Line Value: WS
  misc_feature: MA Experiment 20001906 PARAMETER Experiment Name: At_Drought_Reproduction_P Parameter: Timepoint (day) Value: 5
  misc_feature: MA Experiment 20001906 PARAMETER Experiment Name: At_Drought_Reproduction_P Parameter: Tissue Value: Siliques
  misc_feature: MA Experiment 20001906 PARAMETER Experiment Name: At_Drought_Reproduction_P Parameter: Treatment Value: Drought vs. No Drought
  misc_feature: MA Experiment ID: 20001908 Result: Up-regulated in Transcription
  misc_feature: MA Experiment 20001908 PARAMETER Experiment Name: At_Drought_Reproduction_P Parameter: Age (day) Value: 40
  misc_feature: MA Experiment 20001908 PARAMETER Experiment Name: At_Drought_Reproduction_P Parameter: Organism Value: A. thaliana
  misc_feature: MA Experiment 20001908 PARAMETER Experiment Name: At_Drought_Reproduction_P Parameter: Plant Line Value: WS
  misc_feature: MA Experiment 20001908 PARAMETER Experiment Name: At_Drought_Reproduction_P Parameter: Timepoint (day) Value: 10
  misc_feature: MA Experiment 20001908 PARAMETER Experiment Name: At_Drought_Reproduction_P Parameter: Tissue Value: Siliques
  misc_feature: MA Experiment 20001908 PARAMETER Experiment Name: At_Drought_Reproduction_P Parameter: Treatment Value: Drought vs. No Drought
aaaaaaaaaaaacttttcaaattcatctttggtttctgcagcagcaacaacaaccgagccctgttcgttagggttttcggtttttgttagcttttcttcttcttcttcttcgtttccttccacctgaattgttgtaaccatggcggagaaagtatcggaggacgttatgcttctacacggtgacctcgatttgaaaattgttaaggctaggaggttacctaacatggatatgttctcagaacatttgcgccgtctcttcaccgcctgtaacgcctgtgctagacccaccgataccgatgatgtcgatcccagagataaaggcgaattcggtgataaaaacatccgtagccaccgtaaggttatcaccagcgatccttacgtcaccgtcgtcgttcctcaagcgactctagctcgaacacgtgttttgaaaaactcacaagagcctctttgggacgagaaattcaacatttctatagcgcatccgtttgcttatctcgagttccaggtcaaagacgacgatgttttcggtgctcaaatcattggcacggctaagatcccggttcgagacatcgcatcgggagaacgcatttctggttggtttcctgtactcggtgcttcgggaaaaccgcctaaggcagaaactgctattttcatcgatatgaaatttactccgtttgaccagatccatagctaccgatgtggaatcgccggagatccggagcgtaggggtgttagacggacttatttccctgtgaggaaaggaagtcaggtgaggctttaccaggacgctcatgttatggacggaacgttgccggcgattgggttagataacgggaaagtttatgagcatgggaagtgttgggaagatatatgttatgctatatctgaggctcaccatatgatttacattgttggttggtctatcttccataagattaagcttgttagggaaacaaaagttccaagagataaggatatgacgcttggggaattgctcaaatacaaatcccaggaaggtgttcgagttttgctacttgtatgggatgataagacttctcatgataagtttgggataaaaacgcctggagttatggggacacatgatgaggagactaggaagttcttcaagcattcttctgtgatatgcgttttgtcaccccggtatgccagcagtaagcttgggttgttcaaacaacaggttgttggaactctcttcacgcaccatcaaaagtgtgttcttgtagacactcaggctgttggtaataatcgcaaggtcaccgcttttattggaggtctagatctttgtgatggccgttatgacacacctgagcataggatactccacgatcttgacactgtatttaaggatgatttccacaatcctacatttccagctggtaccaaggccccaagacaaccttggcacgatttgcactgtaggatagatgggcctgcggcatatgatgttctcataaactttgagcagcgatggagaaaggcaacacgatggaaggagtttagcttacgtttaaaggggaaaactcactggcaagatgatgctttgatccggatagggcgtatatcatggattctgagtccagtgtttaaatttctgaaggatggtacttcgataattccagaggacgatccatgtgtttgggtttctaaagaagatgatccagagaactggcatgttcagatattccgttctatcgactcaggatccgtgaaaggatttccaaaatatgaagatgaggctgaggcccagcatctggaatgtgccaagcgtcttgttgtagataaaagcatccagactgcatacatccagacaatcagatctgctcagcatttcatatatatcgagaatcagtatttcctgggttcttcttatgcttggccttcttatagagacgcaggagctgacaatcttattcctatggagttggcactaaagattgttagcaaaatcagagctaaggaaagatttgccgtatatgttgtcataccattgtggcctgaaggcgacccaaagtctggccctgtgcaagaaattctatattggcagagccaaactatgcagatgatgtatgatgttatagcaaaagaactgaaagcggtgcaatcagatgctcatcctctcgattaccttaacttttactgccttggtaaacgagagcagcttccagatgatatgccagccaccaatggcagtgtggtatcagattcttataatttccagcgtttcatgatttacgtgcacgcaaaagggatgatagtagatgatgagtatgtactcatgggatctgctaatatcaaccaaagatctatggcaggcaccaaagatactgaaatcgccatgggcgcataccaacctaatcatacatgggctcacaagggaagacacccacgtggccaggtgtatggatacagaatgtcactatgggcagagcatttaggcaaaactggagatgagtttgtggagccatcagatctggaatgtctgaagaaggtgaacacaatctctgaagaaaactggaaaagattcatagacccgaaattctcagagctacaaggtcacttaataaagtatcctctacaagtagacgttgatggtaaagtaagccctcttcctgattacgagaccttcccagatgttggtggtaagatcattggagctcattccatggctcttcctgacactttaaccacgtaatgtgaatgttcaatgtaaatttcagcatttgttttggggtttcttttgatcctgaataatattagctgaaagtgttgtttgagttgttgtacatttaactgtgttgtttcttttttatacattcttttgtgattgtcgtcaaatatttgttggggtgcaaaatgtagagatcgtgagtgagtgaagaggcaaaataatttgaggatattcta

SEQ ID NO: 41444 - protein, 857 aa, Arabidopsis thaliana
  peptide (1)..(857): Ceres Seq. ID no. 12421326
  misc_feature (16)..(138): Pfam Name: C2 domain Pfam Description: C2 domain
  misc_feature (696)..(856): Homolog of NCBI NO: 22795058 NR Description: phospholipase D beta 1 isoform 1a [Gossypium
  misc_feature (507)..(691): Homolog of NCBI NO: 22795058 NR Description: phospholipase D beta 1 isoform 1a [Gossypium
  misc_feature (3)..(507): Homolog of NCBI NO: 22795058 NR Description: phospholipase D beta 1 isoform 1a [Gossypium
  misc_feature (1)..(40): Homolog of NCBI NO: 13111663 NR Description: phospholipase PLDb2 [Lycopersicon esculentum]
  misc_feature (502)..(856): Homolog of NCBI NO: 13111663 NR Description: phospholipase PLDb2 [Lycopersicon esculentum]
  misc_feature (75)..(507): Homolog of NCBI NO: 13111663 NR Description: phospholipase PLDb2 [Lycopersicon esculentum]
  misc_feature (1)..(40): Homolog of NCBI NO: 20138945 NR Description: Phospholipase D beta 1 (AtPLDbeta1) (PLD beta 1)
  misc_feature (75)..(856): Homolog of NCBI NO: 20138945 NR Description: Phospholipase D beta 1 (AtPLDbeta1) (PLD beta 1)
  misc_feature (6)..(857): Homolog of NCBI NO: 8699602 NR Description: phospholipase D [Oryza sativa]
  misc_feature (10)..(857): Homolog of NCBI NO: 34900970 NR Description: putative phospholipase D [Oryza sativa (japonica
MAEKVSEDVMLLHGDLDLKIVKARRLPNMDMFSEHLRRLFTACNACARPTDTDDVDPRDKGEFGDKNIRSHRKVITSDPYVTVVVPQATLARTRVLKNSQEPLWDEKFNISIAHPFAYLEFQVKDDDVFGAQIIGTAKIPVRDIASGERISGWFPVLGASGKPPKAETAIFIDMKFTPFDQIHSYRCGIAGDPERRGVRRTYFPVRKGSQVRLYQDAHVMDGTLPAIGLDNGKVYEHGKCWEDICYAISEAHHMIYIVGWSIFHKIKLVRETKVPRDKDMTLGELLKYKSQEGVRVLLLVWDDKTSHDKFGIKTPGVMGTHDEETRKFFKHSSVICVLSPRYASSKLGLFKQQVVGTLFTHHQKCVLVDTQAVGNNRKVTAFIGGLDLCDGRYDTPEHRILHDLDTVFKDDFHNPTFPAGTKAPRQPWHDLHCRIDGPAAYDVLINFEQRWRKATRWKEFSLRLKGKTHWQDDALIRIGRISWILSPVFKFLKDGTSIIPEDDPCVWVSKEDDPENWHVQIFRSIDSGSVKGFPKYEDEAEAQHLECAKRLVVDKSIQTAYIQTIRSAQHFIYIENQYFLGSSYAWPSYRDAGADNLIPMELALKIVSKIRAKERFAVYVVIPLWPEGDPKSGPVQEILYWQSQTMQMMYDVIAKELKAVQSDAHPLDYLNFYCLGKREQLPDDMPATNGSVVSDSYNFQRFMIYVHAKGMIVDDEYVLMGSANINQRSMAGTKDTEIAMGAYQPNHTWAHKGRHPRGQVYGYRMSLWAEHLGKTGDEFVEPSDLECLKKVNTISEENWKRFIDPKFSELQGHLIKYPLQVDVDGKVSPLPDYETFPDVGGKIIGAHSMALPDTLTT

SEQ ID NO: 41445 - protein, 848 aa, Arabidopsis thaliana
  peptide (1)..(848): Ceres Seq. ID no. 12421327
  misc_feature (7)..(129): Pfam Name: C2 domain Pfam Description: C2 domain
  misc_feature (687)..(847): Homolog of NCBI NO: 22795058 NR Description: phospholipase D beta 1 isoform 1a [Gossypium
  misc_feature (498)..(682): Homolog of NCBI NO: 22795058 NR Description: phospholipase D beta 1 isoform 1a [Gossypium
  misc_feature (1)..(498): Homolog of NCBI NO: 22795058 NR Description: phospholipase D beta 1 isoform 1a [Gossypium
  misc_feature (1)..(31): Homolog of NCBI NO: 13111663 NR Description: phospholipase PLDb2 [Lycopersicon esculentum]
  misc_feature (493)..(847): Homolog of NCBI NO: 13111663 NR Description: phospholipase PLDb2 [Lycopersicon esculentum]
  misc_feature (66)..(498): Homolog of NCBI NO: 13111663 NR Description: phospholipase PLDb2 [Lycopersicon esculentum]
  misc_feature (1)..(31): Homolog of NCBI NO: 20138945 NR Description: Phospholipase D beta 1 (AtPLDbeta1) (PLD beta 1)
  misc_feature (66)..(847): Homolog of NCBI NO: 20138945 NR Description: Phospholipase D beta 1 (AtPLDbeta1) (PLD beta 1)
  misc_feature (1)..(848): Homolog of NCBI NO: 8699602 NR Description: phospholipase D [Oryza sativa]
  misc_feature (1)..(848): Homolog of NCBI NO: 34900970 NR Description: putative phospholipase D [Oryza sativa (japonica
MLLHGDLDLKIVKARRLPNMDMFSEHLRRLFTACNACARPTDTDDVDPRDKGEFGDKNIRSHRKVITSDPYVTVVVPQATLARTRVLKNSQEPLWDEKFNISIAHPFAYLEFQVKDDDVFGAQIIGTAKIPVRDIASGERISGWFPVLGASGKPPKAETAIFIDMKFTPFDQIHSYRCGIAGDPERRGVRRTYFPVRKGSQVRLYQDAHVMDGTLPAIGLDNGKVYEHGKCWEDICYAISEAHHMIYIVGWSIFHKIKLVRETKVPRDKDMTLGELLKYKSQEGVRVLLLVWDDKTSHDKFGIKTPGVMGTHDEETRKFFKHSSVICVLSPRYASSKLGLFKQQVVGTLFTHHQKCVLVDTQAVGNNRKVTAFIGGLDLCDGRYDTPEHRILHDLDTVFKDDFHNPTFPAGTKAPRQPWHDLHCRIDGPAAYDVLINFEQRWRKATRWKEFSLRLKGKTHWQDDALIRIGRISWILSPVFKFLKDGTSIIPEDDPCVWVSKEDDPENWHVQIFRSIDSGSVKGFPKYEDEAEAQHLECAKRLVVDKSIQTAYIQTIRSAQHFIYIENQYFLGSSYAWPSYRDAGADNLIPMELALKIVSKIRAKERFAVYVVIPLWPEGDPKSGPVQEILYWQSQTMQMMYDVIAKELKAVQSDAHPLDYLNFYCLGKREQLPDDMPATNGSVVSDSYNFQRFMIYVHAKGMIVDDEYVLMGSANINQRSMAGTKDTEIAMGAYQPNHTWAHKGRHPRGQVYGYRMSLWAEHLGKTGDEFVEPSDLECLKKVNTISEENWKRFIDPKFSELQGHLIKYPLQVDVDGKVSPLPDYETFPDVGGKIIGAHSMALPDTLTT

SEQ ID NO: 41446 - protein, 829 aa, Arabidopsis thaliana
  peptide (1)..(829): Ceres Seq. ID no. 12421328
  misc_feature (1)..(110): Pfam Name: C2 domain Pfam Description: C2 domain
  misc_feature (668)..(828): Homolog of NCBI NO: 22795058 NR Description: phospholipase D beta 1 isoform 1a [Gossypium
  misc_feature (479)..(663): Homolog of NCBI NO: 22795058 NR Description: phospholipase D beta 1 isoform 1a [Gossypium
  misc_feature (1)..(479): Homolog of NCBI NO: 22795058 NR Description: phospholipase D beta 1 isoform 1a [Gossypium
  misc_feature (1)..(12): Homolog of NCBI NO: 13111663 NR Description: phospholipase PLDb2 [Lycopersicon esculentum]
  misc_feature (474)..(828): Homolog of NCBI NO: 13111663 NR Description: phospholipase PLDb2 [Lycopersicon esculentum]
  misc_feature (47)..(479): Homolog of NCBI NO: 13111663 NR Description: phospholipase PLDb2 [Lycopersicon esculentum]
  misc_feature (1)..(12): Homolog of NCBI NO: 20138945 NR Description: Phospholipase D beta 1 (AtPLDbeta1) (PLD beta 1)
  misc_feature (47)..(828): Homolog of NCBI NO: 20138945 NR Description: Phospholipase D beta 1 (AtPLDbeta1) (PLD beta 1)
  misc_feature (1)..(829): Homolog of NCBI NO: 8699602 NR Description: phospholipase D [Oryza sativa]
  misc_feature (1)..(829): Homolog of NCBI NO: 34900970 NR Description: putative phospholipase D [Oryza sativa (japonica
MDMFSEHLRRLFTACNACARPTDTDDVDPRDKGEFGDKNIRSHRKVITSDPYVTVVVPQATLARTRVLKNSQEPLWDEKFNISIAHPFAYLEFQVKDDDVFGAQIIGTAKIPVRDIASGERISGWFPVLGASGKPPKAETAIFIDMKFTPFDQIHSYRCGIAGDPERRGVRRTYFPVRKGSQVRLYQDAHVMDGTLPAIGLDNGKVYEHGKCWEDICYAISEAHHMIYIVGWSIFHKIKLVRETKVPRDKDMTLGELLKYKSQEGVRVLLLVWDDKTSHDKFGIKTPGVMGTHDEETRKFFKHSSVICVLSPRYASSKLGLFKQQVVGTLFTHHQKCVLVDTQAVGNNRKVTAFIGGLDLCDGRYDTPEHRILHDLDTVFKDDFHNPTFPAGTKAPRQPWHDLHCRIDGPAAYDVLINFEQRWRKATRWKEFSLRLKGKTHWQDDALIRIGRISWILSPVFKFLKDGTSIIPEDDPCVWVSKEDDPENWHVQIFRSIDSGSVKGFPKYEDEAEAQHLECAKRLVVDKSIQTAYIQTIRSAQHFIYIENQYFLGSSYAWPSYRDAGADNLIPMELALKIVSKIRAKERFAVYVVIPLWPEGDPKSGPVQEILYWQSQTMQMMYDVIAKELKAVQSDAHPLDYLNFYCLGKREQLPDDMPATNGSVVSDSYNFQRFMIYVHAKGMIVDDEYVLMGSANINQRSMAGTKDTEIAMGAYQPNHTWAHKGRHPRGQVYGYRMSLWAEHLGKTGDEFVEPSDLECLKKVNTISEENWKRFIDPKFSELQGHLIKYPLQVDVDGKVSPLPDYETFPDVGGKIIGAHSMALPDTLTT

SEQ ID NO: 41447 - DNA, 2404 bp, Arabidopsis thaliana
  misc_feature (1)..(2404): Ceres Seq. ID no. 12329382
  misc_feature: MA Experiment ID: 108433 Result: Down-regulated in Transcription
  misc_feature: MA Experiment 108433 PARAMETER Experiment Name: At_rhl_Mutant2_cDNA_P Parameter: Age (day) Value: 7
  misc_feature: MA Experiment 108433 PARAMETER Experiment Name: At_rhl_Mutant2_cDNA_P Parameter: Organism Value: A. thaliana
  misc_feature: MA Experiment 108433 PARAMETER Experiment Name: At_rhl_Mutant2_cDNA_P Parameter: Plant Line Value: rhl Mutant vs. wt landsburg
  misc_feature: MA Experiment 108433 PARAMETER Experiment Name: At_rhl_Mutant2_cDNA_P Parameter: Tissue Value: Roots
  misc_feature: MA Experiment ID: 108434 Result: Up-regulated in Transcription
  misc_feature: MA Experiment 108434 PARAMETER Experiment Name: At_Root_Tips_cDNA_P Parameter: Tissue Value: Root Tips
  misc_feature: MA Experiment ID: 108461 Result: Down-regulated in Transcription
  misc_feature: MA Experiment 108461 PARAMETER Experiment Name: At_Germinating_Seeds_cDNA_P Parameter: Age (day) Value: 1 vs. 0
  misc_feature: MA Experiment 108461 PARAMETER Experiment Name: At_Germinating_Seeds_cDNA_P Parameter: Tissue Value: Germinating Seeds
  misc_feature: MA Experiment ID: 108462 Result: Down-regulated in Transcription
  misc_feature: MA Experiment 108462 PARAMETER Experiment Name: At_Germinating_Seeds_cDNA_P Parameter: Age (day) Value: 2 vs. 0
  misc_feature: MA Experiment 108462 PARAMETER Experiment Name: At_Germinating_Seeds_cDNA_P Parameter: Tissue Value: Germinating Seeds
  misc_feature: MA Experiment ID: 108463 Result: Down-regulated in Transcription
  misc_feature: MA Experiment 108463 PARAMETER Experiment Name: At_Germinating_Seeds_cDNA_P Parameter: Age (day) Value: 3 vs. 0
  misc_feature: MA Experiment 108463 PARAMETER Experiment Name: At_Germinating_Seeds_cDNA_P Parameter: Tissue Value: Germinating Seeds
  misc_feature: MA Experiment ID: 108464 Result: Down-regulated in Transcription
  misc_feature: MA Experiment 108464 PARAMETER Experiment Name: At_Germinating_Seeds_cDNA_P Parameter: Age (day) Value: 4 vs. 0
  misc_feature: MA Experiment 108464 PARAMETER Experiment Name: At_Germinating_Seeds_cDNA_P Parameter: Tissue Value: Germinating Seeds
  misc_feature: MA Experiment ID: 20000089 Result: Up-regulated in Transcription
  misc_feature: MA Experiment ID: 20000090 Result: Up-regulated in Transcription
  misc_feature: MA Experiment ID: 20000111 Result: Down-regulated in Transcription
  misc_feature: MA Experiment 20000111 PARAMETER Experiment Name: At_42deg_Heat_cDNA_P Parameter: Temperature (deg C) Value: 42 vs. 22
  misc_feature: MA Experiment 20000111 PARAMETER Experiment Name: At_42deg_Heat_cDNA_P Parameter: Timepoint (hr) Value: 6
  misc_feature: MA Experiment 20000111 PARAMETER Experiment Name: At_42deg_Heat_cDNA_P Parameter: Tissue Value: Aerial
  misc_feature: MA Experiment ID: 20000113 Result: Down-regulated in Transcription
  misc_feature: MA Experiment 20000113 PARAMETER Experiment Name: At_42deg_Heat_cDNA_P Parameter: Temperature (deg C) Value: 42 vs. 22
  misc_feature: MA Experiment 20000113 PARAMETER Experiment Name: At_42deg_Heat_cDNA_P Parameter: Timepoint (hr) Value: 8
  misc_feature: MA Experiment 20000113 PARAMETER Experiment Name: At_42deg_Heat_cDNA_P Parameter: Tissue Value: Aerial
  misc_feature: MA Experiment ID: 20000224 Result: Up-regulated in Transcription
  misc_feature: MA Experiment ID: 20000307 Result: Down-regulated in Transcription
  misc_feature: MA Experiment 20000307 PARAMETER Experiment Name: At_Germinating_Seeds_Sub_P Parameter: Age (hr) Value: 24 vs. 0
  misc_feature: MA Experiment 20000307 PARAMETER Experiment Name: At_Germinating_Seeds_Sub_P Parameter: Organism Value: A. thaliana
  misc_feature: MA Experiment 20000307 PARAMETER Experiment Name: At_Germinating_Seeds_Sub_P Parameter: Plant Line Value: WS
  misc_feature: MA Experiment 20000307 PARAMETER Experiment Name: At_Germinating_Seeds_Sub_P Parameter: Tissue Value: Germinating Seeds
  misc_feature: MA Experiment ID: 20000327 Result: Down-regulated in Transcription
  misc_feature: MA Experiment 20000327 PARAMETER Experiment Name: At_42deg_Heat_Sub_P Parameter: Age (day) Value: 14
  misc_feature: MA Experiment 20000327 PARAMETER Experiment Name: At_42deg_Heat_Sub_P Parameter: Organism Value: A. thaliana
  misc_feature: MA Experiment 20000327 PARAMETER Experiment Name: At_42deg_Heat_Sub_P Parameter: Plant Line Value: WS
  misc_feature: MA Experiment 20000327 PARAMETER Experiment Name: At_42deg_Heat_Sub_P Parameter: Temperature (deg C) Value: 42 vs. 22
  misc_feature: MA Experiment 20000327 PARAMETER Experiment Name: At_42deg_Heat_Sub_P Parameter: Timepoint (hr) Value: 1
  misc_feature: MA Experiment 20000327 PARAMETER Experiment Name: At_42deg_Heat_Sub_P Parameter: Tissue Value: Aerial
  misc_feature: MA Experiment ID: 20000328 Result: Down-regulated in Transcription
  misc_feature: MA Experiment 20000328 PARAMETER Experiment Name: At_42deg_Heat_Sub_P Parameter: Age (day) Value: 14
  misc_feature: MA Experiment 20000328 PARAMETER Experiment Name: At_42deg_Heat_Sub_P Parameter: Organism Value: A. thaliana
  misc_feature: MA Experiment 20000328 PARAMETER Experiment Name: At_42deg_Heat_Sub_P Parameter: Plant Line Value: WS
  misc_feature: MA Experiment 20000328 PARAMETER Experiment Name: At_42deg_Heat_Sub_P Parameter: Temperature (deg C) Value: 42 vs. 22
  misc_feature: MA Experiment 20000328 PARAMETER Experiment Name: At_42deg_Heat_Sub_P Parameter: Timepoint (hr) Value: 6
  misc_feature: MA Experiment 20000328 PARAMETER Experiment Name: At_42deg_Heat_Sub_P Parameter: Tissue Value: Aerial
gtggccgtctttttcaaaaccttagacaatgagtatcatgctatcaatttcccggcgccagaactcttatattctgctcaaccattctcgattcctccggcgtttttcttatgatgttgacccacggccggaaatcaaatcggagagccaggaatttgtagtagtcaaatttgtgaaaactcttcaaaataccccgcaacatgattgggcgtcgagcgagtcgctaagtgcgcttgtcgtatcttcttcttctgcttctcctttagtattctcgcaaatcacgcggcggctaggatcgtattctctagcaatctcgttcttcgagtacctggatgcgaagtctcagtctctgaaacgccgtgaagaatctctctccttggcgcttcagtcggtcattgaattcgccggtagtgaaccggacccgcgtgataaacttctccgtctctacgagatcgccaaagagaagaacattcctcttactatcgttgccactaagcttctgatccgatggtttgggcgtatgggtatggtgaatcagtcggttcttgtatacgaaagactcgattcgaatatgaaaaactcgcaggttcgtaatgttgtggtagacgtcttgctaagaaatggacttgtggatgatgccttcaaggtgctcgacgaaatgcttcagaaagaatctgtttttcctcctaatagaatcacagcggatattgtgttacacgaggtttggaaggaaaggcttttgacagaagaaaagataattgctttgatttcaagatttagctctcatggtgtctccccaaactctgtttggttgactcggtttatatcaagtctatgcaaaaatgctcgcgccaatactgcttgggatattttgagcgacctgatgaagaacaaaaccccacttgaagctcctcccttcaatgcgcttttgtcttgcttaggaaggaatatggacattagtagaatgaatgatttagtcttgaagatggatgaggtgaaaatccggcctgatgttgtgactttagggattcttattaacactttatgcaaatcaagaagggtagatgaagctctcgaagtttttgaacaaatgcgtggaaagagaactgatgatggaaatgtgattaaagctgattcgattcattttaatactctcattgacgggctctgcaaggtggggaggttgaaagaagcagaggagttattggtaaggatgaaactggaagagagatgtgtgcccaatgcagttacttacaattgcttgattgatgggtattgcagagctggaaagcttgagacggctaaagaagtcgtttctcggatgaaagaggacgagattaaacctaatgtggtaactgttaatacaatcgttggtgggatgtgcaggcaccatggattgaacatggcggttgttttctttatggatatggaaaaggaaggcgtgaaagggaatgtggttacttatatgacattgattcatgcttgttgcagcgtcagtaatgtagagaaggctatgtattggtatgaaaaaatgttggaagctggttgttctcctgatgcaaagatctattatgctttgatctctggattgtgccaagttagacgggatcatgacgccattagagtggtggagaaactgaaagaaggagggttttctcttgacttattggcttacaacatgcttattgggttgttttgtgataagaataatgcagagaaagtctatgagatgctaaccgatatggaaaaagaagggaagaaacctgattccatcacttacaacactctgatttcgtttttcggtaaacacaaggacttcgagagtgttgagagaatgatggagcagatgagagaagacgggttagacccgactgtcacgacatatggagcggtgattgacgcttattgctcagtcggcgaattagacgaagcattgaagctctttaaggacatgggtttgcactcaaaggtcaatccgaacactgtaatatacaacattctcataaacgcattttctaagctggggaatttcgggcaagcgctctctctgaaagaggaaatgaagatgaagatggtgagacctaatgttgaaacttacaatgccttgtttaagtgtcttaacgagaaaacccaaggagagacattacttaaactgatggatgagatggtcgaacagtcttgtgaaccaaatcagatcacaatggagattctaatggagcgtctctcaggttctgatgagttagttaagctgaggaagtttatgcaaggctactctgttgcttcgccgaccgagaaagcttcacctttcgatgtctttagcttgggataatgttcttttagatacagtaaccattactataatgtttttaataatttcttgattatgcattttatataattacgc

SEQ ID NO: 41448 - protein, 766 aa, Arabidopsis thaliana
  peptide (1)..(766): Ceres Seq. ID no. 12329383
  misc_feature (477)..(511): Pfam Name: PPR repeat Pfam Description: PPR repeat
  misc_feature (266)..(728): Homolog of NCBI NO: 15234269 NR Description: putative protein; protein id: At4g11690.1
  misc_feature (188)..(737): Homolog of NCBI NO: 25518293 NR Description: hypothetical protein F13K23.2 - Arabidopsis
  misc_feature (189)..(681): Homolog of NCBI NO: 37572999 NR Description: putative fertility restorer homologue
  misc_feature (327)..(733): Homolog of NCBI NO: 15218325 NR Description: hypothetical protein; protein id: At1g09900.1
  misc_feature (196)..(756): Homolog of NCBI NO: 15228763 NR Description: hypothetical protein; protein id: At3g22470.1
  misc_feature (136)..(756): Homolog of NCBI NO: 11994279 NR Description: gb|AAD43616.1~gene_id:F16J14.3~strong similarity
  misc_feature (179)..(766): Homolog of NCBI NO: 34394343 NR Description: putative fertility restorer homologue
  misc_feature (162)..(730): Homolog of NCBI NO: 15221300 NR Description: hypothetical protein; protein id: At1g74580.1
  misc_feature (189)..(744): Homolog of NCBI NO: 15237662 NR Description: putative protein; protein id: At5g64320.1
  misc_feature (297)..(761): Homolog of NCBI NO: 15242446 NR Description: putative protein; protein id: At5g39710.1
MSIMLSISRRQNSYILLNHSRFLRRFSYDVDPRPEIKSESQEFVVVKFVKTLQNTPQHDWASSESLSALVVSSSSASPLVFSQITRRLGSYSLAISFFEYLDAKSQSLKRREESLSLALQSVIEFAGSEPDPRDKLLRLYEIAKEKNIPLTIVATKLLIRWFGRMGMVNQSVLVYERLDSNMKNSQVRNVVVDVLLRNGLVDDAFKVLDEMLQKESVFPPNRITADIVLHEVWKERLLTEEKIIALISRFSSHGVSPNSVWLTRFISSLCKNARANTAWDILSDLMKNKTPLEAPPFNALLSCLGRNMDISRMNDLVLKMDEVKIRPDVVTLGILINTLCKSRRVDEALEVFEQMRGKRTDDGNVIKADSIHFNTLIDGLCKVGRLKEAEELLVRMKLEERCVPNAVTYNCLIDGYCRAGKLETAKEVVSRMKEDEIKPNVVTVNTIVGGMCRHHGLNMAVVFFMDMEKEGVKGNVVTYMTLIHACCSVSNVEKAMYWYEKMLEAGCSPDAKIYYALISGLCQVRRDHDAIRVVEKLKEGGFSLDLLAYNMLIGLFCDKNNAEKVYEMLTDMEKEGKKPDSITYNTLISFFGKHKDFESVERMMEQMREDGLDPTVTTYGAVIDAYCSVGELDEALKLFKDMGLHSKVNPNTVIYNILINAFSKLGNFGQALSLKEEMKMKMVRPNVETYNALFKCLNEKTQGETLLKLMDEMVEQSCEPNQITMEILMERLSGSDELVKLRKFMQGYSVASPTEKASPFDVFSLG

SEQ ID NO: 41449 - protein, 763 aa, Arabidopsis thaliana
  peptide (1)..(763): Ceres Seq. ID no. 12329384
  misc_feature (474)..(508): Pfam Name: PPR repeat Pfam Description: PPR repeat
  misc_feature (263)..(725): Homolog of NCBI NO: 15234269 NR Description: putative protein; protein id: At4g11690.1
  misc_feature (185)..(734): Homolog of NCBI NO: 25518293 NR Description: hypothetical protein F13K23.2 - Arabidopsis
  misc_feature (186)..(678): Homolog of NCBI NO: 37572999 NR Description: putative fertility restorer homologue
  misc_feature (324)..(730): Homolog of NCBI NO: 15218325 NR Description: hypothetical protein; protein id: At1g09900.1
  misc_feature (193)..(753): Homolog of NCBI NO: 15228763 NR Description: hypothetical protein; protein id: At3g22470.1
  misc_feature (133)..(753): Homolog of NCBI NO: 11994279 NR Description: gb|AAD43616.1~gene_id:F16J14.3~strong similarity
  misc_feature (176)..(763): Homolog of NCBI NO: 34394343 NR Description: putative fertility restorer homologue
  misc_feature (159)..(727): Homolog of NCBI NO: 15221300 NR Description: hypothetical protein; protein id: At1g74580.1
  misc_feature (186)..(741): Homolog of NCBI NO: 15237662 NR Description: putative protein; protein id: At5g64320.1
  misc_feature (294)..(758): Homolog of NCBI NO: 15242446 NR Description: putative protein; protein id: At5g39710.1
MLSISRRQNSYILLNHSRFLRRFSYDVDPRPEIKSESQEFVVVKFVKTLQNTPQHDWASSESLSALVVSSSSASPLVFSQITRRLGSYSLAISFFEYLDAKSQSLKRREESLSLALQSVIEFAGSEPDPRDKLLRLYEIAKEKNIPLTIVATKLLIRWFGRMGMVNQSVLVYERLDSNMKNSQVRNVVVDVLLRNGLVDDAFKVLDEMLQKESVFPPNRITADIVLHEVWKERLLTEEKIIALISRFSSHGVSPNSVWLTRFISSLCKNARANTAWDILSDLMKNKTPLEAPPFNALLSCLGRNMDISRMNDLVLKMDEVKIRPDVVTLGILINTLCKSRRVDEALEVFEQMRGKRTDDGNVIKADSIHFNTLIDGLCKVGRLKEAEELLVRMKLEERCVPNAVTYNCLIDGYCRAGKLETAKEVVSRMKEDEIKPNVVTVNTIVGGMCRHHGLNMAVVFFMDMEKEGVKGNVVTYMTLIHACCSVSNVEKAMYWYEKMLEAGCSPDAKIYYALISGLCQVRRDHDAIRVVEKLKEGGFSLDLLAYNMLIGLFCDKNNAEKVYEMLTDMEKEGKKPDSITYNTLISFFGKHKDFESVERMMEQMREDGLDPTVTTYGAVIDAYCSVGELDEALKLFKDMGLHSKVNPNTVIYNILINAFSKLGNFGQALSLKEEMKMKMVRPNVETYNALFKCLNEKTQGETLLKLMDEMVEQSCEPNQITMEILMERLSGSDELVKLRKFMQGYSVASPTEKASPFDVFSLG

SEQ ID NO: 41450 - protein, 602 aa, Arabidopsis thaliana
  peptide (1)..(602): Ceres Seq. ID no. 12329385
  misc_feature (313)..(347): Pfam Name: PPR repeat Pfam Description: PPR repeat
  misc_feature (102)..(564): Homolog of NCBI NO: 15234269 NR Description: putative protein; protein id: At4g11690.1
  misc_feature (24)..(573): Homolog of NCBI NO: 25518293 NR Description: hypothetical protein F13K23.2 - Arabidopsis
  misc_feature (25)..(517): Homolog of NCBI NO: 37572999 NR Description: putative fertility restorer homologue
  misc_feature (163)..(569): Homolog of NCBI NO: 15218325 NR Description: hypothetical protein; protein id: At1g09900.1
  misc_feature (32)..(592): Homolog of NCBI NO: 15228763 NR Description: hypothetical protein; protein id: At3g22470.1
  misc_feature (1)..(592): Homolog of NCBI NO: 11994279 NR Description: gb|AAD43616.1~gene_id:F16J14.3~strong similarity
  misc_feature (15)..(602): Homolog of NCBI NO: 34394343 NR Description: putative fertility restorer homologue
  misc_feature (1)..(566): Homolog of NCBI NO: 15221300 NR Description: hypothetical protein; protein id: At1g74580.1
  misc_feature (25)..(580): Homolog of NCBI NO: 15237662 NR Description: putative protein; protein id: At5g64320.1
  misc_feature (133)..(597): Homolog of NCBI NO: 15242446 NR Description: putative protein; protein id: At5g39710.1
MGMVNQSVLVYERLDSNMKNSQVRNVVVDVLLRNGLVDDAFKVLDEMLQKESVFPPNRITADIVLHEVWKERLLTEEKIIALISRFSSHGVSPNSVWLTRFISSLCKNARANTAWDILSDLMKNKTPLEAPPFNALLSCLGRNMDISRMNDLVLKMDEVKIRPDVVTLGILINTLCKSRRVDEALEVFEQMRGKRTDDGNVIKADSIHFNTLIDGLCKVGRLKEAEELLVRMKLEERCVPNAVTYNCLIDGYCRAGKLETAKEVVSRMKEDEIKPNVVTVNTIVGGMCRHHGLNMAVVFFMDMEKEGVKGNVVTYMTLIHACCSVSNVEKAMYWYEKMLEAGCSPDAKIYYALISGLCQVRRDHDAIRVVEKLKEGGFSLDLLAYNMLIGLFCDKNNAEKVYEMLTDMEKEGKKPDSITYNTLISFFGKHKDFESVERMMEQMREDGLDPTVTTYGAVIDAYCSVGELDEALKLFKDMGLHSKVNPNTVIYNILINAFSKLGNFGQALSLKEEMKMKMVRPNVETYNALFKCLNEKTQGETLLKLMDEMVEQSCEPNQITMEILMERLSGSDELVKLRKFMQGYSVASPTEKASPFDVFSLG

SEQ ID NO: 41451 - DNA, 2423 bp, Arabidopsis thaliana
  misc_feature (1)..(2423): Ceres Seq. ID no. 13489032
  misc_feature: MA Experiment ID: 108434 Result: Up-regulated in Transcription
  misc_feature: MA Experiment 108434 PARAMETER Experiment Name: At_Root_Tips_cDNA_P Parameter: Tissue Value: Root Tips
  misc_feature: MA Experiment ID: 108461 Result: Down-regulated in Transcription
  misc_feature: MA Experiment 108461 PARAMETER Experiment Name: At_Germinating_Seeds_cDNA_P Parameter: Age (day) Value: 1 vs. 0
  misc_feature: MA Experiment 108461 PARAMETER Experiment Name: At_Germinating_Seeds_cDNA_P Parameter: Tissue Value: Germinating Seeds
  misc_feature: MA Experiment ID: 108462 Result: Down-regulated in Transcription
  misc_feature: MA Experiment 108462 PARAMETER Experiment Name: At_Germinating_Seeds_cDNA_P Parameter: Age (day) Value: 2 vs. 0
  misc_feature: MA Experiment 108462 PARAMETER Experiment Name: At_Germinating_Seeds_cDNA_P Parameter: Tissue Value: Germinating Seeds
  misc_feature: MA Experiment ID: 108463 Result: Down-regulated in Transcription
  misc_feature: MA Experiment 108463 PARAMETER Experiment Name: At_Germinating_Seeds_cDNA_P Parameter: Age (day) Value: 3 vs. 0
  misc_feature: MA Experiment 108463 PARAMETER Experiment Name: At_Germinating_Seeds_cDNA_P Parameter: Tissue Value: Germinating Seeds
  misc_feature: MA Experiment ID: 108464 Result: Down-regulated in Transcription
  misc_feature: MA Experiment 108464 PARAMETER Experiment Name: At_Germinating_Seeds_cDNA_P Parameter: Age (day) Value: 4 vs. 0
  misc_feature: MA Experiment 108464 PARAMETER Experiment Name: At_Germinating_Seeds_cDNA_P Parameter: Tissue Value: Germinating Seeds
  misc_feature: MA Experiment ID: 108595 Result: Down-regulated in Transcription
  misc_feature: MA Experiment 108595 PARAMETER Experiment Name: At_Ler-pi_Ovule_cDNA_P Parameter: Plant Line Value: null
  misc_feature: MA Experiment ID: 20000184 Result: Down-regulated in Transcription
  misc_feature: MA Experiment 20000184 PARAMETER Experiment Name: At_Shoots__P Parameter: Age (day) Value: 7
  misc_feature: MA Experiment 20000184 PARAMETER Experiment Name: At_Shoots__P Parameter: Tissue Value: Shoots vs. Whole Plant
ctgcttcaatccccttttttttttcgtttcgtcgtttgttcgttttctctatcgctctcgttcatctacgcaatctctctcactaggtacagttttaaatgggtaagaagaagtcagacgagagtgctgctaccacaaaggtgaagccaagtgggaaagatgcttcgaaagattctaaaaaagagaaattgtcagtctcggctatgcttgcaggcatggatcagaaagatgataaaccgaagaagggctcatcatctagaaccaaggctgctccgaaatctacatcttacactgatggcatagatcttcctccttctgatgaagaagacgacggtgaatctgatgaggaagagagacagaaggaagcaaggaggaagctgaagagtgaacaaaggcaccttgagatatctgtgactgataaggaacaaaagaagcgagaggcgaaagaaagattagctcttcaggctgcagagtcggcaaagagggaggctatgaaggacgatcatgatgcattcacggttgttattggaagcaagacctcagtgcttgaaggagacgacatggctgatgcaaatgttaaggatattaccatagaatctttttctgtatctgctcgaggtaaagagcttttgaagaatgcttctgtcaggatttcacatggtaaaaggtatgggttgatcgggccaaacggaatgggaaagtctacactgttaaagcttttagcttggaggaagattccagtgccaaagaatattgatgttcttcttgttgagcaagaggtggttggtgatgaaaagagtgctctgaatgcagttgtctctgccaatgaagagttggttaagctacgggaagaggctgaagctctgcagaagtcgtcttctggagctgatggagaaaatgttgatggtgaggatgatgatgatactggagaaaagcttgctgaactgtatgacaggctgcagattttagggtcagatgctgctgaagcacaggcatccaaaattcttgcggggttaggtttcacaaaagatatgcaagtgcgtgcgactcagtccttcagtggtggctggaggatgcgaatatcattagctagagctctgttcgtgcaacctacccttttgctgttagatgaacccactaaccatcttgacctgagagctgttctatggttagaggagtatttgtgtcgctggaagaagacactagttgttgtttcacatgaccgggacttcctcaacacagtctgcacggagataatacatctccatgaccaaaatctccacttctaccgtggtaatttcgatggttttgaaagcggatatgagcagcgtcgcaaggagatgaacaaaaaatttgatgtctacgacaaacagatgaaagcagcgaagaggactggaaaccggggtcaacaggagaaggtaaaggacagggccaagtttactgctgcaaaagaagcatccaagagtaagtcaaagggcaagacagtggatgaagaaggcccagcaccagaagctccaaggaagtggagagattacagtgtggtgttccacttcccagaaccaactgagctcactcctcctcttctgcagttaattgaggttagcttcagctatcccaacaggccagatttcagactctcgaatgttgatgtaggtatcgatatggggacacgggttgcgatagttgggcctaacggagcaggaaagtccactctattaaatcttcttgcgggagatttagttccaacagagggtgaaatgagaagaagccagaagctgaggattggcaggtattctcagcattttgttgaccttttaacaatgggggaaacaccggttcagtatctccttcgtcttcatcctgaccaagagggatttagcaagcaagaggcagtgcgagcgaagctaggcaagtttgggctaccaagtcacaatcacttatctccaattgcgaaattgtctggaggacaaaaggctagggttgtgttcacctcgatctcaatgtcaaaaccacacattttgcttctggacgagcctacaaatcacttagacatgcagagtatagatgccttggcggatgcactagatgagttcacaggtggagttgtgttggtgagtcacgactcgagactcatatcacgtgtatgtgcggaagaggagaagagtcaaatttgggttgtagaagacggaacagtgaatttcttcccaggcacatttgaagagtacaaagaagatctccaaagagaaatcaaagcagaagttgatgagtgaagttttgttgttagcttctaaggtaaactcaaactcctttatgttttataacaaactcaaaaagttttggacaattttatttttagcaatcgtgttctttcatcatttgtgcgttaattacatcatatatgacactatatacatcagtttctc

SEQ ID NO: 41452 - protein, 723 aa, Arabidopsis thaliana
  peptide (1)..(723): Ceres Seq. ID no. 13489033
  misc_feature (188)..(392): Pfam Name: ABC transporter Pfam Description: ABC transporter
  misc_feature (24)..(713): Homolog of NCBI NO: 39930335 NR Description: ATP-binding cassette, sub-family F (GCN20),
  misc_feature (6)..(713): Homolog of NCBI NO: 10947135 NR Description: ATP-binding cassette, sub-family F, member 1
  misc_feature (20)..(713): Homolog of NCBI NO: 21759807 NR Description: Similar to ATP-binding cassette, sub-family F
  misc_feature (5)..(713): Homolog of NCBI NO: 10863747 NR Description: ABC50 [Rattus norvegicus]
  misc_feature (5)..(713): Homolog of NCBI NO: 34852051 NR Description: ATP-binding cassette, sub-family F (GCN20),
  misc_feature (450)..(721): Homolog of NCBI NO: 19387267 NR Description: putative ABC transporter protein
  misc_feature (108)..(439): Homolog of NCBI NO: 19387267 NR Description: putative ABC transporter protein
  misc_feature (450)..(721): Homolog of NCBI NO: 38346402 NR Description: OSJNBa0011F23.8 [Oryza sativa (japonica
  misc_feature (71)..(439): Homolog of NCBI NO: 38346402 NR Description: OSJNBa0011F23.8 [Oryza sativa (japonica
  misc_feature (18)..(723): Homolog of NCBI NO: 34896390 NR Description: putative ABC transporter [Oryza sativa (japonica
MGKKKSDESAATTKVKPSGKDASKDSKKEKLSVSAMLAGMDQKDDKPKKGSSSRTKAAPKSTSYTDGIDLPPSDEEDDGESDEEERQKEARRKLKSEQRHLEISVTDKEQKKREAKERLALQAAESAKREAMKDDHDAFTVVIGSKTSVLEGDDMADANVKDITIESFSVSARGKELLKNASVRISHGKRYGLIGPNGMGKSTLLKLLAWRKIPVPKNIDVLLVEQEVVGDEKSALNAVVSANEELVKLREEAEALQKSSSGADGENVDGEDDDDTGEKLAELYDRLQILGSDAAEAQASKILAGLGFTKDMQVRATQSFSGGWRMRISLARALFVQPTLLLLDEPTNHLDLRAVLWLEEYLCRWKKTLVVVSHDRDFLNTVCTEIIHLHDQNLHFYRGNFDGFESGYEQRRKEMNKKFDVYDKQMKAAKRTGNRGQQEKVKDRAKFTAAKEASKSKSKGKTVDEEGPAPEAPRKWRDYSVVFHFPEPTELTPPLLQLIEVSFSYPNRPDFRLSNVDVGIDMGTRVAIVGPNGAGKSTLLNLLAGDLVPTEGEMRRSQKLRIGRYSQHFVDLLTMGETPVQYLLRLHPDQEGFSKQEAVRAKLGKFGLPSHNHLSPIAKLSGGQKARVVFTSISMSKPHILLLDEPTNHLDMQSIDALADALDEFTGGVVLVSHDSRLISRVCAEEEKSQIWVVEDGTVNFFPGTFEEYKEDLQREIKAEVDE

SEQ ID NO: 41453 - protein, 688 aa, Arabidopsis thaliana
  peptide (1)..(688): Ceres Seq. ID no. 13489034
  misc_feature (153)..(357): Pfam Name: ABC transporter Pfam Description: ABC transporter
  misc_feature (1)..(678): Homolog of NCBI NO: 39930335 NR Description: ATP-binding cassette, sub-family F (GCN20),
  misc_feature (1)..(678): Homolog of NCBI NO: 10947135 NR Description: ATP-binding cassette, sub-family F, member 1
  misc_feature (1)..(678): Homolog of NCBI NO: 21759807 NR Description: Similar to ATP-binding cassette, sub-family F
  misc_feature (1)..(678): Homolog of NCBI NO: 10863747 NR Description: ABC50 [Rattus norvegicus]
  misc_feature (1)..(678): Homolog of NCBI NO: 34852051 NR Description: ATP-binding cassette, sub-family F (GCN20),
  misc_feature (415)..(686): Homolog of NCBI NO: 19387267 NR Description: putative ABC transporter protein
  misc_feature (73)..(404): Homolog of NCBI NO: 19387267 NR Description: putative ABC transporter protein
  misc_feature (415)..(686): Homolog of NCBI NO: 38346402 NR Description: OSJNBa0011F23.8 [Oryza sativa (japonica
  misc_feature (36)..(404): Homolog of NCBI NO: 38346402 NR Description: OSJNBa0011F23.8 [Oryza sativa (japonica
  misc_feature (1)..(688): Homolog of NCBI NO: 34896390 NR Description: putative ABC transporter [Oryza sativa (japonica
MLAGMDQKDDKPKKGSSSRTKAAPKSTSYTDGIDLPPSDEEDDGESDEEERQKEARRKLKSEQRHLEISVTDKEQKKREAKERLALQAAESAKREAMKDDHDAFTVVIGSKTSVLEGDDMADANVKDITIESFSVSARGKELLKNASVRISHGKRYGLIGPNGMGKSTLLKLLAWRKIPVPKNIDVLLVEQEVVGDEKSALNAVVSANEELVKLREEAEALQKSSSGADGENVDGEDDDDTGEKLAELYDRLQILGSDAAEAQASKILAGLGFTKDMQVRATQSFSGGWRMRISLARALFVQPTLLLLDEPTNHLDLRAVLWLEEYLCRWKKTLVVVSHDRDFLNTVCTEIIHLHDQNLHFYRGNFDGFESGYEQRRKEMNKKFDVYDKQMKAAKRTGNRGQQEKVKDRAKFTAAKEASKSKSKGKTVDEEGPAPEAPRKWRDYSVVFHFPEPTELTPPLLQLIEVSFSYPNRPDFRLSNVDVGIDMGTRVAIVGPNGAGKSTLLNLLAGDLVPTEGEMRRSQKLRIGRYSQHFVDLLTMGETPVQYLLRLHPDQEGFSKQEAVRAKLGKFGLPSHNHLSPIAKLSGGQKARVVFTSISMSKPHILLLDEPTNHLDMQSIDALADALDEFTGGVVLVSHDSRLISRVCAEEEKSQIWVVEDGTVNFFPGTFEEYKEDLQREIKAEVDE

SEQ ID NO: 41454 - protein, 684 aa, Arabidopsis thaliana
  peptide (1)..(684): Ceres Seq. ID no. 13489035
  misc_feature (149)..(353): Pfam Name: ABC transporter Pfam Description: ABC transporter
  misc_feature (1)..(674): Homolog of NCBI NO: 39930335 NR Description: ATP-binding cassette, sub-family F (GCN20),
  misc_feature (1)..(674): Homolog of NCBI NO: 10947135 NR Description: ATP-binding cassette, sub-family F, member 1
  misc_feature (1)..(674): Homolog of NCBI NO: 21759807 NR Description: Similar to ATP-binding cassette, sub-family F
  misc_feature (1)..(674): Homolog of NCBI NO: 10863747 NR Description: ABC50 [Rattus norvegicus]
  misc_feature (1)..(674): Homolog of NCBI NO: 34852051 NR Description: ATP-binding cassette, sub-family F (GCN20),
  misc_feature (411)..(682): Homolog of NCBI NO: 19387267 NR Description: putative ABC transporter protein
  misc_feature (69)..(400): Homolog of NCBI NO: 19387267 NR Description: putative ABC transporter protein
  misc_feature (411)..(682): Homolog of NCBI NO: 38346402 NR Description: OSJNBa0011F23.8 [Oryza sativa (japonica
  misc_feature (32)..(400): Homolog of NCBI NO: 38346402 NR Description: OSJNBa0011F23.8 [Oryza sativa (japonica
  misc_feature (1)..(684): Homolog of NCBI NO: 34896390 NR Description: putative ABC transporter [Oryza sativa (japonica
MDQKDDKPKKGSSSRTKAAPKSTSYTDGIDLPPSDEEDDGESDEEERQKEARRKLKSEQRHLEISVTDKEQKKREAKERLALQAAESAKREAMKDDHDAFTVVIGSKTSVLEGDDMADANVKDITIESFSVSARGKELLKNASVRISHGKRYGLIGPNGMGKSTLLKLLAWRKIPVPKNIDVLLVEQEVVGDEKSALNAVVSANEELVKLREEAEALQKSSSGADGENVDGEDDDDTGEKLAELYDRLQILGSDAAEAQASKILAGLGFTKDMQVRATQSFSGGWRMRISLARALFVQPTLLLLDEPTNHLDLRAVLWLEEYLCRWKKTLVVVSHDRDFLNTVCTEIIHLHDQNLHFYRGNFDGFESGYEQRRKEMNKKFDVYDKQMKAAKRTGNRGQQEKVKDRAKFTAAKEASKSKSKGKTVDEEGPAPEAPRKWRDYSVVFHFPEPTELTPPLLQLIEVSFSYPNRPDFRLSNVDVGIDMGTRVAIVGPNGAGKSTLLNLLAGDLVPTEGEMRRSQKLRIGRYSQHFVDLLTMGETPVQYLLRLHPDQEGFSKQEAVRAKLGKFGLPSHNHLSPIAKLSGGQKARVVFTSISMSKPHILLLDEPTNHLDMQSIDALADALDEFTGGVVLVSHDSRLISRVCAEEEKSQIWVVEDGTVNFFPGTFEEYKEDLQREIKAEVDE

SEQ ID NO: 41455 - DNA, 918 bp, Arabidopsis thaliana
  misc_feature (1)..(918): Ceres Seq. ID no. 12326248
  misc_feature: MA Experiment ID: 20000185 Result: Down-regulated in Transcription
  misc_feature: MA Experiment 20000185 PARAMETER Experiment Name: At_Roots__P Parameter: Age (day) Value: 7 vs. 21
  misc_feature: MA Experiment 20000185 PARAMETER Experiment Name: At_Roots__P Parameter: Organism Value: A. thaliana
  misc_feature: MA Experiment 20000185 PARAMETER Experiment Name: At_Roots__P Parameter: Tissue Value: Roots vs. Whole Plant
  misc_feature: MA Experiment ID: 20000235 Result: Down-regulated in Transcription
  misc_feature: MA Experiment 20000235 PARAMETER Experiment Name: At_Siliques_P Parameter: Age (day) Value: 21
  misc_feature: MA Experiment 20000235 PARAMETER Experiment Name: At_Siliques_P Parameter: Organism Value: A. thaliana
  misc_feature: MA Experiment 20000235 PARAMETER Experiment Name: At_Siliques_P Parameter: Plant Line Value: WS
  misc_feature: MA Experiment 20000235 PARAMETER Experiment Name: At_Siliques_P Parameter: Tissue Value: 5-10mm Siliques vs. Whole Plant
  misc_feature: MA Experiment ID: 20000264 Result: Down-regulated in Transcription
  misc_feature: MA Experiment 20000264 PARAMETER Experiment Name: At_Open_Flower_P Parameter: Age (day) Value: 21
  misc_feature: MA Experiment 20000264 PARAMETER Experiment Name: At_Open_Flower_P Parameter: Plant Line Value: WS
  misc_feature: MA Experiment 20000264 PARAMETER Experiment Name: At_Open_Flower_P Parameter: Tissue Value: Open Flower vs. Whole Plant
  misc_feature: MA Experiment ID: 20000439 Result: Down-regulated in Transcription
  misc_feature: MA Experiment 20000439 PARAMETER Experiment Name: At_Roots__P Parameter: Age (day) Value: 14 vs. 21
  misc_feature: MA Experiment 20000439 PARAMETER Experiment Name: At_Roots__P Parameter: Organism Value: A. thaliana
  misc_feature: MA Experiment 20000439 PARAMETER Experiment Name: At_Roots__P Parameter: Tissue Value: Roots vs. Whole Plant
  misc_feature: MA Experiment ID: 20000794 Result: Down-regulated in Transcription
  misc_feature: MA Experiment 20000794 PARAMETER Experiment Name: At_Petals_P Parameter: Age (day) Value: 23-25 days
  misc_feature: MA Experiment 20000794 PARAMETER Experiment Name: At_Petals_P Parameter: Plant Line Value: WS
  misc_feature: MA Experiment 20000794 PARAMETER Experiment Name: At_Petals_P Parameter: Tissue Value: Petals vs. Whole plant
aaaagaaagaaaaaaatgccttcttttgcttttggatctcatcaccatttggcgaatcctacagactcgccgccgtactccgtcgaaattagcatcgacggtgactcctccgacttggattctttgtctcaggtcgatttagagtccggcggtgtaccggcgccggagaaacagctacattccggtggtaagaagaggagaactaggaggagaaagaggaggaagaagaagaagaagaagaaaggtggaagagattgcaggatctgtcatcttcctttagagactaacaaagaagctgaagatgaagatgaagaagaagaagatgattctgatgatgatgaagatgaagaagatgaagaagaagaagaagaagaagaagaatattatggtttgcctttgcaattaggttgctcttgtaaaggtgatttgggtgttgctcatagtaagtgtgctgagacttggtttaagatcaaaggaaacatgacatgtgagatatgcggcgcaatggctctaaacgtggctggtgaacaatctaatccggagagcactgcttctacacattcacaagcagctgcgggacaatctctaactcagacagagccacgaggaatctggcatggtcgccctgttatgaacttcttacttgctgctatggtcttcgccttcgttgtttcttggctttttcacttcaaagtcctcaagtgaaacgttttccatctctctctctctctctctttcgcccacccgcacgagctcactcttctcctgttcttgagccgcttgcaatcgctgaatcaatccctcctgttgcttgattattcacacgttttgtagctgtaaaaacttggtagtgtttagattgttgtaacttgtgagatttacattttgtataatattgttctctgctccggcttcgtg

SEQ ID NO: 41456 - protein, 234 aa, Arabidopsis thaliana
  peptide (1)..(234): Ceres Seq. ID no. 12326249
  misc_feature (86)..(166): Pfam Name: Zinc finger, C3HC4 type (RING finger) Pfam Description: Zinc finger, C3HC4 type (RING finger)
  misc_feature (94)..(127): Homolog of NCBI NO: 15242846 NR Description: putative protein; protein id: At5g03710.1
  misc_feature (94)..(127): Homolog of NCBI NO: 15242846 NR Description: putative protein; protein id: At5g03710.1
  misc_feature (94)..(127): Homolog of NCBI NO: 15242846 NR Description: putative protein; protein id: At5g03710.1
  misc_feature (104)..(232): Homolog of NCBI NO: 15224415 NR Description: unknown protein; protein id: At2g37950.1
  misc_feature (130)..(232): Homolog of NCBI NO: 34908318 NR Description: P0529H11.12 [Oryza sativa (japonica
  misc_feature (130)..(232): Homolog of NCBI NO: 15239254 NR Description: putative protein; protein id: At5g05830.1
  misc_feature (6)..(96): Homolog of NCBI NO: 9759231 NR Description: gb|AAD32776.1~gene_id:K19M22.19~similar to
  misc_feature (130)..(234): Homolog of NCBI NO: 9759231 NR Description: gb|AAD32776.1~gene_id:K19M22.19~similar to
  misc_feature (6)..(234): Homolog of NCBI NO: 15237796 NR Description: putative protein
  misc_feature (6)..(234): Homolog of NCBI NO: 21537129 NR Description: unknown [Arabidopsis thaliana]
KRKKKMPSFAFGSHHHLANPTDSPPYSVEISIDGDSSDLDSLSQVDLESGGVPAPEKQLHSGGKKRRTRRRKRRKKKKKKKGGRDCRICHLPLETNKEAEDEDEEEEDDSDDDEDEEDEEEEEEEEEYYGLPLQLGCSCKGDLGVAHSKCAETWFKIKGNMTCEICGAMALNVAGEQSNPESTASTHSQAAAGQSLTQTEPRGIWHGRPVMNFLLAAMVFAFVVSWLFHFKVLK

SEQ ID NO: 41457 - protein, 229 aa, Arabidopsis thaliana
  peptide (1)..(229): Ceres Seq. ID no. 12326250
  misc_feature (81)..(161): Pfam Name: Zinc finger, C3HC4 type (RING finger) Pfam Description: Zinc finger, C3HC4 type (RING finger)
  misc_feature (89)..(122): Homolog of NCBI NO: 15242846 NR Description: putative protein; protein id: At5g03710.1
  misc_feature (89)..(122): Homolog of NCBI NO: 15242846 NR Description: putative protein; protein id: At5g03710.1
  misc_feature (89)..(122): Homolog of NCBI NO: 15242846 NR Description: putative protein; protein id: At5g03710.1
  misc_feature (99)..(227): Homolog of NCBI NO: 15224415 NR Description: unknown protein; protein id: At2g37950.1
  misc_feature (125)..(227): Homolog of NCBI NO: 34908318 NR Description: P0529H11.12 [Oryza sativa (japonica
  misc_feature (125)..(227): Homolog of NCBI NO: 15239254 NR Description: putative protein; protein id: At5g05830.1
  misc_feature (1)..(91): Homolog of NCBI NO: 9759231 NR Description: gb|AAD32776.1~gene_id:K19M22.19~similar to
  misc_feature (125)..(229): Homolog of NCBI NO: 9759231 NR Description: gb|AAD32776.1~gene_id:K19M22.19~similar to
  misc_feature (1)..(229): Homolog of NCBI NO: 15237796 NR Description: putative protein
  misc_feature (1)..(229): Homolog of NCBI NO: 21537129 NR Description: unknown [Arabidopsis thaliana]
MPSFAFGSHHHLANPTDSPPYSVEISIDGDSSDLDSLSQVDLESGGVPAPEKQLHSGGKKRRTRRRKRRKKKKKKKGGRDCRICHLPLETNKEAEDEDEEEEDDSDDDEDEEDEEEEEEEEEYYGLPLQLGCSCKGDLGVAHSKCAETWFKIKGNMTCEICGAMALNVAGEQSNPESTASTHSQAAAGQSLTQTEPRGIWHGRPVMNFLLAAMVFAFVVSWLFHFKVLK

SEQ ID NO: 41458 - DNA, 1426 bp, Arabidopsis thaliana
  misc_feature (1)..(1426): Ceres Seq. ID no. 12329714
  misc_feature: MA Experiment ID: 20000179 Result: Up-regulated in Transcription
  misc_feature: MA Experiment 20000179 PARAMETER Experiment Name: At_Germinating_Seeds_P Parameter: Age (hr) Value: 6 vs. 0
  misc_feature: MA Experiment 20000179 PARAMETER Experiment Name: At_Germinating_Seeds_P Parameter: Tissue Value: Germinating Seeds
  misc_feature: MA Experiment ID: 20000180 Result: Up-regulated in Transcription
  misc_feature: MA Experiment 20000180 PARAMETER Experiment Name: At_Germinating_Seeds_P Parameter: Age (hr) Value: 24 vs. 0
  misc_feature: MA Experiment 20000180 PARAMETER Experiment Name: At_Germinating_Seeds_P Parameter: Tissue Value: Germinating Seeds
  misc_feature: MA Experiment ID: 20000185 Result: Down-regulated in Transcription
  misc_feature: MA Experiment 20000185 PARAMETER Experiment Name: At_Roots__P Parameter: Age (day) Value: 7 vs. 21
  misc_feature: MA Experiment 20000185 PARAMETER Experiment Name: At_Roots__P Parameter: Organism Value: A. thaliana
  misc_feature: MA Experiment 20000185 PARAMETER Experiment Name: At_Roots__P Parameter: Tissue Value: Roots vs. Whole Plant
  misc_feature: MA Experiment ID: 20000214 Result: Up-regulated in Transcription
  misc_feature: MA Experiment 20000214 PARAMETER Experiment Name: At_4deg_Cold_P Parameter: Timepoint (hr) Value: 6
  misc_feature: MA Experiment ID: 20000264 Result: Down-regulated in Transcription
  misc_feature: MA Experiment 20000264 PARAMETER Experiment Name: At_Open_Flower_P Parameter: Age (day) Value: 21
  misc_feature: MA Experiment 20000264 PARAMETER Experiment Name: At_Open_Flower_P Parameter: Plant Line Value: WS
  misc_feature: MA Experiment 20000264 PARAMETER Experiment Name: At_Open_Flower_P Parameter: Tissue Value: Open Flower vs. Whole Plant
  misc_feature: MA Experiment ID: 20000269 Result: Down-regulated in Transcription
  misc_feature: MA Experiment 20000269 PARAMETER Experiment Name: At_1mM_KNO3_L-vs-H_Roots_P Parameter: Age (day) Value: 7,10,12
  misc_feature: MA Experiment 20000269 PARAMETER Experiment Name: At_1mM_KNO3_L-vs-H_Roots_P Parameter: Organism Value: A. thaliana
  misc_feature: MA Experiment 20000269 PARAMETER Experiment Name: At_1mM_KNO3_L-vs-H_Roots_P Parameter: Plant Line Value: WS
  misc_feature: MA Experiment 20000269 PARAMETER Experiment Name: At_1mM_KNO3_L-vs-H_Roots_P Parameter: Timepoint (day) Value: 7,10,12
  misc_feature: MA Experiment 20000269 PARAMETER Experiment Name: At_1mM_KNO3_L-vs-H_Roots_P Parameter: Tissue Value: Roots
  misc_feature: MA Experiment 20000269 PARAMETER Experiment Name: At_1mM_KNO3_L-vs-H_Roots_P Parameter: Treatment Value: 1mM KNO3 vs. 50mM KNO3
  misc_feature: MA Experiment ID: 20000286 Result: Down-regulated in Transcription
  misc_feature: MA Experiment 20000286 PARAMETER Experiment Name: At_Open_Flower_P Parameter: Age (day) Value: 21
  misc_feature: MA Experiment 20000286 PARAMETER Experiment Name: At_Open_Flower_P Parameter: Plant Line Value: WS
  misc_feature: MA Experiment 20000286 PARAMETER Experiment Name: At_Open_Flower_P Parameter: Tissue Value: Half Open vs. Whole Plant
  misc_feature: MA Experiment ID: 20000437 Result: Down-regulated in Transcription
  misc_feature: MA Experiment 20000437 PARAMETER Experiment Name: At_Drought_P Parameter: Age (day) Value: 8
  misc_feature: MA Experiment 20000437 PARAMETER Experiment Name: At_Drought_P Parameter: Organism Value: A. thaliana
  misc_feature: MA Experiment 20000437 PARAMETER Experiment Name: At_Drought_P Parameter: Plant Line Value: WS
  misc_feature: MA Experiment 20000437 PARAMETER Experiment Name: At_Drought_P Parameter: Timepoint (hr) Value: 24
  misc_feature: MA Experiment 20000437 PARAMETER Experiment Name: At_Drought_P Parameter: Tissue Value: Whole Plant
  misc_feature: MA Experiment 20000437 PARAMETER Experiment Name: At_Drought_P Parameter: Treatment Value: Drought vs. No Drought
  misc_feature: MA Experiment ID: 20000439 Result: Down-regulated in Transcription
  misc_feature: MA Experiment 20000439 PARAMETER Experiment Name: At_Roots__P Parameter: Age (day) Value: 14 vs. 21
  misc_feature: MA Experiment 20000439 PARAMETER Experiment Name: At_Roots__P Parameter: Organism Value: A. thaliana
  misc_feature: MA Experiment 20000439 PARAMETER Experiment Name: At_Roots__P Parameter: Tissue Value: Roots vs. Whole Plant
  misc_feature: MA Experiment ID: 20000794 Result: Down-regulated in Transcription
  misc_feature: MA Experiment 20000794 PARAMETER Experiment Name: At_Petals_P Parameter: Age (day) Value: 23-25 days
  misc_feature: MA Experiment 20000794 PARAMETER Experiment Name: At_Petals_P Parameter: Plant Line Value: WS
  misc_feature: MA Experiment 20000794 PARAMETER Experiment Name: At_Petals_P Parameter: Tissue Value: Petals vs. Whole plant
  misc_feature: MA Experiment ID: 20001450 Result: Down-regulated in Transcription
  misc_feature: MA Experiment 20001450 PARAMETER Experiment Name: At_Far-red-induction_P Parameter: Age (day) Value: 7
  misc_feature: MA Experiment 20001450 PARAMETER Experiment Name: At_Far-red-induction_P Parameter: Light Value: Far-red vs. White
  misc_feature: MA Experiment 20001450 PARAMETER Experiment Name: At_Far-red-induction_P Parameter: Organism Value: A. thaliana
  misc_feature: MA Experiment 20001450 PARAMETER Experiment Name: At_Far-red-induction_P Parameter: Plant Line Value: Columbia
  misc_feature: MA Experiment 20001450 PARAMETER Experiment Name: At_Far-red-induction_P Parameter: Timepoint (hr) Value: 8
  misc_feature: MA Experiment 20001450 PARAMETER Experiment Name: At_Far-red-induction_P Parameter: Tissue Value: Whole Plant
  misc_feature: MA Experiment ID: 20001557 Result: Down-regulated in Transcription
  misc_feature: MA Experiment 20001557 PARAMETER Experiment Name: At_Drought_Soil_Dry_P Parameter: Age (day) Value: 27
  misc_feature: MA Experiment 20001557 PARAMETER Experiment Name: At_Drought_Soil_Dry_P Parameter: Organism Value: A. thaliana
  misc_feature: MA Experiment 20001557 PARAMETER Experiment Name: At_Drought_Soil_Dry_P Parameter: Plant Line Value: WS
  misc_feature: MA Experiment 20001557 PARAMETER Experiment Name: At_Drought_Soil_Dry_P Parameter: Post Timepoint (hr) Value: 3
  misc_feature: MA Experiment 20001557 PARAMETER Experiment Name: At_Drought_Soil_Dry_P Parameter: Post-Treatment Value: Re-Water vs. No Drought
  misc_feature: MA Experiment 20001557 PARAMETER Experiment Name: At_Drought_Soil_Dry_P Parameter: Timepoint (day) Value: 13
  misc_feature: MA Experiment 20001557 PARAMETER Experiment Name: At_Drought_Soil_Dry_P Parameter: Treatment Value: Drought vs. No Drought
aacacaatccacacacatccaatcacaacctcatcatatatctcccgctaatctttttttctttgatcttttttttttttttgcttattatttttttgactttgatctcccatcagttcatcttcttcttcttcttctgatcaaccatggctgctgctataagtgctgcagtctctttaccttcctccaagtcatcctctctcctcaccaaaatctcctctgtatcccctcaaaggattttcctcaagaagagcacagtgtgttacagaagagttgtgtcagtgaaggctcaggtgacaacagatactaccgaggcaccaccagttaaagtagtcaaggagtctaagaaacaggaagaagggattgttgtcaacaaattcaaacctaagaacccttacactggtcgctgccttttgaacaccaagatcaccggtgatgacgctcccggtgagacttggcacattgtcttcaccaccgaaggtgaggttccgtatagagaaggacaatcgataggagtgattccagagggaatagacaagaacgggaagccgcacaagctcaggctttactctatcgcgagtagtgccattggtgactttggagactccaagaccgtttctctctgtgtcaagagactagtttacacaaatgatggcggagagattgttaagggggtctgctccaacttcttgtgtgacttgaagccgggtgatgaagctaagatcactggacctgttggcaaggaaatgcttatgccaaaagaccccaatgccaccatcatcatgcttggaacaggaactggaatagctccattcagatcatttttgtggaaaatgttctttgaggagcacgaggactacaagttcaatggtttggcgtggcttttcttgggtgtacccacaagcagctcactgctatacaaggaggagtttgagaagatgaaggagaagaacccagacaacttcaggctggactttgcggtgagcagagagcagacgaacgagaagggagagaaaatgtacattcagacaagaatggcagagtatgcagaagagctgtgggagttgctgaagaaagacaacacctttgtttacatgtgtggtcttaagggtatggagaagggtatcgatgacattatggtctcgcttgctgctaaagatgggatcgattggttggagtacaagaagcaattgaagaggagtgaacagtggaatgttgaagtctactaaggaagcttctgagggagtaattatataatgtagataaaaagcttctgatgcattgtgaaatcttcatatctgcttcttttttctttctcaaggattttcaatcaaaacattcaaaagagagcatcaataccaccaaactactctttctcacttgttgttcatgttatatttcttgcaacaatatagtgagttttgtg

SEQ ID NO: 41459 - protein, 360 aa, Arabidopsis thaliana
  peptide (1)..(360): Ceres Seq. ID no. 12329715
  misc_feature (208)..(330): Pfam Name: Oxidoreductase NAD-binding domain Pfam Description: Oxidoreductase NAD-binding domain
  misc_feature (208)..(330): Pfam Name: Oxidoreductase NAD-binding domain Pfam Description: Oxidoreductase NAD-binding domain
  misc_feature (54)..(360): Homolog of NCBI NO: 4930123 NR Description: Chain A, Wild-Type Pea Fnr
  misc_feature (1)..(360): Homolog of NCBI NO: 3913651 NR Description: Ferredoxin--NADP reductase, leaf-type isozyme,
  misc_feature (1)..(360): Homolog of NCBI NO: 119906 NR Description: Ferredoxin--NADP reductase, chloroplast precursor
  misc_feature (1)..(360): Homolog of NCBI NO: 170111 NR Description: ferredoxin-NADP oxidoreductase
  misc_feature (1)..(360): Homolog of NCBI NO: 729477 NR Description: Ferredoxin--NADP reductase, chloroplast precursor
  misc_feature (54)..(360): Homolog of NCBI NO: 4930123 NR Description: Chain A, Wild-Type Pea Fnr
  misc_feature (1)..(360): Homolog of NCBI NO: 119906 NR Description: Ferredoxin--NADP reductase, chloroplast precursor
  misc_feature (1)..(360): Homolog of NCBI NO: 729477 NR Description: Ferredoxin--NADP reductase, chloroplast precursor
  misc_feature (1)..(360): Homolog of NCBI NO: 15239282 NR Description: ferredoxin-NADP+ reductase
  misc_feature (1)..(360): Homolog of NCBI NO: 5730139 NR Description: ferredoxin-NADP+ reductase [Arabidopsis thaliana]
  misc_feature (1)..(360): Homolog of NCBI NO: 729479 NR Description: Ferredoxin--NADP reductase, chloroplast precursor
  misc_feature (1)..(360): Homolog of NCBI NO: 119905 NR Description: Ferredoxin--NADP reductase, leaf isozyme,
  misc_feature (1)..(360): Homolog of NCBI NO: 6899972 NR Description: chloroplast ferredoxin-NADP+ oxidoreductase
  misc_feature (1)..(360): Homolog of NCBI NO: 170111 NR Description: ferredoxin-NADP oxidoreductase
  misc_feature (1)..(360): Homolog of NCBI NO: 3913651 NR Description: Ferredoxin--NADP reductase, leaf-type isozyme,
  misc_feature (1)..(360): Homolog of NCBI NO: 6899972 NR Description: chloroplast ferredoxin-NADP+ oxidoreductase
  misc_feature (1)..(360): Homolog of NCBI NO: 119905 NR Description: Ferredoxin--NADP reductase, leaf isozyme,
  misc_feature (1)..(360): Homolog of NCBI NO: 729479 NR Description: Ferredoxin--NADP reductase, chloroplast precursor
  misc_feature (1)..(360): Homolog of NCBI NO: 5730139 NR Description: ferredoxin-NADP+ reductase [Arabidopsis thaliana]
  misc_feature (1)..(360): Homolog of NCBI NO: 15239282 NR Description: ferredoxin-NADP+ reductase
MAAAISAAVSLPSSKSSSLLTKISSVSPQRIFLKKSTVCYRRVVSVKAQVTTDTTEAPPVKVVKESKKQEEGIVVNKFKPKNPYTGRCLLNTKITGDDAPGETWHIVFTTEGEVPYREGQSIGVIPEGIDKNGKPHKLRLYSIASSAIGDFGDSKTVSLCVKRLVYTNDGGEIVKGVCSNFLCDLKPGDEAKITGPVGKEMLMPKDPNATIIMLGTGTGIAPFRSFLWKMFFEEHEDYKFNGLAWLFLGVPTSSSLLYKEEFEKMKEKNPDNFRLDFAVSREQTNEKGEKMYIQTRMAEYAEELWELLKKDNTFVYMCGLKGMEKGIDDIMVSLAAKDGIDWLEYKKQLKRSEQWNVEVY

SEQ ID NO: 41460 - DNA, 1160 bp, Arabidopsis thaliana
  misc_feature (1)..(1160): Ceres Seq. ID no. 13504771
  misc_feature: MA Experiment ID: 108434 Result: Up-regulated in Transcription
  misc_feature: MA Experiment 108434 PARAMETER Experiment Name: At_Root_Tips_cDNA_P Parameter: Tissue Value: Root Tips
  misc_feature: MA Experiment ID: 20000264 Result: Up-regulated in Transcription
  misc_feature: MA Experiment 20000264 PARAMETER Experiment Name: At_Open_Flower_P Parameter: Age (day) Value: 21
  misc_feature: MA Experiment 20000264 PARAMETER Experiment Name: At_Open_Flower_P Parameter: Plant Line Value: WS
  misc_feature: MA Experiment 20000264 PARAMETER Experiment Name: At_Open_Flower_P Parameter: Tissue Value: Open Flower vs. Whole Plant
gtagcgattctctctgcggcgcgtgtaaacggtgacggggctctaatggctaatcttcctcctccgctctccatgaaatctgtcgccctctcaggagcttcttctccttcttcttcctccaacaacgatcggaagctatcatcggcggagcagttaattctcgatctcagcaatcccgaactcagagaaaatgcacttcacgagttgtctaagaagagagagatctttcaagatttggctccgcttttatggcattctgttggtaccattcctgctcttctacaggagattatcgcagtttaccctgccctatctcctccaaccatgactcctgctcaatctaacagggtgtgcaatgcacttgctcttcttcagtgtgttgcttctcatactgatacgagaatgttgttcctaaaagcccatctgccattgtacctgtatgctttcttgaatacatcaagcaagtcaagaccgtttgagtacctgcggctgactagcttgggggttattggtgcacttgttaaggttgatgatactgaagtgatcagattccttcttcaaactgagattgtcccattgtgcctccggacaatggagaatggcagcgagttatcaaagactgttgctactttcattgttcagaaagttttgctggacgatgttgggcttgagtacatgtgcacgacagcggagagattctttgctctgggtcgggttttgggaaatatggttacttcacttgcagaaggaccgtccgctaggctactaaagcacatcatacgctgctatcttcgcttgacagataaccccagagcatgcgatgcacttggaagttgccttccagatcttctgagggatgctactttcagtggttgtctctatgatgacccacctgcaatgcaatggctgcagcaactgctccacaacgttaacgttggcgggagagcacctcaagggttggctcatatgtttgtgaattaaatcgaacccttatagtctgggcagaaactgttattcattggacaaaaaaagttagttggaaacagaattacagatgagaaacagaaacccaaccaaagattttgagtttgatggatatatgtatttggatttcttgaccgtcttatgatgttgcaatcaatataactaaaattccattg

SEQ ID NO: 41461 - protein, 326 aa, Arabidopsis thaliana
  peptide (1)..(326): Ceres Seq. ID no. 13504772
  misc_feature (51)..(313): Pfam Name: Cell differentiation family, Rcd1-like Pfam Description: Cell differentiation family, Rcd1-like
  misc_feature (25)..(320): Homolog of NCBI NO: 38174128 NR Description: Unknown (protein for MGC:76003) [Silurana
  misc_feature (25)..(320): Homolog of NCBI NO: 10946722 NR Description: rcd1 (required for cell differentiation) homolog 1
  misc_feature (25)..(320): Homolog of NCBI NO: 4885579 NR Description: RCD1 required for cell differentiation1 homolog
  misc_feature (17)..(323): Homolog of NCBI NO: 34899762 NR Description: putative cell differentiation protein
  misc_feature (20)..(323): Homolog of NCBI NO: 34897134 NR Description: putative cell differentiation protein [Oryza
  misc_feature (104)..(326): Homolog of NCBI NO: 38564258 NR Description: At5g12980 [Arabidopsis thaliana]
  misc_feature (31)..(323): Homolog of NCBI NO: 9294407 NR Description: RCD1 [Arabidopsis thaliana]
  misc_feature (16)..(323): Homolog of NCBI NO: 21537250 NR Description: putative cell differentiation protein
  misc_feature (16)..(323): Homolog of NCBI NO: 15232369 NR Description: cell differentiation protein -related
  misc_feature (16)..(326): Homolog of NCBI NO: 15239962 NR Description: expressed protein [Arabidopsis thaliana]
VAILSAARVNGDGALMANLPPPLSMKSVALSGASSPSSSSNNDRKLSSAEQLILDLSNPELRENALHELSKKREIFQDLAPLLWHSVGTIPALLQEIIAVYPALSPPTMTPAQSNRVCNALALLQCVASHTDTRMLFLKAHLPLYLYAFLNTSSKSRPFEYLRLTSLGVIGALVKVDDTEVIRFLLQTEIVPLCLRTMENGSELSKTVATFIVQKVLLDDVGLEYMCTTAERFFALGRVLGNMVTSLAEGPSARLLKHIIRCYLRLTDNPRACDALGSCLPDLLRDATFSGCLYDDPPAMQWLQQLLHNVNVGGRAPQGLAHMFVN

SEQ ID NO: 41462 - protein, 311 aa, Arabidopsis thaliana
  peptide (1)..(311): Ceres Seq. ID no. 13504773
  misc_feature (36)..(298): Pfam Name: Cell differentiation family, Rcd1-like Pfam Description: Cell differentiation family, Rcd1-like
  misc_feature (10)..(305): Homolog of NCBI NO: 38174128 NR Description: Unknown (protein for MGC:76003) [Silurana
  misc_feature (10)..(305): Homolog of NCBI NO: 10946722 NR Description: rcd1 (required for cell differentiation) homolog 1
  misc_feature (10)..(305): Homolog of NCBI NO: 4885579 NR Description: RCD1 required for cell differentiation1 homolog
  misc_feature (2)..(308): Homolog of NCBI NO: 34899762 NR Description: putative cell differentiation protein
  misc_feature (5)..(308): Homolog of NCBI NO: 34897134 NR Description: putative cell differentiation protein [Oryza
  misc_feature (89)..(311): Homolog of NCBI NO: 38564258 NR Description: At5g12980 [Arabidopsis thaliana]
  misc_feature (16)..(308): Homolog of NCBI NO: 9294407 NR Description: RCD1 [Arabidopsis thaliana]
  misc_feature (1)..(308): Homolog of NCBI NO: 21537250 NR Description: putative cell differentiation protein
  misc_feature (1)..(308): Homolog of NCBI NO: 15232369 NR Description: cell differentiation protein -related
  misc_feature (1)..(311): Homolog of NCBI NO: 15239962 NR Description: expressed protein [Arabidopsis thaliana]
MANLPPPLSMKSVALSGASSPSSSSNNDRKLSSAEQLILDLSNPELRENALHELSKKREIFQDLAPLLWHSVGTIPALLQEIIAVYPALSPPTMTPAQSNRVCNALALLQCVASHTDTRMLFLKAHLPLYLYAFLNTSSKSRPFEYLRLTSLGVIGALVKVDDTEVIRFLLQTEIVPLCLRTMENGSELSKTVATFIVQKVLLDDVGLEYMCTTAERFFALGRVLGNMVTSLAEGPSARLLKHIIRCYLRLTDNPRACDALGSCLPDLLRDATFSGCLYDDPPAMQWLQQLLHNVNVGGRAPQGLAHMFVN

SEQ ID NO: 41463 - protein, 302 aa, Arabidopsis thaliana
  peptide (1)..(302): Ceres Seq. ID no. 13504774
  misc_feature (27)..(289): Pfam Name: Cell differentiation family, Rcd1-like Pfam Description: Cell differentiation family, Rcd1-like
  misc_feature (1)..(296): Homolog of NCBI NO: 38174128 NR Description: Unknown (protein for MGC:76003) [Silurana
  misc_feature (1)..(296): Homolog of NCBI NO: 10946722 NR Description: rcd1 (required for cell differentiation) homolog 1
  misc_feature (1)..(296): Homolog of NCBI NO: 4885579 NR Description: RCD1 required for cell differentiation1 homolog
  misc_feature (1)..(299): Homolog of NCBI NO: 34899762 NR Description: putative cell differentiation protein
  misc_feature (1)..(299): Homolog of NCBI NO: 34897134 NR Description: putative cell differentiation protein [Oryza
  misc_feature (80)..(302): Homolog of NCBI NO: 38564258 NR Description: At5g12980 [Arabidopsis thaliana]
  misc_feature (7)..(299): Homolog of NCBI NO: 9294407 NR Description: RCD1 [Arabidopsis thaliana]
  misc_feature (1)..(299): Homolog of NCBI NO: 21537250 NR Description: putative cell differentiation protein
  misc_feature (1)..(299): Homolog of NCBI NO: 15232369 NR Description: cell differentiation protein -related
  misc_feature (1)..(302): Homolog of NCBI NO: 15239962 NR Description: expressed protein [Arabidopsis thaliana]
MKSVALSGASSPSSSSNNDRKLSSAEQLILDLSNPELRENALHELSKKREIFQDLAPLLWHSVGTIPALLQEIIAVYPALSPPTMTPAQSNRVCNALALLQCVASHTDTRMLFLKAHLPLYLYAFLNTSSKSRPFEYLRLTSLGVIGALVKVDDTEVIRFLLQTEIVPLCLRTMENGSELSKTVATFIVQKVLLDDVGLEYMCTTAERFFALGRVLGNMVTSLAEGPSARLLKHIIRCYLRLTDNPRACDALGSCLPDLLRDATFSGCLYDDPPAMQWLQQLLHNVNVGGRAPQGLAHMFVN

SEQ ID NO: 41464 - DNA, 1161 bp, Arabidopsis thaliana
  misc_feature (1)..(1161): Ceres Seq. ID no. 13575109
  misc_feature: MA Experiment ID: 20000180 Result: Up-regulated in Transcription
  misc_feature: MA Experiment 20000180 PARAMETER Experiment Name: At_Germinating_Seeds_P Parameter: Age (hr) Value: 24 vs. 0
  misc_feature: MA Experiment 20000180 PARAMETER Experiment Name: At_Germinating_Seeds_P Parameter: Tissue Value: Germinating Seeds
  misc_feature: MA Experiment ID: 20000184 Result: Down-regulated in Transcription
  misc_feature: MA Experiment 20000184 PARAMETER Experiment Name: At_Shoots__P Parameter: Age (day) Value: 7
  misc_feature: MA Experiment 20000184 PARAMETER Experiment Name: At_Shoots__P Parameter: Tissue Value: Shoots vs. Whole Plant
  misc_feature: MA Experiment ID: 20000495 Result: Up-regulated in Transcription
  misc_feature: MA Experiment 20000495 PARAMETER Experiment Name: At_Guard_Cells_P Parameter: Harvest Date Value: 8/2/2002
  misc_feature: MA Experiment 20000495 PARAMETER Experiment Name: At_Guard_Cells_P Parameter: Organism Value: A. thaliana
  misc_feature: MA Experiment 20000495 PARAMETER Experiment Name: At_Guard_Cells_P Parameter: Tissue Value: Guard Cells vs. Leaves
aaactcctctgacgttttttctccacccaaatctctctcaactctcaagctcctctctttttcttccttctgcaacaacaacaactgttactgatctctctctctctctcccaagtttttattttattttgatcggagatcgagatcagctagacatggctcctgccatgaagatcgtcttcggtctcttgacatttgtcactgtcggaatggtcatcggttccttgttacaattggcctttattaatagattggaagattcgtacggaactggatttccgtctctaagaggacttcgaggacagaacacccgctatctacgagatgtctcccggtgggcaaatgacaaagatgcagaattgttacggattggcaatgtcaagcctgaagtagtcagttggtcccctcgaattattgtgcttcatgactttctcagtccggaggaatgtgaatacctaaaagcaatcgcccggcctcgccttcaagtttccactgttgttgatgtaaaaaccggaaagggagttaaaagtgacgtgaggacaagctccggaatgtttctaactcatgtagaaagaagttatccaataatacaggcaattgaaaagcgaattgcagtcttttctcaagtaccagcggaaaatggagaacttattcaagttctaagatatgagccgcagcagttttacaaaccacatcacgattactttgctgacactttcaatctaaagcgtggtggtcagcgcgtagcaactatgcttatgtatctaactgatgacgtcgaaggaggagaaacttatttccctttggctggtgatggtgattgcacctgtggtggcaaaatcatgaaaggcatctctgttaaacccaccaaaggagacgcagttctcttctggagcatgggactcgacggacagtcagatcctaggagcatacatggaggatgtgaagttctgtctggagaaaagtggtctgctactaaatggatgaggcaaaaagctacttcttgaagaactacttaaaactttttaaaacaaaaagaaaccacagggacttatattgaaaaatgtcatagtatctcagagttttgatttactctctttttgacccttcaattttagaatttatcatttacatacgtaaatcaatatgaatgtgttttac

SEQ ID NO: 41465 - protein, 334 aa, Arabidopsis thaliana
  peptide (1)..(334): Ceres Seq. ID no. 13575110
  misc_feature (213)..(330): Pfam Name: 2OG-Fe(II) oxygenase superfamily Pfam Description: 2OG-Fe(II) oxygenase superfamily
  misc_feature (129)..(317): Homolog of NCBI NO: 37535718 NR Description: putative prolyl 4-hydroxylase, alpha subunit
  misc_feature (131)..(332): Homolog of NCBI NO: 29150365 NR Description: putative oxidoreductase [Oryza sativa (japonica
  misc_feature (131)..(329): Homolog of NCBI NO: 34393269 NR Description: prolyl 4-hydroxylase alpha-1 subunit
  misc_feature (129)..(327): Homolog of NCBI NO: 21593091 NR Description: putative prolyl 4-hydroxylase, alpha subunit
  misc_feature (129)..(327): Homolog of NCBI NO: 15227885 NR Description: oxidoreductase, 2OG-Fe(II) oxygenase family
  misc_feature (111)..(328): Homolog of NCBI NO: 21537370 NR Description: putative prolyl 4-hydroxylase, alpha subunit
  misc_feature (111)..(328): Homolog of NCBI NO: 18394842 NR Description: oxidoreductase, 2OG-Fe(II) oxygenase family
  misc_feature (62)..(86): Homolog of NCBI NO: 38346023 NR Description: OSJNBb0085H11.11 [Oryza sativa (japonica
  misc_feature (108)..(331): Homolog of NCBI NO: 38346023 NR Description: OSJNBb0085H11.11 [Oryza sativa (japonica
  misc_feature (52)..(334): Homolog of NCBI NO: 15224220 NR Description: oxidoreductase, 2OG-Fe(II) oxygenase family
TPLTFFLHPNLSQLSSSSLFLPSATTTTVTDLSLSLPSFYFILIGDRDQLDMAPAMKIVFGLLTFVTVGMVIGSLLQLAFINRLEDSYGTGFPSLRGLRGQNTRYLRDVSRWANDKDAELLRIGNVKPEVVSWSPRIIVLHDFLSPEECEYLKAIARPRLQVSTVVDVKTGKGVKSDVRTSSGMFLTHVERSYPIIQAIEKRIAVFSQVPAENGELIQVLRYEPQQFYKPHHDYFADTFNLKRGGQRVATMLMYLTDDVEGGETYFPLAGDGDCTCGGKIMKGISVKPTKGDAVLFWSMGLDGQSDPRSIHGGCEVLSGEKWSATKWMRQKATS

SEQ ID NO: 41466 - protein, 283 aa, Arabidopsis thaliana
  peptide (1)..(283): Ceres Seq. ID no. 13575111
  misc_feature (162)..(279): Pfam Name: 2OG-Fe(II) oxygenase superfamily Pfam Description: 2OG-Fe(II) oxygenase superfamily
  misc_feature (78)..(266): Homolog of NCBI NO: 37535718 NR Description: putative prolyl 4-hydroxylase, alpha subunit
  misc_feature (80)..(281): Homolog of NCBI NO: 29150365 NR Description: putative oxidoreductase [Oryza sativa (japonica
  misc_feature (80)..(278): Homolog of NCBI NO: 34393269 NR Description: prolyl 4-hydroxylase alpha-1 subunit
  misc_feature (78)..(276): Homolog of NCBI NO: 21593091 NR Description: putative prolyl 4-hydroxylase, alpha subunit
  misc_feature (78)..(276): Homolog of NCBI NO: 15227885 NR Description: oxidoreductase, 2OG-Fe(II) oxygenase family
  misc_feature (60)..(277): Homolog of NCBI NO: 21537370 NR Description: putative prolyl 4-hydroxylase, alpha subunit
  misc_feature (60)..(277): Homolog of NCBI NO: 18394842 NR Description: oxidoreductase, 2OG-Fe(II) oxygenase family
  misc_feature (11)..(35): Homolog of NCBI NO: 38346023 NR Description: OSJNBb0085H11.11 [Oryza sativa (japonica
  misc_feature (57)..(280): Homolog of NCBI NO: 38346023 NR Description: OSJNBb0085H11.11 [Oryza sativa (japonica
  misc_feature (1)..(283): Homolog of NCBI NO: 15224220 NR Description: oxidoreductase, 2OG-Fe(II) oxygenase family
MAPAMKIVFGLLTFVTVGMVIGSLLQLAFINRLEDSYGTGFPSLRGLRGQNTRYLRDVSRWANDKDAELLRIGNVKPEVVSWSPRIIVLHDFLSPEECEYLKAIARPRLQVSTVVDVKTGKGVKSDVRTSSGMFLTHVERSYPIIQAIEKRIAVFSQVPAENGELIQVLRYEPQQFYKPHHDYFADTFNLKRGGQRVATMLMYLTDDVEGGETYFPLAGDGDCTCGGKIMKGISVKPTKGDAVLFWSMGLDGQSDPRSIHGGCEVLSGEKWSATKWMRQKATS

SEQ ID NO: 41467 - protein, 279 aa, Arabidopsis thaliana
  peptide (1)..(279): Ceres Seq. ID no. 13575112
  misc_feature (158)..(275): Pfam Name: 2OG-Fe(II) oxygenase superfamily Pfam Description: 2OG-Fe(II) oxygenase superfamily
  misc_feature (74)..(262): Homolog of NCBI NO: 37535718 NR Description: putative prolyl 4-hydroxylase, alpha subunit
  misc_feature (76)..(277): Homolog of NCBI NO: 29150365 NR Description: putative oxidoreductase [Oryza sativa (japonica
  misc_feature (76)..(274): Homolog of NCBI NO: 34393269 NR Description: prolyl 4-hydroxylase alpha-1 subunit
  misc_feature (74)..(272): Homolog of NCBI NO: 21593091 NR Description: putative prolyl 4-hydroxylase, alpha subunit
  misc_feature (74)..(272): Homolog of NCBI NO: 15227885 NR Description: oxidoreductase, 2OG-Fe(II) oxygenase family
  misc_feature (56)..(273): Homolog of NCBI NO: 21537370 NR Description: putative prolyl 4-hydroxylase, alpha subunit
  misc_feature (56)..(273): Homolog of NCBI NO: 18394842 NR Description: oxidoreductase, 2OG-Fe(II) oxygenase family
  misc_feature (7)..(31): Homolog of NCBI NO: 38346023 NR Description: OSJNBb0085H11.11 [Oryza sativa (japonica
  misc_feature (53)..(276): Homolog of NCBI NO: 38346023 NR Description: OSJNBb0085H11.11 [Oryza sativa (japonica
  misc_feature (1)..(279): Homolog of NCBI NO: 15224220 NR Description: oxidoreductase, 2OG-Fe(II) oxygenase family
MKIVFGLLTFVTVGMVIGSLLQLAFINRLEDSYGTGFPSLRGLRGQNTRYLRDVSRWANDKDAELLRIGNVKPEVVSWSPRIIVLHDFLSPEECEYLKAIARPRLQVSTVVDVKTGKGVKSDVRTSSGMFLTHVERSYPIIQAIEKRIAVFSQVPAENGELIQVLRYEPQQFYKPHHDYFADTFNLKRGGQRVATMLMYLTDDVEGGETYFPLAGDGDCTCGGKIMKGISVKPTKGDAVLFWSMGLDGQSDPRSIHGGCEVLSGEKWSATKWMRQKATS

SEQ ID NO: 41468 - DNA, 1039 bp, Arabidopsis thaliana
  misc_feature (1)..(1039): Ceres Seq. ID no. 13488549
  misc_feature: MA Experiment ID: 108434 Result: Up-regulated in Transcription
  misc_feature: MA Experiment 108434 PARAMETER Experiment Name: At_Root_Tips_cDNA_P Parameter: Tissue Value: Root Tips
  misc_feature: MA Experiment ID: 108462 Result: Down-regulated in Transcription
  misc_feature: MA Experiment 108462 PARAMETER Experiment Name: At_Germinating_Seeds_cDNA_P Parameter: Age (day) Value: 2 vs. 0
  misc_feature: MA Experiment 108462 PARAMETER Experiment Name: At_Germinating_Seeds_cDNA_P Parameter: Tissue Value: Germinating Seeds
  misc_feature: MA Experiment ID: 108463 Result: Down-regulated in Transcription
  misc_feature: MA Experiment 108463 PARAMETER Experiment Name: At_Germinating_Seeds_cDNA_P Parameter: Age (day) Value: 3 vs. 0
  misc_feature: MA Experiment 108463 PARAMETER Experiment Name: At_Germinating_Seeds_cDNA_P Parameter: Tissue Value: Germinating Seeds
  misc_feature: MA Experiment ID: 108464 Result: Down-regulated in Transcription
  misc_feature: MA Experiment 108464 PARAMETER Experiment Name: At_Germinating_Seeds_cDNA_P Parameter: Age (day) Value: 4 vs. 0
  misc_feature: MA Experiment 108464 PARAMETER Experiment Name: At_Germinating_Seeds_cDNA_P Parameter: Tissue Value: Germinating Seeds
  misc_feature: MA Experiment ID: 108573 Result: Down-regulated in Transcription
  misc_feature: MA Experiment 108573 PARAMETER Experiment Name: At_Drought_cDNA_P Parameter: Timepoint (hr) Value: 6
  misc_feature: MA Experiment 108573 PARAMETER Experiment Name: At_Drought_cDNA_P Parameter: Tissue Value: Aerial
  misc_feature: MA Experiment 108573 PARAMETER Experiment Name: At_Drought_cDNA_P Parameter: Treatment Value: Drought vs. No Drought
  misc_feature: MA Experiment ID: 20000224 Result: Up-regulated in Transcription
  misc_feature: MA Experiment ID: 20000227 Result: Up-regulated in Transcription
  misc_feature: MA Experiment 20000227 PARAMETER Experiment Name: At_Root-Tips-vs-Tops_P Parameter: Tissue Value: Root Tips vs. Root Tops
  misc_feature: MA Experiment ID: 20000234 Result: Up-regulated in Transcription
  misc_feature: MA Experiment 20000234 PARAMETER Experiment Name: At_Siliques_P Parameter: Age (day) Value: 21
  misc_feature: MA Experiment 20000234 PARAMETER Experiment Name: At_Siliques_P Parameter: Organism Value: A. thaliana
  misc_feature: MA Experiment 20000234 PARAMETER Experiment Name: At_Siliques_P Parameter: Plant Line Value: WS
  misc_feature: MA Experiment 20000234 PARAMETER Experiment Name: At_Siliques_P Parameter: Tissue Value: Less Than 5mm Siliques vs. Whole Plant
  misc_feature: MA Experiment ID: 20000495 Result: Up-regulated in Transcription
  misc_feature: MA Experiment 20000495 PARAMETER Experiment Name: At_Guard_Cells_P Parameter: Harvest Date Value: 8/2/2002
  misc_feature: MA Experiment 20000495 PARAMETER Experiment Name: At_Guard_Cells_P Parameter: Organism Value: A. thaliana
  misc_feature: MA Experiment 20000495 PARAMETER Experiment Name: At_Guard_Cells_P Parameter: Tissue Value: Guard Cells vs. Leaves
  misc_feature: MA Experiment ID: 20001556 Result: Up-regulated in Transcription
  misc_feature: MA Experiment 20001556 PARAMETER Experiment Name: At_Drought_Soil_Dry_P Parameter: Age (day) Value: 26
  misc_feature: MA Experiment 20001556 PARAMETER Experiment Name: At_Drought_Soil_Dry_P Parameter: Organism Value: A. thaliana
  misc_feature: MA Experiment 20001556 PARAMETER Experiment Name: At_Drought_Soil_Dry_P Parameter: Plant Line Value: WS
  misc_feature: MA Experiment 20001556 PARAMETER Experiment Name: At_Drought_Soil_Dry_P Parameter: Post Timepoint (hr) Value: None
  misc_feature: MA Experiment 20001556 PARAMETER Experiment Name: At_Drought_Soil_Dry_P Parameter: Post-Treatment Value: None
  misc_feature: MA Experiment 20001556 PARAMETER Experiment Name: At_Drought_Soil_Dry_P Parameter: Timepoint (day) Value: 12
  misc_feature: MA Experiment 20001556 PARAMETER Experiment Name: At_Drought_Soil_Dry_P Parameter: Treatment Value: Drought vs. No Drought
  misc_feature: MA Experiment ID: 20001560 Result: Up-regulated in Transcription
  misc_feature: MA Experiment 20001560 PARAMETER Experiment Name: At_Drought_Soil_Dry_P Parameter: Age (day) Value: 28
  misc_feature: MA Experiment 20001560 PARAMETER Experiment Name: At_Drought_Soil_Dry_P Parameter: Organism Value: A. thaliana
  misc_feature: MA Experiment 20001560 PARAMETER Experiment Name: At_Drought_Soil_Dry_P Parameter: Plant Line Value: WS
  misc_feature: MA Experiment 20001560 PARAMETER Experiment Name: At_Drought_Soil_Dry_P Parameter: Post Timepoint (hr) Value: None
  misc_feature: MA Experiment 20001560 PARAMETER Experiment Name: At_Drought_Soil_Dry_P Parameter: Post-Treatment Value: None
  misc_feature: MA Experiment 20001560 PARAMETER Experiment Name: At_Drought_Soil_Dry_P Parameter: Timepoint (day) Value: 14
  misc_feature: MA Experiment 20001560 PARAMETER Experiment Name: At_Drought_Soil_Dry_P Parameter: Treatment Value: Drought vs. No Drought
  misc_feature: MA Experiment ID: 20001757 Result: Up-regulated in Transcription
  misc_feature: MA Experiment 20001757 PARAMETER Experiment Name: At_50mM_NH4NO3_L-to-H_P Parameter: Timepoint (hr) Value: 6
  misc_feature: MA Experiment 20001757 PARAMETER Experiment Name: At_50mM_NH4NO3_L-to-H_P Parameter: Tissue Value: Leaf
  misc_feature: MA Experiment 20001757 PARAMETER Experiment Name: At_50mM_NH4NO3_L-to-H_P Parameter: Treatment Value: 50mM NH4NO3 vs 100mM Mannitol
actgctaaaacctcacctgcggcttcacctttcttcgagttcgtgaaaaagagacgtcgcatcgcaccgccgtcgccatttccaccgtcgtagcattgccgcttcactgactgtcgcactgaatattgttgaatcgagaaaatggcttatgttgggcaaagtagaaacgtgattcggcatgtagtctcgagaggaacagcttatcacaagtatgaaaatgcgattcatcatcctctccttttcgcttgtcaaggagttcgatacagaaaattagaagttattcttacaacgggcattgagaagcttggcaaagctggtgagactgtgaaggtagctcctggatacttcaggaatcaccttatgccaaaacttcttgctgtgcctaacattgacaagtatgcttatctcatccgagagcaacgcaagatgtataatcatgaagaagtaaaggaggaggttaaggtggttcataaaacttctgaagtccagacaaaagagtatgaaaaggctgcaaagcgtctggcgaatgctaatttggtattgaggaagttagttgacaaggaaaagttcaaaaaccgctcctcaaaagacgacaaacctgatgttcaaactcctatcacaaaggaagagatagtctctgaggtggcgaggcagctctgtgtgaagattgatccagacaatgtggttttagcggcgcctttggaaacttttggcgagtacgaggtgcctcttaaattccccaagacaattcctttgccacaaggaactgttcaatggattctcaaagtcaaagtccgtggccattaaatcttccacctttgaaagtcctccttcagtgatagttctcttcttcaatatgtttcaatatagttttggaattgcagaaacataagcaaacacaaatcagttacatttcccttgactcagtttttttttttttttttttgtagttgtataaaccgggtttactccggtctttaatttaaacaatgactcgaattttgcgaaaaccggactcgtccagaagacggataaattt

SEQ ID NO: 41469 - protein, 221 aa, Arabidopsis thaliana
  peptide (1)..(221): Ceres Seq. ID no. 13488550
  misc_feature (44)..(93): Pfam Name: Ribosomal protein L9, N-terminal domain Pfam Description: Ribosomal protein L9, N-terminal domain
  misc_feature (1)..(221): Homolog of NCBI NO: 15237342 NR Description: expressed protein [Arabidopsis thaliana]
MAYVGQSRNVIRHVVSRGTAYHKYENAIHHPLLFACQGVRYRKLEVILTTGIEKLGKAGETVKVAPGYFRNHLMPKLLAVPNIDKYAYLIREQRKMYNHEEVKEEVKVVHKTSEVQTKEYEKAAKRLANANLVLRKLVDKEKFKNRSSKDDKPDVQTPITKEEIVSEVARQLCVKIDPDNVVLAAPLETFGEYEVPLKFPKTIPLPQGTVQWILKVKVRGH

SEQ ID NO: 41470 - protein, 148 aa, Arabidopsis thaliana
  peptide (1)..(148): Ceres Seq. ID no. 13488551
  misc_feature (54)..(130): Pfam Name: Ribosomal protein L9, C-terminal domain Pfam Description: Ribosomal protein L9, C-terminal domain
  misc_feature (1)..(148): Homolog of NCBI NO: 15237342 NR Description: expressed protein [Arabidopsis thaliana]
MPKLLAVPNIDKYAYLIREQRKMYNHEEVKEEVKVVHKTSEVQTKEYEKAAKRLANANLVLRKLVDKEKFKNRSSKDDKPDVQTPITKEEIVSEVARQLCVKIDPDNVVLAAPLETFGEYEVPLKFPKTIPLPQGTVQWILKVKVRGH

SEQ ID NO: 41471 - protein, 126 aa, Arabidopsis thaliana
  peptide (1)..(126): Ceres Seq. ID no. 13488552
  misc_feature (32)..(108): Pfam Name: Ribosomal protein L9, C-terminal domain Pfam Description: Ribosomal protein L9, C-terminal domain
  misc_feature (1)..(126): Homolog of NCBI NO: 15237342 NR Description: expressed protein [Arabidopsis thaliana]
MYNHEEVKEEVKVVHKTSEVQTKEYEKAAKRLANANLVLRKLVDKEKFKNRSSKDDKPDVQTPITKEEIVSEVARQLCVKIDPDNVVLAAPLETFGEYEVPLKFPKTIPLPQGTVQWILKVKVRGH

SEQ ID NO: 41472 - DNA, 1545 bp, Arabidopsis thaliana
  misc_feature (1)..(1545): Ceres Seq. ID no. 13488935
  misc_feature: MA Experiment ID: 108434 Result: Up-regulated in Transcription
  misc_feature: MA Experiment 108434 PARAMETER Experiment Name: At_Root_Tips_cDNA_P Parameter: Tissue Value: Root Tips
  misc_feature: MA Experiment ID: 108462 Result: Down-regulated in Transcription
  misc_feature: MA Experiment 108462 PARAMETER Experiment Name: At_Germinating_Seeds_cDNA_P Parameter: Age (day) Value: 2 vs. 0
  misc_feature: MA Experiment 108462 PARAMETER Experiment Name: At_Germinating_Seeds_cDNA_P Parameter: Tissue Value: Germinating Seeds
  misc_feature: MA Experiment ID: 108463 Result: Down-regulated in Transcription
  misc_feature: MA Experiment 108463 PARAMETER Experiment Name: At_Germinating_Seeds_cDNA_P Parameter: Age (day) Value: 3 vs. 0
  misc_feature: MA Experiment 108463 PARAMETER Experiment Name: At_Germinating_Seeds_cDNA_P Parameter: Tissue Value: Germinating Seeds
  misc_feature: MA Experiment ID: 108464 Result: Down-regulated in Transcription
  misc_feature: MA Experiment 108464 PARAMETER Experiment Name: At_Germinating_Seeds_cDNA_P Parameter: Age (day) Value: 4 vs. 0
  misc_feature: MA Experiment 108464 PARAMETER Experiment Name: At_Germinating_Seeds_cDNA_P Parameter: Tissue Value: Germinating Seeds
aaaaaaaaaaaacaaacagtttagcaaaagattttgagagggagaaaaagggcgatcgattagggtttttgtgttttcgtcttagtatcgaagatgatcggagctgtgaactcggtggaggctgtgataacgtcaatccaaggtttatcggggagtccagaggatttatctgcacttcacgatcttttgagaggagctcaagactcgctccgagccgaaccaggtgttaatttctctactcttgaccagctcgacgcctcgaagcactctctcggttacctgtatttccttgaggttcttacctgtggtccagtgtcgaaggagaaagctgcttatgagataccgataattgcacggttcatcaattcttgtgatgctgggcagattcgtttggcgagctataaatttgtatctctttgtaagatattgaaagaccatgttatagcactgggagatccgttgcgaggagtagggccactgttaaacgctgttcagaagcttcaggtctcctccaagcgtttgactgcattgcatccagatgttcttcaactctgtttgcaggcgaaatcgtacaaatctggtttctccattcttagtgatgatatcgtggagattgaccagccaagagacttttttctctatagctattatgggggaatgatttgtattggactgaagagatttcagaaagcattagagcttctttacaatgttgtgactgctcctatgcatcaagtcaatgccatagctcttgaggcgtacaaaaagtacatattggtgtctctcattcacaatgggcagtttactaacactctccccaagtgtgcttctacagcagcacagaggagcttcaagaactataccggaccttacattgaactgggtaattgttacaacgacgggaagattggtgaactagaggcattggttgtggccaggaatgcagaatttgaagaggataagaaccttggattagttaagcaagcagtgtcatccctttacaagcgtaacattctgagattgacacagaagtacttgaccctgtcgcttcaagatatagccaacatggtccaacttggtaatgctaaggaggcggaaatgcatgtgcttcagatgatccaggatggtcagatacatgcccttatcaaccagaaagacgggatggtcagattcttggaggaccctgagcagtacaaatctagtgagatgattgagatcatggattctgttatacaaaggactattggtctgtcgaagaatctcttagccatggatgagagcttatcatgtgaccctttatacttgggaaaggtaggaagggaaagacaaaggtacgactttggagacgatttcgatactgttcctcagaagttctccatgtaaacagcgaaagtcgagaagcaccaacaaaacttggctcaaagacaaccgtagtgtgaatcttgagaatgttacttttgatttctttgttcatttttgttggtttaaaaagtttcatatttttgtcacaattgccaacaagtagagaagaccattatggacccg

SEQ ID NO: 41473 - protein, 429 aa, Arabidopsis thaliana
  peptide (1)..(429): Ceres Seq. ID no. 13488936
  misc_feature (258)..(362): Pfam Name: PCI domain Pfam Description: PCI domain
  misc_feature (6)..(406): Homolog of NCBI NO: 28279587 NR Description: Similar to COP9 constitutive photomorphogenic
  misc_feature (6)..(406): Homolog of NCBI NO: 39795809 NR Description: Unknown (protein for MGC:77615) [Danio rerio]
  misc_feature (6)..(428): Homolog of NCBI NO: 27696965 NR Description: Similar to COP9 (constitutive photomorphogenic)
  misc_feature (6)..(428): Homolog of NCBI NO: 34870793 NR Description: similar to COP9 constitutive photomorphogenic
  misc_feature (6)..(428): Homolog of NCBI NO: 23238222 NR Description: COP9 constitutive photomorphogenic homolog
  misc_feature (6)..(428): Homolog of NCBI NO: 6753488 NR Description: COP9 (constitutive photomorphogenic), subunit 3
  misc_feature (189)..(409): Homolog of NCBI NO: 1001955 NR Description: unknown protein
  misc_feature (1)..(383): Homolog of NCBI NO: 11290078 NR Description: hypothetical protein F18O22.40 - Arabidopsis
  misc_feature (1)..(429): Homolog of NCBI NO: 16930463 NR Description: AT5g14250/F18O22_40 [Arabidopsis thaliana]
  misc_feature (1)..(429): Homolog of NCBI NO: 18417330 NR Description: COP9 complex subunit 3, FUS11 [Arabidopsis
MIGAVNSVEAVITSIQGLSGSPEDLSALHDLLRGAQDSLRAEPGVNFSTLDQLDASKHSLGYLYFLEVLTCGPVSKEKAAYEIPIIARFINSCDAGQIRLASYKFVSLCKILKDHVIALGDPLRGVGPLLNAVQKLQVSSKRLTALHPDVLQLCLQAKSYKSGFSILSDDIVEIDQPRDFFLYSYYGGMICIGLKRFQKALELLYNVVTAPMHQVNAIALEAYKKYILVSLIHNGQFTNTLPKCASTAAQRSFKNYTGPYIELGNCYNDGKIGELEALVVARNAEFEEDKNLGLVKQAVSSLYKRNILRLTQKYLTLSLQDIANMVQLGNAKEAEMHVLQMIQDGQIHALINQKDGMVRFLEDPEQYKSSEMIEIMDSVIQRTIGLSKNLLAMDESLSCDPLYLGKVGRERQRYDFGDDFDTVPQKFSM

SEQ ID NO: 41474 - protein, 241 aa, Arabidopsis thaliana
  peptide (1)..(241): Ceres Seq. ID no. 13488937
  misc_feature (70)..(174): Pfam Name: PCI domain Pfam Description: PCI domain
  misc_feature (1)..(218): Homolog of NCBI NO: 28279587 NR Description: Similar to COP9 constitutive photomorphogenic
  misc_feature (1)..(218): Homolog of NCBI NO: 39795809 NR Description: Unknown (protein for MGC:77615) [Danio rerio]
  misc_feature (1)..(240): Homolog of NCBI NO: 27696965 NR Description: Similar to COP9 (constitutive photomorphogenic)
  misc_feature (1)..(240): Homolog of NCBI NO: 34870793 NR Description: similar to COP9 constitutive photomorphogenic
  misc_feature (1)..(240): Homolog of NCBI NO: 23238222 NR Description: COP9 constitutive photomorphogenic homolog
  misc_feature (1)..(240): Homolog of NCBI NO: 6753488 NR Description: COP9 (constitutive photomorphogenic), subunit 3
  misc_feature (1)..(221): Homolog of NCBI NO: 1001955 NR Description: unknown protein
  misc_feature (1)..(195): Homolog of NCBI NO: 11290078 NR Description: hypothetical protein F18O22.40 - Arabidopsis
  misc_feature (1)..(241): Homolog of NCBI NO: 16930463 NR Description: AT5g14250/F18O22_40 [Arabidopsis thaliana]
  misc_feature (1)..(241): Homolog of NCBI NO: 18417330 NR Description: COP9 complex subunit 3, FUS11 [Arabidopsis
MICIGLKRFQKALELLYNVVTAPMHQVNAIALEAYKKYILVSLIHNGQFTNTLPKCASTAAQRSFKNYTGPYIELGNCYNDGKIGELEALVVARNAEFEEDKNLGLVKQAVSSLYKRNILRLTQKYLTLSLQDIANMVQLGNAKEAEMHVLQMIQDGQIHALINQKDGMVRFLEDPEQYKSSEMIEIMDSVIQRTIGLSKNLLAMDESLSCDPLYLGKVGRERQRYDFGDDFDTVPQKFSM

SEQ ID NO: 41475 - protein, 218 aa, Arabidopsis thaliana
  peptide (1)..(218): Ceres Seq. ID no. 13488938
  misc_feature (47)..(151): Pfam Name: PCI domain Pfam Description: PCI domain
  misc_feature (1)..(195): Homolog of NCBI NO: 28279587 NR Description: Similar to COP9 constitutive photomorphogenic
  misc_feature (1)..(195): Homolog of NCBI NO: 39795809 NR Description: Unknown (protein for MGC:77615) [Danio rerio]
  misc_feature (1)..(217): Homolog of NCBI NO: 27696965 NR Description: Similar to COP9 (constitutive photomorphogenic)
  misc_feature (1)..(217): Homolog of NCBI NO: 34870793 NR Description: similar to COP9 constitutive photomorphogenic
  misc_feature (1)..(217): Homolog of NCBI NO: 23238222 NR Description: COP9 constitutive photomorphogenic homolog
  misc_feature (1)..(217): Homolog of NCBI NO: 6753488 NR Description: COP9 (constitutive photomorphogenic), subunit 3
  misc_feature (1)..(198): Homolog of NCBI NO: 1001955 NR Description: unknown protein
  misc_feature (1)..(172): Homolog of NCBI NO: 11290078 NR Description: hypothetical protein F18O22.40 - Arabidopsis
  misc_feature (1)..(218): Homolog of NCBI NO: 16930463 NR Description: AT5g14250/F18O22_40 [Arabidopsis thaliana]
  misc_feature (1)..(218): Homolog of NCBI NO: 18417330 NR Description: COP9 complex subunit 3, FUS11 [Arabidopsis
MHQVNAIALEAYKKYILVSLIHNGQFTNTLPKCASTAAQRSFKNYTGPYIELGNCYNDGKIGELEALVVARNAEFEEDKNLGLVKQAVSSLYKRNILRLTQKYLTLSLQDIANMVQLGNAKEAEMHVLQMIQDGQIHALINQKDGMVRFLEDPEQYKSSEMIEIMDSVIQRTIGLSKNLLAMDESLSCDPLYLGKVGRERQRYDFGDDFDTVPQKFSM

SEQ ID NO: 41476 - DNA, 522 bp, Arabidopsis thaliana
  misc_feature (1)..(522): Ceres Seq. ID no. 5774950
  misc_feature: MA Experiment ID: 20000171 Result: Down-regulated in Transcription
  misc_feature: MA Experiment 20000171 PARAMETER Experiment Name: At_42deg_Heat_P Parameter: Age (day) Value: 14
  misc_feature: MA Experiment 20000171 PARAMETER Experiment Name: At_42deg_Heat_P Parameter: Organism Value: A. thaliana
  misc_feature: MA Experiment 20000171 PARAMETER Experiment Name: At_42deg_Heat_P Parameter: Plant Line Value: WS
  misc_feature: MA Experiment 20000171 PARAMETER Experiment Name: At_42deg_Heat_P Parameter: Temperature (deg C) Value: 42 vs. 22
  misc_feature: MA Experiment 20000171 PARAMETER Experiment Name: At_42deg_Heat_P Parameter: Timepoint (hr) Value: 1
  misc_feature: MA Experiment 20000171 PARAMETER Experiment Name: At_42deg_Heat_P Parameter: Tissue Value: Aerial
  misc_feature: MA Experiment ID: 20000173 Result: Down-regulated in Transcription
  misc_feature: MA Experiment 20000173 PARAMETER Experiment Name: At_42deg_Heat_P Parameter: Age (day) Value: 14
  misc_feature: MA Experiment 20000173 PARAMETER Experiment Name: At_42deg_Heat_P Parameter: Organism Value: A. thaliana
  misc_feature: MA Experiment 20000173 PARAMETER Experiment Name: At_42deg_Heat_P Parameter: Plant Line Value: WS
  misc_feature: MA Experiment 20000173 PARAMETER Experiment Name: At_42deg_Heat_P Parameter: Temperature (deg C) Value: 42 vs. 22
  misc_feature: MA Experiment 20000173 PARAMETER Experiment Name: At_42deg_Heat_P Parameter: Timepoint (hr) Value: 6
  misc_feature: MA Experiment 20000173 PARAMETER Experiment Name: At_42deg_Heat_P Parameter: Tissue Value: Aerial
  misc_feature: MA Experiment ID: 20000184 Result: Down-regulated in Transcription
  misc_feature: MA Experiment 20000184 PARAMETER Experiment Name: At_Shoots__P Parameter: Age (day) Value: 7
  misc_feature: MA Experiment 20000184 PARAMETER Experiment Name: At_Shoots__P Parameter: Tissue Value: Shoots vs. Whole Plant
  misc_feature: MA Experiment ID: 20000234 Result: Down-regulated in Transcription
  misc_feature: MA Experiment 20000234 PARAMETER Experiment Name: At_Siliques_P Parameter: Age (day) Value: 21
  misc_feature: MA Experiment 20000234 PARAMETER Experiment Name: At_Siliques_P Parameter: Organism Value: A. thaliana
  misc_feature: MA Experiment 20000234 PARAMETER Experiment Name: At_Siliques_P Parameter: Plant Line Value: WS
  misc_feature: MA Experiment 20000234 PARAMETER Experiment Name: At_Siliques_P Parameter: Tissue Value: Less Than 5mm Siliques vs. Whole Plant
  misc_feature: MA Experiment ID: 20000235 Result: Down-regulated in Transcription
  misc_feature: MA Experiment 20000235 PARAMETER Experiment Name: At_Siliques_P Parameter: Age (day) Value: 21
  misc_feature: MA Experiment 20000235 PARAMETER Experiment Name: At_Siliques_P Parameter: Organism Value: A. thaliana
  misc_feature: MA Experiment 20000235 PARAMETER Experiment Name: At_Siliques_P Parameter: Plant Line Value: WS
  misc_feature: MA Experiment 20000235 PARAMETER Experiment Name: At_Siliques_P Parameter: Tissue Value: 5-10mm Siliques vs. Whole Plant
  misc_feature: MA Experiment ID: 20000436 Result: Up-regulated in Transcription
  misc_feature: MA Experiment 20000436 PARAMETER Experiment Name: At_Drought_P Parameter: Age (day) Value: 7
  misc_feature: MA Experiment 20000436 PARAMETER Experiment Name: At_Drought_P Parameter: Organism Value: A. thaliana
  misc_feature: MA Experiment 20000436 PARAMETER Experiment Name: At_Drought_P Parameter: Plant Line Value: WS
  misc_feature: MA Experiment 20000436 PARAMETER Experiment Name: At_Drought_P Parameter: Timepoint (hr) Value: 12
  misc_feature: MA Experiment 20000436 PARAMETER Experiment Name: At_Drought_P Parameter: Tissue Value: Whole Plant
  misc_feature: MA Experiment 20000436 PARAMETER Experiment Name: At_Drought_P Parameter: Treatment Value: Drought vs. No Drought
  misc_feature: MA Experiment ID: 20000437 Result: Up-regulated in Transcription
  misc_feature: MA Experiment 20000437 PARAMETER Experiment Name: At_Drought_P Parameter: Age (day) Value: 8
  misc_feature: MA Experiment 20000437 PARAMETER Experiment Name: At_Drought_P Parameter: Organism Value: A. thaliana
  misc_feature: MA Experiment 20000437 PARAMETER Experiment Name: At_Drought_P Parameter: Plant Line Value: WS
  misc_feature: MA Experiment 20000437 PARAMETER Experiment Name: At_Drought_P Parameter: Timepoint (hr) Value: 24
  misc_feature: MA Experiment 20000437 PARAMETER Experiment Name: At_Drought_P Parameter: Tissue Value: Whole Plant
  misc_feature: MA Experiment 20000437 PARAMETER Experiment Name: At_Drought_P Parameter: Treatment Value: Drought vs. No Drought
  misc_feature: MA Experiment ID: 20000438 Result: Down-regulated in Transcription
  misc_feature: MA Experiment 20000438 PARAMETER Experiment Name: At_Shoots__P Parameter: Age (day) Value: 14
  misc_feature: MA Experiment 20000438 PARAMETER Experiment Name: At_Shoots__P Parameter: Tissue Value: Shoots vs. Whole Plant
  misc_feature: MA Experiment ID: 20000439 Result: Down-regulated in Transcription
  misc_feature: MA Experiment 20000439 PARAMETER Experiment Name: At_Roots__P Parameter: Age (day) Value: 14 vs. 21
  misc_feature: MA Experiment 20000439 PARAMETER Experiment Name: At_Roots__P Parameter: Organism Value: A. thaliana
  misc_feature: MA Experiment 20000439 PARAMETER Experiment Name: At_Roots__P Parameter: Tissue Value: Roots vs. Whole Plant
  misc_feature: MA Experiment ID: 20000495 Result: Down-regulated in Transcription
  misc_feature: MA Experiment 20000495 PARAMETER Experiment Name: At_Guard_Cells_P Parameter: Harvest Date Value: 8/2/2002
  misc_feature: MA Experiment 20000495 PARAMETER Experiment Name: At_Guard_Cells_P Parameter: Organism Value: A. thaliana
  misc_feature: MA Experiment 20000495 PARAMETER Experiment Name: At_Guard_Cells_P Parameter: Tissue Value: Guard Cells vs. Leaves
  misc_feature: MA Experiment ID: 20001451 Result: Down-regulated in Transcription
  misc_feature: MA Experiment 20001451 PARAMETER Experiment Name: At_Far-red-induction_P Parameter: Age (day) Value: 7
  misc_feature: MA Experiment 20001451 PARAMETER Experiment Name: At_Far-red-induction_P Parameter: Light Value: Far-red vs. White
  misc_feature: MA Experiment 20001451 PARAMETER Experiment Name: At_Far-red-induction_P Parameter: Organism Value: A. thaliana
  misc_feature: MA Experiment 20001451 PARAMETER Experiment Name: At_Far-red-induction_P Parameter: Plant Line Value: Columbia
  misc_feature: MA Experiment 20001451 PARAMETER Experiment Name: At_Far-red-induction_P Parameter: Timepoint (hr) Value: 24
  misc_feature: MA Experiment 20001451 PARAMETER Experiment Name: At_Far-red-induction_P Parameter: Tissue Value: Whole Plant
  misc_feature: MA Experiment ID: 20001558 Result: Down-regulated in Transcription
  misc_feature: MA Experiment 20001558 PARAMETER Experiment Name: At_Drought_Soil_Dry_P Parameter: Age (day) Value: 27
  misc_feature: MA Experiment 20001558 PARAMETER Experiment Name: At_Drought_Soil_Dry_P Parameter: Organism Value: A. thaliana
  misc_feature: MA Experiment 20001558 PARAMETER Experiment Name: At_Drought_Soil_Dry_P Parameter: Plant Line Value: WS
  misc_feature: MA Experiment 20001558 PARAMETER Experiment Name: At_Drought_Soil_Dry_P Parameter: Post Timepoint (hr) Value: 6
  misc_feature: MA Experiment 20001558 PARAMETER Experiment Name: At_Drought_Soil_Dry_P Parameter: Post-Treatment Value: Re-Water vs. No Drought
  misc_feature: MA Experiment 20001558 PARAMETER Experiment Name: At_Drought_Soil_Dry_P Parameter: Timepoint (day) Value: 13
  misc_feature: MA Experiment 20001558 PARAMETER Experiment Name: At_Drought_Soil_Dry_P Parameter: Treatment Value: Drought vs. No Drought
  misc_feature: MA Experiment ID: 20001560 Result: Down-regulated in Transcription
  misc_feature: MA Experiment 20001560 PARAMETER Experiment Name: At_Drought_Soil_Dry_P Parameter: Age (day) Value: 28
  misc_feature: MA Experiment 20001560 PARAMETER Experiment Name: At_Drought_Soil_Dry_P Parameter: Organism Value: A. thaliana
  misc_feature: MA Experiment 20001560 PARAMETER Experiment Name: At_Drought_Soil_Dry_P Parameter: Plant Line Value: WS
  misc_feature: MA Experiment 20001560 PARAMETER Experiment Name: At_Drought_Soil_Dry_P Parameter: Post Timepoint (hr) Value: None
  misc_feature: MA Experiment 20001560 PARAMETER Experiment Name: At_Drought_Soil_Dry_P Parameter: Post-Treatment Value: None
  misc_feature: MA Experiment 20001560 PARAMETER Experiment Name: At_Drought_Soil_Dry_P Parameter: Timepoint (day) Value: 14
  misc_feature: MA Experiment 20001560 PARAMETER Experiment Name: At_Drought_Soil_Dry_P Parameter: Treatment Value: Drought vs. No Drought
  misc_feature: Pfam Name: zf-C3HC4 Pfam Description: Zinc finger, C3HC4 type (RING finger)
aatataacttggatcagattcttcttctcctctaaacaacaacaaagtctctcttccttctgtctttcacatttcctcttcccctaaaaacagaactcaaaaccaaaacaaaatgactcgctcctctagattccttggtacggcgtcgcctccaccaccggaagaaatcctcgccgccgaaaccgacatggttgtgattctctcagcacttctctgcgctctcgtatgcgtascggtttagccgccgtagctcgctgcgcttggctccgccgtctcaccggagttaatcccgccgccgtcggagaagctccaccgcctaacaaaggcctcaagaaaaaagcacttcaagctctccctaaatcaacttacaccgcctctgcctctaccgccgccgccgctgacgatctaccgtgctcttcagtcggagacgnagattcatccaccgagtgtgcaatatgcataacggaattttcggagggcgaagaaatcagaatcttaccgctgtgtagtcacgcgagacgt

SEQ ID NO: 41477 - protein, 99 aa, Arabidopsis thaliana
  peptide (1)..(99): Ceres Seq. ID no. 5774951
  misc_feature: Pfam Name: zf-C3HC4 Pfam Description: Zinc finger, C3HC4 type (RING finger)
  misc_feature (4)..(96): Homolog of NCBI NO: 30685065 NR Description: unknown protein [Arabidopsis thaliana]
  misc_feature (4)..(96): Homolog of NCBI NO: 15239062 NR Description: RING zinc finger protein-like; protein id:
  misc_feature (4)..(96): Homolog of NCBI NO: 21555237 NR Description: putative RING zinc finger protein [Arabidopsis
  misc_feature (4)..(96): Homolog of NCBI NO: 15223041 NR Description: putative RING zinc finger protein
  misc_feature (33)..(96): Homolog of NCBI NO: 37536508 NR Description: putative ring finger protein
  misc_feature (4)..(97): Homolog of NCBI NO: 32487554 NR Description: OSJNBa0013K16.6 [Oryza sativa (japonica
  misc_feature (4)..(96): Homolog of NCBI NO: 7489432 NR Description: probable ring finger protein - barley
  misc_feature (4)..(96): Homolog of NCBI NO: 15218042 NR Description: similar to putative RING zinc finger protein
  misc_feature (4)..(97): Homolog of NCBI NO: 15227839 NR Description: putative RING zinc finger protein
  misc_feature (4)..(97): Homolog of NCBI NO: 15237013 NR Description: RING-H2 finger protein RHA3b
  misc_feature (3)..(3): Xaa is any aa, unknown or other
  misc_feature (69)..(69): Xaa is any aa, unknown or other
MRXGLAAVARCAWLRRLTGVNPAAVGEAPPPNKGLKKKALQALPKSTYTASASTAAAADDLPCSSVGDXDSSTECAICITEFSEGEEIRILPLCSHARR

SEQ ID NO: 41478 - DNA, 1350 bp, Arabidopsis thaliana
  misc_feature (1)..(1350): Ceres Seq. ID no. 13499917
  misc_feature: MA Experiment ID: 108434 Result: Up-regulated in Transcription
  misc_feature: MA Experiment 108434 PARAMETER Experiment Name: At_Root_Tips_cDNA_P Parameter: Tissue Value: Root Tips
  misc_feature: MA Experiment ID: 20000111 Result: Up-regulated in Transcription
  misc_feature: MA Experiment 20000111 PARAMETER Experiment Name: At_42deg_Heat_cDNA_P Parameter: Temperature (deg C) Value: 42 vs. 22
  misc_feature: MA Experiment 20000111 PARAMETER Experiment Name: At_42deg_Heat_cDNA_P Parameter: Timepoint (hr) Value: 6
  misc_feature: MA Experiment 20000111 PARAMETER Experiment Name: At_42deg_Heat_cDNA_P Parameter: Tissue Value: Aerial
  misc_feature: MA Experiment ID: 20000113 Result: Up-regulated in Transcription
  misc_feature: MA Experiment 20000113 PARAMETER Experiment Name: At_42deg_Heat_cDNA_P Parameter: Temperature (deg C) Value: 42 vs. 22
  misc_feature: MA Experiment 20000113 PARAMETER Experiment Name: At_42deg_Heat_cDNA_P Parameter: Timepoint (hr) Value: 8
  misc_feature: MA Experiment 20000113 PARAMETER Experiment Name: At_42deg_Heat_cDNA_P Parameter: Tissue Value: Aerial
  misc_feature: MA Experiment ID: 20000144 Result: Up-regulated in Transcription
  misc_feature: MA Experiment 20000144 PARAMETER Experiment Name: At_42deg_Heat_cDNA_P Parameter: Temperature (deg C) Value: 42 vs. 22
  misc_feature: MA Experiment 20000144 PARAMETER Experiment Name: At_42deg_Heat_cDNA_P Parameter: Timepoint (hr) Value: 1
  misc_feature: MA Experiment 20000144 PARAMETER Experiment Name: At_42deg_Heat_cDNA_P Parameter: Tissue Value: Aerial
  misc_feature: MA Experiment ID: 20000171 Result: Up-regulated in Transcription
  misc_feature: MA Experiment 20000171 PARAMETER Experiment Name: At_42deg_Heat_P Parameter: Age (day) Value: 14
  misc_feature: MA Experiment 20000171 PARAMETER Experiment Name: At_42deg_Heat_P Parameter: Organism Value: A. thaliana
  misc_feature: MA Experiment 20000171 PARAMETER Experiment Name: At_42deg_Heat_P Parameter: Plant Line Value: WS
  misc_feature: MA Experiment 20000171 PARAMETER Experiment Name: At_42deg_Heat_P Parameter: Temperature (deg C) Value: 42 vs. 22
  misc_feature: MA Experiment 20000171 PARAMETER Experiment Name: At_42deg_Heat_P Parameter: Timepoint (hr) Value: 1
  misc_feature: MA Experiment 20000171 PARAMETER Experiment Name: At_42deg_Heat_P Parameter: Tissue Value: Aerial
  misc_feature: MA Experiment ID: 20000173 Result: Up-regulated in Transcription
  misc_feature: MA Experiment 20000173 PARAMETER Experiment Name: At_42deg_Heat_P Parameter: Age (day) Value: 14
  misc_feature: MA Experiment 20000173 PARAMETER Experiment Name: At_42deg_Heat_P Parameter: Organism Value: A. thaliana
  misc_feature: MA Experiment 20000173 PARAMETER Experiment Name: At_42deg_Heat_P Parameter: Plant Line Value: WS
  misc_feature: MA Experiment 20000173 PARAMETER Experiment Name: At_42deg_Heat_P Parameter: Temperature (deg C) Value: 42 vs. 22
  misc_feature: MA Experiment 20000173 PARAMETER Experiment Name: At_42deg_Heat_P Parameter: Timepoint (hr) Value: 6
  misc_feature: MA Experiment 20000173 PARAMETER Experiment Name: At_42deg_Heat_P Parameter: Tissue Value: Aerial
  misc_feature: MA Experiment ID: 20001247 Result: Up-regulated in Transcription
  misc_feature: MA Experiment 20001247 PARAMETER Experiment Name: At_Far-red-induction_P Parameter: Age (day) Value: 7
  misc_feature: MA Experiment 20001247 PARAMETER Experiment Name: At_Far-red-induction_P Parameter: Light Value: Far-red vs. White
  misc_feature: MA Experiment 20001247 PARAMETER Experiment Name: At_Far-red-induction_P Parameter: Organism Value: A. thaliana
  misc_feature: MA Experiment 20001247 PARAMETER Experiment Name: At_Far-red-induction_P Parameter: Plant Line Value: Columbia
  misc_feature: MA Experiment 20001247 PARAMETER Experiment Name: At_Far-red-induction_P Parameter: Timepoint (hr) Value: 1
  misc_feature: MA Experiment 20001247 PARAMETER Experiment Name: At_Far-red-induction_P Parameter: Tissue Value: Whole Plant
  misc_feature: MA Experiment ID: 20001248 Result: Up-regulated in Transcription
  misc_feature: MA Experiment 20001248 PARAMETER Experiment Name: At_Far-red-induction_P Parameter: Age (day) Value: 7
  misc_feature: MA Experiment 20001248 PARAMETER Experiment Name: At_Far-red-induction_P Parameter: Light Value: Far-red vs. White
  misc_feature: MA Experiment 20001248 PARAMETER Experiment Name: At_Far-red-induction_P Parameter: Organism Value: A. thaliana
  misc_feature: MA Experiment 20001248 PARAMETER Experiment Name: At_Far-red-induction_P Parameter: Plant Line Value: Columbia
  misc_feature: MA Experiment 20001248 PARAMETER Experiment Name: At_Far-red-induction_P Parameter: Timepoint (hr) Value: 4
  misc_feature: MA Experiment 20001248 PARAMETER Experiment Name: At_Far-red-induction_P Parameter: Tissue Value: Whole Plant
  misc_feature: MA Experiment ID: 20001450 Result: Up-regulated in Transcription
  misc_feature: MA Experiment 20001450 PARAMETER Experiment Name: At_Far-red-induction_P Parameter: Age (day) Value: 7
  misc_feature: MA Experiment 20001450 PARAMETER Experiment Name: At_Far-red-induction_P Parameter: Light Value: Far-red vs. White
  misc_feature: MA Experiment 20001450 PARAMETER Experiment Name: At_Far-red-induction_P Parameter: Organism Value: A. thaliana
  misc_feature: MA Experiment 20001450 PARAMETER Experiment Name: At_Far-red-induction_P Parameter: Plant Line Value: Columbia
  misc_feature: MA Experiment 20001450 PARAMETER Experiment Name: At_Far-red-induction_P Parameter: Timepoint (hr) Value: 8
  misc_feature: MA Experiment 20001450 PARAMETER Experiment Name: At_Far-red-induction_P Parameter: Tissue Value: Whole Plant
atgaagaaaaaaaacgaagaagatcaatggtcaatatttaatcagaagcatccacgtccacttcatcagattctatctctctctctctgtaagattccttgctctcgcgcttttctctctctctctcgcgttcgttcttatccacgagctctgcaccgtcgcaatctccgtcttctccatttagatccaacacagagccttttctacatgaaattcggcaaagagtttcgtactcacctcgaagaaactttaccagagtggagagacaagttcctttgctataaacctttaaaaaagcttctcaaatattatccttattactccgccgattttggacccgccaattccgatcacaacgattcgcgtccagtatttgctgatactactaacatctcttccgccgccgacgacggcggtgtggttcccggcgtcaggccatcggaagatctccagggttcgtttgtgaggatacttaacgatgaacttgagaagtttaacgatttttacgttgataaggaagaagatttcgttatcagattacaggagctcaaggaaagaatcgagcaagttaaagaaaagaatggggaatttgcatcagaaagtgagttcagcgaagaaatgatggatattcggagagaccttgttaccattcatggcgagatggtgctcctgaaaaactacagctcccttaattttgcaggacttgtcaagattttgaagaagtacgataaaagaacaggtggacttttacgtttgcctttcacacagcttgttctccatcaacccttctttactacagagccacttactaggttagtccgtgaatgtgaggccaatcttgagcttctttttccttcagaagcggaagttgtagagtcttctagcgcagtgcaagcacactcaagctcacatcagcacaactccccaagaatctcagctgagacttcctcaactctcggcaatgaaaatcttgatatatataagagtacactcgctgcaatgagagctataagagggttacaaaaggctagctcgacgtacaaccctttatcattctcatcgcttcttcagaacgaggatgatgagacggtaacagctgaaaactctccaaactctgggaacaaagatgattcagagaaggaagatactggaccttcccactgatcagaagagaatgatgctctttttgatcaagattttgagaatttgcttcttgatttcaccctaacttttcataaaattaacacattttactttacttcttcaccttttgcaggacacaacttctgtatgcatttgaattgtagtacagtcgtttatagattttcaatgaaattttcctccattgtc

SEQ ID NO: 41479 - protein, 387 aa, Arabidopsis thaliana
  peptide (1)..(387): Ceres Seq. ID no. 13499918
  misc_feature (70)..(259): Pfam Name: SPX domain Pfam Description: SPX domain
  misc_feature (221)..(387): Homolog of NCBI NO: 7489382 NR Description: ids-4 protein - barley
  misc_feature (70)..(110): Homolog of NCBI NO: 21592813 NR Description: ids4-like protein [Arabidopsis thaliana]
  misc_feature (154)..(305): Homolog of NCBI NO: 21592813 NR Description: ids4-like protein [Arabidopsis thaliana]
  misc_feature (70)..(110): Homolog of NCBI NO: 15241275 NR Description: ids4-related protein [Arabidopsis thaliana]
  misc_feature (153)..(305): Homolog of NCBI NO: 15241275 NR Description: ids4-related protein [Arabidopsis thaliana]
  misc_feature (70)..(112): Homolog of NCBI NO: 37533962 NR Description: hypothetical protein [Oryza sativa (japonica
  misc_feature (132)..(351): Homolog of NCBI NO: 37533962 NR Description: hypothetical protein [Oryza sativa (japonica
  misc_feature (120)..(382): Homolog of NCBI NO: 34897330 NR Description: putative signal transduction protein [Oryza
  misc_feature (70)..(387): Homolog of NCBI NO: 18417630 NR Description: ids-4 protein - like [Arabidopsis thaliana]
  misc_feature (1)..(387): Homolog of NCBI NO: 11358467 NR Description: ids-4 protein-like - Arabidopsis thaliana
MKKKNEEDQWSIFNQKHPRPLHQILSLSLCKIPCSRAFLSLSRVRSYPRALHRRNLRLLHLDPTQSLFYMKFGKEFRTHLEETLPEWRDKFLCYKPLKKLLKYYPYYSADFGPANSDHNDSRPVFADTTNISSAADDGGVVPGVRPSEDLQGSFVRILNDELEKFNDFYVDKEEDFVIRLQELKERIEQVKEKNGEFASESEFSEEMMDIRRDLVTIHGEMVLLKNYSSLNFAGLVKILKKYDKRTGGLLRLPFTQLVLHQPFFTTEPLTRLVRECEANLELLFPSEAEVVESSSAVQAHSSSHQHNSPRISAETSSTLGNENLDIYKSTLAAMRAIRGLQKASSTYNPLSFSSLLQNEDDETVTAENSPNSGNKDDSEKEDTGPSH

SEQ ID NO: 41480 - protein, 318 aa, Arabidopsis thaliana
  peptide (1)..(318): Ceres Seq. ID no. 13499919
  misc_feature (1)..(190): Pfam Name: SPX domain Pfam Description: SPX domain
  misc_feature (152)..(318): Homolog of NCBI NO: 7489382 NR Description: ids-4 protein - barley
  misc_feature (1)..(41): Homolog of NCBI NO: 21592813 NR Description: ids4-like protein [Arabidopsis thaliana]
  misc_feature (85)..(236): Homolog of NCBI NO: 21592813 NR Description: ids4-like protein [Arabidopsis thaliana]
  misc_feature (1)..(41): Homolog of NCBI NO: 15241275 NR Description: ids4-related protein [Arabidopsis thaliana]
  misc_feature (84)..(236): Homolog of NCBI NO: 15241275 NR Description: ids4-related protein [Arabidopsis thaliana]
  misc_feature (1)..(43): Homolog of NCBI NO: 37533962 NR Description: hypothetical protein [Oryza sativa (japonica
  misc_feature (63)..(282): Homolog of NCBI NO: 37533962 NR Description: hypothetical protein [Oryza sativa (japonica
  misc_feature (51)..(313): Homolog of NCBI NO: 34897330 NR Description: putative signal transduction protein [Oryza
  misc_feature (1)..(318): Homolog of NCBI NO: 18417630 NR Description: ids-4 protein - like [Arabidopsis thaliana]
  misc_feature (1)..(318): Homolog of NCBI NO: 11358467 NR Description: ids-4 protein-like - Arabidopsis thaliana
MKFGKEFRTHLEETLPEWRDKFLCYKPLKKLLKYYPYYSADFGPANSDHNDSRPVFADTTNISSAADDGGVVPGVRPSEDLQGSFVRILNDELEKFNDFYVDKEEDFVIRLQELKERIEQVKEKNGEFASESEFSEEMMDIRRDLVTIHGEMVLLKNYSSLNFAGLVKILKKYDKRTGGLLRLPFTQLVLHQPFFTTEPLTRLVRECEANLELLFPSEAEVVESSSAVQAHSSSHQHNSPRISAETSSTLGNENLDIYKSTLAAMRAIRGLQKASSTYNPLSFSSLLQNEDDETVTAENSPNSGNKDDSEKEDTGPSH

SEQ ID NO: 41481 - DNA, 1289 bp, Arabidopsis thaliana
  misc_feature (1)..(1289): Ceres Seq. ID no. 12738349
  misc_feature: MA Experiment ID: 20000173 Result: Down-regulated in Transcription
  misc_feature: MA Experiment 20000173 PARAMETER Experiment Name: At_42deg_Heat_P Parameter: Age (day) Value: 14
  misc_feature: MA Experiment 20000173 PARAMETER Experiment Name: At_42deg_Heat_P Parameter: Organism Value: A. thaliana
  misc_feature: MA Experiment 20000173 PARAMETER Experiment Name: At_42deg_Heat_P Parameter: Plant Line Value: WS
  misc_feature: MA Experiment 20000173 PARAMETER Experiment Name: At_42deg_Heat_P Parameter: Temperature (deg C) Value: 42 vs. 22
  misc_feature: MA Experiment 20000173 PARAMETER Experiment Name: At_42deg_Heat_P Parameter: Timepoint (hr) Value: 6
  misc_feature: MA Experiment 20000173 PARAMETER Experiment Name: At_42deg_Heat_P Parameter: Tissue Value: Aerial
  misc_feature: MA Experiment ID: 20000180 Result: Up-regulated in Transcription
  misc_feature: MA Experiment 20000180 PARAMETER Experiment Name: At_Germinating_Seeds_P Parameter: Age (hr) Value: 24 vs. 0
  misc_feature: MA Experiment 20000180 PARAMETER Experiment Name: At_Germinating_Seeds_P Parameter: Tissue Value: Germinating Seeds
  misc_feature: MA Experiment ID: 20000234 Result: Up-regulated in Transcription
  misc_feature: MA Experiment 20000234 PARAMETER Experiment Name: At_Siliques_P Parameter: Age (day) Value: 21
  misc_feature: MA Experiment 20000234 PARAMETER Experiment Name: At_Siliques_P Parameter: Organism Value: A. thaliana
  misc_feature: MA Experiment 20000234 PARAMETER Experiment Name: At_Siliques_P Parameter: Plant Line Value: WS
  misc_feature: MA Experiment 20000234 PARAMETER Experiment Name: At_Siliques_P Parameter: Tissue Value: Less Than 5mm Siliques vs. Whole Plant
  misc_feature: MA Experiment ID: 20000235 Result: Up-regulated in Transcription
  misc_feature: MA Experiment 20000235 PARAMETER Experiment Name: At_Siliques_P Parameter: Age (day) Value: 21
  misc_feature: MA Experiment 20000235 PARAMETER Experiment Name: At_Siliques_P Parameter: Organism Value: A. thaliana
  misc_feature: MA Experiment 20000235 PARAMETER Experiment Name: At_Siliques_P Parameter: Plant Line Value: WS
  misc_feature: MA Experiment 20000235 PARAMETER Experiment Name: At_Siliques_P Parameter: Tissue Value: 5-10mm Siliques vs. Whole Plant
  misc_feature: MA Experiment ID: 20000264 Result: Up-regulated in Transcription
  misc_feature: MA Experiment 20000264 PARAMETER Experiment Name: At_Open_Flower_P Parameter: Age (day) Value: 21
  misc_feature: MA Experiment 20000264 PARAMETER Experiment Name: At_Open_Flower_P Parameter: Plant Line Value: WS
  misc_feature: MA Experiment 20000264 PARAMETER Experiment Name: At_Open_Flower_P Parameter: Tissue Value: Open Flower vs. Whole Plant
  misc_feature: MA Experiment ID: 20000265 Result: Up-regulated in Transcription
  misc_feature: MA Experiment 20000265 PARAMETER Experiment Name: At_Open_Flower_P Parameter: Age (day) Value: 21
  misc_feature: MA Experiment 20000265 PARAMETER Experiment Name: At_Open_Flower_P Parameter: Plant Line Value: WS
  misc_feature: MA Experiment 20000265 PARAMETER Experiment Name: At_Open_Flower_P Parameter: Tissue Value: Closed Flower vs. Whole Plant
  misc_feature: MA Experiment ID: 20000286 Result: Up-regulated in Transcription
  misc_feature: MA Experiment 20000286 PARAMETER Experiment Name: At_Open_Flower_P Parameter: Age (day) Value: 21
  misc_feature: MA Experiment 20000286 PARAMETER Experiment Name: At_Open_Flower_P Parameter: Plant Line Value: WS
  misc_feature: MA Experiment 20000286 PARAMETER Experiment Name: At_Open_Flower_P Parameter: Tissue Value: Half Open vs. Whole Plant
  misc_feature: MA Experiment ID: 20000438 Result: Up-regulated in Transcription
  misc_feature: MA Experiment 20000438 PARAMETER Experiment Name: At_Shoots__P Parameter: Age (day) Value: 14
  misc_feature: MA Experiment 20000438 PARAMETER Experiment Name: At_Shoots__P Parameter: Tissue Value: Shoots vs. Whole Plant
  misc_feature: MA Experiment ID: 20000794 Result: Up-regulated in Transcription
  misc_feature: MA Experiment 20000794 PARAMETER Experiment Name: At_Petals_P Parameter: Age (day) Value: 23-25 days
  misc_feature: MA Experiment 20000794 PARAMETER Experiment Name: At_Petals_P Parameter: Plant Line Value: WS
  misc_feature: MA Experiment 20000794 PARAMETER Experiment Name: At_Petals_P Parameter: Tissue Value: Petals vs. Whole plant
ctgattcaagaacgaaacgagagaaaacttgccgagtacaacctcacccattctctatctccacctaatgctttagatttggttagactttccgaaaagaatgaaagtctacgccctaaagaccacaaagcacaacctagaagcaaagtggcaaagtccttgcagagttttgacaatgctaatgaactatccaaggagatgatcagatgcatgagaaacatatttgtgtctctaggagagacatctgcaggatccaaatcctcacaagagactgccagtgtttcttctcgtgagaatcctccatcatcatcaacgtcatggtggtctccttcagaacactcacggatctccaggtgggcacagagtccacggatcgatattcagaagaactcagatgttttagccacagagagcgatgtgtttgatctttatacagtccaaggaaagctgagctgggctgacatcgggagttacagatctgcaactgaagtggcttcaatgtctgttgaggagaaaaggctcggatatgcttcagatgagttatggagattcaggaacctcgttgaaagacttgccagagtaaatccagcagaactaagccacaacgagaagcttgccttctggatcaacatatacaatgccatgatcatgcatgcatacttggcttacggcgtaccaaaaactgacttaaagctcttctccttgatgcaaaaggctgcttatacagttggtggccattcatacaacgcagcaacgatcgaatacatgactttaaagatgagccctcctctgcatcgtcctcaaattgctctgcttctctccattctcaagctgaaagtatcagacgaacagagacaagcggggataagtacaccggaacctctagtgtcatttgctctcagctgcgggatgcactcatctcctgcggtgagaatatactcagccgagaacgtaggagaagaacttgaagaagctcagaaagattatatccaggcgtcagtgggagtgagcccaaggggaaagttgattgtgccccaaatgcttcactgtttcgccaagaaatctgtcgatgactgcaaggttgctctgtggatttctcgtcatttgcctcctcgccaagctgcatttgttgagcagtgtattcacaggcgacaacggtggggttttctgggttcatctagtagcaaatgcggcatagttccttttgattcacggttccgatatttgtttcttccgtagcaaggcattgattcacaatgatgtgattaaagcaaatactgttccgatcc

SEQ ID NO: 41482 - protein, 412 aa, Arabidopsis thaliana
  peptide (1)..(412): Ceres Seq. ID no. 12738350
  misc_feature (185)..(330): Pfam Name: Protein of unknown function, DUF547 Pfam Description: Protein of unknown function, DUF547
  misc_feature (142)..(410): Homolog of NCBI NO: 15239037 NR Description: putative protein; protein id: At5g42690.1
  misc_feature (90)..(411): Homolog of NCBI NO: 15240016 NR Description: putative protein; protein id: At5g66600.1
  misc_feature (31)..(409): Homolog of NCBI NO: 30690854 NR Description: expressed protein [Arabidopsis thaliana]
  misc_feature (31)..(409): Homolog of NCBI NO: 25407787 NR Description: hypothetical protein AT4g37080 [imported] -
  misc_feature (1)..(36): Homolog of NCBI NO: 22331037 NR Description: hypothetical protein
  misc_feature (3)..(412): Homolog of NCBI NO: 22331037 NR Description: hypothetical protein
  misc_feature (67)..(412): Homolog of NCBI NO: 21618245 NR Description: unknown [Arabidopsis thaliana]
  misc_feature (1)..(22): Homolog of NCBI NO: 25518300 NR Description: hypothetical protein F17F16.4 - Arabidopsis
  misc_feature (52)..(412): Homolog of NCBI NO: 25518300 NR Description: hypothetical protein F17F16.4 - Arabidopsis
  misc_feature (1)..(412): Homolog of NCBI NO: 30684987 NR Description: expressed protein [Arabidopsis thaliana]
LIQERNERKLAEYNLTHSLSPPNALDLVRLSEKNESLRPKDHKAQPRSKVAKSLQSFDNANELSKEMIRCMRNIFVSLGETSAGSKSSQETASVSSRENPPSSSTSWWSPSEHSRISRWAQSPRIDIQKNSDVLATESDVFDLYTVQGKLSWADIGSYRSATEVASMSVEEKRLGYASDELWRFRNLVERLARVNPAELSHNEKLAFWINIYNAMIMHAYLAYGVPKTDLKLFSLMQKAAYTVGGHSYNAATIEYMTLKMSPPLHRPQIALLLSILKLKVSDEQRQAGISTPEPLVSFALSCGMHSSPAVRIYSAENVGEELEEAQKDYIQASVGVSPRGKLIVPQMLHCFAKKSVDDCKVALWISRHLPPRQAAFVEQCIHRRQRWGFLGSSSSKCGIVPFDSRFRYLFLP

SEQ ID NO: 41483 - protein, 346 aa, Arabidopsis thaliana
  peptide (1)..(346): Ceres Seq. ID no. 12738351
  misc_feature (119)..(264): Pfam Name: Protein of unknown function, DUF547 Pfam Description: Protein of unknown function, DUF547
  misc_feature (1)..(346): Homolog of NCBI NO: 34895788 NR Description: P0434B04.9 [Oryza sativa (japonica
  misc_feature (91)..(344): Homolog of NCBI NO: 30695170 NR Description: expressed protein [Arabidopsis thaliana]
  misc_feature (76)..(344): Homolog of NCBI NO: 15239037 NR Description: putative protein; protein id: At5g42690.1
  misc_feature (24)..(345): Homolog of NCBI NO: 15240016 NR Description: putative protein; protein id: At5g66600.1
  misc_feature (1)..(343): Homolog of NCBI NO: 30690854 NR Description: expressed protein [Arabidopsis thaliana]
  misc_feature (1)..(343): Homolog of NCBI NO: 25407787 NR Description: hypothetical protein AT4g37080 [imported] -
  misc_feature (1)..(346): Homolog of NCBI NO: 22331037 NR Description: hypothetical protein
  misc_feature (1)..(346): Homolog of NCBI NO: 21618245 NR Description: unknown [Arabidopsis thaliana]
  misc_feature (1)..(346): Homolog of NCBI NO: 25518300 NR Description: hypothetical protein F17F16.4 - Arabidopsis
  misc_feature (1)..(346): Homolog of NCBI NO: 30684987 NR Description: expressed protein [Arabidopsis thaliana]
MIRCMRNIFVSLGETSAGSKSSQETASVSSRENPPSSSTSWWSPSEHSRISRWAQSPRIDIQKNSDVLATESDVFDLYTVQGKLSWADIGSYRSATEVASMSVEEKRLGYASDELWRFRNLVERLARVNPAELSHNEKLAFWINIYNAMIMHAYLAYGVPKTDLKLFSLMQKAAYTVGGHSYNAATIEYMTLKMSPPLHRPQIALLLSILKLKVSDEQRQAGISTPEPLVSFALSCGMHSSPAVRIYSAENVGEELEEAQKDYIQASVGVSPRGKLIVPQMLHCFAKKSVDDCKVALWISRHLPPRQAAFVEQCIHRRQRWGFLGSSSSKCGIVPFDSRFRYLFLP

SEQ ID NO: 41484 - protein, 342 aa, Arabidopsis thaliana
  peptide (1)..(342): Ceres Seq. ID no. 12738352
  misc_feature (115)..(260): Pfam Name: Protein of unknown function, DUF547 Pfam Description: Protein of unknown function, DUF547
  misc_feature (1)..(342): Homolog of NCBI NO: 34895788 NR Description: P0434B04.9 [Oryza sativa (japonica
  misc_feature (87)..(340): Homolog of NCBI NO: 30695170 NR Description: expressed protein [Arabidopsis thaliana]
  misc_feature (72)..(340): Homolog of NCBI NO: 15239037 NR Description: putative protein; protein id: At5g42690.1
  misc_feature (20)..(341): Homolog of NCBI NO: 15240016 NR Description: putative protein; protein id: At5g66600.1
  misc_feature (1)..(339): Homolog of NCBI NO: 30690854 NR Description: expressed protein [Arabidopsis thaliana]
  misc_feature (1)..(339): Homolog of NCBI NO: 25407787 NR Description: hypothetical protein AT4g37080 [imported] -
  misc_feature (1)..(342): Homolog of NCBI NO: 22331037 NR Description: hypothetical protein
  misc_feature (1)..(342): Homolog of NCBI NO: 21618245 NR Description: unknown [Arabidopsis thaliana]
  misc_feature (1)..(342): Homolog of NCBI NO: 25518300 NR Description: hypothetical protein F17F16.4 - Arabidopsis
  misc_feature (1)..(342): Homolog of NCBI NO: 30684987 NR Description: expressed protein [Arabidopsis thaliana]
MRNIFVSLGETSAGSKSSQETASVSSRENPPSSSTSWWSPSEHSRISRWAQSPRIDIQKNSDVLATESDVFDLYTVQGKLSWADIGSYRSATEVASMSVEEKRLGYASDELWRFRNLVERLARVNPAELSHNEKLAFWINIYNAMIMHAYLAYGVPKTDLKLFSLMQKAAYTVGGHSYNAATIEYMTLKMSPPLHRPQIALLLSILKLKVSDEQRQAGISTPEPLVSFALSCGMHSSPAVRIYSAENVGEELEEAQKDYIQASVGVSPRGKLIVPQMLHCFAKKSVDDCKVALWISRHLPPRQAAFVEQCIHRRQRWGFLGSSSSKCGIVPFDSRFRYLFLP

SEQ ID NO: 41485 - DNA, 1370 bp, Arabidopsis thaliana
  misc_feature (1)..(1370): Ceres Seq. ID no. 12330632
  misc_feature: MA Experiment ID: 108462 Result: Up-regulated in Transcription
  misc_feature: MA Experiment 108462 PARAMETER Experiment Name: At_Germinating_Seeds_cDNA_P Parameter: Age (day) Value: 2 vs. 0
  misc_feature: MA Experiment 108462 PARAMETER Experiment Name: At_Germinating_Seeds_cDNA_P Parameter: Tissue Value: Germinating Seeds
  misc_feature: MA Experiment ID: 108464 Result: Up-regulated in Transcription
  misc_feature: MA Experiment 108464 PARAMETER Experiment Name: At_Germinating_Seeds_cDNA_P Parameter: Age (day) Value: 4 vs. 0
  misc_feature: MA Experiment 108464 PARAMETER Experiment Name: At_Germinating_Seeds_cDNA_P Parameter: Tissue Value: Germinating Seeds
  misc_feature: MA Experiment ID: 20000265 Result: Up-regulated in Transcription
  misc_feature: MA Experiment 20000265 PARAMETER Experiment Name: At_Open_Flower_P Parameter: Age (day) Value: 21
  misc_feature: MA Experiment 20000265 PARAMETER Experiment Name: At_Open_Flower_P Parameter: Plant Line Value: WS
  misc_feature: MA Experiment 20000265 PARAMETER Experiment Name: At_Open_Flower_P Parameter: Tissue Value: Closed Flower vs. Whole Plant
aggaatcacattgatgatcaagagtttatctctggcttctgctcgcatcttcttctctagaacctctccatcttttcttattcccttctcaaagctctctgtatctcatcgtcggaaattctcagtaatggccagtggaagcgacgagttcgtgaaaggaaatgtttatccaaatggcgttgctctcattactcttgatcgacctaaagctctcaacgccatgaatctagaaatggatttgaagtacaaaagcttgcttgatgaatgggaatatgatcctggagtcaaatgtgttgtcgtcgaaggaagcacatctcgggccttttgtgcaggaatggatattaaaggcgttgttgcagagatcctaattgacaaaaatacgtctcttatgcaaaggtatttacatctgagtatagcctgatatgcaagattgctggatacagaaaaccatatatctctttaatggatggcataacaatgggatttggtcttggtctttctggacatggactctaccgagtgataacagagaggacggtcctcgcaatgccagaaaatggaatcggcttgtttccagatgttggattttcatatattgcagctcatagccctggcgaaggatctgttggtgcttacctaggtatgactgggagaaggatttccacaccttcagattcactgtttgtgggtcttgggacacattatgtaccatctggaaagttaggttcactcagagaagccattttgtcagctgacctttccaaggatccccaacaacacatccaagcaactttatcaaattacagcagtgatcctgaaactgagtcccacctccaaatgcttttgcctcagatagaatcagcttttagtgtaagtaagtctgttaaggaaacaatagaagagctgaaaagttccagcagagcagtgaggcttcagttgcagaatgggctaatgaagcagtccaaggcattgaaaaaggggcacctttttctctttacctaacacacaagtacttctccaaagttgcttgtgccaagggtaaaaccaacaacgccatggcaacacttaacggtgtgatgataactgagtaccgcattgctctaagatctgcattgcgcagtgatttcactgaaggtgttagagcagtcttgactgacaaggaccagaatccgaaatggaaaccagcgagcttagacgaagtagatgaaaccgaagtggacgcgctctttatgccattaagtcctgaatttgaagagctaaacgtatgaaccaaacaacagagatattgcttagatcatgaattggtgattattgtgttgcagcttttgaacatatcccatatatttatcaaattttcaagtcgtagattg

SEQ ID NO: 41486 - protein, 179 aa, Arabidopsis thaliana
  peptide (1)..(179): Ceres Seq. ID no. 12330633
  misc_feature (1)..(83): Pfam Name: Enoyl-CoA hydratase/isomerase family Pfam Description: Enoyl-CoA hydratase/isomerase family
  misc_feature (1)..(167): Homolog of NCBI NO: 22122625 NR Description: RIKEN cDNA 2610509I15 [Mus musculus]
  misc_feature (1)..(167): Homolog of NCBI NO: 22968519 NR Description: hypothetical protein [Rhodospirillum rubrum]
  misc_feature (1)..(167): Homolog of NCBI NO: 37594471 NR Description: 3-hydroxyisobutyryl-Coenzyme A hydrolase isoform
  misc_feature (1)..(173): Homolog of NCBI NO: 15239206 NR Description: 3-hydroxyisobutyryl-coenzyme A hydrolase
  misc_feature (1)..(152): Homolog of NCBI NO: 23016278 NR Description: hypothetical protein [Magnetospirillum
  misc_feature (1)..(171): Homolog of NCBI NO: 29655141 NR Description: enoyl-CoA hydratase/isomerase family protein
  misc_feature (1)..(149): Homolog of NCBI NO: 23013936 NR Description: hypothetical protein [Magnetospirillum
  misc_feature (1)..(179): Homolog of NCBI NO: 15230101 NR Description: 3-hydroxyisobutyryl-coenzyme A hydrolase, putative
  misc_feature (1)..(179): Homolog of NCBI NO: 11994698 NR Description: 3-hydroxyisobutyryl-coenzyme A hydrolase-like
  misc_feature (1)..(176): Homolog of NCBI NO: 15235689 NR Description: 3-hydroxyisobutyryl-coenzyme A hydrolase - like
MDGITMGFGLGLSGHGLYRVITERTVLAMPENGIGLFPDVGFSYIAAHSPGEGSVGAYLGMTGRRISTPSDSLFVGLGTHYVPSGKLGSLREAILSADLSKDPQQHIQATLSNYSSDPETESHLQMLLPQIESAFSVSKSVKETIEELKSSSRAVRLQLQNGLMKQSKALKKGHLFLFT

SEQ ID NO: 41487 - protein, 174 aa, Arabidopsis thaliana
  peptide (1)..(174): Ceres Seq. ID no. 12330634
  misc_feature (1)..(78): Pfam Name: Enoyl-CoA hydratase/isomerase family Pfam Description: Enoyl-CoA hydratase/isomerase family
  misc_feature (1)..(162): Homolog of NCBI NO: 22122625 NR Description: RIKEN cDNA 2610509I15 [Mus musculus]
  misc_feature (1)..(162): Homolog of NCBI NO: 22968519 NR Description: hypothetical protein [Rhodospirillum rubrum]
  misc_feature (1)..(162): Homolog of NCBI NO: 37594471 NR Description: 3-hydroxyisobutyryl-Coenzyme A hydrolase isoform
  misc_feature (1)..(168): Homolog of NCBI NO: 15239206 NR Description: 3-hydroxyisobutyryl-coenzyme A hydrolase
  misc_feature (1)..(147): Homolog of NCBI NO: 23016278 NR Description: hypothetical protein [Magnetospirillum
  misc_feature (1)..(166): Homolog of NCBI NO: 29655141 NR Description: enoyl-CoA hydratase/isomerase family protein
  misc_feature (1)..(144): Homolog of NCBI NO: 23013936 NR Description: hypothetical protein [Magnetospirillum
  misc_feature (1)..(174): Homolog of NCBI NO: 15230101 NR Description: 3-hydroxyisobutyryl-coenzyme A hydrolase, putative
  misc_feature (1)..(174): Homolog of NCBI NO: 11994698 NR Description: 3-hydroxyisobutyryl-coenzyme A hydrolase-like
  misc_feature (1)..(171): Homolog of NCBI NO: 15235689 NR Description: 3-hydroxyisobutyryl-coenzyme A hydrolase - like
MGFGLGLSGHGLYRVITERTVLAMPENGIGLFPDVGFSYIAAHSPGEGSVGAYLGMTGRRISTPSDSLFVGLGTHYVPSGKLGSLREAILSADLSKDPQQHIQATLSNYSSDPETESHLQMLLPQIESAFSVSKSVKETIEELKSSSRAVRLQLQNGLMKQSKALKKGHLFLFT

SEQ ID NO: 41488 - protein, 151 aa, Arabidopsis thaliana
  peptide (1)..(151): Ceres Seq. ID no. 12330635
  misc_feature (1)..(55): Pfam Name: Enoyl-CoA hydratase/isomerase family Pfam Description: Enoyl-CoA hydratase/isomerase family
  misc_feature (1)..(139): Homolog of NCBI NO: 22122625 NR Description: RIKEN cDNA 2610509I15 [Mus musculus]
  misc_feature (1)..(139): Homolog of NCBI NO: 22968519 NR Description: hypothetical protein [Rhodospirillum rubrum]
  misc_feature (1)..(139): Homolog of NCBI NO: 37594471 NR Description: 3-hydroxyisobutyryl-Coenzyme A hydrolase isoform
  misc_feature (1)..(145): Homolog of NCBI NO: 15239206 NR Description: 3-hydroxyisobutyryl-coenzyme A hydrolase
  misc_feature (1)..(124): Homolog of NCBI NO: 23016278 NR Description: hypothetical protein [Magnetospirillum
  misc_feature (1)..(143): Homolog of NCBI NO: 29655141 NR Description: enoyl-CoA hydratase/isomerase family protein
  misc_feature (1)..(121): Homolog of NCBI NO: 23013936 NR Description: hypothetical protein [Magnetospirillum
  misc_feature (1)..(151): Homolog of NCBI NO: 15230101 NR Description: 3-hydroxyisobutyryl-coenzyme A hydrolase, putative
  misc_feature (1)..(151): Homolog of NCBI NO: 11994698 NR Description: 3-hydroxyisobutyryl-coenzyme A hydrolase-like
  misc_feature (1)..(148): Homolog of NCBI NO: 15235689 NR Description: 3-hydroxyisobutyryl-coenzyme A hydrolase - like
MPENGIGLFPDVGFSYIAAHSPGEGSVGAYLGMTGRRISTPSDSLFVGLGTHYVPSGKLGSLREAILSADLSKDPQQHIQATLSNYSSDPETESHLQMLLPQIESAFSVSKSVKETIEELKSSSRAVRLQLQNGLMKQSKALKKGHLFLFT

SEQ ID NO: 41489 - DNA, 1951 bp, Arabidopsis thaliana
  misc_feature (1)..(1951): Ceres Seq. ID no. 13491676
  misc_feature: MA Experiment ID: 20000180 Result: Up-regulated in Transcription
  misc_feature: MA Experiment 20000180 PARAMETER Experiment Name: At_Germinating_Seeds_P Parameter: Age (hr) Value: 24 vs. 0
  misc_feature: MA Experiment 20000180 PARAMETER Experiment Name: At_Germinating_Seeds_P Parameter: Tissue Value: Germinating Seeds
  misc_feature: MA Experiment ID: 20000438 Result: Up-regulated in Transcription
  misc_feature: MA Experiment 20000438 PARAMETER Experiment Name: At_Shoots__P Parameter: Age (day) Value: 14
  misc_feature: MA Experiment 20000438 PARAMETER Experiment Name: At_Shoots__P Parameter: Tissue Value: Shoots vs. Whole Plant
  misc_feature: MA Experiment ID: 20000439 Result: Down-regulated in Transcription
  misc_feature: MA Experiment 20000439 PARAMETER Experiment Name: At_Roots__P Parameter: Age (day) Value: 14 vs. 21
  misc_feature: MA Experiment 20000439 PARAMETER Experiment Name: At_Roots__P Parameter: Organism Value: A. thaliana
  misc_feature: MA Experiment 20000439 PARAMETER Experiment Name: At_Roots__P Parameter: Tissue Value: Roots vs. Whole Plant
  misc_feature: MA Experiment ID: 20001248 Result: Down-regulated in Transcription
  misc_feature: MA Experiment 20001248 PARAMETER Experiment Name: At_Far-red-induction_P Parameter: Age (day) Value: 7
  misc_feature: MA Experiment 20001248 PARAMETER Experiment Name: At_Far-red-induction_P Parameter: Light Value: Far-red vs. White
  misc_feature: MA Experiment 20001248 PARAMETER Experiment Name: At_Far-red-induction_P Parameter: Organism Value: A. thaliana
  misc_feature: MA Experiment 20001248 PARAMETER Experiment Name: At_Far-red-induction_P Parameter: Plant Line Value: Columbia
  misc_feature: MA Experiment 20001248 PARAMETER Experiment Name: At_Far-red-induction_P Parameter: Timepoint (hr) Value: 4
  misc_feature: MA Experiment 20001248 PARAMETER Experiment Name: At_Far-red-induction_P Parameter: Tissue Value: Whole Plant
  misc_feature: MA Experiment ID: 20001450 Result: Down-regulated in Transcription
  misc_feature: MA Experiment 20001450 PARAMETER Experiment Name: At_Far-red-induction_P Parameter: Age (day) Value: 7
  misc_feature: MA Experiment 20001450 PARAMETER Experiment Name: At_Far-red-induction_P Parameter: Light Value: Far-red vs. White
  misc_feature: MA Experiment 20001450 PARAMETER Experiment Name: At_Far-red-induction_P Parameter: Organism Value: A. thaliana
  misc_feature: MA Experiment 20001450 PARAMETER Experiment Name: At_Far-red-induction_P Parameter: Plant Line Value: Columbia
  misc_feature: MA Experiment 20001450 PARAMETER Experiment Name: At_Far-red-induction_P Parameter: Timepoint (hr) Value: 8
  misc_feature: MA Experiment 20001450 PARAMETER Experiment Name: At_Far-red-induction_P Parameter: Tissue Value: Whole Plant
atcagttaatcaacgcaacgccgagaagctttttcaggggtttggtgcgttgaatttgtggatcaagaaacaatgcaaattcaatgcaaaaccctaacttttacagtttcttcgattccttgtaacccaaagctaccattcccatcttccctcactttacggtcatggaatccttcattcccgagtttcaggagctccgctgtttccggaccaaagtcatcactgaagctgaacaggtttttaagaaactgtgcaagtacgaatcaggagcttgttgttgatggagaaaccggaaatgggtcgatttcggagctccaaggagatgcagcaaatggttcgatttcgccggtggaagtggaagcagaagtagaagaagtgaaggtagatgatttggcgactcagagcatttggggacagatgaaagagatcgtcatgtttaccggacctgccgcgggattgtggctatgtgggccgttgatgagtctcattgatacggcggtgattggtcaaggaagctcactcgaactcgctgctttaggtcctgctaccgtcatctgtgattatttgtgttatacgttcatgttcctctcagttgcgacttcaaatcttgttgctacctctcttgctcggcaggataaagatgaagtacaacatcagatatcgatcttgcttttcattgggttggcttgtggagtcacgatgatggtgttgacaagactgtttggttcctgggcactaactgcttttacaggggtaaagaatgccgacattgttccagcagctaataaatatgttcagattcgtggtttagcatggccagctgttctcattggatgggttgctcaaagtgcaagtcttggtatgaaagactcatggggacctcttaaggctttggcggttgctagtgcaataaacggtgttggtgatgtggtcttatgcacctttctaggatatggtatagcaggtgcagcttgggcaactatggtgtcacaagttgttgctgcttatatgatgatggacgcattgaacaagaaaggatacagcgcattctcattctgtgttccttctccaagtgaacttttgacgatttttggactcgctgcccctgtctttataactatgatgtcaaaggttttgttctatacgctccttgtgtactttgctacatcaatgggtacaaatatcatagctgctcatcaggttatgcttcagatatataccatgagtacggtttggggggagcctctctctcaaactgcacagtcctttatgcctgagcttttattcggaatcaatcgtaatttgcctaaagctagggtgcttctgaagtcactagttatcatcggagctacgctaggaatagtagtcggaaccattggcacagcagttccatggctgttccctggcatcttcacacgtgacaaggttgtcacatccgagatgcacaaggtcataataccgtattttcttgctttatccatcactccaagtactcacagtcttgaaggcaccttactggctggaagagatcttagatatatcagcttgtcaatgactggatgcttagcggtcgctgggcttctacttatgcttctgagcaatggaggatttggtttgagaggctgctggtatgctctcgtgggattccaatgggctcggttttctctatctcttttccgccttctatcgcgggatggtgtactgtactccgaagatacaagccgatacgctgagaaagtgaaagctgcgtagctcagtaagtcaccgtatacctcacaagaaaaagtataatgaacagagaacagcttcattcagttgtagatcaatgggttactctgtttcaagattgtattctttaagaacatgaaaatgtattcgactgaatagaaaagtcttggcattaataggccctgcttcaactcctgtgattcccctgtatataaaagatgat

SEQ ID NO: 41490 - protein, 559 aa, Arabidopsis thaliana
  peptide (1)..(559): Ceres Seq. ID no. 13491677
  misc_feature (130)..(288): Pfam Name: MatE Pfam Description: MatE
  misc_feature (117)..(209): Homolog of NCBI NO: 15231918 NR Description: MATE efflux protein family [Arabidopsis thaliana]
  misc_feature (197)..(542): Homolog of NCBI NO: 15231918 NR Description: MATE efflux protein family [Arabidopsis thaliana]
  misc_feature (117)..(542): Homolog of NCBI NO: 29830828 NR Description: putative DNA-damage-inducible protein F
  misc_feature (18)..(309): Homolog of NCBI NO: 25412030 NR Description: hypothetical protein At2g21340 [imported] -
  misc_feature (225)..(458): Homolog of NCBI NO: 25412030 NR Description: hypothetical protein At2g21340 [imported] -
  misc_feature (93)..(469): Homolog of NCBI NO: 7485793 NR Description: hypothetical protein F19H22.130 - Arabidopsis
  misc_feature (93)..(558): Homolog of NCBI NO: 22329250 NR Description: enhanced disease susceptibility 5 (Eds5)
  misc_feature (18)..(559): Homolog of NCBI NO: 21554183 NR Description: enhanced disease susceptibility 5 [Arabidopsis
  misc_feature (18)..(559): Homolog of NCBI NO: 18399664 NR Description: enhanced disease susceptibility 5 (Eds5)
  misc_feature (1)..(559): Homolog of NCBI NO: 17065002 NR Description: Unknown protein [Arabidopsis thaliana]
MQIQCKTLTFTVSSIPCNPKLPFPSSLTLRSWNPSFPSFRSSAVSGPKSSLKLNRFLRNCASTNQELVVDGETGNGSISELQGDAANGSISPVEVEAEVEEVKVDDLATQSIWGQMKEIVMFTGPAAGLWLCGPLMSLIDTAVIGQGSSLELAALGPATVICDYLCYTFMFLSVATSNLVATSLARQDKDEVQHQISILLFIGLACGVTMMVLTRLFGSWALTAFTGVKNADIVPAANKYVQIRGLAWPAVLIGWVAQSASLGMKDSWGPLKALAVASAINGVGDVVLCTFLGYGIAGAAWATMVSQVVAAYMMMDALNKKGYSAFSFCVPSPSELLTIFGLAAPVFITMMSKVLFYTLLVYFATSMGTNIIAAHQVMLQIYTMSTVWGEPLSQTAQSFMPELLFGINRNLPKARVLLKSLVIIGATLGIVVGTIGTAVPWLFPGIFTRDKVVTSEMHKVIIPYFLALSITPSTHSLEGTLLAGRDLRYISLSMTGCLAVAGLLLMLLSNGGFGLRGCWYALVGFQWARFSLSLFRLLSRDGVLYSEDTSRYAEKVKAA

SEQ ID NO: 41491 - protein, 444 aa, Arabidopsis thaliana
  peptide (1)..(444): Ceres Seq. ID no. 13491678
  misc_feature (15)..(173): Pfam Name: MatE Pfam Description: MatE
  misc_feature (2)..(94): Homolog of NCBI NO: 15231918 NR Description: MATE efflux protein family [Arabidopsis thaliana]
  misc_feature (82)..(427): Homolog of NCBI NO: 15231918 NR Description: MATE efflux protein family [Arabidopsis thaliana]
  misc_feature (2)..(427): Homolog of NCBI NO: 29830828 NR Description: putative DNA-damage-inducible protein F
  misc_feature (1)..(194): Homolog of NCBI NO: 25412030 NR Description: hypothetical protein At2g21340 [imported] -
  misc_feature (110)..(343): Homolog of NCBI NO: 25412030 NR Description: hypothetical protein At2g21340 [imported] -
  misc_feature (1)..(354): Homolog of NCBI NO: 7485793 NR Description: hypothetical protein F19H22.130 - Arabidopsis
  misc_feature (1)..(443): Homolog of NCBI NO: 22329250 NR Description: enhanced disease susceptibility 5 (Eds5)
  misc_feature (1)..(444): Homolog of NCBI NO: 21554183 NR Description: enhanced disease susceptibility 5 [Arabidopsis
  misc_feature (1)..(444): Homolog of NCBI NO: 18399664 NR Description: enhanced disease susceptibility 5 (Eds5)
  misc_feature (1)..(444): Homolog of NCBI NO: 17065002 NR Description: Unknown protein [Arabidopsis thaliana]
MKEIVMFTGPAAGLWLCGPLMSLIDTAVIGQGSSLELAALGPATVICDYLCYTFMFLSVATSNLVATSLARQDKDEVQHQISILLFIGLACGVTMMVLTRLFGSWALTAFTGVKNADIVPAANKYVQIRGLAWPAVLIGWVAQSASLGMKDSWGPLKALAVASAINGVGDVVLCTFLGYGIAGAAWATMVSQVVAAYMMMDALNKKGYSAFSFCVPSPSELLTIFGLAAPVFITMMSKVLFYTLLVYFATSMGTNIIAAHQVMLQIYTMSTVWGEPLSQTAQSFMPELLFGINRNLPKARVLLKSLVIIGATLGIVVGTIGTAVPWLFPGIFTRDKVVTSEMHKVIIPYFLALSITPSTHSLEGTLLAGRDLRYISLSMTGCLAVAGLLLMLLSNGGFGLRGCWYALVGFQWARFSLSLFRLLSRDGVLYSEDTSRYAEKVKAA

SEQ ID NO: 41492 - protein, 439 aa, Arabidopsis thaliana
  peptide (1)..(439): Ceres Seq. ID no. 13491679
  misc_feature (10)..(168): Pfam Name: MatE Pfam Description: MatE
  misc_feature (1)..(89): Homolog of NCBI NO: 15231918 NR Description: MATE efflux protein family [Arabidopsis thaliana]
  misc_feature (77)..(422): Homolog of NCBI NO: 15231918 NR Description: MATE efflux protein family [Arabidopsis thaliana]
  misc_feature (1)..(422): Homolog of NCBI NO: 29830828 NR Description: putative DNA-damage-inducible protein F
  misc_feature (1)..(189): Homolog of NCBI NO: 25412030 NR Description: hypothetical protein At2g21340 [imported] -
  misc_feature (105)..(338): Homolog of NCBI NO: 25412030 NR Description: hypothetical protein At2g21340 [imported] -
  misc_feature (1)..(349): Homolog of NCBI NO: 7485793 NR Description: hypothetical protein F19H22.130 - Arabidopsis
  misc_feature (1)..(438): Homolog of NCBI NO: 22329250 NR Description: enhanced disease susceptibility 5 (Eds5)
  misc_feature (1)..(439): Homolog of NCBI NO: 21554183 NR Description: enhanced disease susceptibility 5 [Arabidopsis
  misc_feature (1)..(439): Homolog of NCBI NO: 18399664 NR Description: enhanced disease susceptibility 5 (Eds5)
  misc_feature (1)..(439): Homolog of NCBI NO: 17065002 NR Description: Unknown protein [Arabidopsis thaliana]
MFTGPAAGLWLCGPLMSLIDTAVIGQGSSLELAALGPATVICDYLCYTFMFLSVATSNLVATSLARQDKDEVQHQISILLFIGLACGVTMMVLTRLFGSWALTAFTGVKNADIVPAANKYVQIRGLAWPAVLIGWVAQSASLGMKDSWGPLKALAVASAINGVGDVVLCTFLGYGIAGAAWATMVSQVVAAYMMMDALNKKGYSAFSFCVPSPSELLTIFGLAAPVFITMMSKVLFYTLLVYFATSMGTNIIAAHQVMLQIYTMSTVWGEPLSQTAQSFMPELLFGINRNLPKARVLLKSLVIIGATLGIVVGTIGTAVPWLFPGIFTRDKVVTSEMHKVIIPYFLALSITPSTHSLEGTLLAGRDLRYISLSMTGCLAVAGLLLMLLSNGGFGLRGCWYALVGFQWARFSLSLFRLLSRDGVLYSEDTSRYAEKVKAA

SEQ ID NO: 41493 - DNA, 1204 bp, Arabidopsis thaliana
  misc_feature (1)..(1204): Ceres Seq. ID no. 12325916
  misc_feature: MA Experiment ID: 108463 Result: Up-regulated in Transcription
  misc_feature: MA Experiment 108463 PARAMETER Experiment Name: At_Germinating_Seeds_cDNA_P Parameter: Age (day) Value: 3 vs. 0
  misc_feature: MA Experiment 108463 PARAMETER Experiment Name: At_Germinating_Seeds_cDNA_P Parameter: Tissue Value: Germinating Seeds
  misc_feature: MA Experiment ID: 108561 Result: Up-regulated in Transcription
  misc_feature: MA Experiment 108561 PARAMETER Experiment Name: At_100uM_ABA_cDNA_P Parameter: Timepoint (hr) Value: 6
  misc_feature: MA Experiment 108561 PARAMETER Experiment Name: At_100uM_ABA_cDNA_P Parameter: Tissue Value: Aerial
  misc_feature: MA Experiment 108561 PARAMETER Experiment Name: At_100uM_ABA_cDNA_P Parameter: Treatment Value: 100uM ABA vs. No Treatment
  misc_feature: MA Experiment ID: 108572 Result: Up-regulated in Transcription
  misc_feature: MA Experiment 108572 PARAMETER Experiment Name: At_Drought_cDNA_P Parameter: Timepoint (hr) Value: 1
  misc_feature: MA Experiment 108572 PARAMETER Experiment Name: At_Drought_cDNA_P Parameter: Tissue Value: Aerial
  misc_feature: MA Experiment 108572 PARAMETER Experiment Name: At_Drought_cDNA_P Parameter: Treatment Value: Drought vs. No Drought
  misc_feature: MA Experiment ID: 108574 Result: Up-regulated in Transcription
  misc_feature: MA Experiment 108574 PARAMETER Experiment Name: At_Wounding__cDNA_P Parameter: Timepoint (hr) Value: 1
  misc_feature: MA Experiment 108574 PARAMETER Experiment Name: At_Wounding__cDNA_P Parameter: Tissue Value: Aerial
  misc_feature: MA Experiment 108574 PARAMETER Experiment Name: At_Wounding__cDNA_P Parameter: Treatment Value: Wounding vs. No Wounding
  misc_feature: MA Experiment ID: 108579 Result: Up-regulated in Transcription
  misc_feature: MA Experiment 108579 PARAMETER Experiment Name: At_4deg_Cold_cDNA_P Parameter: Temperature (deg C) Value: 4 vs. 22
  misc_feature: MA Experiment 108579 PARAMETER Experiment Name: At_4deg_Cold_cDNA_P Parameter: Timepoint (hr) Value: 6
  misc_feature: MA Experiment 108579 PARAMETER Experiment Name: At_4deg_Cold_cDNA_P Parameter: Tissue Value: Aerial
  misc_feature: MA Experiment ID: 108605 Result: Up-regulated in Transcription
  misc_feature: MA Experiment 108605 PARAMETER Experiment Name: At_100uM_ABA_cDNA_P Parameter: Timepoint (hr) Value: 6
  misc_feature: MA Experiment 108605 PARAMETER Experiment Name: At_100uM_ABA_cDNA_P Parameter: Tissue Value: Aerial
  misc_feature: MA Experiment 108605 PARAMETER Experiment Name: At_100uM_ABA_cDNA_P Parameter: Treatment Value: 100uM ABA vs. No Treatment
  misc_feature: MA Experiment ID: 108607 Result: Up-regulated in Transcription
  misc_feature: MA Experiment 108607 PARAMETER Experiment Name: At_100uM_ABA_cDNA_P Parameter: Timepoint (hr) Value: 4
  misc_feature: MA Experiment 108607 PARAMETER Experiment Name: At_100uM_ABA_cDNA_P Parameter: Tissue Value: Aerial
  misc_feature: MA Experiment 108607 PARAMETER Experiment Name: At_100uM_ABA_cDNA_P Parameter: Treatment Value: 100uM ABA vs. No Treatment
  misc_feature: MA Experiment ID: 20000069 Result: Up-regulated in Transcription
  misc_feature: MA Experiment 20000069 PARAMETER Experiment Name: At_100uM_ABA_Mutants_cDNA_P Parameter: Plant Line Value: CS23
  misc_feature: MA Experiment 20000069 PARAMETER Experiment Name: At_100uM_ABA_Mutants_cDNA_P Parameter: Timepoint (hr) Value: 6
  misc_feature: MA Experiment 20000069 PARAMETER Experiment Name: At_100uM_ABA_Mutants_cDNA_P Parameter: Tissue Value: Aerial
  misc_feature: MA Experiment 20000069 PARAMETER Experiment Name: At_100uM_ABA_Mutants_cDNA_P Parameter: Treatment Value: 100uM ABA vs. No Treatment
  misc_feature: MA Experiment ID: 20000072 Result: Up-regulated in Transcription
  misc_feature: MA Experiment 20000072 PARAMETER Experiment Name: At_100uM_ABA_Mutants_cDNA_P Parameter: Plant Line Value: CS8105
  misc_feature: MA Experiment 20000072 PARAMETER Experiment Name: At_100uM_ABA_Mutants_cDNA_P Parameter: Timepoint (hr) Value: 6
  misc_feature: MA Experiment 20000072 PARAMETER Experiment Name: At_100uM_ABA_Mutants_cDNA_P Parameter: Tissue Value: Aerial
  misc_feature: MA Experiment 20000072 PARAMETER Experiment Name: At_100uM_ABA_Mutants_cDNA_P Parameter: Treatment Value: 100uM ABA vs. No Treatment
  misc_feature: MA Experiment ID: 20000117 Result: Up-regulated in Transcription
  misc_feature: MA Experiment 20000117 PARAMETER Experiment Name: At_100uM_ABA_Mutants_cDNA_P Parameter: Plant Line Value: Columbia
  misc_feature: MA Experiment 20000117 PARAMETER Experiment Name: At_100uM_ABA_Mutants_cDNA_P Parameter: Timepoint (hr) Value: 6
  misc_feature: MA Experiment 20000117 PARAMETER Experiment Name: At_100uM_ABA_Mutants_cDNA_P Parameter: Tissue Value: Aerial
  misc_feature: MA Experiment 20000117 PARAMETER Experiment Name: At_100uM_ABA_Mutants_cDNA_P Parameter: Treatment Value: 100uM ABA vs. No Treatment
agattatctacctgttgtcttgggattaactaaagatggtagccatctacagtttaaagtgcaatttaattgggtaaatcaggaggatgaggaagaggaaacagagatgtcaaacgtttggtatgaagttttatctgttttgcatctaatggcaatgctacaaatgtctcaagccaatttactgcttcttcctagaggttctagtgatggtcacaatcatccgaaagtatccgaagaaaacagacgaacttcgattgatatcttcttaaaagcagctggatatcttgattgtgccgttaagcatgttctcccccagttttctgctgagcaaaggagaagtttaccagttgacttagcagaaggaactctacgggctctttgcttgcaaggcacttggccagggtgttgatatccaacttggcatggcgattgatagctcaaaggccactcttgcagtaaaacgaagactttcatgtgaaatggtgaaatattggcagcaggcacaagataatttaatgaatctcccgttagcaaatggttggggagaaaagcatggactctttgttaagtggaagtatgttgaagctaaggctgcggcttactactatcatggtttgattcttgatgaaggaaacacagagaagtcacatggcatggcagttgctgctttacaagctgcagatgaatgtttcaaagaaagtaagaaagcatccgaagcattcaacgcctctgcgcctacttcaagaacaccgcccctctttggaacaatgaaatatctaactgagaaaatcccgaaagatacttcgagtaaagtcaggataaaccgtgatctatactcttatgaaaaaatcatggagacagcaccaacacttcctgatttcgctttggcattgaaaccagatgagtatcaacttccactcgccgaagcttcgtagtctgaagatgctcaaagcgcttcgaaccaactttaaggagcaaacgaagagagagagagagatgtgtaaaccttgtatagccaaaaaatcagtggtttccaatggctgcctgcaaattatggtatggctatagaatttacccaacaggtttctatactgtgtgagaaaaaacacttatcaaaattgggtttggatcagtttacatgagagagatctttgtatgttaatgtactaatatatttcttcaataaagcattatttttttccct

SEQ ID NO: 41494 - protein, 170 aa, Arabidopsis thaliana
  peptide (1)..(170): Ceres Seq. ID no. 12325917
  misc_feature (1)..(168): Homolog of NCBI NO: 30684716 NR Description: expressed protein [Arabidopsis thaliana]
  misc_feature (1)..(165): Homolog of NCBI NO: 38344447 NR Description: OSJNBa0038O10.19 [Oryza sativa (japonica
  misc_feature (1)..(170): Homolog of NCBI NO: 15220908 NR Description: hypothetical protein; protein id: At1g17940.1
  misc_feature (1)..(170): Homolog of NCBI NO: 15219459 NR Description: hypothetical protein
  misc_feature (1)..(170): Homolog of NCBI NO: 25372891 NR Description: protein F2H15.16 [imported] - Arabidopsis
MAIDSSKATLAVKRRLSCEMVKYWQQAQDNLMNLPLANGWGEKHGLFVKWKYVEAKAAAYYYHGLILDEGNTEKSHGMAVAALQAADECFKESKKASEAFNASAPTSRTPPLFGTMKYLTEKIPKDTSSKVRINRDLYSYEKIMETAPTLPDFALALKPDEYQLPLAEAS

SEQ ID NO: 41495 - protein, 151 aa, Arabidopsis thaliana
  peptide (1)..(151): Ceres Seq. ID no. 12325918
  misc_feature (1)..(149): Homolog of NCBI NO: 30684716 NR Description: expressed protein [Arabidopsis thaliana]
  misc_feature (1)..(146): Homolog of NCBI NO: 38344447 NR Description: OSJNBa0038O10.19 [Oryza sativa (japonica
  misc_feature (1)..(151): Homolog of NCBI NO: 15220908 NR Description: hypothetical protein; protein id: At1g17940.1
  misc_feature (1)..(151): Homolog of NCBI NO: 15219459 NR Description: hypothetical protein
  misc_feature (1)..(151): Homolog of NCBI NO: 25372891 NR Description: protein F2H15.16 [imported] - Arabidopsis
MVKYWQQAQDNLMNLPLANGWGEKHGLFVKWKYVEAKAAAYYYHGLILDEGNTEKSHGMAVAALQAADECFKESKKASEAFNASAPTSRTPPLFGTMKYLTEKIPKDTSSKVRINRDLYSYEKIMETAPTLPDFALALKPDEYQLPLAEAS

SEQ ID NO: 41496 - protein, 139 aa, Arabidopsis thaliana
  peptide (1)..(139): Ceres Seq. ID no. 12325919
  misc_feature (1)..(137): Homolog of NCBI NO: 30684716 NR Description: expressed protein [Arabidopsis thaliana]
  misc_feature (1)..(134): Homolog of NCBI NO: 38344447 NR Description: OSJNBa0038O10.19 [Oryza sativa (japonica
  misc_feature (1)..(139): Homolog of NCBI NO: 15220908 NR Description: hypothetical protein; protein id: At1g17940.1
  misc_feature (1)..(139): Homolog of NCBI NO: 15219459 NR Description: hypothetical protein
  misc_feature (1)..(139): Homolog of NCBI NO: 25372891 NR Description: protein F2H15.16 [imported] - Arabidopsis
MNLPLANGWGEKHGLFVKWKYVEAKAAAYYYHGLILDEGNTEKSHGMAVAALQAADECFKESKKASEAFNASAPTSRTPPLFGTMKYLTEKIPKDTSSKVRINRDLYSYEKIMETAPTLPDFALALKPDEYQLPLAEAS

SEQ ID NO: 41497 - DNA, 1436 bp, Arabidopsis thaliana
  misc_feature (1)..(1436): Ceres Seq. ID no. 12330644
  misc_feature: MA Experiment ID: 108434 Result: Up-regulated in Transcription
  misc_feature: MA Experiment 108434 PARAMETER Experiment Name: At_Root_Tips_cDNA_P Parameter: Tissue Value: Root Tips
  misc_feature: MA Experiment ID: 108461 Result: Up-regulated in Transcription
  misc_feature: MA Experiment 108461 PARAMETER Experiment Name: At_Germinating_Seeds_cDNA_P Parameter: Age (day) Value: 1 vs. 0
  misc_feature: MA Experiment 108461 PARAMETER Experiment Name: At_Germinating_Seeds_cDNA_P Parameter: Tissue Value: Germinating Seeds
  misc_feature: MA Experiment ID: 20000111 Result: Up-regulated in Transcription
  misc_feature: MA Experiment 20000111 PARAMETER Experiment Name: At_42deg_Heat_cDNA_P Parameter: Temperature (deg C) Value: 42 vs. 22
  misc_feature: MA Experiment 20000111 PARAMETER Experiment Name: At_42deg_Heat_cDNA_P Parameter: Timepoint (hr) Value: 6
  misc_feature: MA Experiment 20000111 PARAMETER Experiment Name: At_42deg_Heat_cDNA_P Parameter: Tissue Value: Aerial
  misc_feature: MA Experiment ID: 20000180 Result: Up-regulated in Transcription
  misc_feature: MA Experiment 20000180 PARAMETER Experiment Name: At_Germinating_Seeds_P Parameter: Age (hr) Value: 24 vs. 0
  misc_feature: MA Experiment 20000180 PARAMETER Experiment Name: At_Germinating_Seeds_P Parameter: Tissue Value: Germinating Seeds
  misc_feature: MA Experiment ID: 20000227 Result: Up-regulated in Transcription
  misc_feature: MA Experiment 20000227 PARAMETER Experiment Name: At_Root-Tips-vs-Tops_P Parameter: Tissue Value: Root Tips vs. Root Tops
  misc_feature: MA Experiment ID: 20001757 Result: Down-regulated in Transcription
  misc_feature: MA Experiment 20001757 PARAMETER Experiment Name: At_50mM_NH4NO3_L-to-H_P Parameter: Timepoint (hr) Value: 6
  misc_feature: MA Experiment 20001757 PARAMETER Experiment Name: At_50mM_NH4NO3_L-to-H_P Parameter: Tissue Value: Leaf
  misc_feature: MA Experiment 20001757 PARAMETER Experiment Name: At_50mM_NH4NO3_L-to-H_P Parameter: Treatment Value: 50mM NH4NO3 vs 100mM Mannitol
  misc_feature: MA Experiment ID: 20001905 Result: Down-regulated in Transcription
  misc_feature: MA Experiment 20001905 PARAMETER Experiment Name: At_Drought_Reproduction_P Parameter: Age (day) Value: 40
  misc_feature: MA Experiment 20001905 PARAMETER Experiment Name: At_Drought_Reproduction_P Parameter: Organism Value: A. thaliana
  misc_feature: MA Experiment 20001905 PARAMETER Experiment Name: At_Drought_Reproduction_P Parameter: Plant Line Value: WS
  misc_feature: MA Experiment 20001905 PARAMETER Experiment Name: At_Drought_Reproduction_P Parameter: Timepoint (day) Value: 10
  misc_feature: MA Experiment 20001905 PARAMETER Experiment Name: At_Drought_Reproduction_P Parameter: Tissue Value: Rosettes
  misc_feature: MA Experiment 20001905 PARAMETER Experiment Name: At_Drought_Reproduction_P Parameter: Treatment Value: Drought vs. No Drought
atttaggttcataggccagtgagtctctctctctctatctctaaaagaaagagaagcaaaaaagtaaggaatgtttcctcgcaatcatcatcatcatcaccatcttcgtcttcttctttgaaacctccagcgacttcctcgtagttctctcacttatacacttactaatacagagtaacagagagagacagagtggactcttcttagagtaagatgggaggtgtgacttcttcaatggcggcgaagttggcgttttttcctccgaatccgccgtcgtacaagctggtcagagatgaaacaacggagctttttctaatgagcccttttccccatcgagaaaatgtcgacattttgcggctgcccacgcgccgaggcaccgaaatcgtggccatgtacatcagatacccaatggccgtcaccacccttctctactctcatggaaatgctgccgacatcggtcagatgtatgagctcttcatcgagctcagtattcacctccgcgtcaatttgatggggtatgactattcagggtatggccaatcatcagggaagcccacagaacaaaacacttatgctgatatcgaggctgcttacaaatgtctggaagagaattatggggctaagcaggagaacattattctctatggtcaatctgttggtagtggtccaaccgtggacctagctgctcgtttgcctcgactaagagcttccattcttcatagtccaattctttctgggcttagagttatgtatcccgttaagcgaacttattggtttgacatatacaagaacattgacaaaattacgctggtgaggtgtcctgtcctcgtgattcatggaacagcggatgatgtggttgacttctctcatgggaagcagctttgggaactctgccaagagaaatatgaaccgctatggctcaaaggtggaaaccattgtgatcttgaactctttcccgaatacataggccatctcaagaagtttgtgagcgctgtggagaaatctgcatcgaaaagaaacagttctttctcaagaagaagcatggaagggtgtgaacaacctcctcgtcatagtgtagatgctccaaggaagagtaaggacggacgagaaaaaccgaggaaaagcatagacagactaaggttccagggatacaagttgagccacatagagaaaccggagaagctgaaggttccatttgaagaaatggagaggtcaaggagaagcgtggacatatacagagataagtctcagccgatggagagagcacgtaagagtgtggattggttggacagaagtcgagctaccgaatgaaaatggagggtttgatgtcaaaagattgtatttgagtgtcgttcaatttattggggtatgtgtttgtattgtagtttgtatgccaagttaaaatacaacaggaagatagatttaaacaaagtatg

SEQ ID NO: 41498 - protein, 365 aa, Arabidopsis thaliana
  peptide (1)..(365): Ceres Seq. ID no. 12330645
  misc_feature (100)..(168): Pfam Name: alpha/beta hydrolase fold Pfam Description: alpha/beta hydrolase fold
  misc_feature (1)..(338): Homolog of NCBI NO: 9802758 NR Description: Hypothetical protein [Arabidopsis thaliana]
  misc_feature (1)..(267): Homolog of NCBI NO: 22330474 NR Description: hypothetical protein
  misc_feature (1)..(338): Homolog of NCBI NO: 10177798 NR Description: emb|CAB87778.1~gene_id:MXA21.9~strong similarity
  misc_feature (1)..(30): Homolog of NCBI NO: 34911338 NR Description: P0519D04.38 [Oryza sativa (japonica
  misc_feature (19)..(336): Homolog of NCBI NO: 34911338 NR Description: P0519D04.38 [Oryza sativa (japonica
  misc_feature (1)..(356): Homolog of NCBI NO: 15230760 NR Description: unknown protein; protein id: At3g30380.1
  misc_feature (1)..(230): Homolog of NCBI NO: 18175921 NR Description: unknown protein [Arabidopsis thaliana]
  misc_feature (1)..(363): Homolog of NCBI NO: 15232168 NR Description: unknown protein; protein id: At3g01690.1
  misc_feature (1)..(363): Homolog of NCBI NO: 15241394 NR Description: putative protein
  misc_feature (1)..(365): Homolog of NCBI NO: 15233975 NR Description: putative protein
MGGVTSSMAAKLAFFPPNPPSYKLVRDETTELFLMSPFPHRENVDILRLPTRRGTEIVAMYIRYPMAVTTLLYSHGNAADIGQMYELFIELSIHLRVNLMGYDYSGYGQSSGKPTEQNTYADIEAAYKCLEENYGAKQENIILYGQSVGSGPTVDLAARLPRLRASILHSPILSGLRVMYPVKRTYWFDIYKNIDKITLVRCPVLVIHGTADDVVDFSHGKQLWELCQEKYEPLWLKGGNHCDLELFPEYIGHLKKFVSAVEKSASKRNSSFSRRSMEGCEQPPRHSVDAPRKSKDGREKPRKSIDRLRFQGYKLSHIEKPEKLKVPFEEMERSRRSVDIYRDKSQPMERARKSVDWLDRSRATE

SEQ ID NO: 41499 - protein, 358 aa, Arabidopsis thaliana
  peptide (1)..(358): Ceres Seq. ID no. 12330646
  misc_feature (93)..(161): Pfam Name: alpha/beta hydrolase fold Pfam Description: alpha/beta hydrolase fold
  misc_feature (1)..(331): Homolog of NCBI NO: 9802758 NR Description: Hypothetical protein [Arabidopsis thaliana]
  misc_feature (1)..(260): Homolog of NCBI NO: 22330474 NR Description: hypothetical protein
  misc_feature (1)..(331): Homolog of NCBI NO: 10177798 NR Description: emb|CAB87778.1~gene_id:MXA21.9~strong similarity
  misc_feature (1)..(23): Homolog of NCBI NO: 34911338 NR Description: P0519D04.38 [Oryza sativa (japonica
  misc_feature (12)..(329): Homolog of NCBI NO: 34911338 NR Description: P0519D04.38 [Oryza sativa (japonica
  misc_feature (1)..(349): Homolog of NCBI NO: 15230760 NR Description: unknown protein; protein id: At3g30380.1
  misc_feature (1)..(223): Homolog of NCBI NO: 18175921 NR Description: unknown protein [Arabidopsis thaliana]
  misc_feature (1)..(356): Homolog of NCBI NO: 15232168 NR Description: unknown protein; protein id: At3g01690.1
  misc_feature (1)..(356): Homolog of NCBI NO: 15241394 NR Description: putative protein
  misc_feature (1)..(358): Homolog of NCBI NO: 15233975 NR Description: putative protein
MAAKLAFFPPNPPSYKLVRDETTELFLMSPFPHRENVDILRLPTRRGTEIVAMYIRYPMAVTTLLYSHGNAADIGQMYELFIELSIHLRVNLMGYDYSGYGQSSGKPTEQNTYADIEAAYKCLEENYGAKQENIILYGQSVGSGPTVDLAARLPRLRASILHSPILSGLRVMYPVKRTYWFDIYKNIDKITLVRCPVLVIHGTADDVVDFSHGKQLWELCQEKYEPLWLKGGNHCDLELFPEYIGHLKKFVSAVEKSASKRNSSFSRRSMEGCEQPPRHSVDAPRKSKDGREKPRKSIDRLRFQGYKLSHIEKPEKLKVPFEEMERSRRSVDIYRDKSQPMERARKSVDWLDRSRATE

SEQ ID NO: 41500 - protein, 331 aa, Arabidopsis thaliana
  peptide (1)..(331): Ceres Seq. ID no. 12330647
  misc_feature (66)..(134): Pfam Name: alpha/beta hydrolase fold Pfam Description: alpha/beta hydrolase fold
  misc_feature (1)..(297): Homolog of NCBI NO: 25352159 NR Description: F21F23.4 protein - Arabidopsis thaliana
  misc_feature (1)..(304): Homolog of NCBI NO: 9802758 NR Description: Hypothetical protein [Arabidopsis thaliana]
  misc_feature (1)..(233): Homolog of NCBI NO: 22330474 NR Description: hypothetical protein
  misc_feature (1)..(304): Homolog of NCBI NO: 10177798 NR Description: emb|CAB87778.1~gene_id:MXA21.9~strong similarity
  misc_feature (1)..(302): Homolog of NCBI NO: 34911338 NR Description: P0519D04.38 [Oryza sativa (japonica
  misc_feature (1)..(322): Homolog of NCBI NO: 15230760 NR Description: unknown protein; protein id: At3g30380.1
  misc_feature (1)..(196): Homolog of NCBI NO: 18175921 NR Description: unknown protein [Arabidopsis thaliana]
  misc_feature (1)..(329): Homolog of NCBI NO: 15232168 NR Description: unknown protein; protein id: At3g01690.1
  misc_feature (1)..(329): Homolog of NCBI NO: 15241394 NR Description: putative protein
  misc_feature (1)..(331): Homolog of NCBI NO: 15233975 NR Description: putative protein
MSPFPHRENVDILRLPTRRGTEIVAMYIRYPMAVTTLLYSHGNAADIGQMYELFIELSIHLRVNLMGYDYSGYGQSSGKPTEQNTYADIEAAYKCLEENYGAKQENIILYGQSVGSGPTVDLAARLPRLRASILHSPILSGLRVMYPVKRTYWFDIYKNIDKITLVRCPVLVIHGTADDVVDFSHGKQLWELCQEKYEPLWLKGGNHCDLELFPEYIGHLKKFVSAVEKSASKRNSSFSRRSMEGCEQPPRHSVDAPRKSKDGREKPRKSIDRLRFQGYKLSHIEKPEKLKVPFEEMERSRRSVDIYRDKSQPMERARKSVDWLDRSRATE

SEQ ID NO: 41501 - DNA, 1260 bp, Arabidopsis thaliana
  misc_feature (1)..(1260): Ceres Seq. ID no. 13499913
  misc_feature: MA Experiment ID: 108461 Result: Down-regulated in Transcription
  misc_feature: MA Experiment 108461 PARAMETER Experiment Name: At_Germinating_Seeds_cDNA_P Parameter: Age (day) Value: 1 vs. 0
  misc_feature: MA Experiment 108461 PARAMETER Experiment Name: At_Germinating_Seeds_cDNA_P Parameter: Tissue Value: Germinating Seeds
  misc_feature: MA Experiment ID: 108462 Result: Down-regulated in Transcription
  misc_feature: MA Experiment 108462 PARAMETER Experiment Name: At_Germinating_Seeds_cDNA_P Parameter: Age (day) Value: 2 vs. 0
  misc_feature: MA Experiment 108462 PARAMETER Experiment Name: At_Germinating_Seeds_cDNA_P Parameter: Tissue Value: Germinating Seeds
  misc_feature: MA Experiment ID: 108463 Result: Down-regulated in Transcription
  misc_feature: MA Experiment 108463 PARAMETER Experiment Name: At_Germinating_Seeds_cDNA_P Parameter: Age (day) Value: 3 vs. 0
  misc_feature: MA Experiment 108463 PARAMETER Experiment Name: At_Germinating_Seeds_cDNA_P Parameter: Tissue Value: Germinating Seeds
  misc_feature: MA Experiment ID: 108473 Result: Up-regulated in Transcription
  misc_feature: MA Experiment 108473 PARAMETER Experiment Name: At_Drought_Flowers_cDNA_P Parameter: Timepoint (hr) Value: 7 d
  misc_feature: MA Experiment 108473 PARAMETER Experiment Name: At_Drought_Flowers_cDNA_P Parameter: Tissue Value: Flower
  misc_feature: MA Experiment 108473 PARAMETER Experiment Name: At_Drought_Flowers_cDNA_P Parameter: Treatment Value: Drought vs. No Drought
  misc_feature: MA Experiment ID: 108489 Result: Down-regulated in Transcription
  misc_feature: MA Experiment ID: 108561 Result: Up-regulated in Transcription
  misc_feature: MA Experiment 108561 PARAMETER Experiment Name: At_100uM_ABA_cDNA_P Parameter: Timepoint (hr) Value: 6
  misc_feature: MA Experiment 108561 PARAMETER Experiment Name: At_100uM_ABA_cDNA_P Parameter: Tissue Value: Aerial
  misc_feature: MA Experiment 108561 PARAMETER Experiment Name: At_100uM_ABA_cDNA_P Parameter: Treatment Value: 100uM ABA vs. No Treatment
  misc_feature: MA Experiment ID: 108607 Result: Up-regulated in Transcription
  misc_feature: MA Experiment 108607 PARAMETER Experiment Name: At_100uM_ABA_cDNA_P Parameter: Timepoint (hr) Value: 4
  misc_feature: MA Experiment 108607 PARAMETER Experiment Name: At_100uM_ABA_cDNA_P Parameter: Tissue Value: Aerial
  misc_feature: MA Experiment 108607 PARAMETER Experiment Name: At_100uM_ABA_cDNA_P Parameter: Treatment Value: 100uM ABA vs. No Treatment
  misc_feature: MA Experiment ID: 108608 Result: Up-regulated in Transcription
  misc_feature: MA Experiment 108608 PARAMETER Experiment Name: At_100uM_ABA_cDNA_P Parameter: Timepoint (hr) Value: 1
  misc_feature: MA Experiment 108608 PARAMETER Experiment Name: At_100uM_ABA_cDNA_P Parameter: Tissue Value: Aerial
  misc_feature: MA Experiment 108608 PARAMETER Experiment Name: At_100uM_ABA_cDNA_P Parameter: Treatment Value: 100uM ABA vs. No Treatment
  misc_feature: MA Experiment ID: 108668 Result: Up-regulated in Transcription
  misc_feature: MA Experiment 108668 PARAMETER Experiment Name: At_2mM_SA_cDNA_P Parameter: Plant Line Value: WS
  misc_feature: MA Experiment 108668 PARAMETER Experiment Name: At_2mM_SA_cDNA_P Parameter: Timepoint (hr) Value: 6
  misc_feature: MA Experiment 108668 PARAMETER Experiment Name: At_2mM_SA_cDNA_P Parameter: Treatment Value: 2mM SA vs. No Treatment
  misc_feature: MA Experiment ID: 20000069 Result: Up-regulated in Transcription
  misc_feature: MA Experiment 20000069 PARAMETER Experiment Name: At_100uM_ABA_Mutants_cDNA_P Parameter: Plant Line Value: CS23
  misc_feature: MA Experiment 20000069 PARAMETER Experiment Name: At_100uM_ABA_Mutants_cDNA_P Parameter: Timepoint (hr) Value: 6
  misc_feature: MA Experiment 20000069 PARAMETER Experiment Name: At_100uM_ABA_Mutants_cDNA_P Parameter: Tissue Value: Aerial
  misc_feature: MA Experiment 20000069 PARAMETER Experiment Name: At_100uM_ABA_Mutants_cDNA_P Parameter: Treatment Value: 100uM ABA vs. No Treatment
  misc_feature: MA Experiment ID: 20000070 Result: Up-regulated in Transcription
  misc_feature: MA Experiment 20000070 PARAMETER Experiment Name: At_100uM_ABA_Mutants_cDNA_P Parameter: Plant Line Value: CS24
  misc_feature: MA Experiment 20000070 PARAMETER Experiment Name: At_100uM_ABA_Mutants_cDNA_P Parameter: Timepoint (hr) Value: 6
  misc_feature: MA Experiment 20000070 PARAMETER Experiment Name: At_100uM_ABA_Mutants_cDNA_P Parameter: Tissue Value: Aerial
  misc_feature: MA Experiment 20000070 PARAMETER Experiment Name: At_100uM_ABA_Mutants_cDNA_P Parameter: Treatment Value: 100uM ABA vs. No Treatment
  misc_feature: MA Experiment ID: 20000166 Result: Up-regulated in Transcription
  misc_feature: MA Experiment 20000166 PARAMETER Experiment Name: At_100uM_ABA_P Parameter: Age (day) Value: 14
  misc_feature: MA Experiment 20000166 PARAMETER Experiment Name: At_100uM_ABA_P Parameter: Organism Value: A. thaliana
  misc_feature: MA Experiment 20000166 PARAMETER Experiment Name: At_100uM_ABA_P Parameter: Plant Line Value: WS
  misc_feature: MA Experiment 20000166 PARAMETER Experiment Name: At_100uM_ABA_P Parameter: Timepoint (hr) Value: 1
  misc_feature: MA Experiment 20000166 PARAMETER Experiment Name: At_100uM_ABA_P Parameter: Tissue Value: Aerial
  misc_feature: MA Experiment 20000166 PARAMETER Experiment Name: At_100uM_ABA_P Parameter: Treatment Value: 100uM ABA vs. No Treatment
  misc_feature: MA Experiment ID: 20000173 Result: Up-regulated in Transcription
  misc_feature: MA Experiment 20000173 PARAMETER Experiment Name: At_42deg_Heat_P Parameter: Age (day) Value: 14
  misc_feature: MA Experiment 20000173 PARAMETER Experiment Name: At_42deg_Heat_P Parameter: Organism Value: A. thaliana
  misc_feature: MA Experiment 20000173 PARAMETER Experiment Name: At_42deg_Heat_P Parameter: Plant Line Value: WS
  misc_feature: MA Experiment 20000173 PARAMETER Experiment Name: At_42deg_Heat_P Parameter: Temperature (deg C) Value: 42 vs. 22
  misc_feature: MA Experiment 20000173 PARAMETER Experiment Name: At_42deg_Heat_P Parameter: Timepoint (hr) Value: 6
  misc_feature: MA Experiment 20000173 PARAMETER Experiment Name: At_42deg_Heat_P Parameter: Tissue Value: Aerial
  misc_feature: MA Experiment ID: 20000180 Result: Down-regulated in Transcription
  misc_feature: MA Experiment 20000180 PARAMETER Experiment Name: At_Germinating_Seeds_P Parameter: Age (hr) Value: 24 vs. 0
  misc_feature: MA Experiment 20000180 PARAMETER Experiment Name: At_Germinating_Seeds_P Parameter: Tissue Value: Germinating Seeds
  misc_feature: MA Experiment ID: 20000182 Result: Up-regulated in Transcription
  misc_feature: MA Experiment 20000182 PARAMETER Experiment Name: At_2mM_SA_P Parameter: Age (day) Value: 14
  misc_feature: MA Experiment 20000182 PARAMETER Experiment Name: At_2mM_SA_P Parameter: Organism Value: A. thaliana
  misc_feature: MA Experiment 20000182 PARAMETER Experiment Name: At_2mM_SA_P Parameter: Plant Line Value: WS
  misc_feature: MA Experiment 20000182 PARAMETER Experiment Name: At_2mM_SA_P Parameter: Timepoint (hr) Value: 6
  misc_feature: MA Experiment 20000182 PARAMETER Experiment Name: At_2mM_SA_P Parameter: Tissue Value: Aerial
  misc_feature: MA Experiment 20000182 PARAMETER Experiment Name: At_2mM_SA_P Parameter: Treatment Value: 2mM SA vs. No Treatment
  misc_feature: MA Experiment ID: 20000267 Result: Up-regulated in Transcription
  misc_feature: MA Experiment 20000267 PARAMETER Experiment Name: At_Drought_P Parameter: Age (day) Value: 7
  misc_feature: MA Experiment 20000267 PARAMETER Experiment Name: At_Drought_P Parameter: Organism Value: A. thaliana
  misc_feature: MA Experiment 20000267 PARAMETER Experiment Name: At_Drought_P Parameter: Plant Line Value: WS
  misc_feature: MA Experiment 20000267 PARAMETER Experiment Name: At_Drought_P Parameter: Timepoint (hr) Value: 6
  misc_feature: MA Experiment 20000267 PARAMETER Experiment Name: At_Drought_P Parameter: Tissue Value: Whole Plant
  misc_feature: MA Experiment 20000267 PARAMETER Experiment Name: At_Drought_P Parameter: Treatment Value: Drought vs. No Drought
  misc_feature: MA Experiment ID: 20000436 Result: Up-regulated in Transcription
  misc_feature: MA Experiment 20000436 PARAMETER Experiment Name: At_Drought_P Parameter: Age (day) Value: 7
  misc_feature: MA Experiment 20000436 PARAMETER Experiment Name: At_Drought_P Parameter: Organism Value: A. thaliana
  misc_feature: MA Experiment 20000436 PARAMETER Experiment Name: At_Drought_P Parameter: Plant Line Value: WS
  misc_feature: MA Experiment 20000436 PARAMETER Experiment Name: At_Drought_P Parameter: Timepoint (hr) Value: 12
  misc_feature: MA Experiment 20000436 PARAMETER Experiment Name: At_Drought_P Parameter: Tissue Value: Whole Plant
  misc_feature: MA Experiment 20000436 PARAMETER Experiment Name: At_Drought_P Parameter: Treatment Value: Drought vs. No Drought
  misc_feature: MA Experiment ID: 20000437 Result: Up-regulated in Transcription
  misc_feature: MA Experiment 20000437 PARAMETER Experiment Name: At_Drought_P Parameter: Age (day) Value: 8
  misc_feature: MA Experiment 20000437 PARAMETER Experiment Name: At_Drought_P Parameter: Organism Value: A. thaliana
  misc_feature: MA Experiment 20000437 PARAMETER Experiment Name: At_Drought_P Parameter: Plant Line Value: WS
  misc_feature: MA Experiment 20000437 PARAMETER Experiment Name: At_Drought_P Parameter: Timepoint (hr) Value: 24
  misc_feature: MA Experiment 20000437 PARAMETER Experiment Name: At_Drought_P Parameter: Tissue Value: Whole Plant
  misc_feature: MA Experiment 20000437 PARAMETER Experiment Name: At_Drought_P Parameter: Treatment Value: Drought vs. No Drought
  misc_feature: MA Experiment ID: 20001248 Result: Up-regulated in Transcription
  misc_feature: MA Experiment 20001248 PARAMETER Experiment Name: At_Far-red-induction_P Parameter: Age (day) Value: 7
  misc_feature: MA Experiment 20001248 PARAMETER Experiment Name: At_Far-red-induction_P Parameter: Light Value: Far-red vs. White
  misc_feature: MA Experiment 20001248 PARAMETER Experiment Name: At_Far-red-induction_P Parameter: Organism Value: A. thaliana
  misc_feature: MA Experiment 20001248 PARAMETER Experiment Name: At_Far-red-induction_P Parameter: Plant Line Value: Columbia
  misc_feature: MA Experiment 20001248 PARAMETER Experiment Name: At_Far-red-induction_P Parameter: Timepoint (hr) Value: 4
  misc_feature: MA Experiment 20001248 PARAMETER Experiment Name: At_Far-red-induction_P Parameter: Tissue Value: Whole Plant
  misc_feature: MA Experiment ID: 20001450 Result: Up-regulated in Transcription
  misc_feature: MA Experiment 20001450 PARAMETER Experiment Name: At_Far-red-induction_P Parameter: Age (day) Value: 7
  misc_feature: MA Experiment 20001450 PARAMETER Experiment Name: At_Far-red-induction_P Parameter: Light Value: Far-red vs. White
  misc_feature: MA Experiment 20001450 PARAMETER Experiment Name: At_Far-red-induction_P Parameter: Organism Value: A. thaliana
  misc_feature: MA Experiment 20001450 PARAMETER Experiment Name: At_Far-red-induction_P Parameter: Plant Line Value: Columbia
  misc_feature: MA Experiment 20001450 PARAMETER Experiment Name: At_Far-red-induction_P Parameter: Timepoint (hr) Value: 8
  misc_feature: MA Experiment 20001450 PARAMETER Experiment Name: At_Far-red-induction_P Parameter: Tissue Value: Whole Plant
  misc_feature: MA Experiment ID: 20001554 Result: Up-regulated in Transcription
  misc_feature: MA Experiment 20001554 PARAMETER Experiment Name: At_Drought_Soil_Dry_P Parameter: Age (day) Value: 21
  misc_feature: MA Experiment 20001554 PARAMETER Experiment Name: At_Drought_Soil_Dry_P Parameter: Organism Value: A. thaliana
  misc_feature: MA Experiment 20001554 PARAMETER Experiment Name: At_Drought_Soil_Dry_P Parameter: Plant Line Value: WS
  misc_feature: MA Experiment 20001554 PARAMETER Experiment Name: At_Drought_Soil_Dry_P Parameter: Post Timepoint (hr) Value: None
  misc_feature: MA Experiment 20001554 PARAMETER Experiment Name: At_Drought_Soil_Dry_P Parameter: Post-Treatment Value: None
  misc_feature: MA Experiment 20001554 PARAMETER Experiment Name: At_Drought_Soil_Dry_P Parameter: Timepoint (day) Value: 7
  misc_feature: MA Experiment 20001554 PARAMETER Experiment Name: At_Drought_Soil_Dry_P Parameter: Treatment Value: Drought vs. No Drought
  misc_feature: MA Experiment ID: 20001555 Result: Up-regulated in Transcription
  misc_feature: MA Experiment 20001555 PARAMETER Experiment Name: At_Drought_Soil_Dry_P Parameter: Age (day) Value: 24
  misc_feature: MA Experiment 20001555 PARAMETER Experiment Name: At_Drought_Soil_Dry_P Parameter: Organism Value: A. thaliana
  misc_feature: MA Experiment 20001555 PARAMETER Experiment Name: At_Drought_Soil_Dry_P Parameter: Plant Line Value: WS
  misc_feature: MA Experiment 20001555 PARAMETER Experiment Name: At_Drought_Soil_Dry_P Parameter: Post Timepoint (hr) Value: None
  misc_feature: MA Experiment 20001555 PARAMETER Experiment Name: At_Drought_Soil_Dry_P Parameter: Post-Treatment Value: None
  misc_feature: MA Experiment 20001555 PARAMETER Experiment Name: At_Drought_Soil_Dry_P Parameter: Timepoint (day) Value: 10
  misc_feature: MA Experiment 20001555 PARAMETER Experiment Name: At_Drought_Soil_Dry_P Parameter: Treatment Value: Drought vs. No Drought
acactgagaagaaaaatccttcaggttatcgaaaattcccggattttactctttgggcggtggccgatttcttacgcgctctttttgtggcgactgttgtatacgcgcgagccttcatggacacgaaggcggttggagtttctaaggatacggcggcgtcgatggaagcgtcgacggtgtttcctgggtttaaattctcgccgacggatgtggagttgatttcgtattacctgaagcggaagatggatggcttggagaggtccgttgaggttataccggaccttgagatttacaatttcgagccttgggatttacccgataagtcgattgtgaaatctgatagcgagtggttcttcttctgtgcgcgtgggaaaaagtatccacatggttcacagaacaggagagcaacgaagatgggatactggaaagcaactgggaaagagcgtgatgtgaagtctggttctgaggtcattggaacaaagaggacgcttgttttccatattggtcgtgcaccaaaaggcgaaagaactgactggattatgcacgagtactgcgtgaaaggagtatctctggatgatgctatggttgtttgccgggttaggaggaacaaagaatacaatagtggtacaagtcagaaggcaccaaagccaaattcatcagccgagaagcatgcgaaagtccaaaatggcgctacgagttcagggagcccgtctgattgggacaacttggttgatttttacctagcaggtgaatcaggggagaaactactcgctgagatggcagagtcatcagaaaatctacaggtggataatgacgaggatttctttgcggatatcctaagagacgaaatcatcaatctcgatgaagcggtgatgacagggaacacaccaaacgaagtgccaacactagaatcagcatcaatggagataagggtacttcctttaccaaacatgatagacaaacaaatgtcatcactgttagaggaaagaccatcgcagaagaagaaaggaaaagacgccacggaatcattgtcgagctgcttcgtgggtttatactcgatcaaatcagtgaacaaggcacgatgggatgttattataggtgtagtggctctgatagcaatgttgttttatctagaataagaggcttatggaagtagcgaaaaacagtgtcctagctatgtttgtatcatcttttctcggacattgacaaggattatatgatgtttttgtgtaaacggtttatgttttacacttctacttc

SEQ ID NO: 41502 - protein, 378 aa, Arabidopsis thaliana
  peptide (1)..(378): Ceres Seq. ID no. 13499914
  misc_feature (59)..(186): Pfam Name: No apical meristem (NAM) protein Pfam Description: No apical meristem (NAM) protein
  misc_feature (61)..(199): Homolog of NCBI NO: 34902214 NR Description: Hypothetical protein [Oryza sativa (japonica
  misc_feature (61)..(279): Homolog of NCBI NO: 15237939 NR Description: No apical meristem (NAM) protein family
  misc_feature (54)..(202): Homolog of NCBI NO: 21105751 NR Description: nam-like protein 11 [Petunia x hybrida]
  misc_feature (58)..(259): Homolog of NCBI NO: 37537036 NR Description: putative NAM (no apical meristem) protein
  misc_feature (54)..(327): Homolog of NCBI NO: 15237469 NR Description: No apical meristem (NAM) protein family
  misc_feature (61)..(313): Homolog of NCBI NO: 15218843 NR Description: No apical meristem (NAM) protein family
  misc_feature (46)..(375): Homolog of NCBI NO: 15225866 NR Description: No apical meristem (NAM) protein family
  misc_feature (57)..(377): Homolog of NCBI NO: 15229931 NR Description: No apical meristem (NAM) protein family
  misc_feature (54)..(378): Homolog of NCBI NO: 9757809 NR Description: NAM (no apical meristem)-like protein
  misc_feature (39)..(378): Homolog of NCBI NO: 18420448 NR Description: No apical meristem (NAM) protein family
TEKKNPSGYRKFPDFTLWAVADFLRALFVATVVYARAFMDTKAVGVSKDTAASMEASTVFPGFKFSPTDVELISYYLKRKMDGLERSVEVIPDLEIYNFEPWDLPDKSIVKSDSEWFFFCARGKKYPHGSQNRRATKMGYWKATGKERDVKSGSEVIGTKRTLVFHIGRAPKGERTDWIMHEYCVKGVSLDDAMVVCRVRRNKEYNSGTSQKAPKPNSSAEKHAKVQNGATSSGSPSDWDNLVDFYLAGESGEKLLAEMAESSENLQVDNDEDFFADILRDEIINLDEAVMTGNTPNEVPTLESASMEIRVLPLPNMIDKQMSSLLEERPSQKKKGKDATESLSSCFVGLYSIKSVNKARWDVIIGVVALIAMLFYLE

SEQ ID NO: 41503 - protein, 340 aa, Arabidopsis thaliana
  peptide (1)..(340): Ceres Seq. ID no. 13499915
  misc_feature (21)..(148): Pfam Name: No apical meristem (NAM) protein Pfam Description: No apical meristem (NAM) protein
  misc_feature (23)..(161): Homolog of NCBI NO: 34902214 NR Description: Hypothetical protein [Oryza sativa (japonica
  misc_feature (23)..(241): Homolog of NCBI NO: 15237939 NR Description: No apical meristem (NAM) protein family
  misc_feature (16)..(164): Homolog of NCBI NO: 21105751 NR Description: nam-like protein 11 [Petunia x hybrida]
  misc_feature (20)..(221): Homolog of NCBI NO: 37537036 NR Description: putative NAM (no apical meristem) protein
  misc_feature (16)..(289): Homolog of NCBI NO: 15237469 NR Description: No apical meristem (NAM) protein family
  misc_feature (23)..(275): Homolog of NCBI NO: 15218843 NR Description: No apical meristem (NAM) protein family
  misc_feature (8)..(337): Homolog of NCBI NO: 15225866 NR Description: No apical meristem (NAM) protein family
  misc_feature (19)..(339): Homolog of NCBI NO: 15229931 NR Description: No apical meristem (NAM) protein family
  misc_feature (16)..(340): Homolog of NCBI NO: 9757809 NR Description: NAM (no apical meristem)-like protein
  misc_feature (1)..(340): Homolog of NCBI NO: 18420448 NR Description: No apical meristem (NAM) protein family
MDTKAVGVSKDTAASMEASTVFPGFKFSPTDVELISYYLKRKMDGLERSVEVIPDLEIYNFEPWDLPDKSIVKSDSEWFFFCARGKKYPHGSQNRRATKMGYWKATGKERDVKSGSEVIGTKRTLVFHIGRAPKGERTDWIMHEYCVKGVSLDDAMVVCRVRRNKEYNSGTSQKAPKPNSSAEKHAKVQNGATSSGSPSDWDNLVDFYLAGESGEKLLAEMAESSENLQVDNDEDFFADILRDEIINLDEAVMTGNTPNEVPTLESASMEIRVLPLPNMIDKQMSSLLEERPSQKKKGKDATESLSSCFVGLYSIKSVNKARWDVIIGVVALIAMLFYLE

SEQ ID NO: 41504 - protein, 325 aa, Arabidopsis thaliana
  peptide (1)..(325): Ceres Seq. ID no. 13499916
  misc_feature (6)..(133): Pfam Name: No apical meristem (NAM) protein Pfam Description: No apical meristem (NAM) protein
  misc_feature (8)..(146): Homolog of NCBI NO: 34902214 NR Description: Hypothetical protein [Oryza sativa (japonica
  misc_feature (8)..(226): Homolog of NCBI NO: 15237939 NR Description: No apical meristem (NAM) protein family
  misc_feature (1)..(149): Homolog of NCBI NO: 21105751 NR Description: nam-like protein 11 [Petunia x hybrida]
  misc_feature (5)..(206): Homolog of NCBI NO: 37537036 NR Description: putative NAM (no apical meristem) protein
  misc_feature (1)..(274): Homolog of NCBI NO: 15237469 NR Description: No apical meristem (NAM) protein family
  misc_feature (8)..(260): Homolog of NCBI NO: 15218843 NR Description: No apical meristem (NAM) protein family
  misc_feature (1)..(322): Homolog of NCBI NO: 15225866 NR Description: No apical meristem (NAM) protein family
  misc_feature (4)..(324): Homolog of NCBI NO: 15229931 NR Description: No apical meristem (NAM) protein family
  misc_feature (1)..(325): Homolog of NCBI NO: 9757809 NR Description: NAM (no apical meristem)-like protein
  misc_feature (1)..(325): Homolog of NCBI NO: 18420448 NR Description: No apical meristem (NAM) protein family
MEASTVFPGFKFSPTDVELISYYLKRKMDGLERSVEVIPDLEIYNFEPWDLPDKSIVKSDSEWFFFCARGKKYPHGSQNRRATKMGYWKATGKERDVKSGSEVIGTKRTLVFHIGRAPKGERTDWIMHEYCVKGVSLDDAMVVCRVRRNKEYNSGTSQKAPKPNSSAEKHAKVQNGATSSGSPSDWDNLVDFYLAGESGEKLLAEMAESSENLQVDNDEDFFADILRDEIINLDEAVMTGNTPNEVPTLESASMEIRVLPLPNMIDKQMSSLLEERPSQKKKGKDATESLSSCFVGLYSIKSVNKARWDVIIGVVALIAMLFYLE

SEQ ID NO: 41505 - DNA, 912 bp, Arabidopsis thaliana
  misc_feature (1)..(912): Ceres Seq. ID no. 13500029
  misc_feature: MA Experiment ID: 108608 Result: Up-regulated in Transcription
  misc_feature: MA Experiment 108608 PARAMETER Experiment Name: At_100uM_ABA_cDNA_P Parameter: Timepoint (hr) Value: 1
  misc_feature: MA Experiment 108608 PARAMETER Experiment Name: At_100uM_ABA_cDNA_P Parameter: Tissue Value: Aerial
  misc_feature: MA Experiment 108608 PARAMETER Experiment Name: At_100uM_ABA_cDNA_P Parameter: Treatment Value: 100uM ABA vs. No Treatment
  misc_feature: MA Experiment ID: 20000166 Result: Up-regulated in Transcription
  misc_feature: MA Experiment 20000166 PARAMETER Experiment Name: At_100uM_ABA_P Parameter: Age (day) Value: 14
  misc_feature: MA Experiment 20000166 PARAMETER Experiment Name: At_100uM_ABA_P Parameter: Organism Value: A. thaliana
  misc_feature: MA Experiment 20000166 PARAMETER Experiment Name: At_100uM_ABA_P Parameter: Plant Line Value: WS
  misc_feature: MA Experiment 20000166 PARAMETER Experiment Name: At_100uM_ABA_P Parameter: Timepoint (hr) Value: 1
  misc_feature: MA Experiment 20000166 PARAMETER Experiment Name: At_100uM_ABA_P Parameter: Tissue Value: Aerial
  misc_feature: MA Experiment 20000166 PARAMETER Experiment Name: At_100uM_ABA_P Parameter: Treatment Value: 100uM ABA vs. No Treatment
  misc_feature: MA Experiment ID: 20000179 Result: Up-regulated in Transcription
  misc_feature: MA Experiment 20000179 PARAMETER Experiment Name: At_Germinating_Seeds_P Parameter: Age (hr) Value: 6 vs. 0
  misc_feature: MA Experiment 20000179 PARAMETER Experiment Name: At_Germinating_Seeds_P Parameter: Tissue Value: Germinating Seeds
  misc_feature: MA Experiment ID: 20000180 Result: Up-regulated in Transcription
  misc_feature: MA Experiment 20000180 PARAMETER Experiment Name: At_Germinating_Seeds_P Parameter: Age (hr) Value: 24 vs. 0
  misc_feature: MA Experiment 20000180 PARAMETER Experiment Name: At_Germinating_Seeds_P Parameter: Tissue Value: Germinating Seeds
  misc_feature: MA Experiment ID: 20000182 Result: Up-regulated in Transcription
  misc_feature: MA Experiment 20000182 PARAMETER Experiment Name: At_2mM_SA_P Parameter: Age (day) Value: 14
  misc_feature: MA Experiment 20000182 PARAMETER Experiment Name: At_2mM_SA_P Parameter: Organism Value: A. thaliana
  misc_feature: MA Experiment 20000182 PARAMETER Experiment Name: At_2mM_SA_P Parameter: Plant Line Value: WS
  misc_feature: MA Experiment 20000182 PARAMETER Experiment Name: At_2mM_SA_P Parameter: Timepoint (hr) Value: 6
  misc_feature: MA Experiment 20000182 PARAMETER Experiment Name: At_2mM_SA_P Parameter: Tissue Value: Aerial
  misc_feature: MA Experiment 20000182 PARAMETER Experiment Name: At_2mM_SA_P Parameter: Treatment Value: 2mM SA vs. No Treatment
  misc_feature: MA Experiment ID: 20000227 Result: Down-regulated in Transcription
  misc_feature: MA Experiment 20000227 PARAMETER Experiment Name: At_Root-Tips-vs-Tops_P Parameter: Tissue Value: Root Tips vs. Root Tops
  misc_feature: MA Experiment ID: 20000234 Result: Down-regulated in Transcription
  misc_feature: MA Experiment 20000234 PARAMETER Experiment Name: At_Siliques_P Parameter: Age (day) Value: 21
  misc_feature: MA Experiment 20000234 PARAMETER Experiment Name: At_Siliques_P Parameter: Organism Value: A. thaliana
  misc_feature: MA Experiment 20000234 PARAMETER Experiment Name: At_Siliques_P Parameter: Plant Line Value: WS
  misc_feature: MA Experiment 20000234 PARAMETER Experiment Name: At_Siliques_P Parameter: Tissue Value: Less Than 5mm Siliques vs. Whole Plant
  misc_feature: MA Experiment ID: 20000235 Result: Down-regulated in Transcription
  misc_feature: MA Experiment 20000235 PARAMETER Experiment Name: At_Siliques_P Parameter: Age (day) Value: 21
  misc_feature: MA Experiment 20000235 PARAMETER Experiment Name: At_Siliques_P Parameter: Organism Value: A. thaliana
  misc_feature: MA Experiment 20000235 PARAMETER Experiment Name: At_Siliques_P Parameter: Plant Line Value: WS
  misc_feature: MA Experiment 20000235 PARAMETER Experiment Name: At_Siliques_P Parameter: Tissue Value: 5-10mm Siliques vs. Whole Plant
  misc_feature: MA Experiment ID: 20000264 Result: Down-regulated in Transcription
  misc_feature: MA Experiment 20000264 PARAMETER Experiment Name: At_Open_Flower_P Parameter: Age (day) Value: 21
  misc_feature: MA Experiment 20000264 PARAMETER Experiment Name: At_Open_Flower_P Parameter: Plant Line Value: WS
  misc_feature: MA Experiment 20000264 PARAMETER Experiment Name: At_Open_Flower_P Parameter: Tissue Value: Open Flower vs. Whole Plant
  misc_feature: MA Experiment ID: 20000265 Result: Down-regulated in Transcription
  misc_feature: MA Experiment 20000265 PARAMETER Experiment Name: At_Open_Flower_P Parameter: Age (day) Value: 21
  misc_feature: MA Experiment 20000265 PARAMETER Experiment Name: At_Open_Flower_P Parameter: Plant Line Value: WS
  misc_feature: MA Experiment 20000265 PARAMETER Experiment Name: At_Open_Flower_P Parameter: Tissue Value: Closed Flower vs. Whole Plant
  misc_feature: MA Experiment ID: 20000268 Result: Down-regulated in Transcription
  misc_feature: MA Experiment 20000268 PARAMETER Experiment Name: At_100mM_NaCl__P Parameter: Age (day) Value: 14
  misc_feature: MA Experiment 20000268 PARAMETER Experiment Name: At_100mM_NaCl__P Parameter: Organism Value: A. thaliana
  misc_feature: MA Experiment 20000268 PARAMETER Experiment Name: At_100mM_NaCl__P Parameter: Plant Line Value: WS
  misc_feature: MA Experiment 20000268 PARAMETER Experiment Name: At_100mM_NaCl__P Parameter: Timepoint (hr) Value: 6
  misc_feature: MA Experiment 20000268 PARAMETER Experiment Name: At_100mM_NaCl__P Parameter: Tissue Value: Whole Plant
  misc_feature: MA Experiment 20000268 PARAMETER Experiment Name: At_100mM_NaCl__P Parameter: Treatment Value: 100mM NaCl vs. No Treatment
  misc_feature: MA Experiment ID: 20000286 Result: Down-regulated in Transcription
  misc_feature: MA Experiment 20000286 PARAMETER Experiment Name: At_Open_Flower_P Parameter: Age (day) Value: 21
  misc_feature: MA Experiment 20000286 PARAMETER Experiment Name: At_Open_Flower_P Parameter: Plant Line Value: WS
  misc_feature: MA Experiment 20000286 PARAMETER Experiment Name: At_Open_Flower_P Parameter: Tissue Value: Half Open vs. Whole Plant
  misc_feature: MA Experiment ID: 20000438 Result: Down-regulated in Transcription
  misc_feature: MA Experiment 20000438 PARAMETER Experiment Name: At_Shoots__P Parameter: Age (day) Value: 14
  misc_feature: MA Experiment 20000438 PARAMETER Experiment Name: At_Shoots__P Parameter: Tissue Value: Shoots vs. Whole Plant
  misc_feature: MA Experiment ID: 20000439 Result: Down-regulated in Transcription
  misc_feature: MA Experiment 20000439 PARAMETER Experiment Name: At_Roots__P Parameter: Age (day) Value: 14 vs. 21
  misc_feature: MA Experiment 20000439 PARAMETER Experiment Name: At_Roots__P Parameter: Organism Value: A. thaliana
  misc_feature: MA Experiment 20000439 PARAMETER Experiment Name: At_Roots__P Parameter: Tissue Value: Roots vs. Whole Plant
  misc_feature: MA Experiment ID: 20000441 Result: Up-regulated in Transcription
  misc_feature: MA Experiment 20000441 PARAMETER Experiment Name: At_1uM_BR-BRZ__P Parameter: Tissue Value: Shoot Apices
  misc_feature: MA Experiment 20000441 PARAMETER Experiment Name: At_1uM_BR-BRZ__P Parameter: Treatment Value: 1uM BR vs. No Treatment
  misc_feature: MA Experiment ID: 20000443 Result: Up-regulated in Transcription
  misc_feature: MA Experiment 20000443 PARAMETER Experiment Name: At_1uM_BR-BRZ__P Parameter: Tissue Value: Shoot Apices
  misc_feature: MA Experiment 20000443 PARAMETER Experiment Name: At_1uM_BR-BRZ__P Parameter: Treatment Value: 1uM BRZ vs. No Treatment
  misc_feature: MA Experiment ID: 20000496 Result: Up-regulated in Transcription
  misc_feature: MA Experiment 20000496 PARAMETER Experiment Name: At_Guard_Cells_P Parameter: Harvest Date Value: 7/19/2002
  misc_feature: MA Experiment 20000496 PARAMETER Experiment Name: At_Guard_Cells_P Parameter: Organism Value: Canola
  misc_feature: MA Experiment 20000496 PARAMETER Experiment Name: At_Guard_Cells_P Parameter: Tissue Value: Guard Cells vs. Leaves
  misc_feature: MA Experiment ID: 20000794 Result: Down-regulated in Transcription
  misc_feature: MA Experiment 20000794 PARAMETER Experiment Name: At_Petals_P Parameter: Age (day) Value: 23-25 days
  misc_feature: MA Experiment 20000794 PARAMETER Experiment Name: At_Petals_P Parameter: Plant Line Value: WS
  misc_feature: MA Experiment 20000794 PARAMETER Experiment Name: At_Petals_P Parameter: Tissue Value: Petals vs. Whole plant
  misc_feature: MA Experiment ID: 20001247 Result: Up-regulated in Transcription
  misc_feature: MA Experiment 20001247 PARAMETER Experiment Name: At_Far-red-induction_P Parameter: Age (day) Value: 7
  misc_feature: MA Experiment 20001247 PARAMETER Experiment Name: At_Far-red-induction_P Parameter: Light Value: Far-red vs. White
  misc_feature: MA Experiment 20001247 PARAMETER Experiment Name: At_Far-red-induction_P Parameter: Organism Value: A. thaliana
  misc_feature: MA Experiment 20001247 PARAMETER Experiment Name: At_Far-red-induction_P Parameter: Plant Line Value: Columbia
  misc_feature: MA Experiment 20001247 PARAMETER Experiment Name: At_Far-red-induction_P Parameter: Timepoint (hr) Value: 1
  misc_feature: MA Experiment 20001247 PARAMETER Experiment Name: At_Far-red-induction_P Parameter: Tissue Value: Whole Plant
  misc_feature: MA Experiment ID: 20001248 Result: Up-regulated in Transcription
  misc_feature: MA Experiment 20001248 PARAMETER Experiment Name: At_Far-red-induction_P Parameter: Age (day) Value: 7
  misc_feature: MA Experiment 20001248 PARAMETER Experiment Name: At_Far-red-induction_P Parameter: Light Value: Far-red vs. White
  misc_feature: MA Experiment 20001248 PARAMETER Experiment Name: At_Far-red-induction_P Parameter: Organism Value: A. thaliana
  misc_feature: MA Experiment 20001248 PARAMETER Experiment Name: At_Far-red-induction_P Parameter: Plant Line Value: Columbia
  misc_feature: MA Experiment 20001248 PARAMETER Experiment Name: At_Far-red-induction_P Parameter: Timepoint (hr) Value: 4
  misc_feature: MA Experiment 20001248 PARAMETER Experiment Name: At_Far-red-induction_P Parameter: Tissue Value: Whole Plant
  misc_feature: MA Experiment ID: 20001450 Result: Up-regulated in Transcription
  misc_feature: MA Experiment 20001450 PARAMETER Experiment Name: At_Far-red-induction_P Parameter: Age (day) Value: 7
  misc_feature: MA Experiment 20001450 PARAMETER Experiment Name: At_Far-red-induction_P Parameter: Light Value: Far-red vs. White
  misc_feature: MA Experiment 20001450 PARAMETER Experiment Name: At_Far-red-induction_P Parameter: Organism Value: A. thaliana
  misc_feature: MA Experiment 20001450 PARAMETER Experiment Name: At_Far-red-induction_P Parameter: Plant Line Value: Columbia
  misc_feature: MA Experiment 20001450 PARAMETER Experiment Name: At_Far-red-induction_P Parameter: Timepoint (hr) Value: 8
  misc_feature: MA Experiment 20001450 PARAMETER Experiment Name: At_Far-red-induction_P Parameter: Tissue Value: Whole Plant
  misc_feature: MA Experiment ID: 20001451 Result: Up-regulated in Transcription
  misc_feature: MA Experiment 20001451 PARAMETER Experiment Name: At_Far-red-induction_P Parameter: Age (day) Value: 7
  misc_feature: MA Experiment 20001451 PARAMETER Experiment Name: At_Far-red-induction_P Parameter: Light Value: Far-red vs. White
  misc_feature: MA Experiment 20001451 PARAMETER Experiment Name: At_Far-red-induction_P Parameter: Organism Value: A. thaliana
  misc_feature: MA Experiment 20001451 PARAMETER Experiment Name: At_Far-red-induction_P Parameter: Plant Line Value: Columbia
  misc_feature: MA Experiment 20001451 PARAMETER Experiment Name: At_Far-red-induction_P Parameter: Timepoint (hr) Value: 24
  misc_feature: MA Experiment 20001451 PARAMETER Experiment Name: At_Far-red-induction_P Parameter: Tissue Value: Whole Plant
  misc_feature: MA Experiment ID: 20001905 Result: Up-regulated in Transcription
  misc_feature: MA Experiment 20001905 PARAMETER Experiment Name: At_Drought_Reproduction_P Parameter: Age (day) Value: 40
  misc_feature: MA Experiment 20001905 PARAMETER Experiment Name: At_Drought_Reproduction_P Parameter: Organism Value: A. thaliana
  misc_feature: MA Experiment 20001905 PARAMETER Experiment Name: At_Drought_Reproduction_P Parameter: Plant Line Value: WS
  misc_feature: MA Experiment 20001905 PARAMETER Experiment Name: At_Drought_Reproduction_P Parameter: Timepoint (day) Value: 10
  misc_feature: MA Experiment 20001905 PARAMETER Experiment Name: At_Drought_Reproduction_P Parameter: Tissue Value: Rosettes
  misc_feature: MA Experiment 20001905 PARAMETER Experiment Name: At_Drought_Reproduction_P Parameter: Treatment Value: Drought vs. No Drought
tgaaaatccttcaagaatcgcttcatcttcttcttcttcaacaaatcgagtcctttttctgataactcatttcgatttcagaaactcgccaagaactggatactctggcggaatcagagattaagaaccgagacgtggttctgaaactgtatgaagccctgagatctcgcgacgtcaaatctgtgcaccagatcttaaccccagatctggagtattggttccacggtcctccgccgcaccagtttttgatgcgcgtactcaccggaggtgtctctccgtcttcttcctccttcgaattcgtacctctctccgtcgtttccttcggatctaccgtaatcgcggaaggctgcgacgccgcgacatcgatttcttggatccacgcttggactgtagcgaatgggataatcacacaggtgagggagtactctaacacttctctcaccgtcacacggatcggtaacgttgttgctggacgacgctccgctgagattgcgcctccgtcgcattgttcctccgtgtgggaaagccaattctcgggtcgggctggtaaacccgtacccggtttggttctggcgatttgaaagagtttggtaaagtaagtaacagccacgtcaggagaataactaaataaaggctgcttacgtgtctgtgtgtggttggtttgtttgttgtatgggttaaaaaggattttgttgctgttttaaacgcggtgtgggcttctggggctacggtcgcgtttggctgtcgctagttttttttttttttttaagttgtttgtctgaaaattcgtgtgggtttgtgttttttagtgggagcaagtatggggaaacccaaatcgacttgttgtcccgttgcgtttgatgtaacgtttgcttatgttataattgaaataaaaaagtgcttttgggatcc

SEQ ID NO: 41506 - protein, 110 aa, Arabidopsis thaliana; identical to SEQ ID NO: 26872
  peptide (1)..(110): Ceres Seq. ID no. 13500030
  misc_feature (1)..(110): Homolog of NCBI NO: 33146884 NR Description: unknown protein [Oryza sativa (japonica
  misc_feature (1)..(110): Homolog of NCBI NO: 15241041 NR Description: expressed protein [Arabidopsis thaliana]
  misc_feature (1)..(110): Homolog of NCBI NO: 139780 NR Description: WOUND-INDUCED PROTEIN 1
  misc_feature (1)..(110): Homolog of NCBI NO: 10241935 NR Description: elicitor inducible protein [Nicotiana tabacum]
  misc_feature (1)..(110): Homolog of NCBI NO: 34898184 NR Description: P0034A04.2 [Oryza sativa (japonica
  misc_feature (1)..(110): Homolog of NCBI NO: 4574320 NR Description: wound-induced protein WI12 [Mesembryanthemum
  misc_feature (1)..(110): Homolog of NCBI NO: 15028339 NR Description: unknown protein [Arabidopsis thaliana]
  misc_feature (1)..(110): Homolog of NCBI NO: 15228414 NR Description: expressed protein [Arabidopsis thaliana]

SEQ ID NO: 41507 - DNA, 1086 bp, Arabidopsis thaliana
  misc_feature (1)..(1086): Ceres Seq. ID no. 12331251
  misc_feature: MA Experiment ID: 108461 Result: Up-regulated in Transcription
  misc_feature: MA Experiment 108461 PARAMETER Experiment Name: At_Germinating_Seeds_cDNA_P Parameter: Age (day) Value: 1 vs. 0
  misc_feature: MA Experiment 108461 PARAMETER Experiment Name: At_Germinating_Seeds_cDNA_P Parameter: Tissue Value: Germinating Seeds
  misc_feature: MA Experiment ID: 108462 Result: Up-regulated in Transcription
  misc_feature: MA Experiment 108462 PARAMETER Experiment Name: At_Germinating_Seeds_cDNA_P Parameter: Age (day) Value: 2 vs. 0
  misc_feature: MA Experiment 108462 PARAMETER Experiment Name: At_Germinating_Seeds_cDNA_P Parameter: Tissue Value: Germinating Seeds
  misc_feature: MA Experiment ID: 108463 Result: Up-regulated in Transcription
  misc_feature: MA Experiment 108463 PARAMETER Experiment Name: At_Germinating_Seeds_cDNA_P Parameter: Age (day) Value: 3 vs. 0
  misc_feature: MA Experiment 108463 PARAMETER Experiment Name: At_Germinating_Seeds_cDNA_P Parameter: Tissue Value: Germinating Seeds
  misc_feature: MA Experiment ID: 108501 Result: Up-regulated in Transcription
  misc_feature: MA Experiment 108501 PARAMETER Experiment Name: At_ap2_floral_buds_cDNA_P Parameter: Plant Line Value: ap2 (Ler.)
  misc_feature: MA Experiment 108501 PARAMETER Experiment Name: At_ap2_floral_buds_cDNA_P Parameter: Tissue Value: Closed Flower
  misc_feature: MA Experiment ID: 108594 Result: Down-regulated in Transcription
  misc_feature: MA Experiment 108594 PARAMETER Experiment Name: At_Ler-rhl_Root_cDNA_P Parameter: Plant Line Value: null
  misc_feature: MA Experiment ID: 20000071 Result: Down-regulated in Transcription
  misc_feature: MA Experiment 20000071 PARAMETER Experiment Name: At_100uM_ABA_Mutants_cDNA_P Parameter: Plant Line Value: CS8104
  misc_feature: MA Experiment 20000071 PARAMETER Experiment Name: At_100uM_ABA_Mutants_cDNA_P Parameter: Timepoint (hr) Value: 6
  misc_feature: MA Experiment 20000071 PARAMETER Experiment Name: At_100uM_ABA_Mutants_cDNA_P Parameter: Tissue Value: Aerial
  misc_feature: MA Experiment 20000071 PARAMETER Experiment Name: At_100uM_ABA_Mutants_cDNA_P Parameter: Treatment Value: 100uM ABA vs. No Treatment
  misc_feature: MA Experiment ID: 20000111 Result: Down-regulated in Transcription
  misc_feature: MA Experiment 20000111 PARAMETER Experiment Name: At_42deg_Heat_cDNA_P Parameter: Temperature (deg C) Value: 42 vs. 22
  misc_feature: MA Experiment 20000111 PARAMETER Experiment Name: At_42deg_Heat_cDNA_P Parameter: Timepoint (hr) Value: 6
  misc_feature: MA Experiment 20000111 PARAMETER Experiment Name: At_42deg_Heat_cDNA_P Parameter: Tissue Value: Aerial
  misc_feature: MA Experiment ID: 20000307 Result: Up-regulated in Transcription
  misc_feature: MA Experiment 20000307 PARAMETER Experiment Name: At_Germinating_Seeds_Sub_P Parameter: Age (hr) Value: 24 vs. 0
  misc_feature: MA Experiment 20000307 PARAMETER Experiment Name: At_Germinating_Seeds_Sub_P Parameter: Organism Value: A. thaliana
  misc_feature: MA Experiment 20000307 PARAMETER Experiment Name: At_Germinating_Seeds_Sub_P Parameter: Plant Line Value: WS
  misc_feature: MA Experiment 20000307 PARAMETER Experiment Name: At_Germinating_Seeds_Sub_P Parameter: Tissue Value: Germinating Seeds
  misc_feature: MA Experiment ID: 20000355 Result: Up-regulated in Transcription
  misc_feature: MA Experiment 20000355 PARAMETER Experiment Name: At_Siliques_Sub_P Parameter: Age (day) Value: 21
  misc_feature: MA Experiment 20000355 PARAMETER Experiment Name: At_Siliques_Sub_P Parameter: Organism Value: A. thaliana
  misc_feature: MA Experiment 20000355 PARAMETER Experiment Name: At_Siliques_Sub_P Parameter: Plant Line Value: WS
  misc_feature: MA Experiment 20000355 PARAMETER Experiment Name: At_Siliques_Sub_P Parameter: Tissue Value: Less Than 5mm Siliques vs. Whole Plant
aattcatttcaccaccatccttcttcttctttatttagttttctttctgtactttgaaccaagacaaggtggtggagaggagaagaagaaaacaaccaacaagagacatgtcttgtaataataatggcttagctttcttccctgaaaatttcagtctccaaaaccatcaccaagaagaagaagatcaccctcaacttcttcaagacttccatgggtttctaggtaaaagatctccaatgaacaacgtgcaagggttttgtaatctagatatgaacggagatgaagaatattcagacgatggatctaagatgggagagaagaagaggagattgaacatggaacaattgaaggcactagagaaggactttgagcttggtaataaacttgaatcagatcgaaaattagagctagctcgtgccttgggattgcaacctagacaaattgctatatggttccaaaacagaagagctcgatccaaaaccaagcagcttgagaaagactatgacatgcttaagcgtcaattcgaaagtctcagagatgagaacgaagttcttcaaactcaaaatcaaaagcttcaagctcaggtaatggcattgaaaagcagagaaccaatagaatcaatcaatctgaacaaagaaacagaaggatcatgtagtgacagaagtgagaacatttctggtgacatcaggccaccggagatcgatagccaattcgccctaggccatccaccgacaactacaacgatgcagttttttcagaattcatcgtcagaacagagaatggtgaaagaagagaacagtatcagtaacatgttctgtggaattgatgaccagtctgggttctggccatggcttgaccagcaacaatacaattgaatgtggtcgatctgttcttgtttgtattaaaattttcgttttctttaagtggtcagatgaaccaattcatgtttcaagaatctatatttagtctatatgcaccaactaagctagtagtttttttgggtaatgtgatgtaagagaattaatgggggaaatattcatcatattatatgataattaatcaatcatatgggccatatgattagac

SEQ ID NO: 41508 - protein, 255 aa, Arabidopsis thaliana
  peptide (1)..(255): Ceres Seq. ID no. 12331252
  misc_feature (71)..(125): Pfam Name: Homeobox domain Pfam Description: Homeobox domain
  misc_feature (32)..(206): Homolog of NCBI NO: 7446247 NR Description: homeotic protein - common sunflower
  misc_feature (231)..(255): Homolog of NCBI NO: 19071644 NR Description: putative DNA-binding protein
  misc_feature (31)..(209): Homolog of NCBI NO: 19071644 NR Description: putative DNA-binding protein
  misc_feature (223)..(255): Homolog of NCBI NO: 1435022 NR Description: DNA-binding protein [Daucus carota]
  misc_feature (45)..(216): Homolog of NCBI NO: 1435022 NR Description: DNA-binding protein [Daucus carota]
  misc_feature (8)..(219): Homolog of NCBI NO: 21555784 NR Description: homeobox gene 13 protein [Arabidopsis thaliana]
  misc_feature (1)..(219): Homolog of NCBI NO: 15222452 NR Description: HD-Zip transcription factor, Athb-13
  misc_feature (1)..(44): Homolog of NCBI NO: 25386233 NR Description: hypothetical protein T2P11.15 - Arabidopsis
  misc_feature (34)..(255): Homolog of NCBI NO: 25386233 NR Description: hypothetical protein T2P11.15 - Arabidopsis
  misc_feature (1)..(255): Homolog of NCBI NO: 18396130 NR Description: HD-Zip transcription factor
MSCNNNGLAFFPENFSLQNHHQEEEDHPQLLQDFHGFLGKRSPMNNVQGFCNLDMNGDEEYSDDGSKMGEKKRRLNMEQLKALEKDFELGNKLESDRKLELARALGLQPRQIAIWFQNRRARSKTKQLEKDYDMLKRQFESLRDENEVLQTQNQKLQAQVMALKSREPIESINLNKETEGSCSDRSENISGDIRPPEIDSQFALGHPPTTTTMQFFQNSSSEQRMVKEENSISNMFCGIDDQSGFWPWLDQQQYN

SEQ ID NO: 41509 - protein, 212 aa, Arabidopsis thaliana
  peptide (1)..(212): Ceres Seq. ID no. 12331253
  misc_feature (28)..(82): Pfam Name: Homeobox domain Pfam Description: Homeobox domain
  misc_feature (1)..(178): Homolog of NCBI NO: 7446243 NR Description: homeotic protein - carrot
  misc_feature (1)..(163): Homolog of NCBI NO: 7446247 NR Description: homeotic protein - common sunflower
  misc_feature (188)..(212): Homolog of NCBI NO: 19071644 NR Description: putative DNA-binding protein
  misc_feature (1)..(166): Homolog of NCBI NO: 19071644 NR Description: putative DNA-binding protein
  misc_feature (180)..(212): Homolog of NCBI NO: 1435022 NR Description: DNA-binding protein [Daucus carota]
  misc_feature (2)..(173): Homolog of NCBI NO: 1435022 NR Description: DNA-binding protein [Daucus carota]
  misc_feature (1)..(176): Homolog of NCBI NO: 21555784 NR Description: homeobox gene 13 protein [Arabidopsis thaliana]
  misc_feature (1)..(176): Homolog of NCBI NO: 15222452 NR Description: HD-Zip transcription factor, Athb-13
  misc_feature (1)..(212): Homolog of NCBI NO: 25386233 NR Description: hypothetical protein T2P11.15 - Arabidopsis
  misc_feature (1)..(212): Homolog of NCBI NO: 18396130 NR Description: HD-Zip transcription factor
MNNVQGFCNLDMNGDEEYSDDGSKMGEKKRRLNMEQLKALEKDFELGNKLESDRKLELARALGLQPRQIAIWFQNRRARSKTKQLEKDYDMLKRQFESLRDENEVLQTQNQKLQAQVMALKSREPIESINLNKETEGSCSDRSENISGDIRPPEIDSQFALGHPPTTTTMQFFQNSSSEQRMVKEENSISNMFCGIDDQSGFWPWLDQQQYN

SEQ ID NO: 41510 - protein, 201 aa, Arabidopsis thaliana
  peptide (1)..(201): Ceres Seq. ID no. 12331254
  misc_feature (17)..(71): Pfam Name: Homeobox domain Pfam Description: Homeobox domain
  misc_feature (1)..(167): Homolog of NCBI NO: 7446243 NR Description: homeotic protein - carrot
  misc_feature (1)..(152): Homolog of NCBI NO: 7446247 NR Description: homeotic protein - common sunflower
  misc_feature (177)..(201): Homolog of NCBI NO: 19071644 NR Description: putative DNA-binding protein
  misc_feature (1)..(155): Homolog of NCBI NO: 19071644 NR Description: putative DNA-binding protein
  misc_feature (169)..(201): Homolog of NCBI NO: 1435022 NR Description: DNA-binding protein [Daucus carota]
  misc_feature (1)..(162): Homolog of NCBI NO: 1435022 NR Description: DNA-binding protein [Daucus carota]
  misc_feature (1)..(165): Homolog of NCBI NO: 21555784 NR Description: homeobox gene 13 protein [Arabidopsis thaliana]
  misc_feature (1)..(165): Homolog of NCBI NO: 15222452 NR Description: HD-Zip transcription factor, Athb-13
  misc_feature (1)..(201): Homolog of NCBI NO: 25386233 NR Description: hypothetical protein T2P11.15 - Arabidopsis
  misc_feature (1)..(201): Homolog of NCBI NO: 18396130 NR Description: HD-Zip transcription factor
MNGDEEYSDDGSKMGEKKRRLNMEQLKALEKDFELGNKLESDRKLELARALGLQPRQIAIWFQNRRARSKTKQLEKDYDMLKRQFESLRDENEVLQTQNQKLQAQVMALKSREPIESINLNKETEGSCSDRSENISGDIRPPEIDSQFALGHPPTTTTMQFFQNSSSEQRMVKEENSISNMFCGIDDQSGFWPWLDQQQYN

SEQ ID NO: 41511 - DNA, 1067 bp, Arabidopsis thaliana
  misc_feature (1)..(1067): Ceres Seq. ID no. 13491405
  misc_feature: MA Experiment ID: 108573 Result: Up-regulated in Transcription
  misc_feature: MA Experiment 108573 PARAMETER Experiment Name: At_Drought_cDNA_P Parameter: Timepoint (hr) Value: 6
  misc_feature: MA Experiment 108573 PARAMETER Experiment Name: At_Drought_cDNA_P Parameter: Tissue Value: Aerial
  misc_feature: MA Experiment 108573 PARAMETER Experiment Name: At_Drought_cDNA_P Parameter: Treatment Value: Drought vs. No Drought
cgggaagaaagttgactagaaacggagaatttccaaatgttgaatttgttggatgcatgtgaaagccaattctatttggttcctccttgataatccacccaatcgctgtcattctcccatcaatctagctgctttcacaaaccattgtactgagatcgtatctttaaggtaaatttcaaatcggagtcggcgagatcgaaataggaacctggaagtcggagaatttgtgtaaattcggtttttttttttttaattctccgatggatagtttaagtgatatcgatggtgatttcgatggaagaaatgaaggaggatcgtcatcggattatcgattgttgggtcggcagattacggttcatcagttcatgggtggtggcaaagctgctgacttgctcttatggaggaggcgacatctttctttgggggttatcattatatcaactgtagcctggcttatattcgagttttccgggttgcctttcttatctgtttcttcggatgtcttactcatcgtgatcatgatatcattcgttcatgcccgggtttctgcttttaggaatagacagttgcattcgttgccagagcttgttctatcagaggaaatggtgaatagtgctgcagcttctttccgtataaaactcaatcacttgcttgtaatggctcatgatgtcacagttggcaacgattttcgactcttcttcaaggtggtgatttgtctgtggcttctctctgccattggtagctatatatctctctgcactcttctttacatcgggaccatcctatctgtaacaataccggctttgtacagtaaatatcaaagcaaagtagacaagtgttgcgggacgattcacaggcggttgtctcaccactacaaaatagtagacgaaaatgttataagcagactctcatggagcttatccaaggataaagattcatgagcttaactttggtgattctgagaatgcttttacttgtttttgtttagcttttcttgttattcaccatttgtagtataactaaacgccatatccagaatgaatataagatggtttctttgttcaact

SEQ ID NO: 41512 - protein, 226 aa, Arabidopsis thaliana
  peptide (1)..(226): Ceres Seq. ID no. 13491406
  misc_feature (3)..(224): Homolog of NCBI NO: 34909318 NR Description: OSJNBb0021A09.5 [Oryza sativa (japonica
  misc_feature (23)..(224): Homolog of NCBI NO: 34904202 NR Description: P0492F05.25 [Oryza sativa (japonica
  misc_feature (2)..(224): Homolog of NCBI NO: 15237093 NR Description: expressed protein [Arabidopsis thaliana]
  misc_feature (20)..(224): Homolog of NCBI NO: 15236556 NR Description: expressed protein [Arabidopsis thaliana]
  misc_feature (12)..(224): Homolog of NCBI NO: 21592845 NR Description: unknown [Arabidopsis thaliana]
  misc_feature (2)..(225): Homolog of NCBI NO: 15238125 NR Description: expressed protein [Arabidopsis thaliana]
  misc_feature (3)..(222): Homolog of NCBI NO: 15222616 NR Description: expressed protein [Arabidopsis thaliana]
  misc_feature (31)..(224): Homolog of NCBI NO: 38345298 NR Description: OSJNBa0043A12.26 [Oryza sativa (japonica
  misc_feature (26)..(226): Homolog of NCBI NO: 30681541 NR Description: reticulon family [Arabidopsis thaliana]
  misc_feature (1)..(226): Homolog of NCBI NO: 26450318 NR Description: unknown protein [Arabidopsis thaliana]
MDSLSDIDGDFDGRNEGGSSSDYRLLGRQITVHQFMGGGKAADLLLWRRRHLSLGVIIISTVAWLIFEFSGLPFLSVSSDVLLIVIMISFVHARVSAFRNRQLHSLPELVLSEEMVNSAAASFRIKLNHLLVMAHDVTVGNDFRLFFKVVICLWLLSAIGSYISLCTLLYIGTILSVTIPALYSKYQSKVDKCCGTIHRRLSHHYKIVDENVISRLSWSLSKDKDS

SEQ ID NO: 41513 - protein, 191 aa, Arabidopsis thaliana
  peptide (1)..(191): Ceres Seq. ID no. 13491407
  misc_feature (1)..(189): Homolog of NCBI NO: 34909318 NR Description: OSJNBb0021A09.5 [Oryza sativa (japonica
  misc_feature (1)..(189): Homolog of NCBI NO: 34904202 NR Description: P0492F05.25 [Oryza sativa (japonica
  misc_feature (1)..(189): Homolog of NCBI NO: 15237093 NR Description: expressed protein [Arabidopsis thaliana]
  misc_feature (1)..(189): Homolog of NCBI NO: 15236556 NR Description: expressed protein [Arabidopsis thaliana]
  misc_feature (1)..(189): Homolog of NCBI NO: 21592845 NR Description: unknown [Arabidopsis thaliana]
  misc_feature (1)..(190): Homolog of NCBI NO: 15238125 NR Description: expressed protein [Arabidopsis thaliana]
  misc_feature (1)..(187): Homolog of NCBI NO: 15222616 NR Description: expressed protein [Arabidopsis thaliana]
  misc_feature (1)..(189): Homolog of NCBI NO: 38345298 NR Description: OSJNBa0043A12.26 [Oryza sativa (japonica
  misc_feature (1)..(191): Homolog of NCBI NO: 30681541 NR Description: reticulon family [Arabidopsis thaliana]
  misc_feature (1)..(191): Homolog of NCBI NO: 26450318 NR Description: unknown protein [Arabidopsis thaliana]
MGGGKAADLLLWRRRHLSLGVIIISTVAWLIFEFSGLPFLSVSSDVLLIVIMISFVHARVSAFRNRQLHSLPELVLSEEMVNSAAASFRIKLNHLLVMAHDVTVGNDFRLFFKVVICLWLLSAIGSYISLCTLLYIGTILSVTIPALYSKYQSKVDKCCGTIHRRLSHHYKIVDENVISRLSWSLSKDKDS

SEQ ID NO: 41514 - protein, 140 aa, Arabidopsis thaliana
  peptide (1)..(140): Ceres Seq. ID no. 13491408
  misc_feature (1)..(138): Homolog of NCBI NO: 34909318 NR Description: OSJNBb0021A09.5 [Oryza sativa (japonica
  misc_feature (1)..(138): Homolog of NCBI NO: 34904202 NR Description: P0492F05.25 [Oryza sativa (japonica
  misc_feature (1)..(138): Homolog of NCBI NO: 15237093 NR Description: expressed protein [Arabidopsis thaliana]
  misc_feature (1)..(138): Homolog of NCBI NO: 15236556 NR Description: expressed protein [Arabidopsis thaliana]
  misc_feature (1)..(138): Homolog of NCBI NO: 21592845 NR Description: unknown [Arabidopsis thaliana]
  misc_feature (1)..(139): Homolog of NCBI NO: 15238125 NR Description: expressed protein [Arabidopsis thaliana]
  misc_feature (1)..(136): Homolog of NCBI NO: 15222616 NR Description: expressed protein [Arabidopsis thaliana]
  misc_feature (1)..(138): Homolog of NCBI NO: 38345298 NR Description: OSJNBa0043A12.26 [Oryza sativa (japonica
  misc_feature (1)..(140): Homolog of NCBI NO: 30681541 NR Description: reticulon family [Arabidopsis thaliana]
  misc_feature (1)..(140): Homolog of NCBI NO: 26450318 NR Description: unknown protein [Arabidopsis thaliana]
MISFVHARVSAFRNRQLHSLPELVLSEEMVNSAAASFRIKLNHLLVMAHDVTVGNDFRLFFKVVICLWLLSAIGSYISLCTLLYIGTILSVTIPALYSKYQSKVDKCCGTIHRRLSHHYKIVDENVISRLSWSLSKDKDS

SEQ ID NO: 41515 - DNA, 1474 bp, Arabidopsis thaliana
  misc_feature (1)..(1474): Ceres Seq. ID no. 12329750
  misc_feature: MA Experiment ID: 108435 Result: Up-regulated in Transcription
  misc_feature: MA Experiment 108435 PARAMETER Experiment Name: At_stm_Mutants_cDNA_P Parameter: Plant Line Value: wt Landsburg vs stm
  misc_feature: MA Experiment 108435 PARAMETER Experiment Name: At_stm_Mutants_cDNA_P Parameter: Tissue Value: Shoot Apical Meristem Region
  misc_feature: MA Experiment ID: 108461 Result: Down-regulated in Transcription
  misc_feature: MA Experiment 108461 PARAMETER Experiment Name: At_Germinating_Seeds_cDNA_P Parameter: Age (day) Value: 1 vs. 0
  misc_feature: MA Experiment 108461 PARAMETER Experiment Name: At_Germinating_Seeds_cDNA_P Parameter: Tissue Value: Germinating Seeds
  misc_feature: MA Experiment ID: 108464 Result: Down-regulated in Transcription
  misc_feature: MA Experiment 108464 PARAMETER Experiment Name: At_Germinating_Seeds_cDNA_P Parameter: Age (day) Value: 4 vs. 0
  misc_feature: MA Experiment 108464 PARAMETER Experiment Name: At_Germinating_Seeds_cDNA_P Parameter: Tissue Value: Germinating Seeds
  misc_feature: MA Experiment ID: 108469 Result: Up-regulated in Transcription
  misc_feature: MA Experiment ID: 108501 Result: Up-regulated in Transcription
  misc_feature: MA Experiment 108501 PARAMETER Experiment Name: At_ap2_floral_buds_cDNA_P Parameter: Plant Line Value: ap2 (Ler.)
  misc_feature: MA Experiment 108501 PARAMETER Experiment Name: At_ap2_floral_buds_cDNA_P Parameter: Tissue Value: Closed Flower
  misc_feature: MA Experiment ID: 108561 Result: Up-regulated in Transcription
  misc_feature: MA Experiment 108561 PARAMETER Experiment Name: At_100uM_ABA_cDNA_P Parameter: Timepoint (hr) Value: 6
  misc_feature: MA Experiment 108561 PARAMETER Experiment Name: At_100uM_ABA_cDNA_P Parameter: Tissue Value: Aerial
  misc_feature: MA Experiment 108561 PARAMETER Experiment Name: At_100uM_ABA_cDNA_P Parameter: Treatment Value: 100uM ABA vs. No Treatment
  misc_feature: MA Experiment ID: 108572 Result: Up-regulated in Transcription
  misc_feature: MA Experiment 108572 PARAMETER Experiment Name: At_Drought_cDNA_P Parameter: Timepoint (hr) Value: 1
  misc_feature: MA Experiment 108572 PARAMETER Experiment Name: At_Drought_cDNA_P Parameter: Tissue Value: Aerial
  misc_feature: MA Experiment 108572 PARAMETER Experiment Name: At_Drought_cDNA_P Parameter: Treatment Value: Drought vs. No Drought
  misc_feature: MA Experiment ID: 108573 Result: Up-regulated in Transcription
  misc_feature: MA Experiment 108573 PARAMETER Experiment Name: At_Drought_cDNA_P Parameter: Timepoint (hr) Value: 6
  misc_feature: MA Experiment 108573 PARAMETER Experiment Name: At_Drought_cDNA_P Parameter: Tissue Value: Aerial
  misc_feature: MA Experiment 108573 PARAMETER Experiment Name: At_Drought_cDNA_P Parameter: Treatment Value: Drought vs. No Drought
  misc_feature: MA Experiment ID: 108577 Result: Up-regulated in Transcription
  misc_feature: MA Experiment 108577 PARAMETER Experiment Name: At_42deg_Heat_cDNA_P Parameter: Temperature (deg C) Value: 42 vs. 22
  misc_feature: MA Experiment 108577 PARAMETER Experiment Name: At_42deg_Heat_cDNA_P Parameter: Timepoint (hr) Value: 6
  misc_feature: MA Experiment 108577 PARAMETER Experiment Name: At_42deg_Heat_cDNA_P Parameter: Tissue Value: Aerial
  misc_feature: MA Experiment ID: 108585 Result: Up-regulated in Transcription
  misc_feature: MA Experiment 108585 PARAMETER Experiment Name: At_5mM_NaNP_cDNA_P Parameter: Timepoint (hr) Value: 6
  misc_feature: MA Experiment 108585 PARAMETER Experiment Name: At_5mM_NaNP_cDNA_P Parameter: Tissue Value: Aerial
  misc_feature: MA Experiment 108585 PARAMETER Experiment Name: At_5mM_NaNP_cDNA_P Parameter: Treatment Value: null
  misc_feature: MA Experiment ID: 108594 Result: Down-regulated in Transcription
  misc_feature: MA Experiment 108594 PARAMETER Experiment Name: At_Ler-rhl_Root_cDNA_P Parameter: Plant Line Value: null
  misc_feature: MA Experiment ID: 108595 Result: Up-regulated in Transcription
  misc_feature: MA Experiment 108595 PARAMETER Experiment Name: At_Ler-pi_Ovule_cDNA_P Parameter: Plant Line Value: null
  misc_feature: MA Experiment ID: 108605 Result: Up-regulated in Transcription
  misc_feature: MA Experiment 108605 PARAMETER Experiment Name: At_100uM_ABA_cDNA_P Parameter: Timepoint (hr) Value: 6
  misc_feature: MA Experiment 108605 PARAMETER Experiment Name: At_100uM_ABA_cDNA_P Parameter: Tissue Value: Aerial
  misc_feature: MA Experiment 108605 PARAMETER Experiment Name: At_100uM_ABA_cDNA_P Parameter: Treatment Value: 100uM ABA vs. No Treatment
  misc_feature: MA Experiment ID: 108607 Result: Up-regulated in Transcription
  misc_feature: MA Experiment 108607 PARAMETER Experiment Name: At_100uM_ABA_cDNA_P Parameter: Timepoint (hr) Value: 4
  misc_feature: MA Experiment 108607 PARAMETER Experiment Name: At_100uM_ABA_cDNA_P Parameter: Tissue Value: Aerial
  misc_feature: MA Experiment 108607 PARAMETER Experiment Name: At_100uM_ABA_cDNA_P Parameter: Treatment Value: 100uM ABA vs. No Treatment
  misc_feature: MA Experiment ID: 108608 Result: Up-regulated in Transcription
  misc_feature: MA Experiment 108608 PARAMETER Experiment Name: At_100uM_ABA_cDNA_P Parameter: Timepoint (hr) Value: 1
  misc_feature: MA Experiment 108608 PARAMETER Experiment Name: At_100uM_ABA_cDNA_P Parameter: Tissue Value: Aerial
  misc_feature: MA Experiment 108608 PARAMETER Experiment Name: At_100uM_ABA_cDNA_P Parameter: Treatment Value: 100uM ABA vs. No Treatment
  misc_feature: MA Experiment ID: 108609 Result: Up-regulated in Transcription
  misc_feature: MA Experiment 108609 PARAMETER Experiment Name: At_100uM_ABA_cDNA_P Parameter: Timepoint (hr) Value: 24
  misc_feature: MA Experiment 108609 PARAMETER Experiment Name: At_100uM_ABA_cDNA_P Parameter: Tissue Value: Aerial
  misc_feature: MA Experiment 108609 PARAMETER Experiment Name: At_100uM_ABA_cDNA_P Parameter: Treatment Value: 100uM ABA vs. No Treatment
  misc_feature: MA Experiment ID: 108668 Result: Up-regulated in Transcription
  misc_feature: MA Experiment 108668 PARAMETER Experiment Name: At_2mM_SA_cDNA_P Parameter: Plant Line Value: WS
  misc_feature: MA Experiment 108668 PARAMETER Experiment Name: At_2mM_SA_cDNA_P Parameter: Timepoint (hr) Value: 6
  misc_feature: MA Experiment 108668 PARAMETER Experiment Name: At_2mM_SA_cDNA_P Parameter: Treatment Value: 2mM SA vs. No Treatment
  misc_feature: MA Experiment ID: 20000069 Result: Up-regulated in Transcription
  misc_feature: MA Experiment 20000069 PARAMETER Experiment Name: At_100uM_ABA_Mutants_cDNA_P Parameter: Plant Line Value: CS23
  misc_feature: MA Experiment 20000069 PARAMETER Experiment Name: At_100uM_ABA_Mutants_cDNA_P Parameter: Timepoint (hr) Value: 6
  misc_feature: MA Experiment 20000069 PARAMETER Experiment Name: At_100uM_ABA_Mutants_cDNA_P Parameter: Tissue Value: Aerial
  misc_feature: MA Experiment 20000069 PARAMETER Experiment Name: At_100uM_ABA_Mutants_cDNA_P Parameter: Treatment Value: 100uM ABA vs. No Treatment
  misc_feature: MA Experiment ID: 20000070 Result: Up-regulated in Transcription
  misc_feature: MA Experiment 20000070 PARAMETER Experiment Name: At_100uM_ABA_Mutants_cDNA_P Parameter: Plant Line Value: CS24
  misc_feature: MA Experiment 20000070 PARAMETER Experiment Name: At_100uM_ABA_Mutants_cDNA_P Parameter: Timepoint (hr) Value: 6
  misc_feature: MA Experiment 20000070 PARAMETER Experiment Name: At_100uM_ABA_Mutants_cDNA_P Parameter: Tissue Value: Aerial
  misc_feature: MA Experiment 20000070 PARAMETER Experiment Name: At_100uM_ABA_Mutants_cDNA_P Parameter: Treatment Value: 100uM ABA vs. No Treatment
  misc_feature: MA Experiment ID: 20000071 Result: Up-regulated in Transcription
  misc_feature: MA Experiment 20000071 PARAMETER Experiment Name: At_100uM_ABA_Mutants_cDNA_P Parameter: Plant Line Value: CS8104
  misc_feature: MA Experiment 20000071 PARAMETER Experiment Name: At_100uM_ABA_Mutants_cDNA_P Parameter: Timepoint (hr) Value: 6
  misc_feature: MA Experiment 20000071 PARAMETER Experiment Name: At_100uM_ABA_Mutants_cDNA_P Parameter: Tissue Value: Aerial
  misc_feature: MA Experiment 20000071 PARAMETER Experiment Name: At_100uM_ABA_Mutants_cDNA_P Parameter: Treatment Value: 100uM ABA vs. No Treatment
  misc_feature: MA Experiment ID: 20000072 Result: Up-regulated in Transcription
  misc_feature: MA Experiment 20000072 PARAMETER Experiment Name: At_100uM_ABA_Mutants_cDNA_P Parameter: Plant Line Value: CS8105
  misc_feature: MA Experiment 20000072 PARAMETER Experiment Name: At_100uM_ABA_Mutants_cDNA_P Parameter: Timepoint (hr) Value: 6
  misc_feature: MA Experiment 20000072 PARAMETER Experiment Name: At_100uM_ABA_Mutants_cDNA_P Parameter: Tissue Value: Aerial
  misc_feature: MA Experiment 20000072 PARAMETER Experiment Name: At_100uM_ABA_Mutants_cDNA_P Parameter: Treatment Value: 100uM ABA vs. No Treatment
  misc_feature: MA Experiment ID: 20000086 Result: Up-regulated in Transcription
  misc_feature: MA Experiment 20000086 PARAMETER Experiment Name: At_100uM_ABA_Mutants_cDNA_P Parameter: Plant Line Value: CS22
  misc_feature: MA Experiment 20000086 PARAMETER Experiment Name: At_100uM_ABA_Mutants_cDNA_P Parameter: Timepoint (hr) Value: 6
  misc_feature: MA Experiment 20000086 PARAMETER Experiment Name: At_100uM_ABA_Mutants_cDNA_P Parameter: Tissue Value: Aerial
  misc_feature: MA Experiment 20000086 PARAMETER Experiment Name: At_100uM_ABA_Mutants_cDNA_P Parameter: Treatment Value: 100uM ABA vs. No Treatment
  misc_feature: MA Experiment ID: 20000087 Result: Up-regulated in Transcription
  misc_feature: MA Experiment 20000087 PARAMETER Experiment Name: At_100uM_ABA_Mutants_cDNA_P Parameter: Plant Line Value: WS
  misc_feature: MA Experiment 20000087 PARAMETER Experiment Name: At_100uM_ABA_Mutants_cDNA_P Parameter: Timepoint (hr) Value: 6
  misc_feature: MA Experiment 20000087 PARAMETER Experiment Name: At_100uM_ABA_Mutants_cDNA_P Parameter: Tissue Value: Aerial
  misc_feature: MA Experiment 20000087 PARAMETER Experiment Name: At_100uM_ABA_Mutants_cDNA_P Parameter: Treatment Value: 100uM ABA vs. No Treatment
  misc_feature: MA Experiment ID: 20000088 Result: Up-regulated in Transcription
  misc_feature: MA Experiment 20000088 PARAMETER Experiment Name: At_100uM_ABA_Mutants_cDNA_P Parameter: Plant Line Value: Landsberg
  misc_feature: MA Experiment 20000088 PARAMETER Experiment Name: At_100uM_ABA_Mutants_cDNA_P Parameter: Timepoint (hr) Value: 6
  misc_feature: MA Experiment 20000088 PARAMETER Experiment Name: At_100uM_ABA_Mutants_cDNA_P Parameter: Tissue Value: Aerial
  misc_feature: MA Experiment 20000088 PARAMETER Experiment Name: At_100uM_ABA_Mutants_cDNA_P Parameter: Treatment Value: 100uM ABA vs. No Treatment
  misc_feature: MA Experiment ID: 20000093 Result: Up-regulated in Transcription
  misc_feature: MA Experiment 20000093 PARAMETER Experiment Name: At_42deg_Heat_cDNA_P Parameter: Temperature (deg C) Value: 42 vs. 22
  misc_feature: MA Experiment 20000093 PARAMETER Experiment Name: At_42deg_Heat_cDNA_P Parameter: Timepoint (hr) Value: 0.5
  misc_feature: MA Experiment 20000093 PARAMETER Experiment Name: At_42deg_Heat_cDNA_P Parameter: Tissue Value: Aerial
  misc_feature: MA Experiment ID: 20000111 Result: Up-regulated in Transcription
  misc_feature: MA Experiment 20000111 PARAMETER Experiment Name: At_42deg_Heat_cDNA_P Parameter: Temperature (deg C) Value: 42 vs. 22
  misc_feature: MA Experiment 20000111 PARAMETER Experiment Name: At_42deg_Heat_cDNA_P Parameter: Timepoint (hr) Value: 6
  misc_feature: MA Experiment 20000111 PARAMETER Experiment Name: At_42deg_Heat_cDNA_P Parameter: Tissue Value: Aerial
  misc_feature: MA Experiment ID: 20000112 Result: Up-regulated in Transcription
  misc_feature: MA Experiment 20000112 PARAMETER Experiment Name: At_42deg_Heat_cDNA_P Parameter: Temperature (deg C) Value: 42 vs. 22
  misc_feature: MA Experiment 20000112 PARAMETER Experiment Name: At_42deg_Heat_cDNA_P Parameter: Timepoint (hr) Value: 2
  misc_feature: MA Experiment 20000112 PARAMETER Experiment Name: At_42deg_Heat_cDNA_P Parameter: Tissue Value: Aerial
  misc_feature: MA Experiment ID: 20000113 Result: Up-regulated in Transcription
  misc_feature: MA Experiment 20000113 PARAMETER Experiment Name: At_42deg_Heat_cDNA_P Parameter: Temperature (deg C) Value: 42 vs. 22
  misc_feature: MA Experiment 20000113 PARAMETER Experiment Name: At_42deg_Heat_cDNA_P Parameter: Timepoint (hr) Value: 8
  misc_feature: MA Experiment 20000113 PARAMETER Experiment Name: At_42deg_Heat_cDNA_P Parameter: Tissue Value: Aerial
  misc_feature: MA Experiment ID: 20000117 Result: Up-regulated in Transcription
  misc_feature: MA Experiment 20000117 PARAMETER Experiment Name: At_100uM_ABA_Mutants_cDNA_P Parameter: Plant Line Value: Columbia
  misc_feature: MA Experiment 20000117 PARAMETER Experiment Name: At_100uM_ABA_Mutants_cDNA_P Parameter: Timepoint (hr) Value: 6
  misc_feature: MA Experiment 20000117 PARAMETER Experiment Name: At_100uM_ABA_Mutants_cDNA_P Parameter: Tissue Value: Aerial
  misc_feature: MA Experiment 20000117 PARAMETER Experiment Name: At_100uM_ABA_Mutants_cDNA_P Parameter: Treatment Value: 100uM ABA vs. No Treatment
  misc_feature: MA Experiment ID: 20000144 Result: Up-regulated in Transcription
  misc_feature: MA Experiment 20000144 PARAMETER Experiment Name: At_42deg_Heat_cDNA_P Parameter: Temperature (deg C) Value: 42 vs. 22
  misc_feature: MA Experiment 20000144 PARAMETER Experiment Name: At_42deg_Heat_cDNA_P Parameter: Timepoint (hr) Value: 1
  misc_feature: MA Experiment 20000144 PARAMETER Experiment Name: At_42deg_Heat_cDNA_P Parameter: Tissue Value: Aerial
  misc_feature: MA Experiment ID: 20000166 Result: Up-regulated in Transcription
  misc_feature: MA Experiment 20000166 PARAMETER Experiment Name: At_100uM_ABA_P Parameter: Age (day) Value: 14
  misc_feature: MA Experiment 20000166 PARAMETER Experiment Name: At_100uM_ABA_P Parameter: Organism Value: A. thaliana
  misc_feature: MA Experiment 20000166 PARAMETER Experiment Name: At_100uM_ABA_P Parameter: Plant Line Value: WS
  misc_feature: MA Experiment 20000166 PARAMETER Experiment Name: At_100uM_ABA_P Parameter: Timepoint (hr) Value: 1
  misc_feature: MA Experiment 20000166 PARAMETER Experiment Name: At_100uM_ABA_P Parameter: Tissue Value: Aerial
  misc_feature: MA Experiment 20000166 PARAMETER Experiment Name: At_100uM_ABA_P Parameter: Treatment Value: 100uM ABA vs. No Treatment
  misc_feature: MA Experiment ID: 20000169 Result: Up-regulated in Transcription
  misc_feature: MA Experiment 20000169 PARAMETER Experiment Name: At_100uM_ABA_P Parameter: Age (day) Value: 14
  misc_feature: MA Experiment 20000169 PARAMETER Experiment Name: At_100uM_ABA_P Parameter: Organism Value: A. thaliana
  misc_feature: MA Experiment 20000169 PARAMETER Experiment Name: At_100uM_ABA_P Parameter: Plant Line Value: WS
  misc_feature: MA Experiment 20000169 PARAMETER Experiment Name: At_100uM_ABA_P Parameter: Timepoint (hr) Value: 6
  misc_feature: MA Experiment 20000169 PARAMETER Experiment Name: At_100uM_ABA_P Parameter: Tissue Value: Aerial
  misc_feature: MA Experiment 20000169 PARAMETER Experiment Name: At_100uM_ABA_P Parameter: Treatment Value: 100uM ABA vs. No Treatment
  misc_feature: MA Experiment ID: 20000171 Result: Up-regulated in Transcription
  misc_feature: MA Experiment 20000171 PARAMETER Experiment Name: At_42deg_Heat_P Parameter: Age (day) Value: 14
  misc_feature: MA Experiment 20000171 PARAMETER Experiment Name: At_42deg_Heat_P Parameter: Organism Value: A. thaliana
  misc_feature: MA Experiment 20000171 PARAMETER Experiment Name: At_42deg_Heat_P Parameter: Plant Line Value: WS
  misc_feature: MA Experiment 20000171 PARAMETER Experiment Name: At_42deg_Heat_P Parameter: Temperature (deg C) Value: 42 vs. 22
  misc_feature: MA Experiment 20000171 PARAMETER Experiment Name: At_42deg_Heat_P Parameter: Timepoint (hr) Value: 1
  misc_feature: MA Experiment 20000171 PARAMETER Experiment Name: At_42deg_Heat_P Parameter: Tissue Value: Aerial
  misc_feature: MA Experiment ID: 20000182 Result: Up-regulated in Transcription
  misc_feature: MA Experiment 20000182 PARAMETER Experiment Name: At_2mM_SA_P Parameter: Age (day) Value: 14
  misc_feature: MA Experiment 20000182 PARAMETER Experiment Name: At_2mM_SA_P Parameter: Organism Value: A. thaliana
  misc_feature: MA Experiment 20000182 PARAMETER Experiment Name: At_2mM_SA_P Parameter: Plant Line Value: WS
  misc_feature: MA Experiment 20000182 PARAMETER Experiment Name: At_2mM_SA_P Parameter: Timepoint (hr) Value: 6
  misc_feature: MA Experiment 20000182 PARAMETER Experiment Name: At_2mM_SA_P Parameter: Tissue Value: Aerial
  misc_feature: MA Experiment 20000182 PARAMETER Experiment Name: At_2mM_SA_P Parameter: Treatment Value: 2mM SA vs. No Treatment
  misc_feature: MA Experiment ID: 20000184 Result: Down-regulated in Transcription
  misc_feature: MA Experiment 20000184 PARAMETER Experiment Name: At_Shoots__P Parameter: Age (day) Value: 7
  misc_feature: MA Experiment 20000184 PARAMETER Experiment Name: At_Shoots__P Parameter: Tissue Value: Shoots vs. Whole Plant
  misc_feature: MA Experiment ID: 20000224 Result: Up-regulated in Transcription
  misc_feature: MA Experiment ID: 20000234 Result: Up-regulated in Transcription
  misc_feature: MA Experiment 20000234 PARAMETER Experiment Name: At_Siliques_P Parameter: Age (day) Value: 21
  misc_feature: MA Experiment 20000234 PARAMETER Experiment Name: At_Siliques_P Parameter: Organism Value: A. thaliana
  misc_feature: MA Experiment 20000234 PARAMETER Experiment Name: At_Siliques_P Parameter: Plant Line Value: WS
  misc_feature: MA Experiment 20000234 PARAMETER Experiment Name: At_Siliques_P Parameter: Tissue Value: Less Than 5mm Siliques vs. Whole Plant
  misc_feature: MA Experiment ID: 20000264 Result: Up-regulated in Transcription
  misc_feature: MA Experiment 20000264 PARAMETER Experiment Name: At_Open_Flower_P Parameter: Age (day) Value: 21
  misc_feature: MA Experiment 20000264 PARAMETER Experiment Name: At_Open_Flower_P Parameter: Plant Line Value: WS
  misc_feature: MA Experiment 20000264 PARAMETER Experiment Name: At_Open_Flower_P Parameter: Tissue Value: Open Flower vs. Whole Plant
  misc_feature: MA Experiment ID: 20000267 Result: Up-regulated in Transcription
  misc_feature: MA Experiment 20000267 PARAMETER Experiment Name: At_Drought_P Parameter: Age (day) Value: 7
  misc_feature: MA Experiment 20000267 PARAMETER Experiment Name: At_Drought_P Parameter: Organism Value: A. thaliana
  misc_feature: MA Experiment 20000267 PARAMETER Experiment Name: At_Drought_P Parameter: Plant Line Value: WS
  misc_feature: MA Experiment 20000267 PARAMETER Experiment Name: At_Drought_P Parameter: Timepoint (hr) Value: 6
  misc_feature: MA Experiment 20000267 PARAMETER Experiment Name: At_Drought_P Parameter: Tissue Value: Whole Plant
  misc_feature: MA Experiment 20000267 PARAMETER Experiment Name: At_Drought_P Parameter: Treatment Value: Drought vs. No Drought
  misc_feature: MA Experiment ID: 20000268 Result: Up-regulated in Transcription
  misc_feature: MA Experiment 20000268 PARAMETER Experiment Name: At_100mM_NaCl__P Parameter: Age (day) Value: 14
  misc_feature: MA Experiment 20000268 PARAMETER Experiment Name: At_100mM_NaCl__P Parameter: Organism Value: A. thaliana
  misc_feature: MA Experiment 20000268 PARAMETER Experiment Name: At_100mM_NaCl__P Parameter: Plant Line Value: WS
  misc_feature: MA Experiment 20000268 PARAMETER Experiment Name: At_100mM_NaCl__P Parameter: Timepoint (hr) Value: 6
  misc_feature: MA Experiment 20000268 PARAMETER Experiment Name: At_100mM_NaCl__P Parameter: Tissue Value: Whole Plant
  misc_feature: MA Experiment 20000268 PARAMETER Experiment Name: At_100mM_NaCl__P Parameter: Treatment Value: 100mM NaCl vs. No Treatment
  misc_feature: MA Experiment ID: 20000436 Result: Up-regulated in Transcription
  misc_feature: MA Experiment 20000436 PARAMETER Experiment Name: At_Drought_P Parameter: Age (day) Value: 7
  misc_feature: MA Experiment 20000436 PARAMETER Experiment Name: At_Drought_P Parameter: Organism Value: A. thaliana
  misc_feature: MA Experiment 20000436 PARAMETER Experiment Name: At_Drought_P Parameter: Plant Line Value: WS
  misc_feature: MA Experiment 20000436 PARAMETER Experiment Name: At_Drought_P Parameter: Timepoint (hr) Value: 12
  misc_feature: MA Experiment 20000436 PARAMETER Experiment Name: At_Drought_P Parameter: Tissue Value: Whole Plant
  misc_feature: MA Experiment 20000436 PARAMETER Experiment Name: At_Drought_P Parameter: Treatment Value: Drought vs. No Drought
  misc_feature: MA Experiment ID: 20000453 Result: Up-regulated in Transcription
  misc_feature: MA Experiment 20000453 PARAMETER Experiment Name: At_100uM_ABA_P Parameter: Age (day) Value: 15
  misc_feature: MA Experiment 20000453 PARAMETER Experiment Name: At_100uM_ABA_P Parameter: Organism Value: A. thaliana
  misc_feature: MA Experiment 20000453 PARAMETER Experiment Name: At_100uM_ABA_P Parameter: Plant Line Value: WS
  misc_feature: MA Experiment 20000453 PARAMETER Experiment Name: At_100uM_ABA_P Parameter: Timepoint (hr) Value: 24
  misc_feature: MA Experiment 20000453 PARAMETER Experiment Name: At_100uM_ABA_P Parameter: Tissue Value: Aerial
  misc_feature: MA Experiment 20000453 PARAMETER Experiment Name: At_100uM_ABA_P Parameter: Treatment Value: 100uM ABA vs. No Treatment
  misc_feature: MA Experiment ID: 20000455 Result: Up-regulated in Transcription
  misc_feature: MA Experiment 20000455 PARAMETER Experiment Name: At_100uM_ABA_P Parameter: Age (day) Value: 16
  misc_feature: MA Experiment 20000455 PARAMETER Experiment Name: At_100uM_ABA_P Parameter: Organism Value: A. thaliana
  misc_feature: MA Experiment 20000455 PARAMETER Experiment Name: At_100uM_ABA_P Parameter: Plant Line Value: WS
  misc_feature: MA Experiment 20000455 PARAMETER Experiment Name: At_100uM_ABA_P Parameter: Timepoint (hr) Value: 48
  misc_feature: MA Experiment 20000455 PARAMETER Experiment Name: At_100uM_ABA_P Parameter: Tissue Value: Aerial
  misc_feature: MA Experiment 20000455 PARAMETER Experiment Name: At_100uM_ABA_P Parameter: Treatment Value: 100uM ABA vs. No Treatment
  misc_feature: MA Experiment ID: 20000794 Result: Up-regulated in Transcription
  misc_feature: MA Experiment 20000794 PARAMETER Experiment Name: At_Petals_P Parameter: Age (day) Value: 23-25 days
  misc_feature: MA Experiment 20000794 PARAMETER Experiment Name: At_Petals_P Parameter: Plant Line Value: WS
  misc_feature: MA Experiment 20000794 PARAMETER Experiment Name: At_Petals_P Parameter: Tissue Value: Petals vs. Whole plant
  misc_feature: MA Experiment ID: 20001248 Result: Down-regulated in Transcription
  misc_feature: MA Experiment 20001248 PARAMETER Experiment Name: At_Far-red-induction_P Parameter: Age (day) Value: 7
  misc_feature: MA Experiment 20001248 PARAMETER Experiment Name: At_Far-red-induction_P Parameter: Light Value: Far-red vs. White
  misc_feature: MA Experiment 20001248 PARAMETER Experiment Name: At_Far-red-induction_P Parameter: Organism Value: A. thaliana
  misc_feature: MA Experiment 20001248 PARAMETER Experiment Name: At_Far-red-induction_P Parameter: Plant Line Value: Columbia
  misc_feature: MA Experiment 20001248 PARAMETER Experiment Name: At_Far-red-induction_P Parameter: Timepoint (hr) Value: 4
  misc_feature: MA Experiment 20001248 PARAMETER Experiment Name: At_Far-red-induction_P Parameter: Tissue Value: Whole Plant
  misc_feature: MA Experiment ID: 20001450 Result: Down-regulated in Transcription
  misc_feature: MA Experiment 20001450 PARAMETER Experiment Name: At_Far-red-induction_P Parameter: Age (day) Value: 7
  misc_feature: MA Experiment 20001450 PARAMETER Experiment Name: At_Far-red-induction_P Parameter: Light Value: Far-red vs. White
  misc_feature: MA Experiment 20001450 PARAMETER Experiment Name: At_Far-red-induction_P Parameter: Organism Value: A. thaliana
  misc_feature: MA Experiment 20001450 PARAMETER Experiment Name: At_Far-red-induction_P Parameter: Plant Line Value: Columbia
  misc_feature: MA Experiment 20001450 PARAMETER Experiment Name: At_Far-red-induction_P Parameter: Timepoint (hr) Value: 8
  misc_feature: MA Experiment 20001450 PARAMETER Experiment Name: At_Far-red-induction_P Parameter: Tissue Value: Whole Plant
  misc_feature: MA Experiment ID: 20001554 Result: Up-regulated in Transcription
  misc_feature: MA Experiment 20001554 PARAMETER Experiment Name: At_Drought_Soil_Dry_P Parameter: Age (day) Value: 21
  misc_feature: MA Experiment 20001554 PARAMETER Experiment Name: At_Drought_Soil_Dry_P Parameter: Organism Value: A. thaliana
  misc_feature: MA Experiment 20001554 PARAMETER Experiment Name: At_Drought_Soil_Dry_P Parameter: Plant Line Value: WS
  misc_feature: MA Experiment 20001554 PARAMETER Experiment Name: At_Drought_Soil_Dry_P Parameter: Post Timepoint (hr) Value: None
  misc_feature: MA Experiment 20001554 PARAMETER Experiment Name: At_Drought_Soil_Dry_P Parameter: Post-Treatment Value: None
  misc_feature: MA Experiment 20001554 PARAMETER Experiment Name: At_Drought_Soil_Dry_P Parameter: Timepoint (day) Value: 7
  misc_feature: MA Experiment 20001554 PARAMETER Experiment Name: At_Drought_Soil_Dry_P Parameter: Treatment Value: Drought vs. No Drought
  misc_feature: MA Experiment ID: 20001555 Result: Up-regulated in Transcription
  misc_feature: MA Experiment 20001555 PARAMETER Experiment Name: At_Drought_Soil_Dry_P Parameter: Age (day) Value: 24
  misc_feature: MA Experiment 20001555 PARAMETER Experiment Name: At_Drought_Soil_Dry_P Parameter: Organism Value: A. thaliana
  misc_feature: MA Experiment 20001555 PARAMETER Experiment Name: At_Drought_Soil_Dry_P Parameter: Plant Line Value: WS
  misc_feature: MA Experiment 20001555 PARAMETER Experiment Name: At_Drought_Soil_Dry_P Parameter: Post Timepoint (hr) Value: None
  misc_feature: MA Experiment 20001555 PARAMETER Experiment Name: At_Drought_Soil_Dry_P Parameter: Post-Treatment Value: None
  misc_feature: MA Experiment 20001555 PARAMETER Experiment Name: At_Drought_Soil_Dry_P Parameter: Timepoint (day) Value: 10
  misc_feature: MA Experiment 20001555 PARAMETER Experiment Name: At_Drought_Soil_Dry_P Parameter: Treatment Value: Drought vs. No Drought
  misc_feature: MA Experiment ID: 20001905 Result: Up-regulated in Transcription
  misc_feature: MA Experiment 20001905 PARAMETER Experiment Name: At_Drought_Reproduction_P Parameter: Age (day) Value: 40
  misc_feature: MA Experiment 20001905 PARAMETER Experiment Name: At_Drought_Reproduction_P Parameter: Organism Value: A. thaliana
  misc_feature: MA Experiment 20001905 PARAMETER Experiment Name: At_Drought_Reproduction_P Parameter: Plant Line Value: WS
  misc_feature: MA Experiment 20001905 PARAMETER Experiment Name: At_Drought_Reproduction_P Parameter: Timepoint (day) Value: 10
  misc_feature: MA Experiment 20001905 PARAMETER Experiment Name: At_Drought_Reproduction_P Parameter: Tissue Value: Rosettes
  misc_feature: MA Experiment 20001905 PARAMETER Experiment Name: At_Drought_Reproduction_P Parameter: Treatment Value: Drought vs. No Drought
aaatagagacctttctttaacacagagaaagagcctgagagacaagtgagaaacgcaacaacaccaccgaaagagagagtccaaattcgaaagagaaaaagaatcaaattccttcttcttccttttttgattttcaattattactttaatcttctttcccgctctctattcttcttcttctttaggatcaatcaccgtttagctttcttcccatacgtctctccgtttacgaccagtatacagaggctggagctggggaagaaaaggattgtctatggagggagacgtcggaataggtttggtatgccagaatactatggatgggaaggcgagtaatggaaatggtttagagaagactgtaccttcttgttgccttaaggctatggcatgtgtacctgaggatgatgctaagtgtcactccactgttgtttctgggtggttttcggaacctcaccctcgctctgggaaaaaaggcggcaaagcagtctatttcaacaaccctatgtggccaggagaagcacactcactgaaagttgagaaagttctgttcaaagacaagtcggattttcaggaagtcctagtgttcgagtcagccacgtacggaaaggtgcttgttctagatggtatcgtacagctgaccgaaaaagatgaatgtgcatatcaggagatgatagcccatctgcctttatgctctatatcttcccctaaaaatgttcttgttgttggtggaggtgatggtggtgttcttcgagagatttctcgccatagttctgttgaggttattgatatctgtgagatagacaagatggttatagatgtgtctaagaagttcttccccgagttagcggttgggtttgacgatcctcgtgttcaacttcacattggtgatgctgctgagttcctccgtaaatcccctgaagggaagtatgatgccatcattgttgattcttcagatcccgtaggtcctgctcttgcgcttgttgagaagcctttcttcgagacactggctagagcgttgaagcctgggggagttctttgtaacatggcagaaagtatgtggctccatactcatcttattgaagatatgatctccatttgccgtcaaacattcaaaagtgttcactatgcgtggagcagcgtccccacatatccaagcggcgtgattggtttcgtcttgtgctctactgaaggaccagctgttgacttcaagaacccaatcaaccctattgagaaactagacggtgcgatgacccataaaagagaattgaagttctataactctgatatgcacagagccgcatttgctttgcccacattcctgcggagagaagtagcttcacttctggcttcttgacttctgtttggctctaccatatccctcatatcaaactttgtagaactcttgaagaggaataataaatcattgaaggctttgtatctctaagtttactcctttataaaaagacttatattt

SEQ ID NO: 41516 - protein, 359 aa, Arabidopsis thaliana; identical to SEQ ID NO: 24836
  peptide (1)..(359): Ceres Seq. ID no. 12329751
  misc_feature (54)..(313): Pfam Name: Spermine/spermidine synthase Pfam Description: Spermine/spermidine synthase
  misc_feature (75)..(355): Homolog of NCBI NO: 6094327 NR Description: Spermidine synthase 1 (Putrescine
  misc_feature (42)..(355): Homolog of NCBI NO: 12229958 NR Description: Spermidine synthase 1 (Putrescine
  misc_feature (75)..(355): Homolog of NCBI NO: 6094330 NR Description: Spermidine synthase 2 (Putrescine
  misc_feature (49)..(355): Homolog of NCBI NO: 6094335 NR Description: Spermidine synthase (Putrescine
  misc_feature (18)..(355): Homolog of NCBI NO: 33354149 NR Description: aminopropyl transferase [Oryza sativa (japonica
  misc_feature (15)..(359): Homolog of NCBI NO: 33150481 NR Description: putative spermine synthase [Lycopersicon
  misc_feature (1)..(359): Homolog of NCBI NO: 9757993 NR Description: spermidine synthase [Arabidopsis thaliana]
  misc_feature (15)..(359): Homolog of NCBI NO: 21592832 NR Description: spermidine synthase [Arabidopsis thaliana]
  misc_feature (1)..(359): Homolog of NCBI NO: 15983394 NR Description: AT5g53120/MFH8_5 [Arabidopsis thaliana]
  misc_feature (1)..(359): Homolog of NCBI NO: 18423473 NR Description: spermidine synthase

SEQ ID NO: 41517 - protein, 345 aa, Arabidopsis thaliana; identical to SEQ ID NO: 24837
  peptide (1)..(345): Ceres Seq. ID no. 12329752
  misc_feature (40)..(299): Pfam Name: Spermine/spermidine synthase Pfam Description: Spermine/spermidine synthase
  misc_feature (61)..(341): Homolog of NCBI NO: 6094327 NR Description: Spermidine synthase 1 (Putrescine
  misc_feature (28)..(341): Homolog of NCBI NO: 12229958 NR Description: Spermidine synthase 1 (Putrescine
  misc_feature (61)..(341): Homolog of NCBI NO: 6094330 NR Description: Spermidine synthase 2 (Putrescine
  misc_feature (35)..(341): Homolog of NCBI NO: 6094335 NR Description: Spermidine synthase (Putrescine
  misc_feature (4)..(341): Homolog of NCBI NO: 33354149 NR Description: aminopropyl transferase [Oryza sativa (japonica
  misc_feature (1)..(345): Homolog of NCBI NO: 33150481 NR Description: putative spermine synthase [Lycopersicon
  misc_feature (1)..(345): Homolog of NCBI NO: 9757993 NR Description: spermidine synthase [Arabidopsis thaliana]
  misc_feature (1)..(345): Homolog of NCBI NO: 21592832 NR Description: spermidine synthase [Arabidopsis thaliana]
  misc_feature (1)..(345): Homolog of NCBI NO: 15983394 NR Description: AT5g53120/MFH8_5 [Arabidopsis thaliana]
  misc_feature (1)..(345): Homolog of NCBI NO: 18423473 NR Description: spermidine synthase

SEQ ID NO: 41518 - protein, 323 aa, Arabidopsis thaliana; identical to SEQ ID NO: 24838
  peptide (1)..(323): Ceres Seq. ID no. 12329753
  misc_feature (18)..(277): Pfam Name: Spermine/spermidine synthase Pfam Description: Spermine/spermidine synthase
  misc_feature (39)..(319): Homolog of NCBI NO: 6094327 NR Description: Spermidine synthase 1 (Putrescine
  misc_feature (6)..(319): Homolog of NCBI NO: 12229958 NR Description: Spermidine synthase 1 (Putrescine
  misc_feature (39)..(319): Homolog of NCBI NO: 6094330 NR Description: Spermidine synthase 2 (Putrescine
  misc_feature (13)..(319): Homolog of NCBI NO: 6094335 NR Description: Spermidine synthase (Putrescine
  misc_feature (1)..(319): Homolog of NCBI NO: 33354149 NR Description: aminopropyl transferase [Oryza sativa (japonica
  misc_feature (1)..(323): Homolog of NCBI NO: 33150481 NR Description: putative spermine synthase [Lycopersicon
  misc_feature (1)..(323): Homolog of NCBI NO: 9757993 NR Description: spermidine synthase [Arabidopsis thaliana]
  misc_feature (1)..(323): Homolog of NCBI NO: 21592832 NR Description: spermidine synthase [Arabidopsis thaliana]
  misc_feature (1)..(323): Homolog of NCBI NO: 15983394 NR Description: AT5g53120/MFH8_5 [Arabidopsis thaliana]
  misc_feature (1)..(323): Homolog of NCBI NO: 18423473 NR Description: spermidine synthase

SEQ ID NO: 41519 - DNA, 1538 bp, Arabidopsis thaliana
  misc_feature (1)..(1538): Ceres Seq. ID no. 12389171
  misc_feature: MA Experiment ID: 108573 Result: Up-regulated in Transcription
  misc_feature: MA Experiment 108573 PARAMETER Experiment Name: At_Drought_cDNA_P Parameter: Timepoint (hr) Value: 6
  misc_feature: MA Experiment 108573 PARAMETER Experiment Name: At_Drought_cDNA_P Parameter: Tissue Value: Aerial
  misc_feature: MA Experiment 108573 PARAMETER Experiment Name: At_Drought_cDNA_P Parameter: Treatment Value: Drought vs. No Drought
  misc_feature: MA Experiment ID: 108576 Result: Down-regulated in Transcription
  misc_feature: MA Experiment 108576 PARAMETER Experiment Name: At_42deg_Heat_cDNA_P Parameter: Temperature (deg C) Value: 42 vs. 22
  misc_feature: MA Experiment 108576 PARAMETER Experiment Name: At_42deg_Heat_cDNA_P Parameter: Timepoint (hr) Value: 1
  misc_feature: MA Experiment 108576 PARAMETER Experiment Name: At_42deg_Heat_cDNA_P Parameter: Tissue Value: Aerial
  misc_feature: MA Experiment ID: 108577 Result: Down-regulated in Transcription
  misc_feature: MA Experiment 108577 PARAMETER Experiment Name: At_42deg_Heat_cDNA_P Parameter: Temperature (deg C) Value: 42 vs. 22
  misc_feature: MA Experiment 108577 PARAMETER Experiment Name: At_42deg_Heat_cDNA_P Parameter: Timepoint (hr) Value: 6
  misc_feature: MA Experiment 108577 PARAMETER Experiment Name: At_42deg_Heat_cDNA_P Parameter: Tissue Value: Aerial
  misc_feature: MA Experiment ID: 108595 Result: Down-regulated in Transcription
  misc_feature: MA Experiment 108595 PARAMETER Experiment Name: At_Ler-pi_Ovule_cDNA_P Parameter: Plant Line Value: null
  misc_feature: MA Experiment ID: 20000111 Result: Down-regulated in Transcription
  misc_feature: MA Experiment 20000111 PARAMETER Experiment Name: At_42deg_Heat_cDNA_P Parameter: Temperature (deg C) Value: 42 vs. 22
  misc_feature: MA Experiment 20000111 PARAMETER Experiment Name: At_42deg_Heat_cDNA_P Parameter: Timepoint (hr) Value: 6
  misc_feature: MA Experiment 20000111 PARAMETER Experiment Name: At_42deg_Heat_cDNA_P Parameter: Tissue Value: Aerial
  misc_feature: MA Experiment ID: 20000112 Result: Down-regulated in Transcription
  misc_feature: MA Experiment 20000112 PARAMETER Experiment Name: At_42deg_Heat_cDNA_P Parameter: Temperature (deg C) Value: 42 vs. 22
  misc_feature: MA Experiment 20000112 PARAMETER Experiment Name: At_42deg_Heat_cDNA_P Parameter: Timepoint (hr) Value: 2
  misc_feature: MA Experiment 20000112 PARAMETER Experiment Name: At_42deg_Heat_cDNA_P Parameter: Tissue Value: Aerial
  misc_feature: MA Experiment ID: 20000113 Result: Down-regulated in Transcription
  misc_feature: MA Experiment 20000113 PARAMETER Experiment Name: At_42deg_Heat_cDNA_P Parameter: Temperature (deg C) Value: 42 vs. 22
  misc_feature: MA Experiment 20000113 PARAMETER Experiment Name: At_42deg_Heat_cDNA_P Parameter: Timepoint (hr) Value: 8
  misc_feature: MA Experiment 20000113 PARAMETER Experiment Name: At_42deg_Heat_cDNA_P Parameter: Tissue Value: Aerial
  misc_feature: MA Experiment ID: 20000144 Result: Down-regulated in Transcription
  misc_feature: MA Experiment 20000144 PARAMETER Experiment Name: At_42deg_Heat_cDNA_P Parameter: Temperature (deg C) Value: 42 vs. 22
  misc_feature: MA Experiment 20000144 PARAMETER Experiment Name: At_42deg_Heat_cDNA_P Parameter: Timepoint (hr) Value: 1
  misc_feature: MA Experiment 20000144 PARAMETER Experiment Name: At_42deg_Heat_cDNA_P Parameter: Tissue Value: Aerial
  misc_feature: MA Experiment ID: 20000224 Result: Down-regulated in Transcription
gattagattgtccctaggagtcactgttatcgctctttcaattactgtaatgttgaatttgggtttcatctactaactaagatgaagtttcttgtctctttctgtctccctctttcttaattcctctctacttttcggttaattgctcctcttcagctaactttggggctttaaagtgataggatggctcgcttcagttttccttgttttccaaattttgggggttttaatcaggctgtgacaaatcgggggcctgagatttcagaaactgctgataattgggtctcaccatctgacattccactcatagaacctaatagtaaagagcacaggatgagagaggcacagctaggcggtcacactctgaggtcccatggaatgactgttgcaaggactcacatgcatgattggatcattctcgtgttacttgttattctcgagtgtgtactccttataatccacccattttatcgctttgttggtaaagatatgatgactgatctaagttacccgttaaagagtaacaccgtaccaatttggtctgtcccggtatatgcgatgctgttacctttggtaatcttcatctttatctacttccgtcgaagagatgtttatgatcttcatcacgcggtgctaggtctcttatactctgttctggtgacagcagtacttaccgatgcaataaagaatgcagttggtcgaccacgtcctgacttcttctggcgttgttttccagatggcaaagctctttatgatagccttggagatgttatatgccatggtgataaaagcgtcataagggaaggtcacaaaagctttccaagtggacacacgtcatggtctttttcgggtctcggatttctttcgctttacttatcgggaaagattcaagcatttgacggtaaaggccacgttgcaaagctatgcatagtcatactccctttgctatttgcagctcttgtcggcatttcccgtgttgatgactattggcatcattggcaagacgtctttgcaggaggcttgctaggtcttgcgatctctacaatctgttatcttcaatttttcccgccaccatatcacaccgaaggttggggaccatatgcttacttccaagtgttggaggctgcgagagtgcaaggagcagcgaatggagcagtgcagcagccgccgccccaagttaacaacggtgaagaagaagacggtgggtttatgggtttacatttggtggataatccgactatgaggagagaagaggatgtagaaactggtagaggctgagatgaagaaactctgaagctggtttggttacttgttaggacactttctcttgttcttttgattctttgttggacaactttagtagatttctctaagataactaatagagtcgtttggttttggttttggtttaaatggatgaccggttttatggttccggtattggtggttaaagtttatgtttttcaaaaaagttcactggataaatgtagctttattttcaatattttaaggattgaaatcggatttgaacttaatcg

SEQ ID NO: 41520 - protein, 364 aa, Arabidopsis thaliana
  peptide (1)..(364): Ceres Seq. ID no. 12389172
  misc_feature (158)..(298): Pfam Name: PAP2 superfamily Pfam Description: PAP2 superfamily
  misc_feature (148)..(322): Homolog of NCBI NO: 32565034 NR Description: PA-phosphatase related phosphoesterase family
  misc_feature (133)..(306): Homolog of NCBI NO: 17137258 NR Description: wunen CG8804-PA [Drosophila melanogaster]
  misc_feature (148)..(299): Homolog of NCBI NO: 30584477 NR Description: Homo sapiens phosphatidic acid phosphatase type
  misc_feature (190)..(235): Homolog of NCBI NO: 34911402 NR Description: similar to phosphatidic acid phosphatase beta
  misc_feature (257)..(281): Homolog of NCBI NO: 34911402 NR Description: similar to phosphatidic acid phosphatase beta
  misc_feature (61)..(224): Homolog of NCBI NO: 34911402 NR Description: similar to phosphatidic acid phosphatase beta
  misc_feature (60)..(330): Homolog of NCBI NO: 34910912 NR Description: putative phosphatidic acid phosphatase beta
  misc_feature (51)..(322): Homolog of NCBI NO: 38637527 NR Description: putative phosphatidic acid phosphatase beta
  misc_feature (52)..(306): Homolog of NCBI NO: 34895654 NR Description: putative phosphatidic acid phosphatase alpha
  misc_feature (51)..(363): Homolog of NCBI NO: 38637528 NR Description: unknown protein [Oryza sativa (japonica
MARFSFPCFPNFGGFNQAVTNRGPEISETADNWVSPSDIPLIEPNSKEHRMREAQLGGHTLRSHGMTVARTHMHDWIILVLLVILECVLLIIHPFYRFVGKDMMTDLSYPLKSNTVPIWSVPVYAMLLPLVIFIFIYFRRRDVYDLHHAVLGLLYSVLVTAVLTDAIKNAVGRPRPDFFWRCFPDGKALYDSLGDVICHGDKSVIREGHKSFPSGHTSWSFSGLGFLSLYLSGKIQAFDGKGHVAKLCIVILPLLFAALVGISRVDDYWHHWQDVFAGGLLGLAISTICYLQFFPPPYHTEGWGPYAYFQVLEAARVQGAANGAVQQPPPQVNNGEEEDGGFMGLHLVDNPTMRREEDVETGRG

SEQ ID NO: 41521 - protein, 314 aa, Arabidopsis thaliana; identical to SEQ ID NO: 27353
  peptide (1)..(314): Ceres Seq. ID no. 12389173
  misc_feature (108)..(248): Pfam Name: PAP2 superfamily Pfam Description: PAP2 superfamily
  misc_feature (98)..(272): Homolog of NCBI NO: 32565034 NR Description: PA-phosphatase related phosphoesterase family
  misc_feature (83)..(256): Homolog of NCBI NO: 17137258 NR Description: wunen CG8804-PA [Drosophila melanogaster]
  misc_feature (98)..(249): Homolog of NCBI NO: 30584477 NR Description: Homo sapiens phosphatidic acid phosphatase type
  misc_feature (140)..(185): Homolog of NCBI NO: 34911402 NR Description: similar to phosphatidic acid phosphatase beta
  misc_feature (207)..(231): Homolog of NCBI NO: 34911402 NR Description: similar to phosphatidic acid phosphatase beta
  misc_feature (11)..(174): Homolog of NCBI NO: 34911402 NR Description: similar to phosphatidic acid phosphatase beta
  misc_feature (10)..(280): Homolog of NCBI NO: 34910912 NR Description: putative phosphatidic acid phosphatase beta
  misc_feature (1)..(272): Homolog of NCBI NO: 38637527 NR Description: putative phosphatidic acid phosphatase beta
  misc_feature (2)..(256): Homolog of NCBI NO: 34895654 NR Description: putative phosphatidic acid phosphatase alpha
  misc_feature (1)..(313): Homolog of NCBI NO: 38637528 NR Description: unknown protein [Oryza sativa (japonica

SEQ ID NO: 41522 - protein, 299 aa, Arabidopsis thaliana; identical to SEQ ID NO: 27354
  peptide (1)..(299): Ceres Seq. ID no. 12389174
  misc_feature (93)..(233): Pfam Name: PAP2 superfamily Pfam Description: PAP2 superfamily
  misc_feature (83)..(257): Homolog of NCBI NO: 32565034 NR Description: PA-phosphatase related phosphoesterase family
  misc_feature (68)..(241): Homolog of NCBI NO: 17137258 NR Description: wunen CG8804-PA [Drosophila melanogaster]
  misc_feature (83)..(234): Homolog of NCBI NO: 30584477 NR Description: Homo sapiens phosphatidic acid phosphatase type
  misc_feature (125)..(170): Homolog of NCBI NO: 34911402 NR Description: similar to phosphatidic acid phosphatase beta
  misc_feature (192)..(216): Homolog of NCBI NO: 34911402 NR Description: similar to phosphatidic acid phosphatase beta
  misc_feature (1)..(159): Homolog of NCBI NO: 34911402 NR Description: similar to phosphatidic acid phosphatase beta
  misc_feature (1)..(265): Homolog of NCBI NO: 34910912 NR Description: putative phosphatidic acid phosphatase beta
  misc_feature (1)..(257): Homolog of NCBI NO: 38637527 NR Description: putative phosphatidic acid phosphatase beta
  misc_feature (1)..(241): Homolog of NCBI NO: 34895654 NR Description: putative phosphatidic acid phosphatase alpha
  misc_feature (1)..(298): Homolog of NCBI NO: 38637528 NR Description: unknown protein [Oryza sativa (japonica

SEQ ID NO: 41523 - DNA, 1170 bp, Arabidopsis thaliana
  misc_feature (1)..(1170): Ceres Seq. ID no. 13491722
  misc_feature: MA Experiment ID: 108461 Result: Down-regulated in Transcription
  misc_feature: MA Experiment 108461 PARAMETER Experiment Name: At_Germinating_Seeds_cDNA_P Parameter: Age (day) Value: 1 vs. 0
  misc_feature: MA Experiment 108461 PARAMETER Experiment Name: At_Germinating_Seeds_cDNA_P Parameter: Tissue Value: Germinating Seeds
  misc_feature: MA Experiment ID: 108462 Result: Down-regulated in Transcription
  misc_feature: MA Experiment 108462 PARAMETER Experiment Name: At_Germinating_Seeds_cDNA_P Parameter: Age (day) Value: 2 vs. 0
  misc_feature: MA Experiment 108462 PARAMETER Experiment Name: At_Germinating_Seeds_cDNA_P Parameter: Tissue Value: Germinating Seeds
  misc_feature: MA Experiment ID: 108463 Result: Down-regulated in Transcription
  misc_feature: MA Experiment 108463 PARAMETER Experiment Name: At_Germinating_Seeds_cDNA_P Parameter: Age (day) Value: 3 vs. 0
  misc_feature: MA Experiment 108463 PARAMETER Experiment Name: At_Germinating_Seeds_cDNA_P Parameter: Tissue Value: Germinating Seeds
  misc_feature: MA Experiment ID: 108464 Result: Down-regulated in Transcription
  misc_feature: MA Experiment 108464 PARAMETER Experiment Name: At_Germinating_Seeds_cDNA_P Parameter: Age (day) Value: 4 vs. 0
  misc_feature: MA Experiment 108464 PARAMETER Experiment Name: At_Germinating_Seeds_cDNA_P Parameter: Tissue Value: Germinating Seeds
  misc_feature: MA Experiment ID: 108488 Result: Down-regulated in Transcription
  misc_feature: MA Experiment ID: 20000306 Result: Down-regulated in Transcription
  misc_feature: MA Experiment 20000306 PARAMETER Experiment Name: At_Germinating_Seeds_Sub_P Parameter: Age (hr) Value: 6 vs. 0
  misc_feature: MA Experiment 20000306 PARAMETER Experiment Name: At_Germinating_Seeds_Sub_P Parameter: Organism Value: A. thaliana
  misc_feature: MA Experiment 20000306 PARAMETER Experiment Name: At_Germinating_Seeds_Sub_P Parameter: Plant Line Value: WS
  misc_feature: MA Experiment 20000306 PARAMETER Experiment Name: At_Germinating_Seeds_Sub_P Parameter: Tissue Value: Germinating Seeds
  misc_feature: MA Experiment ID: 20000307 Result: Down-regulated in Transcription
  misc_feature: MA Experiment 20000307 PARAMETER Experiment Name: At_Germinating_Seeds_Sub_P Parameter: Age (hr) Value: 24 vs. 0
  misc_feature: MA Experiment 20000307 PARAMETER Experiment Name: At_Germinating_Seeds_Sub_P Parameter: Organism Value: A. thaliana
  misc_feature: MA Experiment 20000307 PARAMETER Experiment Name: At_Germinating_Seeds_Sub_P Parameter: Plant Line Value: WS
  misc_feature: MA Experiment 20000307 PARAMETER Experiment Name: At_Germinating_Seeds_Sub_P Parameter: Tissue Value: Germinating Seeds
  misc_feature: MA Experiment ID: 20000329 Result: Up-regulated in Transcription
  misc_feature: MA Experiment 20000329 PARAMETER Experiment Name: At_4deg_Cold_Sub_P Parameter: Age (day) Value: 14
  misc_feature: MA Experiment 20000329 PARAMETER Experiment Name: At_4deg_Cold_Sub_P Parameter: Organism Value: A. thaliana
  misc_feature: MA Experiment 20000329 PARAMETER Experiment Name: At_4deg_Cold_Sub_P Parameter: Plant Line Value: WS
  misc_feature: MA Experiment 20000329 PARAMETER Experiment Name: At_4deg_Cold_Sub_P Parameter: Temperature (deg C) Value: 4 vs. 22
  misc_feature: MA Experiment 20000329 PARAMETER Experiment Name: At_4deg_Cold_Sub_P Parameter: Timepoint (hr) Value: 6
  misc_feature: MA Experiment 20000329 PARAMETER Experiment Name: At_4deg_Cold_Sub_P Parameter: Tissue Value: Aerial
aagttagaagacgatatccgctctgaagcagaagaaaaggtaattctgaatgtctggaagaaaccggattcacagagatatccgagacagctatcatgatcatcgtgatttacctccggagagaccttttctccgaggccctccattgttacaacctccaccaccatctttgttagaagatcttcagatacaggagggtgaaatcagaaggcaggatgctgaaatcagaaggcttttgagtgataatcatggactagctgacgaccgaatggttctggagagagaactcgttgctgctaaagaagagcttcaccgaatgaatctgatgatttctgatcttcgtgctgagcaagatctgcaattgagggagtttagtgagaaaaggcataaacttgagggggatgttcgcgctatggagtcgtataagaaggaggcttcacagttgcgtggtgaagttcagaagctggatgagattaaacgtgaattaagtggaaatgttcagttgcttaggaaagatttggctaaattgcaatcagataacaagcagattcctggtatgagagctgaggttaaagacctgcagaaggagcttatgcatgctagagatgcaattgaatatgagaagaaggaaaagtttgagcttatggagcagcggcagacaatggaaaagaacatggtttctatggcgcgtgaagttgaaaagctacgcgcagaacttgctactgttgatagtaggccgtggggttttggtggatcgtatgggatgaattacaacaatatggacggcactttccgtggctcgtatggcgaaaacgatacttatttgggatcttcggaaaggagtcaatattacagccatgggtctggctcgcagaagaaacctcgtttggatcgtcattgaaatctaaaatgatctgtggaaaaagaatgaggtgacgactaaatagcccacttctcaatactcctctggttgtttgtgggtatgcatctactctaaatctaaatgttagttcttctgcttttttaataaggcgttatagttatgtaacttagatggctttttttctttctttctttttagccaagcttagatggctaatctatttcgtatgtttcaataatttgacgatttggttcttcttgcttgctattaattgtgttctattatcc

SEQ ID NO: 41524 - protein, 283 aa, Arabidopsis thaliana
  peptide (1)..(283): Ceres Seq. ID no. 13491723
  misc_feature (40)..(229): Pfam Name: Myosin tail Pfam Description: Myosin tail
  misc_feature (45)..(229): Homolog of NCBI NO: 38605778 NR Description: OSJNBa0044K18.21 [Oryza sativa (japonica
  misc_feature (20)..(272): Homolog of NCBI NO: 28876008 NR Description: hypothetical protein [Oryza sativa (japonica
  misc_feature (13)..(242): Homolog of NCBI NO: 30697468 NR Description: expressed protein [Arabidopsis thaliana]
  misc_feature (13)..(242): Homolog of NCBI NO: 25404669 NR Description: hypothetical protein F5A8.8 [imported] -
  misc_feature (15)..(278): Homolog of NCBI NO: 33146484 NR Description: myosin-like protein [Oryza sativa (japonica
  misc_feature (22)..(248): Homolog of NCBI NO: 18400511 NR Description: expressed protein [Arabidopsis thaliana]
  misc_feature (22)..(248): Homolog of NCBI NO: 9294396 NR Description: gb|AAD10662.1~gene_id:MIE1.26~similar to unknown
  misc_feature (1)..(261): Homolog of NCBI NO: 38175471 NR Description: myosin-like protein [Oryza sativa (japonica
  misc_feature (1)..(266): Homolog of NCBI NO: 25405799 NR Description: myosin-like protein, 97843-94399
  misc_feature (1)..(283): Homolog of NCBI NO: 18405242 NR Description: myosin -related [Arabidopsis thaliana]
MSGRNRIHRDIRDSYHDHRDLPPERPFLRGPPLLQPPPPSLLEDLQIQEGEIRRQDAEIRRLLSDNHGLADDRMVLERELVAAKEELHRMNLMISDLRAEQDLQLREFSEKRHKLEGDVRAMESYKKEASQLRGEVQKLDEIKRELSGNVQLLRKDLAKLQSDNKQIPGMRAEVKDLQKELMHARDAIEYEKKEKFELMEQRQTMEKNMVSMAREVEKLRAELATVDSRPWGFGGSYGMNYNNMDGTFRGSYGENDTYLGSSERSQYYSHGSGSQKKPRLDRH

SEQ ID NO: 41525 - protein, 210 aa, Arabidopsis thaliana
  peptide (1)..(210): Ceres Seq. ID no. 13491724
  misc_feature (1)..(156): Pfam Name: Myosin tail Pfam Description: Myosin tail
  misc_feature (1)..(156): Homolog of NCBI NO: 38605778 NR Description: OSJNBa0044K18.21 [Oryza sativa (japonica
  misc_feature (1)..(199): Homolog of NCBI NO: 28876008 NR Description: hypothetical protein [Oryza sativa (japonica
  misc_feature (1)..(169): Homolog of NCBI NO: 30697468 NR Description: expressed protein [Arabidopsis thaliana]
  misc_feature (1)..(169): Homolog of NCBI NO: 25404669 NR Description: hypothetical protein F5A8.8 [imported] -
  misc_feature (1)..(205): Homolog of NCBI NO: 33146484 NR Description: myosin-like protein [Oryza sativa (japonica
  misc_feature (1)..(175): Homolog of NCBI NO: 18400511 NR Description: expressed protein [Arabidopsis thaliana]
  misc_feature (1)..(175): Homolog of NCBI NO: 9294396 NR Description: gb|AAD10662.1~gene_id:MIE1.26~similar to unknown
  misc_feature (1)..(188): Homolog of NCBI NO: 38175471 NR Description: myosin-like protein [Oryza sativa (japonica
  misc_feature (1)..(193): Homolog of NCBI NO: 25405799 NR Description: myosin-like protein, 97843-94399
  misc_feature (1)..(210): Homolog of NCBI NO: 18405242 NR Description: myosin -related [Arabidopsis thaliana]
MVLERELVAAKEELHRMNLMISDLRAEQDLQLREFSEKRHKLEGDVRAMESYKKEASQLRGEVQKLDEIKRELSGNVQLLRKDLAKLQSDNKQIPGMRAEVKDLQKELMHARDAIEYEKKEKFELMEQRQTMEKNMVSMAREVEKLRAELATVDSRPWGFGGSYGMNYNNMDGTFRGSYGENDTYLGSSERSQYYSHGSGSQKKPRLDRH

SEQ ID NO: 41526 - protein, 194 aa, Arabidopsis thaliana
  peptide (1)..(194): Ceres Seq. ID no. 13491725
  misc_feature (1)..(140): Pfam Name: Myosin tail Pfam Description: Myosin tail
  misc_feature (1)..(140): Homolog of NCBI NO: 38605778 NR Description: OSJNBa0044K18.21 [Oryza sativa (japonica
  misc_feature (1)..(183): Homolog of NCBI NO: 28876008 NR Description: hypothetical protein [Oryza sativa (japonica
  misc_feature (1)..(153): Homolog of NCBI NO: 30697468 NR Description: expressed protein [Arabidopsis thaliana]
  misc_feature (1)..(153): Homolog of NCBI NO: 25404669 NR Description: hypothetical protein F5A8.8 [imported] -
  misc_feature (1)..(189): Homolog of NCBI NO: 33146484 NR Description: myosin-like protein [Oryza sativa (japonica
  misc_feature (1)..(159): Homolog of NCBI NO: 18400511 NR Description: expressed protein [Arabidopsis thaliana]
  misc_feature (1)..(159): Homolog of NCBI NO: 9294396 NR Description: gb|AAD10662.1~gene_id:MIE1.26~similar to unknown
  misc_feature (1)..(172): Homolog of NCBI NO: 38175471 NR Description: myosin-like protein [Oryza sativa (japonica
  misc_feature (1)..(177): Homolog of NCBI NO: 25405799 NR Description: myosin-like protein, 97843-94399
  misc_feature (1)..(194): Homolog of NCBI NO: 18405242 NR Description: myosin -related [Arabidopsis thaliana]
MNLMISDLRAEQDLQLREFSEKRHKLEGDVRAMESYKKEASQLRGEVQKLDEIKRELSGNVQLLRKDLAKLQSDNKQIPGMRAEVKDLQKELMHARDAIEYEKKEKFELMEQRQTMEKNMVSMAREVEKLRAELATVDSRPWGFGGSYGMNYNNMDGTFRGSYGENDTYLGSSERSQYYSHGSGSQKKPRLDRH

SEQ ID NO: 41527 - DNA, 1376 bp, Arabidopsis thaliana
  misc_feature (1)..(1376): Ceres Seq. ID no. 12395085
  misc_feature: MA Experiment ID: 108501 Result: Up-regulated in Transcription
  misc_feature: MA Experiment 108501 PARAMETER Experiment Name: At_ap2_floral_buds_cDNA_P Parameter: Plant Line Value: ap2 (Ler.)
  misc_feature: MA Experiment 108501 PARAMETER Experiment Name: At_ap2_floral_buds_cDNA_P Parameter: Tissue Value: Closed Flower
  misc_feature: MA Experiment ID: 108607 Result: Up-regulated in Transcription
  misc_feature: MA Experiment 108607 PARAMETER Experiment Name: At_100uM_ABA_cDNA_P Parameter: Timepoint (hr) Value: 4
  misc_feature: MA Experiment 108607 PARAMETER Experiment Name: At_100uM_ABA_cDNA_P Parameter: Tissue Value: Aerial
  misc_feature: MA Experiment 108607 PARAMETER Experiment Name: At_100uM_ABA_cDNA_P Parameter: Treatment Value: 100uM ABA vs. No Treatment
  misc_feature: MA Experiment ID: 20000112 Result: Down-regulated in Transcription
  misc_feature: MA Experiment 20000112 PARAMETER Experiment Name: At_42deg_Heat_cDNA_P Parameter: Temperature (deg C) Value: 42 vs. 22
  misc_feature: MA Experiment 20000112 PARAMETER Experiment Name: At_42deg_Heat_cDNA_P Parameter: Timepoint (hr) Value: 2
  misc_feature: MA Experiment 20000112 PARAMETER Experiment Name: At_42deg_Heat_cDNA_P Parameter: Tissue Value: Aerial
  misc_feature: MA Experiment ID: 20000144 Result: Down-regulated in Transcription
  misc_feature: MA Experiment 20000144 PARAMETER Experiment Name: At_42deg_Heat_cDNA_P Parameter: Temperature (deg C) Value: 42 vs. 22
  misc_feature: MA Experiment 20000144 PARAMETER Experiment Name: At_42deg_Heat_cDNA_P Parameter: Timepoint (hr) Value: 1
  misc_feature: MA Experiment 20000144 PARAMETER Experiment Name: At_42deg_Heat_cDNA_P Parameter: Tissue Value: Aerial
  misc_feature: MA Experiment ID: 20000171 Result: Down-regulated in Transcription
  misc_feature: MA Experiment 20000171 PARAMETER Experiment Name: At_42deg_Heat_P Parameter: Age (day) Value: 14
  misc_feature: MA Experiment 20000171 PARAMETER Experiment Name: At_42deg_Heat_P Parameter: Organism Value: A. thaliana
  misc_feature: MA Experiment 20000171 PARAMETER Experiment Name: At_42deg_Heat_P Parameter: Plant Line Value: WS
  misc_feature: MA Experiment 20000171 PARAMETER Experiment Name: At_42deg_Heat_P Parameter: Temperature (deg C) Value: 42 vs. 22
  misc_feature: MA Experiment 20000171 PARAMETER Experiment Name: At_42deg_Heat_P Parameter: Timepoint (hr) Value: 1
  misc_feature: MA Experiment 20000171 PARAMETER Experiment Name: At_42deg_Heat_P Parameter: Tissue Value: Aerial
  misc_feature: MA Experiment ID: 20000173 Result: Down-regulated in Transcription
  misc_feature: MA Experiment 20000173 PARAMETER Experiment Name: At_42deg_Heat_P Parameter: Age (day) Value: 14
  misc_feature: MA Experiment 20000173 PARAMETER Experiment Name: At_42deg_Heat_P Parameter: Organism Value: A. thaliana
  misc_feature: MA Experiment 20000173 PARAMETER Experiment Name: At_42deg_Heat_P Parameter: Plant Line Value: WS
  misc_feature: MA Experiment 20000173 PARAMETER Experiment Name: At_42deg_Heat_P Parameter: Temperature (deg C) Value: 42 vs. 22
  misc_feature: MA Experiment 20000173 PARAMETER Experiment Name: At_42deg_Heat_P Parameter: Timepoint (hr) Value: 6
  misc_feature: MA Experiment 20000173 PARAMETER Experiment Name: At_42deg_Heat_P Parameter: Tissue Value: Aerial
  misc_feature: MA Experiment ID: 20000185 Result: Down-regulated in Transcription
  misc_feature: MA Experiment 20000185 PARAMETER Experiment Name: At_Roots__P Parameter: Age (day) Value: 7 vs. 21
  misc_feature: MA Experiment 20000185 PARAMETER Experiment Name: At_Roots__P Parameter: Organism Value: A. thaliana
  misc_feature: MA Experiment 20000185 PARAMETER Experiment Name: At_Roots__P Parameter: Tissue Value: Roots vs. Whole Plant
  misc_feature: MA Experiment ID: 20000235 Result: Down-regulated in Transcription
  misc_feature: MA Experiment 20000235 PARAMETER Experiment Name: At_Siliques_P Parameter: Age (day) Value: 21
  misc_feature: MA Experiment 20000235 PARAMETER Experiment Name: At_Siliques_P Parameter: Organism Value: A. thaliana
  misc_feature: MA Experiment 20000235 PARAMETER Experiment Name: At_Siliques_P Parameter: Plant Line Value: WS
  misc_feature: MA Experiment 20000235 PARAMETER Experiment Name: At_Siliques_P Parameter: Tissue Value: 5-10mm Siliques vs. Whole Plant
  misc_feature: MA Experiment ID: 20000439 Result: Down-regulated in Transcription
  misc_feature: MA Experiment 20000439 PARAMETER Experiment Name: At_Roots__P Parameter: Age (day) Value: 14 vs. 21
  misc_feature: MA Experiment 20000439 PARAMETER Experiment Name: At_Roots__P Parameter: Organism Value: A. thaliana
  misc_feature: MA Experiment 20000439 PARAMETER Experiment Name: At_Roots__P Parameter: Tissue Value: Roots vs. Whole Plant
  misc_feature: MA Experiment ID: 20000451 Result: Up-regulated in Transcription
  misc_feature: MA Experiment 20000451 PARAMETER Experiment Name: At_CS6879_Shoots-Roots_P Parameter: Age (day) Value: 14
  misc_feature: MA Experiment 20000451 PARAMETER Experiment Name: At_CS6879_Shoots-Roots_P Parameter: Organism Value: A. thaliana
  misc_feature: MA Experiment 20000451 PARAMETER Experiment Name: At_CS6879_Shoots-Roots_P Parameter: Plant Line Value: CS6879 vs. WS
  misc_feature: MA Experiment 20000451 PARAMETER Experiment Name: At_CS6879_Shoots-Roots_P Parameter: Tissue Value: Roots
  misc_feature: MA Experiment ID: 20000495 Result: Down-regulated in Transcription
  misc_feature: MA Experiment 20000495 PARAMETER Experiment Name: At_Guard_Cells_P Parameter: Harvest Date Value: 8/2/2002
  misc_feature: MA Experiment 20000495 PARAMETER Experiment Name: At_Guard_Cells_P Parameter: Organism Value: A. thaliana
  misc_feature: MA Experiment 20000495 PARAMETER Experiment Name: At_Guard_Cells_P Parameter: Tissue Value: Guard Cells vs. Leaves
  misc_feature: MA Experiment ID: 20000573 Result: Down-regulated in Transcription
  misc_feature: MA Experiment 20000573 PARAMETER Experiment Name: At_100uM_ABA_Mutants__P Parameter: Organism Value: A. thaliana
  misc_feature: MA Experiment 20000573 PARAMETER Experiment Name: At_100uM_ABA_Mutants__P Parameter: Plant Line Value: CS22 vs. Ler wt
  misc_feature: MA Experiment 20000573 PARAMETER Experiment Name: At_100uM_ABA_Mutants__P Parameter: Timepoint (hr) Value: N/A
  misc_feature: MA Experiment 20000573 PARAMETER Experiment Name: At_100uM_ABA_Mutants__P Parameter: Tissue Value: Whole Plant
  misc_feature: MA Experiment 20000573 PARAMETER Experiment Name: At_100uM_ABA_Mutants__P Parameter: Treatment Value: None
  misc_feature: MA Experiment ID: 20000574 Result: Down-regulated in Transcription
  misc_feature: MA Experiment 20000574 PARAMETER Experiment Name: At_100uM_ABA_Mutants__P Parameter: Organism Value: A. thaliana
  misc_feature: MA Experiment 20000574 PARAMETER Experiment Name: At_100uM_ABA_Mutants__P Parameter: Plant Line Value: CS23 vs. Ler wt
  misc_feature: MA Experiment 20000574 PARAMETER Experiment Name: At_100uM_ABA_Mutants__P Parameter: Timepoint (hr) Value: N/A
  misc_feature: MA Experiment 20000574 PARAMETER Experiment Name: At_100uM_ABA_Mutants__P Parameter: Tissue Value: Whole Plant
  misc_feature: MA Experiment 20000574 PARAMETER Experiment Name: At_100uM_ABA_Mutants__P Parameter: Treatment Value: None
  misc_feature: MA Experiment ID: 20001910 Result: Up-regulated in Transcription
  misc_feature: MA Experiment 20001910 PARAMETER Experiment Name: At_Drought_Reproduction_P Parameter: Age (day) Value: 37
  misc_feature: MA Experiment 20001910 PARAMETER Experiment Name: At_Drought_Reproduction_P Parameter: Organism Value: A. thaliana
  misc_feature: MA Experiment 20001910 PARAMETER Experiment Name: At_Drought_Reproduction_P Parameter: Plant Line Value: WS
  misc_feature: MA Experiment 20001910 PARAMETER Experiment Name: At_Drought_Reproduction_P Parameter: Timepoint (day) Value: 7
  misc_feature: MA Experiment 20001910 PARAMETER Experiment Name: At_Drought_Reproduction_P Parameter: Tissue Value: Flowers
  misc_feature: MA Experiment 20001910 PARAMETER Experiment Name: At_Drought_Reproduction_P Parameter: Treatment Value: Drought vs. No Drought
atgcatctccttcaaaggttcattttctttcattctgagtttgttccatcgctccaactttcaaacacaagtgcttttgtcttaagaccttttctcttcgggttcgtgagttaagggttcttcttcttcttcttcttttttctctaaactggaaaataaagaagaaaagaacatggatttgcattcttgtctaaactcatactttcttttgctcctcctctgtcttcttaatattaccaccattaactcaacgaagccattagaacaagaaacagtgctttttggcggcaactttccggctttttatgttattggagattcattggttgattcaggaaacaataatcatcttacaacgatggtcaaatcgaattttccaccttatggttcggactttgaaggtggcaaagccaccggccgtttcagcaatggcaaaacaattgctgattacattgctatctactatggtcttcctttggttcctgcttatttgggattatctcaagaagaaaagaatagtatctcaactggtattaactatgcttctgctggctgtgggattcttcctcagacaggaaggcaaataggaacatgtctctcgttaagtgtccaagtcgatatgttccaggagaccatcacaaacaatctgaagaagaacttcaagaagtccgagctccgtgaacacttggctgaatcgttgtttatgatcgccattggggttaacgactacacattcttatttaatgaaacaaccgatgcgaatgagtttgcaaacaagcttcttcatgattacttgcttcaaatagaaagattgcacaagttaggagcaaggaagttcttcatcaacaacattaaaccattaggatgttacccaaatgttgtagctaagaccgtgccacgtggaagctgcaacgatgctttgaactttgcggtcagcattttcaacactaagcttagaaaaagtctgtctcgtatgacgcaaaaattcatcaaaacgtcctttttatactcggattactacaactacatgttgggactaagaggaccttcaagcaatcaagttggttcgagtctattgaacgtgacaagcccatgttgtcctaacgtttatgatggaggtcaattgacaagttgcaagcctggttcgatcgcgtgtaaggcacccgatactcatattttctttgatccgtttcatccgactcaattggcgaattacatgtatgcgattgcgtgtttccacgagagaagtatttgccatgtgatattggaagattaacttttgtcggcaacaatcttttttgtttgttttaaacaccaatttggttgttgtttgttgctttcaacttttcaatatcatcagaacttttaagattacc

SEQ ID NO: 41528 - protein, 367 aa, Arabidopsis thaliana
  peptide (1)..(367): Ceres Seq. ID no. 12395086
  misc_feature (44)..(354): Pfam Name: GDSL-like Lipase/Acylhydrolase Pfam Description: GDSL-like Lipase/Acylhydrolase
  misc_feature (1)..(356): Homolog of NCBI NO: 15224005 NR Description: putative GDSL-motif lipase/acylhydrolase; protein
  misc_feature (8)..(346): Homolog of NCBI NO: 15240452 NR Description: GDSL-motif lipase/hydrolase-like protein
  misc_feature (42)..(359): Homolog of NCBI NO: 21592417 NR Description: lipase/hydrolase, putative [Arabidopsis thaliana]
  misc_feature (42)..(359): Homolog of NCBI NO: 15220514 NR Description: lipase/hydrolase, putative
  misc_feature (39)..(364): Homolog of NCBI NO: 18409881 NR Description: hypothetical protein; protein id: At1g71691.1
  misc_feature (12)..(351): Homolog of NCBI NO: 11280578 NR Description: hypothetical protein F14F8_100 - Arabidopsis
  misc_feature (12)..(351): Homolog of NCBI NO: 18417760 NR Description: putative protein
  misc_feature (1)..(364): Homolog of NCBI NO: 15241626 NR Description: GDSL-motif lipase acylhydrolase-like protein
  misc_feature (1)..(245): Homolog of NCBI NO: 15228057 NR Description: putative GDSL-motif lipase/hydrolase; protein id:
  misc_feature (1)..(367): Homolog of NCBI NO: 15228051 NR Description: putative GDSL-motif lipase/hydrolase
MDLHSCLNSYFLLLLLCLLNITTINSTKPLEQETVLFGGNFPAFYVIGDSLVDSGNNNHLTTMVKSNFPPYGSDFEGGKATGRFSNGKTIADYIAIYYGLPLVPAYLGLSQEEKNSISTGINYASAGCGILPQTGRQIGTCLSLSVQVDMFQETITNNLKKNFKKSELREHLAESLFMIAIGVNDYTFLFNETTDANEFANKLLHDYLLQIERLHKLGARKFFINNIKPLGCYPNVVAKTVPRGSCNDALNFAVSIFNTKLRKSLSRMTQKFIKTSFLYSDYYNYMLGLRGPSSNQVGSSLLNVTSPCCPNVYDGGQLTSCKPGSIACKAPDTHIFFDPFHPTQLANYMYAIACFHERSICHVILED

SEQ ID NO: 41529 - protein, 305 aa, Arabidopsis thaliana; identical to SEQ ID NO: 37441
  peptide (1)..(305): Ceres Seq. ID no. 12395087
  misc_feature (1)..(292): Pfam Name: GDSL-like Lipase/Acylhydrolase Pfam Description: GDSL-like Lipase/Acylhydrolase
  misc_feature (1)..(294): Homolog of NCBI NO: 15224005 NR Description: putative GDSL-motif lipase/acylhydrolase; protein
  misc_feature (1)..(284): Homolog of NCBI NO: 15240452 NR Description: GDSL-motif lipase/hydrolase-like protein
  misc_feature (1)..(297): Homolog of NCBI NO: 21592417 NR Description: lipase/hydrolase, putative [Arabidopsis thaliana]
  misc_feature (1)..(297): Homolog of NCBI NO: 15220514 NR Description: lipase/hydrolase, putative
  misc_feature (1)..(302): Homolog of NCBI NO: 18409881 NR Description: hypothetical protein; protein id: At1g71691.1
  misc_feature (1)..(289): Homolog of NCBI NO: 11280578 NR Description: hypothetical protein F14F8_100 - Arabidopsis
  misc_feature (1)..(289): Homolog of NCBI NO: 18417760 NR Description: putative protein
  misc_feature (1)..(302): Homolog of NCBI NO: 15241626 NR Description: GDSL-motif lipase acylhydrolase-like protein
  misc_feature (1)..(183): Homolog of NCBI NO: 15228057 NR Description: putative GDSL-motif lipase/hydrolase; protein id:
  misc_feature (1)..(305): Homolog of NCBI NO: 15228051 NR Description: putative GDSL-motif lipase/hydrolase

SEQ ID NO: 41530 - protein, 218 aa, Arabidopsis thaliana
  peptide (1)..(218): Ceres Seq. ID no. 12395088
  misc_feature (1)..(205): Pfam Name: GDSL-like Lipase/Acylhydrolase Pfam Description: GDSL-like Lipase/Acylhydrolase
  misc_feature (1)..(207): Homolog of NCBI NO: 15224005 NR Description: putative GDSL-motif lipase/acylhydrolase; protein
  misc_feature (1)..(197): Homolog of NCBI NO: 15240452 NR Description: GDSL-motif lipase/hydrolase-like protein
  misc_feature (1)..(210): Homolog of NCBI NO: 21592417 NR Description: lipase/hydrolase, putative [Arabidopsis thaliana]
  misc_feature (1)..(210): Homolog of NCBI NO: 15220514 NR Description: lipase/hydrolase, putative
  misc_feature (1)..(215): Homolog of NCBI NO: 18409881 NR Description: hypothetical protein; protein id: At1g71691.1
  misc_feature (1)..(202): Homolog of NCBI NO: 11280578 NR Description: hypothetical protein F14F8_100 - Arabidopsis
  misc_feature (1)..(202): Homolog of NCBI NO: 18417760 NR Description: putative protein
  misc_feature (1)..(215): Homolog of NCBI NO: 15241626 NR Description: GDSL-motif lipase acylhydrolase-like protein
  misc_feature (1)..(96): Homolog of NCBI NO: 15228057 NR Description: putative GDSL-motif lipase/hydrolase; protein id:
  misc_feature (1)..(218): Homolog of NCBI NO: 15228051 NR Description: putative GDSL-motif lipase/hydrolase
MFQETITNNLKKNFKKSELREHLAESLFMIAIGVNDYTFLFNETTDANEFANKLLHDYLLQIERLHKLGARKFFINNIKPLGCYPNVVAKTVPRGSCNDALNFAVSIFNTKLRKSLSRMTQKFIKTSFLYSDYYNYMLGLRGPSSNQVGSSLLNVTSPCCPNVYDGGQLTSCKPGSIACKAPDTHIFFDPFHPTQLANYMYAIACFHERSICHVILED

SEQ ID NO: 41531 - DNA, 1608 bp, Arabidopsis thaliana
  misc_feature (1)..(1608): Ceres Seq. ID no. 13592782
ctaatccaaaaacttcctagaaaagtaagtatatacctttctctgtatttccttcacctccggctaaatctccggcgaccgcgtaacttgttctccggtctgaatagtgaataaacacacacacggagccaaatccaggagaaattaggtttgaattagagagattaggagaatacaaattggtttggtggttttcaagtatgctaccaagtgggttgaaagaaacccaactccgtgagagcaacaacaaccaaaaagtccatcctcaaccaatggaagagtctatcaatcagaatcctgaagctatggaagcacttatctccaatctcttcggaaacatctcgtctttgaaatctgcttatatcgagcttcaaagtgctcatactccttacgatcccgagaagattcaggcagcggacaaagttgtcatttctgaactcaagaatctttccgaaatgaagcatttttacagagagaataaccccaaacctgtatgtgtctctccacaagactctcgtttagctgcagagatccaagagcagcagagtttgttgaagacttatgaggttatggtgaagaagtttcagtctgagattcagaacaaggattctgagatcacgcagatgctacagaagattgaggaagcaaaccagaaacggcttaagcttgataagaatcttaagttaagaggaatgtctacaaacgaaggttctaatggagatggaaatatgcagtttcctgacttaactactgaactctatgtatctacttacgaagctgctgctaaagccgtgcacgatttctccaagccgctaatcaacatgatgaaagcagcaggatgggatcttgattctgcagccaattctattgagcctgatgttgtttacgccaagaggcctcacaagaaatatgcatttgaatcatacatatgccaaaggatgttcagtgggtttcagcagaagaacttctcagtaaactcagagagtgctgcggttatggccgatgatgacacagacacctttttccgccagtttcttgctctcaaggacatggatccactagatgctctaggtacaaaccctgattccaactttggtatattctgcaggagcaagtatctcctcttggtccacccaaagatggaagcttctttctttggaaatctagaccagcgtgactacgtgacaggaggtgggcacccgaggactgcgttttaccaggccttcttaaaacttgcaaagtcgatatggatcttgcacaggcttgcttactcttttgatccagctgcaaagatcttccaagtgaaaaagggtagtgagttctctgattcatacatggaaagtgttgtgaagaacatagttgtggatgaaaaagaagagaacccaagagttggtcttatggttatgcctgggttttggattggtggcagtgtcattcaaagccgagtttatgtttctggtgtgaaggtccttgagtgaaggatctcaggaactctcttaatgcttcttcccactttgttgtgcaacttttattttctctttgttataagcaagcctatatgtatcatctattgttaaaaaaaaatggaattaatatcttcttcgtctc

SEQ ID NO: 41532 - protein, 425 aa, Arabidopsis thaliana
  peptide (1)..(425): Ceres Seq. ID no. 13592783
  misc_feature (25)..(160): Pfam Name: Plant protein of unknown function (DUF641) Pfam Description: Plant protein of unknown function (DUF641)
  misc_feature (35)..(419): Homolog of NCBI NO: 34903732 NR Description: unnamed protein product [Oryza sativa (japonica
  misc_feature (38)..(418): Homolog of NCBI NO: 37535904 NR Description: hypothetical protein [Oryza sativa (japonica
  misc_feature (38)..(420): Homolog of NCBI NO: 15232398 NR Description: expressed protein [Arabidopsis thaliana]
  misc_feature (25)..(419): Homolog of NCBI NO: 15219282 NR Description: expressed protein [Arabidopsis thaliana]
  misc_feature (35)..(419): Homolog of NCBI NO: 15231944 NR Description: expressed protein [Arabidopsis thaliana]
  misc_feature (35)..(419): Homolog of NCBI NO: 8777470 NR Description: gb|AAB82637.1~gene_id:K15M2.1~similar to unknown
  misc_feature (25)..(310): Homolog of NCBI NO: 15234143 NR Description: hypothetical protein [Arabidopsis thaliana]
  misc_feature (322)..(386): Homolog of NCBI NO: 15235221 NR Description: expressed protein [Arabidopsis thaliana]
  misc_feature (25)..(290): Homolog of NCBI NO: 15235221 NR Description: expressed protein [Arabidopsis thaliana]
  misc_feature (1)..(425): Homolog of NCBI NO: 15225441 NR Description: expressed protein [Arabidopsis thaliana]
MLPSGLKETQLRESNNNQKVHPQPMEESINQNPEAMEALISNLFGNISSLKSAYIELQSAHTPYDPEKIQAADKVVISELKNLSEMKHFYRENNPKPVCVSPQDSRLAAEIQEQQSLLKTYEVMVKKFQSEIQNKDSEITQMLQKIEEANQKRLKLDKNLKLRGMSTNEGSNGDGNMQFPDLTTELYVSTYEAAAKAVHDFSKPLINMMKAAGWDLDSAANSIEPDVVYAKRPHKKYAFESYICQRMFSGFQQKNFSVNSESAAVMADDDTDTFFRQFLALKDMDPLDALGTNPDSNFGIFCRSKYLLLVHPKMEASFFGNLDQRDYVTGGGHPRTAFYQAFLKLAKSIWILHRLAYSFDPAAKIFQVKKGSEFSDSYMESVVKNIVVDEKEENPRVGLMVMPGFWIGGSVIQSRVYVSGVKVLE

SEQ ID NO: 41533 - protein, 401 aa, Arabidopsis thaliana
  peptide (1)..(401): Ceres Seq. ID no. 13592784
  misc_feature (1)..(136): Pfam Name: Plant protein of unknown function (DUF641) Pfam Description: Plant protein of unknown function (DUF641)
  misc_feature (11)..(395): Homolog of NCBI NO: 34903732 NR Description: unnamed protein product [Oryza sativa (japonica
  misc_feature (14)..(394): Homolog of NCBI NO: 37535904 NR Description: hypothetical protein [Oryza sativa (japonica
  misc_feature (14)..(396): Homolog of NCBI NO: 15232398 NR Description: expressed protein [Arabidopsis thaliana]
  misc_feature (1)..(395): Homolog of NCBI NO: 15219282 NR Description: expressed protein [Arabidopsis thaliana]
  misc_feature (11)..(395): Homolog of NCBI NO: 15231944 NR Description: expressed protein [Arabidopsis thaliana]
  misc_feature (11)..(395): Homolog of NCBI NO: 8777470 NR Description: gb|AAB82637.1~gene_id:K15M2.1~similar to unknown
  misc_feature (1)..(286): Homolog of NCBI NO: 15234143 NR Description: hypothetical protein [Arabidopsis thaliana]
  misc_feature (298)..(362): Homolog of NCBI NO: 15235221 NR Description: expressed protein [Arabidopsis thaliana]
  misc_feature (1)..(266): Homolog of NCBI NO: 15235221 NR Description: expressed protein [Arabidopsis thaliana]
  misc_feature (1)..(401): Homolog of NCBI NO: 15225441 NR Description: expressed protein [Arabidopsis thaliana]
MEESINQNPEAMEALISNLFGNISSLKSAYIELQSAHTPYDPEKIQAADKVVISELKNLSEMKHFYRENNPKPVCVSPQDSRLAAEIQEQQSLLKTYEVMVKKFQSEIQNKDSEITQMLQKIEEANQKRLKLDKNLKLRGMSTNEGSNGDGNMQFPDLTTELYVSTYEAAAKAVHDFSKPLINMMKAAGWDLDSAANSIEPDVVYAKRPHKKYAFESYICQRMFSGFQQKNFSVNSESAAVMADDDTDTFFRQFLALKDMDPLDALGTNPDSNFGIFCRSKYLLLVHPKMEASFFGNLDQRDYVTGGGHPRTAFYQAFLKLAKSIWILHRLAYSFDPAAKIFQVKKGSEFSDSYMESVVKNIVVDEKEENPRVGLMVMPGFWIGGSVIQSRVYVSGVKVLE

SEQ ID NO: 41534 - protein, 390 aa, Arabidopsis thaliana
  peptide (1)..(390): Ceres Seq. ID no. 13592785
  misc_feature (1)..(125): Pfam Name: Plant protein of unknown function (DUF641) Pfam Description: Plant protein of unknown function (DUF641)
  misc_feature (1)..(384): Homolog of NCBI NO: 34903732 NR Description: unnamed protein product [Oryza sativa (japonica
  misc_feature (3)..(383): Homolog of NCBI NO: 37535904 NR Description: hypothetical protein [Oryza sativa (japonica
  misc_feature (3)..(385): Homolog of NCBI NO: 15232398 NR Description: expressed protein [Arabidopsis thaliana]
  misc_feature (1)..(384): Homolog of NCBI NO: 15219282 NR Description: expressed protein [Arabidopsis thaliana]
  misc_feature (1)..(384): Homolog of NCBI NO: 15231944 NR Description: expressed protein [Arabidopsis thaliana]
  misc_feature (1)..(384): Homolog of NCBI NO: 8777470 NR Description: gb|AAB82637.1~gene_id:K15M2.1~similar to unknown
  misc_feature (1)..(275): Homolog of NCBI NO: 15234143 NR Description: hypothetical protein [Arabidopsis thaliana]
  misc_feature (287)..(351): Homolog of NCBI NO: 15235221 NR Description: expressed protein [Arabidopsis thaliana]
  misc_feature (1)..(255): Homolog of NCBI NO: 15235221 NR Description: expressed protein [Arabidopsis thaliana]
  misc_feature (1)..(390): Homolog of NCBI NO: 15225441 NR Description: expressed protein [Arabidopsis thaliana]
MEALISNLFGNISSLKSAYIELQSAHTPYDPEKIQAADKVVISELKNLSEMKHFYRENNPKPVCVSPQDSRLAAEIQEQQSLLKTYEVMVKKFQSEIQNKDSEITQMLQKIEEANQKRLKLDKNLKLRGMSTNEGSNGDGNMQFPDLTTELYVSTYEAAAKAVHDFSKPLINMMKAAGWDLDSAANSIEPDVVYAKRPHKKYAFESYICQRMFSGFQQKNFSVNSESAAVMADDDTDTFFRQFLALKDMDPLDALGTNPDSNFGIFCRSKYLLLVHPKMEASFFGNLDQRDYVTGGGHPRTAFYQAFLKLAKSIWILHRLAYSFDPAAKIFQVKKGSEFSDSYMESVVKNIVVDEKEENPRVGLMVMPGFWIGGSVIQSRVYVSGVKVLE

SEQ ID NO: 41535 - DNA, 1486 bp, Arabidopsis thaliana
  misc_feature (1)..(1486): Ceres Seq. ID no. 12328370
  misc_feature: MA Experiment ID: 108461 Result: Up-regulated in Transcription
  misc_feature: MA Experiment 108461 PARAMETER Experiment Name: At_Germinating_Seeds_cDNA_P Parameter: Age (day) Value: 1 vs. 0
  misc_feature: MA Experiment 108461 PARAMETER Experiment Name: At_Germinating_Seeds_cDNA_P Parameter: Tissue Value: Germinating Seeds
  misc_feature: MA Experiment ID: 108469 Result: Up-regulated in Transcription
  misc_feature: MA Experiment ID: 20000069 Result: Down-regulated in Transcription
  misc_feature: MA Experiment 20000069 PARAMETER Experiment Name: At_100uM_ABA_Mutants_cDNA_P Parameter: Plant Line Value: CS23
  misc_feature: MA Experiment 20000069 PARAMETER Experiment Name: At_100uM_ABA_Mutants_cDNA_P Parameter: Timepoint (hr) Value: 6
  misc_feature: MA Experiment 20000069 PARAMETER Experiment Name: At_100uM_ABA_Mutants_cDNA_P Parameter: Tissue Value: Aerial
  misc_feature: MA Experiment 20000069 PARAMETER Experiment Name: At_100uM_ABA_Mutants_cDNA_P Parameter: Treatment Value: 100uM ABA vs. No Treatment
  misc_feature: MA Experiment ID: 20000171 Result: Down-regulated in Transcription
  misc_feature: MA Experiment 20000171 PARAMETER Experiment Name: At_42deg_Heat_P Parameter: Age (day) Value: 14
  misc_feature: MA Experiment 20000171 PARAMETER Experiment Name: At_42deg_Heat_P Parameter: Organism Value: A. thaliana
  misc_feature: MA Experiment 20000171 PARAMETER Experiment Name: At_42deg_Heat_P Parameter: Plant Line Value: WS
  misc_feature: MA Experiment 20000171 PARAMETER Experiment Name: At_42deg_Heat_P Parameter: Temperature (deg C) Value: 42 vs. 22
  misc_feature: MA Experiment 20000171 PARAMETER Experiment Name: At_42deg_Heat_P Parameter: Timepoint (hr) Value: 1
  misc_feature: MA Experiment 20000171 PARAMETER Experiment Name: At_42deg_Heat_P Parameter: Tissue Value: Aerial
  misc_feature: MA Experiment ID: 20000173 Result: Down-regulated in Transcription
  misc_feature: MA Experiment 20000173 PARAMETER Experiment Name: At_42deg_Heat_P Parameter: Age (day) Value: 14
  misc_feature: MA Experiment 20000173 PARAMETER Experiment Name: At_42deg_Heat_P Parameter: Organism Value: A. thaliana
  misc_feature: MA Experiment 20000173 PARAMETER Experiment Name: At_42deg_Heat_P Parameter: Plant Line Value: WS
  misc_feature: MA Experiment 20000173 PARAMETER Experiment Name: At_42deg_Heat_P Parameter: Temperature (deg C) Value: 42 vs. 22
  misc_feature: MA Experiment 20000173 PARAMETER Experiment Name: At_42deg_Heat_P Parameter: Timepoint (hr) Value: 6
  misc_feature: MA Experiment 20000173 PARAMETER Experiment Name: At_42deg_Heat_P Parameter: Tissue Value: Aerial
  misc_feature: MA Experiment ID: 20000179 Result: Up-regulated in Transcription
  misc_feature: MA Experiment 20000179 PARAMETER Experiment Name: At_Germinating_Seeds_P Parameter: Age (hr) Value: 6 vs. 0
  misc_feature: MA Experiment 20000179 PARAMETER Experiment Name: At_Germinating_Seeds_P Parameter: Tissue Value: Germinating Seeds
  misc_feature: MA Experiment ID: 20000180 Result: Up-regulated in Transcription
  misc_feature: MA Experiment 20000180 PARAMETER Experiment Name: At_Germinating_Seeds_P Parameter: Age (hr) Value: 24 vs. 0
  misc_feature: MA Experiment 20000180 PARAMETER Experiment Name: At_Germinating_Seeds_P Parameter: Tissue Value: Germinating Seeds
  misc_feature: MA Experiment ID: 20000185 Result: Up-regulated in Transcription
  misc_feature: MA Experiment 20000185 PARAMETER Experiment Name: At_Roots__P Parameter: Age (day) Value: 7 vs. 21
  misc_feature: MA Experiment 20000185 PARAMETER Experiment Name: At_Roots__P Parameter: Organism Value: A. thaliana
  misc_feature: MA Experiment 20000185 PARAMETER Experiment Name: At_Roots__P Parameter: Tissue Value: Roots vs. Whole Plant
  misc_feature: MA Experiment ID: 20000224 Result: Up-regulated in Transcription
  misc_feature: MA Experiment ID: 20000437 Result: Down-regulated in Transcription
  misc_feature: MA Experiment 20000437 PARAMETER Experiment Name: At_Drought_P Parameter: Age (day) Value: 8
  misc_feature: MA Experiment 20000437 PARAMETER Experiment Name: At_Drought_P Parameter: Organism Value: A. thaliana
  misc_feature: MA Experiment 20000437 PARAMETER Experiment Name: At_Drought_P Parameter: Plant Line Value: WS
  misc_feature: MA Experiment 20000437 PARAMETER Experiment Name: At_Drought_P Parameter: Timepoint (hr) Value: 24
  misc_feature: MA Experiment 20000437 PARAMETER Experiment Name: At_Drought_P Parameter: Tissue Value: Whole Plant
  misc_feature: MA Experiment 20000437 PARAMETER Experiment Name: At_Drought_P Parameter: Treatment Value: Drought vs. No Drought
  misc_feature: MA Experiment ID: 20001451 Result: Down-regulated in Transcription
  misc_feature: MA Experiment 20001451 PARAMETER Experiment Name: At_Far-red-induction_P Parameter: Age (day) Value: 7
  misc_feature: MA Experiment 20001451 PARAMETER Experiment Name: At_Far-red-induction_P Parameter: Light Value: Far-red vs. White
  misc_feature: MA Experiment 20001451 PARAMETER Experiment Name: At_Far-red-induction_P Parameter: Organism Value: A. thaliana
  misc_feature: MA Experiment 20001451 PARAMETER Experiment Name: At_Far-red-induction_P Parameter: Plant Line Value: Columbia
  misc_feature: MA Experiment 20001451 PARAMETER Experiment Name: At_Far-red-induction_P Parameter: Timepoint (hr) Value: 24
  misc_feature: MA Experiment 20001451 PARAMETER Experiment Name: At_Far-red-induction_P Parameter: Tissue Value: Whole Plant
cactcatccgatctctcaatcctctcaaatctcaaactctctcttcccatcactctctcgctctctcttcaatctcatctcaatcatgacagagcaagagatctgcgtgagggttacaagagcggcggcgaaacgaaaagcttcgacggcgatgggtattgacggagatcgggtcaacaagaagagagttgttctcggtgagcttctaaacgtctccaatgtcaatctcttggctaatctcaatcagaagaaagaaacccagaagccaaaaaggaatcttaaacctcctccggcgaaacagattaagtcagctccggtggctattattgacctagaatcaaaatctgacattgattctcgatctgatgatcctcaaatgtgtggaccttatgttgctgatatctatgagtatcttcgtcaacttgaggtgaagccaaagcagagacctttaccagattacatagagaaagttcagaaagatgtaacaccaagtatgagaggtgttttggttgattggttagtggaagttgctgaagagtataaacttggatctgaaacactttatctcactgtctcacatattgatagattcttgtctttaaagactgttaacaagcaaaagctacagcttgttggagtttctgctatgcttattgcttcgaagtatgaagagataagtcctcctaaagtggatgatttttgttacattacggataatacgttttcgaaacaagatgttgtgaagatggaagctgatatacttcttgctcttcagtttgagttgggaagaccaacgattaatacttttatgagacggtttactagagttgcacaagacgatttcaaagttccacatttgcagctagagcctctttgttgctatttgtcagaattgagtatattagattataagactgtgaagtttgtgccgtctctgttggctgcttctgctgtttttctcgctcggttcatcatccgtccgaaacaacatccttggaaccaaatgttagaagagtacacaaagtacaaagcggctgatctacaagtgtgtgttggaatcatacatgacttgtatttgagcagaagaggaggtgctttacaagctgttagagagaaatataagcaccataagttccaatgcgttgcgaccatgcctgtttcaccagagctgccggttaccttttgggaggatgttaccatttgatctgaggttatgctatcttaagcaaatgttacggagctggattaccgaatcttgtttcaaatagtataatggacacagatcttcaagtgaagctagaagagtaagaaatatagaagtgaaggcaggagcaaataagtctgcgttatgtgaagatgtgtgatgtattattgaaatctcttcttttttatttacaaaattttagtgtgaaattcggaataatataattttatacaattatgcaatatgatataagtatttatgtgacatgatcttattttgttt

SEQ ID NO: 41536 - protein, 400 aa, Arabidopsis thaliana
  peptide (1)..(400): Ceres Seq. ID no. 12328371
  misc_feature (264)..(391): Pfam Name: Cyclin, C-terminal domain Pfam Description: Cyclin, C-terminal domain
  misc_feature (37)..(398): Homolog of NCBI NO: 40538955 NR Description: putative A-type cyclin [Oryza sativa (japonica
  misc_feature (29)..(220): Homolog of NCBI NO: 18401622 NR Description: Cyclin, putative; supported by full length cDNA:
  misc_feature (113)..(396): Homolog of NCBI NO: 7242793 NR Description: cyclin A3.1 [Pisum sativum]
  misc_feature (29)..(398): Homolog of NCBI NO: 7438516 NR Description: cyclin A-type - Madagascar periwinkle
  misc_feature (27)..(398): Homolog of NCBI NO: 7438513 NR Description: cyclin A-type (clone 59) - common tobacco
  misc_feature (110)..(398): Homolog of NCBI NO: 15220145 NR Description: Cyclin A3;3; protein id: At1g47220.1 [Arabidopsis
  misc_feature (67)..(400): Homolog of NCBI NO: 15239172 NR Description: Cyclin A3;1; protein id: At5g43080.1 [Arabidopsis
  misc_feature (29)..(400): Homolog of NCBI NO: 15220147 NR Description: Cyclin A3;4; protein id: At1g47230.1, supported
  misc_feature (29)..(400): Homolog of NCBI NO: 30694019 NR Description: cyclin family [Arabidopsis thaliana]
THPISQSSQISNSLFPSLSRSLFNLISIMTEQEICVRVTRAAAKRKASTAMGIDGDRVNKKRVVLGELLNVSNVNLLANLNQKKETQKPKRNLKPPPAKQIKSAPVAIIDLESKSDIDSRSDDPQMCGPYVADIYEYLRQLEVKPKQRPLPDYIEKVQKDVTPSMRGVLVDWLVEVAEEYKLGSETLYLTVSHIDRFLSLKTVNKQKLQLVGVSAMLIASKYEEISPPKVDDFCYITDNTFSKQDVVKMEADILLALQFELGRPTINTFMRRFTRVAQDDFKVPHLQLEPLCCYLSELSILDYKTVKFVPSLLAASAVFLARFIIRPKQHPWNQMLEEYTKYKAADLQVCVGIIHDLYLSRRGGALQAVREKYKHHKFQCVATMPVSPELPVTFWEDVTI

SEQ ID NO: 41537 - protein, 372 aa, Arabidopsis thaliana
  peptide (1)..(372): Ceres Seq. ID no. 12328372
  misc_feature (236)..(363): Pfam Name: Cyclin, C-terminal domain Pfam Description: Cyclin, C-terminal domain
  misc_feature (9)..(370): Homolog of NCBI NO: 40538955 NR Description: putative A-type cyclin [Oryza sativa (japonica
  misc_feature (1)..(192): Homolog of NCBI NO: 18401622 NR Description: Cyclin, putative; supported by full length cDNA:
  misc_feature (85)..(368): Homolog of NCBI NO: 7242793 NR Description: cyclin A3.1 [Pisum sativum]
  misc_feature (1)..(370): Homolog of NCBI NO: 7438516 NR Description: cyclin A-type - Madagascar periwinkle
  misc_feature (1)..(370): Homolog of NCBI NO: 7438513 NR Description: cyclin A-type (clone 59) - common tobacco
  misc_feature (82)..(370): Homolog of NCBI NO: 15220145 NR Description: Cyclin A3;3; protein id: At1g47220.1 [Arabidopsis
  misc_feature (39)..(372): Homolog of NCBI NO: 15239172 NR Description: Cyclin A3;1; protein id: At5g43080.1 [Arabidopsis
  misc_feature (1)..(372): Homolog of NCBI NO: 15220147 NR Description: Cyclin A3;4; protein id: At1g47230.1, supported
  misc_feature (1)..(372): Homolog of NCBI NO: 30694019 NR Description: cyclin family [Arabidopsis thaliana]
MTEQEICVRVTRAAAKRKASTAMGIDGDRVNKKRVVLGELLNVSNVNLLANLNQKKETQKPKRNLKPPPAKQIKSAPVAIIDLESKSDIDSRSDDPQMCGPYVADIYEYLRQLEVKPKQRPLPDYIEKVQKDVTPSMRGVLVDWLVEVAEEYKLGSETLYLTVSHIDRFLSLKTVNKQKLQLVGVSAMLIASKYEEISPPKVDDFCYITDNTFSKQDVVKMEADILLALQFELGRPTINTFMRRFTRVAQDDFKVPHLQLEPLCCYLSELSILDYKTVKFVPSLLAASAVFLARFIIRPKQHPWNQMLEEYTKYKAADLQVCVGIIHDLYLSRRGGALQAVREKYKHHKFQCVATMPVSPELPVTFWEDVTI

SEQ ID NO: 41538 - protein, 350 aa, Arabidopsis thaliana
  peptide (1)..(350): Ceres Seq. ID no. 12328373
  misc_feature (214)..(341): Pfam Name: Cyclin, C-terminal domain Pfam Description: Cyclin, C-terminal domain
  misc_feature (1)..(348): Homolog of NCBI NO: 40538955 NR Description: putative A-type cyclin [Oryza sativa (japonica
  misc_feature (1)..(170): Homolog of NCBI NO: 18401622 NR Description: Cyclin, putative; supported by full length cDNA:
  misc_feature (63)..(346): Homolog of NCBI NO: 7242793 NR Description: cyclin A3.1 [Pisum sativum]
  misc_feature (1)..(348): Homolog of NCBI NO: 7438516 NR Description: cyclin A-type - Madagascar periwinkle
  misc_feature (1)..(348): Homolog of NCBI NO: 7438513 NR Description: cyclin A-type (clone 59) - common tobacco
  misc_feature (60)..(348): Homolog of NCBI NO: 15220145 NR Description: Cyclin A3;3; protein id: At1g47220.1 [Arabidopsis
  misc_feature (17)..(350): Homolog of NCBI NO: 15239172 NR Description: Cyclin A3;1; protein id: At5g43080.1 [Arabidopsis
  misc_feature (1)..(350): Homolog of NCBI NO: 15220147 NR Description: Cyclin A3;4; protein id: At1g47230.1, supported
  misc_feature (1)..(350): Homolog of NCBI NO: 30694019 NR Description: cyclin family [Arabidopsis thaliana]
MGIDGDRVNKKRVVLGELLNVSNVNLLANLNQKKETQKPKRNLKPPPAKQIKSAPVAIIDLESKSDIDSRSDDPQMCGPYVADIYEYLRQLEVKPKQRPLPDYIEKVQKDVTPSMRGVLVDWLVEVAEEYKLGSETLYLTVSHIDRFLSLKTVNKQKLQLVGVSAMLIASKYEEISPPKVDDFCYITDNTFSKQDVVKMEADILLALQFELGRPTINTFMRRFTRVAQDDFKVPHLQLEPLCCYLSELSILDYKTVKFVPSLLAASAVFLARFIIRPKQHPWNQMLEEYTKYKAADLQVCVGIIHDLYLSRRGGALQAVREKYKHHKFQCVATMPVSPELPVTFWEDVTI

SEQ ID NO: 41539 - DNA, 1306 bp, Arabidopsis thaliana
  misc_feature (1)..(1306): Ceres Seq. ID no. 12339414
  misc_feature: MA Experiment ID: 108463 Result: Up-regulated in Transcription
  misc_feature: MA Experiment 108463 PARAMETER Experiment Name: At_Germinating_Seeds_cDNA_P Parameter: Age (day) Value: 3 vs. 0
  misc_feature: MA Experiment 108463 PARAMETER Experiment Name: At_Germinating_Seeds_cDNA_P Parameter: Tissue Value: Germinating Seeds
  misc_feature: MA Experiment ID: 108488 Result: Down-regulated in Transcription
  misc_feature: MA Experiment ID: 108577 Result: Down-regulated in Transcription
  misc_feature: MA Experiment 108577 PARAMETER Experiment Name: At_42deg_Heat_cDNA_P Parameter: Temperature (deg C) Value: 42 vs. 22
  misc_feature: MA Experiment 108577 PARAMETER Experiment Name: At_42deg_Heat_cDNA_P Parameter: Timepoint (hr) Value: 6
  misc_feature: MA Experiment 108577 PARAMETER Experiment Name: At_42deg_Heat_cDNA_P Parameter: Tissue Value: Aerial
  misc_feature: MA Experiment ID: 108579 Result: Up-regulated in Transcription
  misc_feature: MA Experiment 108579 PARAMETER Experiment Name: At_4deg_Cold_cDNA_P Parameter: Temperature (deg C) Value: 4 vs. 22
  misc_feature: MA Experiment 108579 PARAMETER Experiment Name: At_4deg_Cold_cDNA_P Parameter: Timepoint (hr) Value: 6
  misc_feature: MA Experiment 108579 PARAMETER Experiment Name: At_4deg_Cold_cDNA_P Parameter: Tissue Value: Aerial
  misc_feature: MA Experiment ID: 108585 Result: Up-regulated in Transcription
  misc_feature: MA Experiment 108585 PARAMETER Experiment Name: At_5mM_NaNP_cDNA_P Parameter: Timepoint (hr) Value: 6
  misc_feature: MA Experiment 108585 PARAMETER Experiment Name: At_5mM_NaNP_cDNA_P Parameter: Tissue Value: Aerial
  misc_feature: MA Experiment 108585 PARAMETER Experiment Name: At_5mM_NaNP_cDNA_P Parameter: Treatment Value: null
  misc_feature: MA Experiment ID: 108667 Result: Up-regulated in Transcription
  misc_feature: MA Experiment 108667 PARAMETER Experiment Name: At_2mM_SA_cDNA_P Parameter: Plant Line Value: WS
  misc_feature: MA Experiment 108667 PARAMETER Experiment Name: At_2mM_SA_cDNA_P Parameter: Timepoint (hr) Value: 1
  misc_feature: MA Experiment 108667 PARAMETER Experiment Name: At_2mM_SA_cDNA_P Parameter: Treatment Value: 2mM SA vs. No Treatment
  misc_feature: MA Experiment ID: 20000089 Result: Down-regulated in Transcription
  misc_feature: MA Experiment ID: 20000144 Result: Down-regulated in Transcription
  misc_feature: MA Experiment 20000144 PARAMETER Experiment Name: At_42deg_Heat_cDNA_P Parameter: Temperature (deg C) Value: 42 vs. 22
  misc_feature: MA Experiment 20000144 PARAMETER Experiment Name: At_42deg_Heat_cDNA_P Parameter: Timepoint (hr) Value: 1
  misc_feature: MA Experiment 20000144 PARAMETER Experiment Name: At_42deg_Heat_cDNA_P Parameter: Tissue Value: Aerial
  misc_feature: MA Experiment ID: 20000171 Result: Down-regulated in Transcription
  misc_feature: MA Experiment 20000171 PARAMETER Experiment Name: At_42deg_Heat_P Parameter: Age (day) Value: 14
  misc_feature: MA Experiment 20000171 PARAMETER Experiment Name: At_42deg_Heat_P Parameter: Organism Value: A. thaliana
  misc_feature: MA Experiment 20000171 PARAMETER Experiment Name: At_42deg_Heat_P Parameter: Plant Line Value: WS
  misc_feature: MA Experiment 20000171 PARAMETER Experiment Name: At_42deg_Heat_P Parameter: Temperature (deg C) Value: 42 vs. 22
  misc_feature: MA Experiment 20000171 PARAMETER Experiment Name: At_42deg_Heat_P Parameter: Timepoint (hr) Value: 1
  misc_feature: MA Experiment 20000171 PARAMETER Experiment Name: At_42deg_Heat_P Parameter: Tissue Value: Aerial
  misc_feature: MA Experiment ID: 20000184 Result: Down-regulated in Transcription
  misc_feature: MA Experiment 20000184 PARAMETER Experiment Name: At_Shoots__P Parameter: Age (day) Value: 7
  misc_feature: MA Experiment 20000184 PARAMETER Experiment Name: At_Shoots__P Parameter: Tissue Value: Shoots vs. Whole Plant
  misc_feature: MA Experiment ID: 20000185 Result: Down-regulated in Transcription
  misc_feature: MA Experiment 20000185 PARAMETER Experiment Name: At_Roots__P Parameter: Age (day) Value: 7 vs. 21
  misc_feature: MA Experiment 20000185 PARAMETER Experiment Name: At_Roots__P Parameter: Organism Value: A. thaliana
  misc_feature: MA Experiment 20000185 PARAMETER Experiment Name: At_Roots__P Parameter: Tissue Value: Roots vs. Whole Plant
  misc_feature: MA Experiment ID: 20000224 Result: Down-regulated in Transcription
  misc_feature: MA Experiment ID: 20000234 Result: Down-regulated in Transcription
  misc_feature: MA Experiment 20000234 PARAMETER Experiment Name: At_Siliques_P Parameter: Age (day) Value: 21
  misc_feature: MA Experiment 20000234 PARAMETER Experiment Name: At_Siliques_P Parameter: Organism Value: A. thaliana
  misc_feature: MA Experiment 20000234 PARAMETER Experiment Name: At_Siliques_P Parameter: Plant Line Value: WS
  misc_feature: MA Experiment 20000234 PARAMETER Experiment Name: At_Siliques_P Parameter: Tissue Value: Less Than 5mm Siliques vs. Whole Plant
  misc_feature: MA Experiment ID: 20000235 Result: Down-regulated in Transcription
  misc_feature: MA Experiment 20000235 PARAMETER Experiment Name: At_Siliques_P Parameter: Age (day) Value: 21
  misc_feature: MA Experiment 20000235 PARAMETER Experiment Name: At_Siliques_P Parameter: Organism Value: A. thaliana
  misc_feature: MA Experiment 20000235 PARAMETER Experiment Name: At_Siliques_P Parameter: Plant Line Value: WS
  misc_feature: MA Experiment 20000235 PARAMETER Experiment Name: At_Siliques_P Parameter: Tissue Value: 5-10mm Siliques vs. Whole Plant
  misc_feature: MA Experiment ID: 20000264 Result: Down-regulated in Transcription
  misc_feature: MA Experiment 20000264 PARAMETER Experiment Name: At_Open_Flower_P Parameter: Age (day) Value: 21
  misc_feature: MA Experiment 20000264 PARAMETER Experiment Name: At_Open_Flower_P Parameter: Plant Line Value: WS
  misc_feature: MA Experiment 20000264 PARAMETER Experiment Name: At_Open_Flower_P Parameter: Tissue Value: Open Flower vs. Whole Plant
  misc_feature: MA Experiment ID: 20000265 Result: Down-regulated in Transcription
  misc_feature: MA Experiment 20000265 PARAMETER Experiment Name: At_Open_Flower_P Parameter: Age (day) Value: 21
  misc_feature: MA Experiment 20000265 PARAMETER Experiment Name: At_Open_Flower_P Parameter: Plant Line Value: WS
  misc_feature: MA Experiment 20000265 PARAMETER Experiment Name: At_Open_Flower_P Parameter: Tissue Value: Closed Flower vs. Whole Plant
  misc_feature: MA Experiment ID: 20000286 Result: Down-regulated in Transcription
  misc_feature: MA Experiment 20000286 PARAMETER Experiment Name: At_Open_Flower_P Parameter: Age (day) Value: 21
  misc_feature: MA Experiment 20000286 PARAMETER Experiment Name: At_Open_Flower_P Parameter: Plant Line Value: WS
  misc_feature: MA Experiment 20000286 PARAMETER Experiment Name: At_Open_Flower_P Parameter: Tissue Value: Half Open vs. Whole Plant
  misc_feature: MA Experiment ID: 20000438 Result: Down-regulated in Transcription
  misc_feature: MA Experiment 20000438 PARAMETER Experiment Name: At_Shoots__P Parameter: Age (day) Value: 14
  misc_feature: MA Experiment 20000438 PARAMETER Experiment Name: At_Shoots__P Parameter: Tissue Value: Shoots vs. Whole Plant
  misc_feature: MA Experiment ID: 20000439 Result: Down-regulated in Transcription
  misc_feature: MA Experiment 20000439 PARAMETER Experiment Name: At_Roots__P Parameter: Age (day) Value: 14 vs. 21
  misc_feature: MA Experiment 20000439 PARAMETER Experiment Name: At_Roots__P Parameter: Organism Value: A. thaliana
  misc_feature: MA Experiment 20000439 PARAMETER Experiment Name: At_Roots__P Parameter: Tissue Value: Roots vs. Whole Plant
  misc_feature: MA Experiment ID: 20000441 Result: Up-regulated in Transcription
  misc_feature: MA Experiment 20000441 PARAMETER Experiment Name: At_1uM_BR-BRZ__P Parameter: Tissue Value: Shoot Apices
  misc_feature: MA Experiment 20000441 PARAMETER Experiment Name: At_1uM_BR-BRZ__P Parameter: Treatment Value: 1uM BR vs. No Treatment
  misc_feature: MA Experiment ID: 20000460 Result: Up-regulated in Transcription
  misc_feature: MA Experiment 20000460 PARAMETER Experiment Name: At_10percent_PEG_P Parameter: Age (day) Value: 12
  misc_feature: MA Experiment 20000460 PARAMETER Experiment Name: At_10percent_PEG_P Parameter: Organism Value: A. thaliana
  misc_feature: MA Experiment 20000460 PARAMETER Experiment Name: At_10percent_PEG_P Parameter: Plant Line Value: WS
  misc_feature: MA Experiment 20000460 PARAMETER Experiment Name: At_10percent_PEG_P Parameter: Timepoint (day) Value: 12
  misc_feature: MA Experiment 20000460 PARAMETER Experiment Name: At_10percent_PEG_P Parameter: Tissue Value: Whole Plant
  misc_feature: MA Experiment 20000460 PARAMETER Experiment Name: At_10percent_PEG_P Parameter: Treatment Value: 10percent PEG vs. No Treatment
  misc_feature: MA Experiment ID: 20000495 Result: Down-regulated in Transcription
  misc_feature: MA Experiment 20000495 PARAMETER Experiment Name: At_Guard_Cells_P Parameter: Harvest Date Value: 8/2/2002
  misc_feature: MA Experiment 20000495 PARAMETER Experiment Name: At_Guard_Cells_P Parameter: Organism Value: A. thaliana
  misc_feature: MA Experiment 20000495 PARAMETER Experiment Name: At_Guard_Cells_P Parameter: Tissue Value: Guard Cells vs. Leaves
  misc_feature: MA Experiment ID: 20000496 Result: Up-regulated in Transcription
  misc_feature: MA Experiment 20000496 PARAMETER Experiment Name: At_Guard_Cells_P Parameter: Harvest Date Value: 7/19/2002
  misc_feature: MA Experiment 20000496 PARAMETER Experiment Name: At_Guard_Cells_P Parameter: Organism Value: Canola
  misc_feature: MA Experiment 20000496 PARAMETER Experiment Name: At_Guard_Cells_P Parameter: Tissue Value: Guard Cells vs. Leaves
  misc_feature: MA Experiment ID: 20000573 Result: Down-regulated in Transcription
  misc_feature: MA Experiment 20000573 PARAMETER Experiment Name: At_100uM_ABA_Mutants__P Parameter: Organism Value: A. thaliana
  misc_feature: MA Experiment 20000573 PARAMETER Experiment Name: At_100uM_ABA_Mutants__P Parameter: Plant Line Value: CS22 vs. Ler wt
  misc_feature: MA Experiment 20000573 PARAMETER Experiment Name: At_100uM_ABA_Mutants__P Parameter: Timepoint (hr) Value: N/A
  misc_feature: MA Experiment 20000573 PARAMETER Experiment Name: At_100uM_ABA_Mutants__P Parameter: Tissue Value: Whole Plant
  misc_feature: MA Experiment 20000573 PARAMETER Experiment Name: At_100uM_ABA_Mutants__P Parameter: Treatment Value: None
  misc_feature: MA Experiment ID: 20000574 Result: Down-regulated in Transcription
  misc_feature: MA Experiment 20000574 PARAMETER Experiment Name: At_100uM_ABA_Mutants__P Parameter: Organism Value: A. thaliana
  misc_feature: MA Experiment 20000574 PARAMETER Experiment Name: At_100uM_ABA_Mutants__P Parameter: Plant Line Value: CS23 vs. Ler wt
  misc_feature: MA Experiment 20000574 PARAMETER Experiment Name: At_100uM_ABA_Mutants__P Parameter: Timepoint (hr) Value: N/A
  misc_feature: MA Experiment 20000574 PARAMETER Experiment Name: At_100uM_ABA_Mutants__P Parameter: Tissue Value: Whole Plant
  misc_feature: MA Experiment 20000574 PARAMETER Experiment Name: At_100uM_ABA_Mutants__P Parameter: Treatment Value: None
  misc_feature: MA Experiment ID: 20000794 Result: Down-regulated in Transcription
  misc_feature: MA Experiment 20000794 PARAMETER Experiment Name: At_Petals_P Parameter: Age (day) Value: 23-25 days
  misc_feature: MA Experiment 20000794 PARAMETER Experiment Name: At_Petals_P Parameter: Plant Line Value: WS
  misc_feature: MA Experiment 20000794 PARAMETER Experiment Name: At_Petals_P Parameter: Tissue Value: Petals vs. Whole plant
  misc_feature: MA Experiment ID: 20001757 Result: Down-regulated in Transcription
  misc_feature: MA Experiment 20001757 PARAMETER Experiment Name: At_50mM_NH4NO3_L-to-H_P Parameter: Timepoint (hr) Value: 6
  misc_feature: MA Experiment 20001757 PARAMETER Experiment Name: At_50mM_NH4NO3_L-to-H_P Parameter: Tissue Value: Leaf
  misc_feature: MA Experiment 20001757 PARAMETER Experiment Name: At_50mM_NH4NO3_L-to-H_P Parameter: Treatment Value: 50mM NH4NO3 vs 100mM Mannitol
  misc_feature: MA Experiment ID: 20001774 Result: Down-regulated in Transcription
  misc_feature: MA Experiment 20001774 PARAMETER Experiment Name: At_Far-red-enriched-adult_P Parameter: Age (day) Value: 31
  misc_feature: MA Experiment 20001774 PARAMETER Experiment Name: At_Far-red-enriched-adult_P Parameter: Light Value: Far-red enriched vs. White
  misc_feature: MA Experiment 20001774 PARAMETER Experiment Name: At_Far-red-enriched-adult_P Parameter: Organism Value: A. thaliana
  misc_feature: MA Experiment 20001774 PARAMETER Experiment Name: At_Far-red-enriched-adult_P Parameter: Plant Line Value: Columbia
  misc_feature: MA Experiment 20001774 PARAMETER Experiment Name: At_Far-red-enriched-adult_P Parameter: Timepoint (hr) Value: 72
  misc_feature: MA Experiment 20001774 PARAMETER Experiment Name: At_Far-red-enriched-adult_P Parameter: Tissue Value: Aerial
atcaacttcagatcctttcaccagcaacacaagttattttcaaaagatgatgccaaattctagatcggcgacaataactccgacgacagaatcaaccaccacaacaacaacaacaacaacgactctaacgacgtcgtattggtgttacagttgtacacgattcatcagcgtttgggaagatcaagacgcaaacgctggagtcttatgtccttattgcaacggtggattcatcgaagagattgaagattcttctaattccaccgtcgcggcgattccggcttcgactccggaagttagatcggttgaggaaacacatagatctataattagacgtcgtagatctaatcgccggacgtcctttaatccggtaatcgtcttacacggcggaggaggaggaggagccggtgagagagttgagaacgaagaaggtgacggagctactagagaacgacgagcttatgagttttattacgatgatggatctggttcaggtctaagacctcttcctgattctgtatctgagatcttgatgggatctggattcgaacggttacttgaacaattgagtcagatcgaagcgtcaggtaacggaatcggtagatctgggaatccaccggcgtcgaaatcagcgattgaatctttacctagagtcgaaatctcagattgtcatacgaaagcagaagctaattgcgccgtgtgtacggaggttttcgaagccggaatcgaaggtcgtgagatgccgtgtaaacacatatttcacggtgattgtattgttccatggctttcgattcggaattcgtgtcctgtgtgtagatttgagttaccttcagatccaatccaacggagtaatgaagaagaacatgccgttgggatgacgatttggagattacctggtggtggtttcgctgttggtaggtttaacgcgggagtgagagaaggtgagaggatattgccggtggtattgacggagatggatggtggtggacttggtagtaatgaaggaccgagaaggatatcttgggttagagctcatgagacaccggagatgagtaggaatggtggtcgttctggtaatggtggtagattgagaagagctgttcgtggaatggtttcgtttatgagaagagttagaccaagtcgtggctcttcgaattcgaatgttattgatttggatagtgatggtgaaactagagttatgaatcgatcaacttcgttgatcagaagatttttctgatgaaactaggtgagatttttttgtttgttgattcaacaatgtatatatatttatttagatgaacttatttgg

SEQ ID NO: 41540 - protein, 410 aa, Arabidopsis thaliana
  peptide (1)..(410): Ceres Seq. ID no. 12339416
  misc_feature (230)..(270): Pfam Name: Zinc finger, C3HC4 type (RING finger) Pfam Description: Zinc finger, C3HC4 type (RING finger)
  misc_feature (45)..(276): Homolog of NCBI NO: 34908968 NR Description: P0003D09.21 [Oryza sativa (japonica
  misc_feature (46)..(100): Homolog of NCBI NO: 37535546 NR Description: putative zinc finger protein
  misc_feature (171)..(277): Homolog of NCBI NO: 37535546 NR Description: putative zinc finger protein
  misc_feature (181)..(334): Homolog of NCBI NO: 34906008 NR Description: putative RING-H2 finger protein RHC2a
  misc_feature (130)..(385): Homolog of NCBI NO: 34902106 NR Description: unknown protein [Oryza sativa (japonica
  misc_feature (107)..(385): Homolog of NCBI NO: 18405141 NR Description: expressed protein
  misc_feature (28)..(386): Homolog of NCBI NO: 14719329 NR Description: putative RING-H2 finger protein [Oryza sativa]
  misc_feature (31)..(410): Homolog of NCBI NO: 18424254 NR Description: putative protein
  misc_feature (7)..(410): Homolog of NCBI NO: 8885559 NR Description: emb|CAB62332.1~gene_id:F2O15.22~strong similarity
  misc_feature (16)..(410): Homolog of NCBI NO: 15232595 NR Description: putative protein
STSDPFTSNTSYFQKMMPNSRSATITPTTESTTTTTTTTTTLTTSYWCYSCTRFISVWEDQDANAGVLCPYCNGGFIEEIEDSSNSTVAAIPASTPEVRSVEETHRSIIRRRRSNRRTSFNPVIVLHGGGGGGAGERVENEEGDGATRERRAYEFYYDDGSGSGLRPLPDSVSEILMGSGFERLLEQLSQIEASGNGIGRSGNPPASKSAIESLPRVEISDCHTKAEANCAVCTEVFEAGIEGREMPCKHIFHGDCIVPWLSIRNSCPVCRFELPSDPIQRSNEEEHAVGMTIWRLPGGGFAVGRFNAGVREGERILPVVLTEMDGGGLGSNEGPRRISWVRAHETPEMSRNGGRSGNGGRLRRAVRGMVSFMRRVRPSRGSSNSNVIDLDSDGETRVMNRSTSLIRRFF

SEQ ID NO: 41541 - protein, 395 aa, Arabidopsis thaliana
  peptide (1)..(395): Ceres Seq. ID no. 12339417
  misc_feature (215)..(255): Pfam Name: Zinc finger, C3HC4 type (RING finger) Pfam Description: Zinc finger, C3HC4 type (RING finger)
  misc_feature (30)..(261): Homolog of NCBI NO: 34908968 NR Description: P0003D09.21 [Oryza sativa (japonica
  misc_feature (31)..(85): Homolog of NCBI NO: 37535546 NR Description: putative zinc finger protein
  misc_feature (156)..(262): Homolog of NCBI NO: 37535546 NR Description: putative zinc finger protein
  misc_feature (166)..(319): Homolog of NCBI NO: 34906008 NR Description: putative RING-H2 finger protein RHC2a
  misc_feature (115)..(370): Homolog of NCBI NO: 34902106 NR Description: unknown protein [Oryza sativa (japonica
  misc_feature (92)..(370): Homolog of NCBI NO: 18405141 NR Description: expressed protein
  misc_feature (13)..(371): Homolog of NCBI NO: 14719329 NR Description: putative RING-H2 finger protein [Oryza sativa]
  misc_feature (16)..(395): Homolog of NCBI NO: 18424254 NR Description: putative protein
  misc_feature (1)..(395): Homolog of NCBI NO: 8885559 NR Description: emb|CAB62332.1~gene_id:F2O15.22~strong similarity
  misc_feature (1)..(395): Homolog of NCBI NO: 15232595 NR Description: putative protein
MMPNSRSATITPTTESTTTTTTTTTTLTTSYWCYSCTRFISVWEDQDANAGVLCPYCNGGFIEEIEDSSNSTVAAIPASTPEVRSVEETHRSIIRRRRSNRRTSFNPVIVLHGGGGGGAGERVENEEGDGATRERRAYEFYYDDGSGSGLRPLPDSVSEILMGSGFERLLEQLSQIEASGNGIGRSGNPPASKSAIESLPRVEISDCHTKAEANCAVCTEVFEAGIEGREMPCKHIFHGDCIVPWLSIRNSCPVCRFELPSDPIQRSNEEEHAVGMTIWRLPGGGFAVGRFNAGVREGERILPVVLTEMDGGGLGSNEGPRRISWVRAHETPEMSRNGGRSGNGGRLRRAVRGMVSFMRRVRPSRGSSNSNVIDLDSDGETRVMNRSTSLIRRFF

SEQ ID NO: 41542 - protein, 394 aa, Arabidopsis thaliana
  peptide (1)..(394): Ceres Seq. ID no. 12339419
  misc_feature (214)..(254): Pfam Name: Zinc finger, C3HC4 type (RING finger) Pfam Description: Zinc finger, C3HC4 type (RING finger)
  misc_feature (29)..(260): Homolog of NCBI NO: 34908968 NR Description: P0003D09.21 [Oryza sativa (japonica
  misc_feature (30)..(84): Homolog of NCBI NO: 37535546 NR Description: putative zinc finger protein
  misc_feature (155)..(261): Homolog of NCBI NO: 37535546 NR Description: putative zinc finger protein
  misc_feature (165)..(318): Homolog of NCBI NO: 34906008 NR Description: putative RING-H2 finger protein RHC2a
  misc_feature (114)..(369): Homolog of NCBI NO: 34902106 NR Description: unknown protein [Oryza sativa (japonica
  misc_feature (91)..(369): Homolog of NCBI NO: 18405141 NR Description: expressed protein
  misc_feature (12)..(370): Homolog of NCBI NO: 14719329 NR Description: putative RING-H2 finger protein [Oryza sativa]
  misc_feature (15)..(394): Homolog of NCBI NO: 18424254 NR Description: putative protein
  misc_feature (1)..(394): Homolog of NCBI NO: 8885559 NR Description: emb|CAB62332.1~gene_id:F2O15.22~strong similarity
  misc_feature (1)..(394): Homolog of NCBI NO: 15232595 NR Description: putative protein
MPNSRSATITPTTESTTTTTTTTTTLTTSYWCYSCTRFISVWEDQDANAGVLCPYCNGGFIEEIEDSSNSTVAAIPASTPEVRSVEETHRSIIRRRRSNRRTSFNPVIVLHGGGGGGAGERVENEEGDGATRERRAYEFYYDDGSGSGLRPLPDSVSEILMGSGFERLLEQLSQIEASGNGIGRSGNPPASKSAIESLPRVEISDCHTKAEANCAVCTEVFEAGIEGREMPCKHIFHGDCIVPWLSIRNSCPVCRFELPSDPIQRSNEEEHAVGMTIWRLPGGGFAVGRFNAGVREGERILPVVLTEMDGGGLGSNEGPRRISWVRAHETPEMSRNGGRSGNGGRLRRAVRGMVSFMRRVRPSRGSSNSNVIDLDSDGETRVMNRSTSLIRRFF

SEQ ID NO: 41543 - DNA, 2181 bp, Arabidopsis thaliana; identical to SEQ ID NO: 37605
  misc_feature (1)..(2181): Ceres Seq. ID no. 13646180
  misc_feature: MA Experiment ID: 108561 Result: Up-regulated in Transcription
  misc_feature: MA Experiment 108561 PARAMETER Experiment Name: At_100uM_ABA_cDNA_P Parameter: Timepoint (hr) Value: 6
  misc_feature: MA Experiment 108561 PARAMETER Experiment Name: At_100uM_ABA_cDNA_P Parameter: Tissue Value: Aerial
  misc_feature: MA Experiment 108561 PARAMETER Experiment Name: At_100uM_ABA_cDNA_P Parameter: Treatment Value: 100uM ABA vs. No Treatment
  misc_feature: MA Experiment ID: 108572 Result: Up-regulated in Transcription
  misc_feature: MA Experiment 108572 PARAMETER Experiment Name: At_Drought_cDNA_P Parameter: Timepoint (hr) Value: 1
  misc_feature: MA Experiment 108572 PARAMETER Experiment Name: At_Drought_cDNA_P Parameter: Tissue Value: Aerial
  misc_feature: MA Experiment 108572 PARAMETER Experiment Name: At_Drought_cDNA_P Parameter: Treatment Value: Drought vs. No Drought
  misc_feature: MA Experiment ID: 20000169 Result: Up-regulated in Transcription
  misc_feature: MA Experiment 20000169 PARAMETER Experiment Name: At_100uM_ABA_P Parameter: Age (day) Value: 14
  misc_feature: MA Experiment 20000169 PARAMETER Experiment Name: At_100uM_ABA_P Parameter: Organism Value: A. thaliana
  misc_feature: MA Experiment 20000169 PARAMETER Experiment Name: At_100uM_ABA_P Parameter: Plant Line Value: WS
  misc_feature: MA Experiment 20000169 PARAMETER Experiment Name: At_100uM_ABA_P Parameter: Timepoint (hr) Value: 6
  misc_feature: MA Experiment 20000169 PARAMETER Experiment Name: At_100uM_ABA_P Parameter: Tissue Value: Aerial
  misc_feature: MA Experiment 20000169 PARAMETER Experiment Name: At_100uM_ABA_P Parameter: Treatment Value: 100uM ABA vs. No Treatment
  misc_feature: MA Experiment ID: 20000180 Result: Up-regulated in Transcription
  misc_feature: MA Experiment 20000180 PARAMETER Experiment Name: At_Germinating_Seeds_P Parameter: Age (hr) Value: 24 vs. 0
  misc_feature: MA Experiment 20000180 PARAMETER Experiment Name: At_Germinating_Seeds_P Parameter: Tissue Value: Germinating Seeds
  misc_feature: MA Experiment ID: 20000185 Result: Down-regulated in Transcription
  misc_feature: MA Experiment 20000185 PARAMETER Experiment Name: At_Roots__P Parameter: Age (day) Value: 7 vs. 21
  misc_feature: MA Experiment 20000185 PARAMETER Experiment Name: At_Roots__P Parameter: Organism Value: A. thaliana
  misc_feature: MA Experiment 20000185 PARAMETER Experiment Name: At_Roots__P Parameter: Tissue Value: Roots vs. Whole Plant
  misc_feature: MA Experiment ID: 20000439 Result: Down-regulated in Transcription
  misc_feature: MA Experiment 20000439 PARAMETER Experiment Name: At_Roots__P Parameter: Age (day) Value: 14 vs. 21
  misc_feature: MA Experiment 20000439 PARAMETER Experiment Name: At_Roots__P Parameter: Organism Value: A. thaliana
  misc_feature: MA Experiment 20000439 PARAMETER Experiment Name: At_Roots__P Parameter: Tissue Value: Roots vs. Whole Plant
  misc_feature: MA Experiment ID: 20000794 Result: Up-regulated in Transcription
  misc_feature: MA Experiment 20000794 PARAMETER Experiment Name: At_Petals_P Parameter: Age (day) Value: 23-25 days
  misc_feature: MA Experiment 20000794 PARAMETER Experiment Name: At_Petals_P Parameter: Plant Line Value: WS
  misc_feature: MA Experiment 20000794 PARAMETER Experiment Name: At_Petals_P Parameter: Tissue Value: Petals vs. Whole plant
  misc_feature: MA Experiment ID: 20001554 Result: Up-regulated in Transcription
  misc_feature: MA Experiment 20001554 PARAMETER Experiment Name: At_Drought_Soil_Dry_P Parameter: Age (day) Value: 21
  misc_feature: MA Experiment 20001554 PARAMETER Experiment Name: At_Drought_Soil_Dry_P Parameter: Organism Value: A. thaliana
  misc_feature: MA Experiment 20001554 PARAMETER Experiment Name: At_Drought_Soil_Dry_P Parameter: Plant Line Value: WS
  misc_feature: MA Experiment 20001554 PARAMETER Experiment Name: At_Drought_Soil_Dry_P Parameter: Post Timepoint (hr) Value: None
  misc_feature: MA Experiment 20001554 PARAMETER Experiment Name: At_Drought_Soil_Dry_P Parameter: Post-Treatment Value: None
  misc_feature: MA Experiment 20001554 PARAMETER Experiment Name: At_Drought_Soil_Dry_P Parameter: Timepoint (day) Value: 7
  misc_feature: MA Experiment 20001554 PARAMETER Experiment Name: At_Drought_Soil_Dry_P Parameter: Treatment Value: Drought vs. No Drought

SEQ ID NO: 41544 - protein, 497 aa, Arabidopsis thaliana; identical to SEQ ID NO: 23374
  peptide (1)..(497): Ceres Seq. ID no. 13646181
  misc_feature (330)..(470): Pfam Name: Chalcone and stilbene synthases, C-terminal domain Pfam Description: Chalcone and stilbene synthases, C-terminal
  misc_feature (330)..(470): Pfam Name: Chalcone and stilbene synthases, C-terminal domain Pfam Description: Chalcone and stilbene synthases, C-terminal
  misc_feature (330)..(470): Pfam Name: Chalcone and stilbene synthases, C-terminal domain Pfam Description: Chalcone and stilbene synthases, C-terminal
  misc_feature (6)..(492): Homolog of NCBI NO: 29417540 NR Description: beta-ketoacyl-CoA-synthase [Marchantia polymorpha]
  misc_feature (6)..(489): Homolog of NCBI NO: 15223556 NR Description: very-long-chain fatty acid condensing enzyme
  misc_feature (6)..(489): Homolog of NCBI NO: 15226724 NR Description: very-long-chain fatty acid condensing enzyme
  misc_feature (1)..(349): Homolog of NCBI NO: 30697701 NR Description: very-long-chain fatty acid condensing enzyme
  misc_feature (6)..(497): Homolog of NCBI NO: 28393607 NR Description: putative fatty acid condensing enzyme CUT1
  misc_feature (6)..(492): Homolog of NCBI NO: 29417540 NR Description: beta-ketoacyl-CoA-synthase [Marchantia polymorpha]
  misc_feature (6)..(489): Homolog of NCBI NO: 15226724 NR Description: very-long-chain fatty acid condensing enzyme
  misc_feature (6)..(497): Homolog of NCBI NO: 28393607 NR Description: putative fatty acid condensing enzyme CUT1
  misc_feature (1)..(349): Homolog of NCBI NO: 30697701 NR Description: very-long-chain fatty acid condensing enzyme
  misc_feature (6)..(489): Homolog of NCBI NO: 15226724 NR Description: very-long-chain fatty acid condensing enzyme
  misc_feature (6)..(489): Homolog of NCBI NO: 15223556 NR Description: very-long-chain fatty acid condensing enzyme
  misc_feature (6)..(492): Homolog of NCBI NO: 29417540 NR Description: beta-ketoacyl-CoA-synthase [Marchantia polymorpha]
  misc_feature (1)..(497): Homolog of NCBI NO: 15221431 NR Description: very-long-chain fatty acid condensing enzyme
  misc_feature (1)..(497): Homolog of NCBI NO: 17979464 NR Description: At1g68530/T26J14_10 [Arabidopsis thaliana]
  misc_feature (6)..(497): Homolog of NCBI NO: 21593111 NR Description: very-long-chain fatty acid condensing enzyme CUT1
  misc_feature (6)..(497): Homolog of NCBI NO: 15222592 NR Description: very-long-chain fatty acid condensing enzyme
  misc_feature (6)..(497): Homolog of NCBI NO: 21618184 NR Description: fatty acid condensing enzyme CUT1, putative
  misc_feature (1)..(497): Homolog of NCBI NO: 15221431 NR Description: very-long-chain fatty acid condensing enzyme
  misc_feature (1)..(497): Homolog of NCBI NO: 17979464 NR Description: At1g68530/T26J14_10 [Arabidopsis thaliana]
  misc_feature (6)..(497): Homolog of NCBI NO: 21593111 NR Description: very-long-chain fatty acid condensing enzyme CUT1
  misc_feature (6)..(497): Homolog of NCBI NO: 15222592 NR Description: very-long-chain fatty acid condensing enzyme
  misc_feature (6)..(497): Homolog of NCBI NO: 21618184 NR Description: fatty acid condensing enzyme CUT1, putative
  misc_feature (6)..(497): Homolog of NCBI NO: 28393607 NR Description: putative fatty acid condensing enzyme CUT1
  misc_feature (1)..(349): Homolog of NCBI NO: 30697701 NR Description: very-long-chain fatty acid condensing enzyme
  misc_feature (6)..(489): Homolog of NCBI NO: 15223556 NR Description: very-long-chain fatty acid condensing enzyme
  misc_feature (6)..(497): Homolog of NCBI NO: 21618184 NR Description: fatty acid condensing enzyme CUT1, putative
  misc_feature (6)..(497): Homolog of NCBI NO: 15222592 NR Description: very-long-chain fatty acid condensing enzyme
  misc_feature (6)..(497): Homolog of NCBI NO: 21593111 NR Description: very-long-chain fatty acid condensing enzyme CUT1
  misc_feature (1)..(497): Homolog of NCBI NO: 17979464 NR Description: At1g68530/T26J14_10 [Arabidopsis thaliana]
  misc_feature (1)..(497): Homolog of NCBI NO: 15221431 NR Description: very-long-chain fatty acid condensing enzyme

SEQ ID NO: 41545 - protein, 492 aa, Arabidopsis thaliana; identical to SEQ ID NO: 23375
  peptide (1)..(492): Ceres Seq. ID no. 13646182
  misc_feature (325)..(465): Pfam Name: Chalcone and stilbene synthases, C-terminal domain Pfam Description: Chalcone and stilbene synthases, C-terminal
  misc_feature (325)..(465): Pfam Name: Chalcone and stilbene synthases, C-terminal domain Pfam Description: Chalcone and stilbene synthases, C-terminal
  misc_feature (325)..(465): Pfam Name: Chalcone and stilbene synthases, C-terminal domain Pfam Description: Chalcone and stilbene synthases, C-terminal
  misc_feature (1)..(487): Homolog of NCBI NO: 29417540 NR Description: beta-ketoacyl-CoA-synthase [Marchantia polymorpha]
  misc_feature (1)..(484): Homolog of NCBI NO: 15223556 NR Description: very-long-chain fatty acid condensing enzyme
  misc_feature (1)..(484): Homolog of NCBI NO: 15226724 NR Description: very-long-chain fatty acid condensing enzyme
  misc_feature (1)..(344): Homolog of NCBI NO: 30697701 NR Description: very-long-chain fatty acid condensing enzyme
  misc_feature (1)..(492): Homolog of NCBI NO: 28393607 NR Description: putative fatty acid condensing enzyme CUT1
  misc_feature (1)..(487): Homolog of NCBI NO: 29417540 NR Description: beta-ketoacyl-CoA-synthase [Marchantia polymorpha]
  misc_feature (1)..(484): Homolog of NCBI NO: 15226724 NR Description: very-long-chain fatty acid condensing enzyme
  misc_feature (1)..(492): Homolog of NCBI NO: 28393607 NR Description: putative fatty acid condensing enzyme CUT1
  misc_feature (1)..(344): Homolog of NCBI NO: 30697701 NR Description: very-long-chain fatty acid condensing enzyme
  misc_feature (1)..(484): Homolog of NCBI NO: 15226724 NR Description: very-long-chain fatty acid condensing enzyme
  misc_feature (1)..(484): Homolog of NCBI NO: 15223556 NR Description: very-long-chain fatty acid condensing enzyme
  misc_feature (1)..(487): Homolog of NCBI NO: 29417540 NR Description: beta-ketoacyl-CoA-synthase [Marchantia polymorpha]
  misc_feature (1)..(492): Homolog of NCBI NO: 15221431 NR Description: very-long-chain fatty acid condensing enzyme
  misc_feature (1)..(492): Homolog of NCBI NO: 17979464 NR Description: At1g68530/T26J14_10 [Arabidopsis thaliana]
  misc_feature (1)..(492): Homolog of NCBI NO: 21593111 NR Description: very-long-chain fatty acid condensing enzyme CUT1
  misc_feature (1)..(492): Homolog of NCBI NO: 15222592 NR Description: very-long-chain fatty acid condensing enzyme
  misc_feature (1)..(492): Homolog of NCBI NO: 21618184 NR Description: fatty acid condensing enzyme CUT1, putative
  misc_feature (1)..(492): Homolog of NCBI NO: 15221431 NR Description: very-long-chain fatty acid condensing enzyme
  misc_feature (1)..(492): Homolog of NCBI NO: 17979464 NR Description: At1g68530/T26J14_10 [Arabidopsis thaliana]
  misc_feature (1)..(492): Homolog of NCBI NO: 21593111 NR Description: very-long-chain fatty acid condensing enzyme CUT1
  misc_feature (1)..(492): Homolog of NCBI NO: 15222592 NR Description: very-long-chain fatty acid condensing enzyme
  misc_feature (1)..(492): Homolog of NCBI NO: 21618184 NR Description: fatty acid condensing enzyme CUT1, putative
  misc_feature (1)..(492): Homolog of NCBI NO: 28393607 NR Description: putative fatty acid condensing enzyme CUT1
  misc_feature (1)..(344): Homolog of NCBI NO: 30697701 NR Description: very-long-chain fatty acid condensing enzyme
  misc_feature (1)..(484): Homolog of NCBI NO: 15223556 NR Description: very-long-chain fatty acid condensing enzyme
  misc_feature (1)..(492): Homolog of NCBI NO: 21618184 NR Description: fatty acid condensing enzyme CUT1, putative
  misc_feature (1)..(492): Homolog of NCBI NO: 15222592 NR Description: very-long-chain fatty acid condensing enzyme
  misc_feature (1)..(492): Homolog of NCBI NO: 21593111 NR Description: very-long-chain fatty acid condensing enzyme CUT1
  misc_feature (1)..(492): Homolog of NCBI NO: 17979464 NR Description: At1g68530/T26J14_10 [Arabidopsis thaliana]
  misc_feature (1)..(492): Homolog of NCBI NO: 15221431 NR Description: very-long-chain fatty acid condensing enzyme

SEQ ID NO: 41546 - protein, 460 aa, Arabidopsis thaliana; identical to SEQ ID NO: 23376
  peptide (1)..(460): Ceres Seq. ID no. 13646183
  misc_feature (293)..(433): Pfam Name: Chalcone and stilbene synthases, C-terminal domain Pfam Description: Chalcone and stilbene synthases, C-terminal
  misc_feature (293)..(433): Pfam Name: Chalcone and stilbene synthases, C-terminal domain Pfam Description: Chalcone and stilbene synthases, C-terminal
  misc_feature (293)..(433): Pfam Name: Chalcone and stilbene synthases, C-terminal domain Pfam Description: Chalcone and stilbene synthases, C-terminal
  misc_feature (1)..(455): Homolog of NCBI NO: 29417540 NR Description: beta-ketoacyl-CoA-synthase [Marchantia polymorpha]
  misc_feature (1)..(452): Homolog of NCBI NO: 15223556 NR Description: very-long-chain fatty acid condensing enzyme
  misc_feature (1)..(452): Homolog of NCBI NO: 15226724 NR Description: very-long-chain fatty acid condensing enzyme
  misc_feature (1)..(312): Homolog of NCBI NO: 30697701 NR Description: very-long-chain fatty acid condensing enzyme
  misc_feature (1)..(460): Homolog of NCBI NO: 28393607 NR Description: putative fatty acid condensing enzyme CUT1
  misc_feature (1)..(455): Homolog of NCBI NO: 29417540 NR Description: beta-ketoacyl-CoA-synthase [Marchantia polymorpha]
  misc_feature (1)..(452): Homolog of NCBI NO: 15226724 NR Description: very-long-chain fatty acid condensing enzyme
  misc_feature (1)..(460): Homolog of NCBI NO: 28393607 NR Description: putative fatty acid condensing enzyme CUT1
  misc_feature (1)..(312): Homolog of NCBI NO: 30697701 NR Description: very-long-chain fatty acid condensing enzyme
  misc_feature (1)..(452): Homolog of NCBI NO: 15226724 NR Description: very-long-chain fatty acid condensing enzyme
  misc_feature (1)..(452): Homolog of NCBI NO: 15223556 NR Description: very-long-chain fatty acid condensing enzyme
  misc_feature (1)..(455): Homolog of NCBI NO: 29417540 NR Description: beta-ketoacyl-CoA-synthase [Marchantia polymorpha]
  misc_feature (1)..(460): Homolog of NCBI NO: 15221431 NR Description: very-long-chain fatty acid condensing enzyme
  misc_feature (1)..(460): Homolog of NCBI NO: 17979464 NR Description: At1g68530/T26J14_10 [Arabidopsis thaliana]
  misc_feature (1)..(460): Homolog of NCBI NO: 21593111 NR Description: very-long-chain fatty acid condensing enzyme CUT1
  misc_feature (1)..(460): Homolog of NCBI NO: 15222592 NR Description: very-long-chain fatty acid condensing enzyme
  misc_feature (1)..(460): Homolog of NCBI NO: 21618184 NR Description: fatty acid condensing enzyme CUT1, putative
  misc_feature (1)..(460): Homolog of NCBI NO: 15221431 NR Description: very-long-chain fatty acid condensing enzyme
  misc_feature (1)..(460): Homolog of NCBI NO: 17979464 NR Description: At1g68530/T26J14_10 [Arabidopsis thaliana]
  misc_feature (1)..(460): Homolog of NCBI NO: 21593111 NR Description: very-long-chain fatty acid condensing enzyme CUT1
  misc_feature (1)..(460): Homolog of NCBI NO: 15222592 NR Description: very-long-chain fatty acid condensing enzyme
  misc_feature (1)..(460): Homolog of NCBI NO: 21618184 NR Description: fatty acid condensing enzyme CUT1, putative
  misc_feature (1)..(460): Homolog of NCBI NO: 28393607 NR Description: putative fatty acid condensing enzyme CUT1
  misc_feature (1)..(312): Homolog of NCBI NO: 30697701 NR Description: very-long-chain fatty acid condensing enzyme
  misc_feature (1)..(452): Homolog of NCBI NO: 15223556 NR Description: very-long-chain fatty acid condensing enzyme
  misc_feature (1)..(460): Homolog of NCBI NO: 21618184 NR Description: fatty acid condensing enzyme CUT1, putative
  misc_feature (1)..(460): Homolog of NCBI NO: 15222592 NR Description: very-long-chain fatty acid condensing enzyme
  misc_feature (1)..(460): Homolog of NCBI NO: 21593111 NR Description: very-long-chain fatty acid condensing enzyme CUT1
  misc_feature (1)..(460): Homolog of NCBI NO: 17979464 NR Description: At1g68530/T26J14_10 [Arabidopsis thaliana]
  misc_feature (1)..(460): Homolog of NCBI NO: 15221431 NR Description: very-long-chain fatty acid condensing enzyme

SEQ ID NO: 41547 - DNA, 799 bp, Arabidopsis thaliana; identical to SEQ ID NO: 36512
  misc_feature (1)..(799): Ceres Seq. ID no. 12462083
  misc_feature: MA Experiment ID: 108434 Result: Up-regulated in Transcription
  misc_feature: MA Experiment 108434 PARAMETER Experiment Name: At_Root_Tips_cDNA_P Parameter: Tissue Value: Root Tips
  misc_feature: MA Experiment ID: 108462 Result: Down-regulated in Transcription
  misc_feature: MA Experiment 108462 PARAMETER Experiment Name: At_Germinating_Seeds_cDNA_P Parameter: Age (day) Value: 2 vs. 0
  misc_feature: MA Experiment 108462 PARAMETER Experiment Name: At_Germinating_Seeds_cDNA_P Parameter: Tissue Value: Germinating Seeds
  misc_feature: MA Experiment ID: 108463 Result: Down-regulated in Transcription
  misc_feature: MA Experiment 108463 PARAMETER Experiment Name: At_Germinating_Seeds_cDNA_P Parameter: Age (day) Value: 3 vs. 0
  misc_feature: MA Experiment 108463 PARAMETER Experiment Name: At_Germinating_Seeds_cDNA_P Parameter: Tissue Value: Germinating Seeds
  misc_feature: MA Experiment ID: 108464 Result: Down-regulated in Transcription
  misc_feature: MA Experiment 108464 PARAMETER Experiment Name: At_Germinating_Seeds_cDNA_P Parameter: Age (day) Value: 4 vs. 0
  misc_feature: MA Experiment 108464 PARAMETER Experiment Name: At_Germinating_Seeds_cDNA_P Parameter: Tissue Value: Germinating Seeds
  misc_feature: MA Experiment ID: 108573 Result: Down-regulated in Transcription
  misc_feature: MA Experiment 108573 PARAMETER Experiment Name: At_Drought_cDNA_P Parameter: Timepoint (hr) Value: 6
  misc_feature: MA Experiment 108573 PARAMETER Experiment Name: At_Drought_cDNA_P Parameter: Tissue Value: Aerial
  misc_feature: MA Experiment 108573 PARAMETER Experiment Name: At_Drought_cDNA_P Parameter: Treatment Value: Drought vs. No Drought
  misc_feature: MA Experiment ID: 20000234 Result: Up-regulated in Transcription
  misc_feature: MA Experiment 20000234 PARAMETER Experiment Name: At_Siliques_P Parameter: Age (day) Value: 21
  misc_feature: MA Experiment 20000234 PARAMETER Experiment Name: At_Siliques_P Parameter: Organism Value: A. thaliana
  misc_feature: MA Experiment 20000234 PARAMETER Experiment Name: At_Siliques_P Parameter: Plant Line Value: WS
  misc_feature: MA Experiment 20000234 PARAMETER Experiment Name: At_Siliques_P Parameter: Tissue Value: Less Than 5mm Siliques vs. Whole Plant
  misc_feature: MA Experiment ID: 20000437 Result: Down-regulated in Transcription
  misc_feature: MA Experiment 20000437 PARAMETER Experiment Name: At_Drought_P Parameter: Age (day) Value: 8
  misc_feature: MA Experiment 20000437 PARAMETER Experiment Name: At_Drought_P Parameter: Organism Value: A. thaliana
  misc_feature: MA Experiment 20000437 PARAMETER Experiment Name: At_Drought_P Parameter: Plant Line Value: WS
  misc_feature: MA Experiment 20000437 PARAMETER Experiment Name: At_Drought_P Parameter: Timepoint (hr) Value: 24
  misc_feature: MA Experiment 20000437 PARAMETER Experiment Name: At_Drought_P Parameter: Tissue Value: Whole Plant
  misc_feature: MA Experiment 20000437 PARAMETER Experiment Name: At_Drought_P Parameter: Treatment Value: Drought vs. No Drought
  misc_feature: MA Experiment ID: 20001557 Result: Up-regulated in Transcription
  misc_feature: MA Experiment 20001557 PARAMETER Experiment Name: At_Drought_Soil_Dry_P Parameter: Age (day) Value: 27
  misc_feature: MA Experiment 20001557 PARAMETER Experiment Name: At_Drought_Soil_Dry_P Parameter: Organism Value: A. thaliana
  misc_feature: MA Experiment 20001557 PARAMETER Experiment Name: At_Drought_Soil_Dry_P Parameter: Plant Line Value: WS
  misc_feature: MA Experiment 20001557 PARAMETER Experiment Name: At_Drought_Soil_Dry_P Parameter: Post Timepoint (hr) Value: 3
  misc_feature: MA Experiment 20001557 PARAMETER Experiment Name: At_Drought_Soil_Dry_P Parameter: Post-Treatment Value: Re-Water vs. No Drought
  misc_feature: MA Experiment 20001557 PARAMETER Experiment Name: At_Drought_Soil_Dry_P Parameter: Timepoint (day) Value: 13
  misc_feature: MA Experiment 20001557 PARAMETER Experiment Name: At_Drought_Soil_Dry_P Parameter: Treatment Value: Drought vs. No Drought
  misc_feature: MA Experiment ID: 20001558 Result: Up-regulated in Transcription
  misc_feature: MA Experiment 20001558 PARAMETER Experiment Name: At_Drought_Soil_Dry_P Parameter: Age (day) Value: 27
  misc_feature: MA Experiment 20001558 PARAMETER Experiment Name: At_Drought_Soil_Dry_P Parameter: Organism Value: A. thaliana
  misc_feature: MA Experiment 20001558 PARAMETER Experiment Name: At_Drought_Soil_Dry_P Parameter: Plant Line Value: WS
  misc_feature: MA Experiment 20001558 PARAMETER Experiment Name: At_Drought_Soil_Dry_P Parameter: Post Timepoint (hr) Value: 6
  misc_feature: MA Experiment 20001558 PARAMETER Experiment Name: At_Drought_Soil_Dry_P Parameter: Post-Treatment Value: Re-Water vs. No Drought
  misc_feature: MA Experiment 20001558 PARAMETER Experiment Name: At_Drought_Soil_Dry_P Parameter: Timepoint (day) Value: 13
  misc_feature: MA Experiment 20001558 PARAMETER Experiment Name: At_Drought_Soil_Dry_P Parameter: Treatment Value: Drought vs. No Drought
  misc_feature: MA Experiment ID: 20001560 Result: Up-regulated in Transcription
  misc_feature: MA Experiment 20001560 PARAMETER Experiment Name: At_Drought_Soil_Dry_P Parameter: Age (day) Value: 28
  misc_feature: MA Experiment 20001560 PARAMETER Experiment Name: At_Drought_Soil_Dry_P Parameter: Organism Value: A. thaliana
  misc_feature: MA Experiment 20001560 PARAMETER Experiment Name: At_Drought_Soil_Dry_P Parameter: Plant Line Value: WS
  misc_feature: MA Experiment 20001560 PARAMETER Experiment Name: At_Drought_Soil_Dry_P Parameter: Post Timepoint (hr) Value: None
  misc_feature: MA Experiment 20001560 PARAMETER Experiment Name: At_Drought_Soil_Dry_P Parameter: Post-Treatment Value: None
  misc_feature: MA Experiment 20001560 PARAMETER Experiment Name: At_Drought_Soil_Dry_P Parameter: Timepoint (day) Value: 14
  misc_feature: MA Experiment 20001560 PARAMETER Experiment Name: At_Drought_Soil_Dry_P Parameter: Treatment Value: Drought vs. No Drought
  misc_feature: MA Experiment ID: 20001757 Result: Up-regulated in Transcription
  misc_feature: MA Experiment 20001757 PARAMETER Experiment Name: At_50mM_NH4NO3_L-to-H_P Parameter: Timepoint (hr) Value: 6
  misc_feature: MA Experiment 20001757 PARAMETER Experiment Name: At_50mM_NH4NO3_L-to-H_P Parameter: Tissue Value: Leaf
  misc_feature: MA Experiment 20001757 PARAMETER Experiment Name: At_50mM_NH4NO3_L-to-H_P Parameter: Treatment Value: 50mM NH4NO3 vs 100mM Mannitol

SEQ ID NO: 41548 - protein, 199 aa, Arabidopsis thaliana; identical to SEQ ID NO: 36513
  peptide (1)..(199): Ceres Seq. ID no. 12462084
  misc_feature (13)..(198): Homolog of NCBI NO: 13592057 NR Description: ribosomal protein L18 [Rattus norvegicus]
  misc_feature (13)..(198): Homolog of NCBI NO: 28630356 NR Description: ribosomal protein L18 [Petromyzon marinus]
  misc_feature (13)..(175): Homolog of NCBI NO: 28798549 NR Description: 60S ribosomal protein [Medicago sativa]
  misc_feature (14)..(199): Homolog of NCBI NO: 7440855 NR Description: ribosomal protein L18, cytosolic - Arabidopsis
  misc_feature (16)..(199): Homolog of NCBI NO: 6094021 NR Description: 60S RIBOSOMAL PROTEIN L18
  misc_feature (13)..(199): Homolog of NCBI NO: 34393858 NR Description: putative cytoplasmic ribosomal protein L18
  misc_feature (13)..(199): Homolog of NCBI NO: 34897628 NR Description: cytoplasmic ribosomal protein L18 [Oryza sativa]
  misc_feature (13)..(199): Homolog of NCBI NO: 15241061 NR Description: 60S ribosomal protein - like
  misc_feature (13)..(199): Homolog of NCBI NO: 606970 NR Description: cytoplasmic ribosomal protein L18
  misc_feature (13)..(199): Homolog of NCBI NO: 15230011 NR Description: putative 60S ribosomal protein L18
  misc_feature (13)..(198): Homolog of NCBI NO: 13592057 NR Description: ribosomal protein L18 [Rattus norvegicus]
  misc_feature (13)..(198): Homolog of NCBI NO: 28630356 NR Description: ribosomal protein L18 [Petromyzon marinus]
  misc_feature (13)..(175): Homolog of NCBI NO: 28798549 NR Description: 60S ribosomal protein [Medicago sativa]
  misc_feature (14)..(199): Homolog of NCBI NO: 7440855 NR Description: ribosomal protein L18, cytosolic - Arabidopsis
  misc_feature (16)..(199): Homolog of NCBI NO: 6094021 NR Description: 60S RIBOSOMAL PROTEIN L18
  misc_feature (13)..(199): Homolog of NCBI NO: 34393858 NR Description: putative cytoplasmic ribosomal protein L18
  misc_feature (13)..(199): Homolog of NCBI NO: 34897628 NR Description: cytoplasmic ribosomal protein L18 [Oryza sativa]
  misc_feature (13)..(199): Homolog of NCBI NO: 15241061 NR Description: 60S ribosomal protein - like
  misc_feature (13)..(199): Homolog of NCBI NO: 606970 NR Description: cytoplasmic ribosomal protein L18
  misc_feature (13)..(199): Homolog of NCBI NO: 15230011 NR Description: putative 60S ribosomal protein L18

SEQ ID NO: 41549 - protein, 187 aa, Arabidopsis thaliana; identical to SEQ ID NO: 36514
  peptide (1)..(187): Ceres Seq. ID no. 12462085
  misc_feature (1)..(186): Homolog of NCBI NO: 13592057 NR Description: ribosomal protein L18 [Rattus norvegicus]
  misc_feature (1)..(186): Homolog of NCBI NO: 28630356 NR Description: ribosomal protein L18 [Petromyzon marinus]
  misc_feature (1)..(163): Homolog of NCBI NO: 28798549 NR Description: 60S ribosomal protein [Medicago sativa]
  misc_feature (2)..(187): Homolog of NCBI NO: 7440855 NR Description: ribosomal protein L18, cytosolic - Arabidopsis
  misc_feature (4)..(187): Homolog of NCBI NO: 6094021 NR Description: 60S RIBOSOMAL PROTEIN L18
  misc_feature (1)..(187): Homolog of NCBI NO: 34393858 NR Description: putative cytoplasmic ribosomal protein L18
  misc_feature (1)..(187): Homolog of NCBI NO: 34897628 NR Description: cytoplasmic ribosomal protein L18 [Oryza sativa]
  misc_feature (1)..(187): Homolog of NCBI NO: 15241061 NR Description: 60S ribosomal protein - like
  misc_feature (1)..(187): Homolog of NCBI NO: 606970 NR Description: cytoplasmic ribosomal protein L18
  misc_feature (1)..(187): Homolog of NCBI NO: 15230011 NR Description: putative 60S ribosomal protein L18
  misc_feature (1)..(186): Homolog of NCBI NO: 13592057 NR Description: ribosomal protein L18 [Rattus norvegicus]
  misc_feature (1)..(186): Homolog of NCBI NO: 28630356 NR Description: ribosomal protein L18 [Petromyzon marinus]
  misc_feature (1)..(163): Homolog of NCBI NO: 28798549 NR Description: 60S ribosomal protein [Medicago sativa]
  misc_feature (2)..(187): Homolog of NCBI NO: 7440855 NR Description: ribosomal protein L18, cytosolic - Arabidopsis
  misc_feature (4)..(187): Homolog of NCBI NO: 6094021 NR Description: 60S RIBOSOMAL PROTEIN L18
  misc_feature (1)..(187): Homolog of NCBI NO: 34393858 NR Description: putative cytoplasmic ribosomal protein L18
  misc_feature (1)..(187): Homolog of NCBI NO: 34897628 NR Description: cytoplasmic ribosomal protein L18 [Oryza sativa]
  misc_feature (1)..(187): Homolog of NCBI NO: 15241061 NR Description: 60S ribosomal protein - like
  misc_feature (1)..(187): Homolog of NCBI NO: 606970 NR Description: cytoplasmic ribosomal protein L18
  misc_feature (1)..(187): Homolog of NCBI NO: 15230011 NR Description: putative 60S ribosomal protein L18

SEQ ID NO: 41550 - protein, 134 aa, Arabidopsis thaliana; identical to SEQ ID NO: 36515
  peptide (1)..(134): Ceres Seq. ID no. 12462086
  misc_feature (1)..(133): Homolog of NCBI NO: 13592057 NR Description: ribosomal protein L18 [Rattus norvegicus]
  misc_feature (1)..(133): Homolog of NCBI NO: 28630356 NR Description: ribosomal protein L18 [Petromyzon marinus]
  misc_feature (1)..(110): Homolog of NCBI NO: 28798549 NR Description: 60S ribosomal protein [Medicago sativa]
  misc_feature (1)..(134): Homolog of NCBI NO: 7440855 NR Description: ribosomal protein L18, cytosolic - Arabidopsis
  misc_feature (1)..(134): Homolog of NCBI NO: 6094021 NR Description: 60S RIBOSOMAL PROTEIN L18
  misc_feature (1)..(134): Homolog of NCBI NO: 34393858 NR Description: putative cytoplasmic ribosomal protein L18
  misc_feature (1)..(134): Homolog of NCBI NO: 34897628 NR Description: cytoplasmic ribosomal protein L18 [Oryza sativa]
  misc_feature (1)..(134): Homolog of NCBI NO: 15241061 NR Description: 60S ribosomal protein - like
  misc_feature (1)..(134): Homolog of NCBI NO: 606970 NR Description: cytoplasmic ribosomal protein L18
  misc_feature (1)..(134): Homolog of NCBI NO: 15230011 NR Description: putative 60S ribosomal protein L18
  misc_feature (1)..(133): Homolog of NCBI NO: 13592057 NR Description: ribosomal protein L18 [Rattus norvegicus]
  misc_feature (1)..(133): Homolog of NCBI NO: 28630356 NR Description: ribosomal protein L18 [Petromyzon marinus]
  misc_feature (1)..(110): Homolog of NCBI NO: 28798549 NR Description: 60S ribosomal protein [Medicago sativa]
  misc_feature (1)..(134): Homolog of NCBI NO: 7440855 NR Description: ribosomal protein L18, cytosolic - Arabidopsis
  misc_feature (1)..(134): Homolog of NCBI NO: 6094021 NR Description: 60S RIBOSOMAL PROTEIN L18
  misc_feature (1)..(134): Homolog of NCBI NO: 34393858 NR Description: putative cytoplasmic ribosomal protein L18
  misc_feature (1)..(134): Homolog of NCBI NO: 34897628 NR Description: cytoplasmic ribosomal protein L18 [Oryza sativa]
  misc_feature (1)..(134): Homolog of NCBI NO: 15241061 NR Description: 60S ribosomal protein - like
  misc_feature (1)..(134): Homolog of NCBI NO: 606970 NR Description: cytoplasmic ribosomal protein L18
  misc_feature (1)..(134): Homolog of NCBI NO: 15230011 NR Description: putative 60S ribosomal protein L18

SEQ ID NO: 41551 - DNA, 1437 bp, Arabidopsis thaliana
  misc_feature (1)..(1437): Ceres Seq. ID no. 12329608
  misc_feature: MA Experiment ID: 108573 Result: Up-regulated in Transcription
  misc_feature: MA Experiment 108573 PARAMETER Experiment Name: At_Drought_cDNA_P Parameter: Timepoint (hr) Value: 6
  misc_feature: MA Experiment 108573 PARAMETER Experiment Name: At_Drought_cDNA_P Parameter: Tissue Value: Aerial
  misc_feature: MA Experiment 108573 PARAMETER Experiment Name: At_Drought_cDNA_P Parameter: Treatment Value: Drought vs. No Drought
  misc_feature: MA Experiment ID: 108595 Result: Down-regulated in Transcription
  misc_feature: MA Experiment 108595 PARAMETER Experiment Name: At_Ler-pi_Ovule_cDNA_P Parameter: Plant Line Value: null
  misc_feature: MA Experiment ID: 20000069 Result: Down-regulated in Transcription
  misc_feature: MA Experiment 20000069 PARAMETER Experiment Name: At_100uM_ABA_Mutants_cDNA_P Parameter: Plant Line Value: CS23
  misc_feature: MA Experiment 20000069 PARAMETER Experiment Name: At_100uM_ABA_Mutants_cDNA_P Parameter: Timepoint (hr) Value: 6
  misc_feature: MA Experiment 20000069 PARAMETER Experiment Name: At_100uM_ABA_Mutants_cDNA_P Parameter: Tissue Value: Aerial
  misc_feature: MA Experiment 20000069 PARAMETER Experiment Name: At_100uM_ABA_Mutants_cDNA_P Parameter: Treatment Value: 100uM ABA vs. No Treatment
  misc_feature: MA Experiment ID: 20000087 Result: Down-regulated in Transcription
  misc_feature: MA Experiment 20000087 PARAMETER Experiment Name: At_100uM_ABA_Mutants_cDNA_P Parameter: Plant Line Value: WS
  misc_feature: MA Experiment 20000087 PARAMETER Experiment Name: At_100uM_ABA_Mutants_cDNA_P Parameter: Timepoint (hr) Value: 6
  misc_feature: MA Experiment 20000087 PARAMETER Experiment Name: At_100uM_ABA_Mutants_cDNA_P Parameter: Tissue Value: Aerial
  misc_feature: MA Experiment 20000087 PARAMETER Experiment Name: At_100uM_ABA_Mutants_cDNA_P Parameter: Treatment Value: 100uM ABA vs. No Treatment
  misc_feature: MA Experiment ID: 20000117 Result: Down-regulated in Transcription
  misc_feature: MA Experiment 20000117 PARAMETER Experiment Name: At_100uM_ABA_Mutants_cDNA_P Parameter: Plant Line Value: Columbia
  misc_feature: MA Experiment 20000117 PARAMETER Experiment Name: At_100uM_ABA_Mutants_cDNA_P Parameter: Timepoint (hr) Value: 6
  misc_feature: MA Experiment 20000117 PARAMETER Experiment Name: At_100uM_ABA_Mutants_cDNA_P Parameter: Tissue Value: Aerial
  misc_feature: MA Experiment 20000117 PARAMETER Experiment Name: At_100uM_ABA_Mutants_cDNA_P Parameter: Treatment Value: 100uM ABA vs. No Treatment
  misc_feature: MA Experiment ID: 20000180 Result: Up-regulated in Transcription
  misc_feature: MA Experiment 20000180 PARAMETER Experiment Name: At_Germinating_Seeds_P Parameter: Age (hr) Value: 24 vs. 0
  misc_feature: MA Experiment 20000180 PARAMETER Experiment Name: At_Germinating_Seeds_P Parameter: Tissue Value: Germinating Seeds
  misc_feature: MA Experiment ID: 20000185 Result: Down-regulated in Transcription
  misc_feature: MA Experiment 20000185 PARAMETER Experiment Name: At_Roots__P Parameter: Age (day) Value: 7 vs. 21
  misc_feature: MA Experiment 20000185 PARAMETER Experiment Name: At_Roots__P Parameter: Organism Value: A. thaliana
  misc_feature: MA Experiment 20000185 PARAMETER Experiment Name: At_Roots__P Parameter: Tissue Value: Roots vs. Whole Plant
  misc_feature: MA Experiment ID: 20000439 Result: Down-regulated in Transcription
  misc_feature: MA Experiment 20000439 PARAMETER Experiment Name: At_Roots__P Parameter: Age (day) Value: 14 vs. 21
  misc_feature: MA Experiment 20000439 PARAMETER Experiment Name: At_Roots__P Parameter: Organism Value: A. thaliana
  misc_feature: MA Experiment 20000439 PARAMETER Experiment Name: At_Roots__P Parameter: Tissue Value: Roots vs. Whole Plant
  misc_feature: MA Experiment ID: 20001451 Result: Down-regulated in Transcription
  misc_feature: MA Experiment 20001451 PARAMETER Experiment Name: At_Far-red-induction_P Parameter: Age (day) Value: 7
  misc_feature: MA Experiment 20001451 PARAMETER Experiment Name: At_Far-red-induction_P Parameter: Light Value: Far-red vs. White
  misc_feature: MA Experiment 20001451 PARAMETER Experiment Name: At_Far-red-induction_P Parameter: Organism Value: A. thaliana
  misc_feature: MA Experiment 20001451 PARAMETER Experiment Name: At_Far-red-induction_P Parameter: Plant Line Value: Columbia
  misc_feature: MA Experiment 20001451 PARAMETER Experiment Name: At_Far-red-induction_P Parameter: Timepoint (hr) Value: 24
  misc_feature: MA Experiment 20001451 PARAMETER Experiment Name: At_Far-red-induction_P Parameter: Tissue Value: Whole Plant
aagaacaacagaaaatttcaaaatggtttctcagataatctcgtgtttatctcaatcttcgtctcttctatgtttatccgattcaaggaggttaattcttccgaagacttgtacttgcggcggtttgagccggttttctccaggatttgctagccgccggttatttacggttaatcggaagaaatggagatcggcctgcattttcaactctggaaaggaacctggaggagagggaaaggttactggatcactgactctatctaaattagattcttgtttagtttccggtctgaatttttctgaggcagctctatgtaacttgttcaattgaatccaaattctattggaatgtgaaaaaagactagacctttgagaaattatttgaagttttgattgttatatttgttgtagttacaaggaggtagctcagagtggccgatacttcagagatgggaagttccatggggatggcagacagtttcgttaacttcgtttgcttgtgcactaaggcagttttgttttgacaggattaaccgagatggcagtcataccgtttttaggaatcgacgttgagaaactgaccttggacgataaggcggagattttgttcctggatcaaggcctaacaaccgcggtggtacttgctgtcatattcactgttgccaaaaccttcgacccacttcctgaagatattcttcgctatgatttgagacaacccgtcaacctgcaaaaaggatggcttgtgtggggtggaatcggtctggttggtgctgttggtgctattgcgttaacaggtgttgttttatccgtgttcaggacagaagcacctgaaagggaggtagactctttgatgaagcttcttccattaattggatcctcaaacataagcaccttaagcttagtgggcataactggaatccttgctccacttctggaggagaccgtgtttcgcggattcttcatggtctctcttaccaaatgggtcccgaccccaatagcgatcatcatcagctcagctgcgtttgcccttgcccatttcacacctggtgaattcccgcagctgtttattctaggaagtgttttgggattatcatatgcacaaacccgcaatctcattaccccaatggtcatacacggtttctggaactcgggagttattttgctactcacttttcttcagatccaagggtatgacattaaggagctattgcaggcaaactagctctgagccatgctctttgtgctgtccgcatttaacatcaaaaagcttcattatgtgctcgatgttagtaagatattttgtattcgagaacagatttcatacttaatgcaatttgggttttggtagagttatctttattacaacatcatgacagtaatgtatgaactaatatggtagagatgaatctttttggaacaaaaaacaaatttatttgc

SEQ ID NO: 41552 - protein, 227 aa, Arabidopsis thaliana; identical to SEQ ID NO: 23346
  peptide (1)..(227): Ceres Seq. ID no. 12329609
  misc_feature (121)..(210): Pfam Name: CAAX amino terminal protease family Pfam Description: CAAX amino terminal protease family
  misc_feature (107)..(213): Homolog of NCBI NO: 23043203 NR Description: hypothetical protein [Trichodesmium erythraeum
  misc_feature (3)..(210): Homolog of NCBI NO: 18424393 NR Description: putative protein
  misc_feature (3)..(210): Homolog of NCBI NO: 9759339 NR Description: gene_id:MUP24.17~pir||S76167~similar to unknown
  misc_feature (35)..(213): Homolog of NCBI NO: 23130090 NR Description: hypothetical protein [Nostoc punctiforme]
  misc_feature (1)..(213): Homolog of NCBI NO: 17231277 NR Description: hypothetical protein [Nostoc sp. PCC 7120]
  misc_feature (1)..(213): Homolog of NCBI NO: 16331018 NR Description: unknown protein [Synechocystis sp. PCC 6803]
  misc_feature (1)..(227): Homolog of NCBI NO: 20259411 NR Description: unknown protein [Arabidopsis thaliana]
  misc_feature (1)..(227): Homolog of NCBI NO: 25518680 NR Description: hypothetical protein F14L17.3 - Arabidopsis
  misc_feature (1)..(227): Homolog of NCBI NO: 21593106 NR Description: unknown [Arabidopsis thaliana]
  misc_feature (1)..(227): Homolog of NCBI NO: 30683693 NR Description: CAAX amino terminal protease family [Arabidopsis

SEQ ID NO: 41553 - protein, 123 aa, Arabidopsis thaliana
  peptide (1)..(123): Ceres Seq. ID no. 12329610
  misc_feature (17)..(106): Pfam Name: CAAX amino terminal protease family Pfam Description: CAAX amino terminal protease family
  misc_feature (3)..(109): Homolog of NCBI NO: 23043203 NR Description: hypothetical protein [Trichodesmium erythraeum
  misc_feature (1)..(106): Homolog of NCBI NO: 18424393 NR Description: putative protein
  misc_feature (1)..(106): Homolog of NCBI NO: 9759339 NR Description: gene_id:MUP24.17~pir||S76167~similar to unknown
  misc_feature (1)..(109): Homolog of NCBI NO: 23130090 NR Description: hypothetical protein [Nostoc punctiforme]
  misc_feature (1)..(109): Homolog of NCBI NO: 17231277 NR Description: hypothetical protein [Nostoc sp. PCC 7120]
  misc_feature (1)..(109): Homolog of NCBI NO: 16331018 NR Description: unknown protein [Synechocystis sp. PCC 6803]
  misc_feature (1)..(123): Homolog of NCBI NO: 20259411 NR Description: unknown protein [Arabidopsis thaliana]
  misc_feature (1)..(123): Homolog of NCBI NO: 25518680 NR Description: hypothetical protein F14L17.3 - Arabidopsis
  misc_feature (1)..(123): Homolog of NCBI NO: 21593106 NR Description: unknown [Arabidopsis thaliana]
  misc_feature (1)..(123): Homolog of NCBI NO: 30683693 NR Description: CAAX amino terminal protease family [Arabidopsis
MKLLPLIGSSNISTLSLVGITGILAPLLEETVFRGFFMVSLTKWVPTPIAIIISSAAFALAHFTPGEFPQLFILGSVLGLSYAQTRNLITPMVIHGFWNSGVILLLTFLQIQGYDIKELLQAN

SEQ ID NO: 41554 - DNA, 755 bp, Arabidopsis thaliana
  misc_feature (1)..(755): Ceres Seq. ID no. 12325799
  misc_feature: MA Experiment ID: 108473 Result: Down-regulated in Transcription
  misc_feature: MA Experiment 108473 PARAMETER Experiment Name: At_Drought_Flowers_cDNA_P Parameter: Timepoint (hr) Value: 7 d
  misc_feature: MA Experiment 108473 PARAMETER Experiment Name: At_Drought_Flowers_cDNA_P Parameter: Tissue Value: Flower
  misc_feature: MA Experiment 108473 PARAMETER Experiment Name: At_Drought_Flowers_cDNA_P Parameter: Treatment Value: Drought vs. No Drought
  misc_feature: MA Experiment ID: 108501 Result: Down-regulated in Transcription
  misc_feature: MA Experiment 108501 PARAMETER Experiment Name: At_ap2_floral_buds_cDNA_P Parameter: Plant Line Value: ap2 (Ler.)
  misc_feature: MA Experiment 108501 PARAMETER Experiment Name: At_ap2_floral_buds_cDNA_P Parameter: Tissue Value: Closed Flower
  misc_feature: MA Experiment ID: 20000184 Result: Down-regulated in Transcription
  misc_feature: MA Experiment 20000184 PARAMETER Experiment Name: At_Shoots__P Parameter: Age (day) Value: 7
  misc_feature: MA Experiment 20000184 PARAMETER Experiment Name: At_Shoots__P Parameter: Tissue Value: Shoots vs. Whole Plant
  misc_feature: MA Experiment ID: 20000234 Result: Down-regulated in Transcription
  misc_feature: MA Experiment 20000234 PARAMETER Experiment Name: At_Siliques_P Parameter: Age (day) Value: 21
  misc_feature: MA Experiment 20000234 PARAMETER Experiment Name: At_Siliques_P Parameter: Organism Value: A. thaliana
  misc_feature: MA Experiment 20000234 PARAMETER Experiment Name: At_Siliques_P Parameter: Plant Line Value: WS
  misc_feature: MA Experiment 20000234 PARAMETER Experiment Name: At_Siliques_P Parameter: Tissue Value: Less Than 5mm Siliques vs. Whole Plant
  misc_feature: MA Experiment ID: 20000235 Result: Down-regulated in Transcription
  misc_feature: MA Experiment 20000235 PARAMETER Experiment Name: At_Siliques_P Parameter: Age (day) Value: 21
  misc_feature: MA Experiment 20000235 PARAMETER Experiment Name: At_Siliques_P Parameter: Organism Value: A. thaliana
  misc_feature: MA Experiment 20000235 PARAMETER Experiment Name: At_Siliques_P Parameter: Plant Line Value: WS
  misc_feature: MA Experiment 20000235 PARAMETER Experiment Name: At_Siliques_P Parameter: Tissue Value: 5-10mm Siliques vs. Whole Plant
  misc_feature: MA Experiment ID: 20000265 Result: Up-regulated in Transcription
  misc_feature: MA Experiment 20000265 PARAMETER Experiment Name: At_Open_Flower_P Parameter: Age (day) Value: 21
  misc_feature: MA Experiment 20000265 PARAMETER Experiment Name: At_Open_Flower_P Parameter: Plant Line Value: WS
  misc_feature: MA Experiment 20000265 PARAMETER Experiment Name: At_Open_Flower_P Parameter: Tissue Value: Closed Flower vs. Whole Plant
  misc_feature: MA Experiment ID: 20000286 Result: Up-regulated in Transcription
  misc_feature: MA Experiment 20000286 PARAMETER Experiment Name: At_Open_Flower_P Parameter: Age (day) Value: 21
  misc_feature: MA Experiment 20000286 PARAMETER Experiment Name: At_Open_Flower_P Parameter: Plant Line Value: WS
  misc_feature: MA Experiment 20000286 PARAMETER Experiment Name: At_Open_Flower_P Parameter: Tissue Value: Half Open vs. Whole Plant
  misc_feature: MA Experiment ID: 20000438 Result: Down-regulated in Transcription
  misc_feature: MA Experiment 20000438 PARAMETER Experiment Name: At_Shoots__P Parameter: Age (day) Value: 14
  misc_feature: MA Experiment 20000438 PARAMETER Experiment Name: At_Shoots__P Parameter: Tissue Value: Shoots vs. Whole Plant
  misc_feature: MA Experiment ID: 20000439 Result: Down-regulated in Transcription
  misc_feature: MA Experiment 20000439 PARAMETER Experiment Name: At_Roots__P Parameter: Age (day) Value: 14 vs. 21
  misc_feature: MA Experiment 20000439 PARAMETER Experiment Name: At_Roots__P Parameter: Organism Value: A. thaliana
  misc_feature: MA Experiment 20000439 PARAMETER Experiment Name: At_Roots__P Parameter: Tissue Value: Roots vs. Whole Plant
  misc_feature: MA Experiment ID: 20001760 Result: Up-regulated in Transcription
  misc_feature: MA Experiment 20001760 PARAMETER Experiment Name: At_50mM_NH4NO3_L-to-H_P Parameter: Timepoint (hr) Value: 2
  misc_feature: MA Experiment 20001760 PARAMETER Experiment Name: At_50mM_NH4NO3_L-to-H_P Parameter: Tissue Value: Siliques
  misc_feature: MA Experiment 20001760 PARAMETER Experiment Name: At_50mM_NH4NO3_L-to-H_P Parameter: Treatment Value: 50mM NH4NO3 vs 100mM Mannitol
  misc_feature: MA Experiment ID: 20001761 Result: Up-regulated in Transcription
  misc_feature: MA Experiment 20001761 PARAMETER Experiment Name: At_50mM_NH4NO3_L-to-H_P Parameter: Timepoint (hr) Value: 4
  misc_feature: MA Experiment 20001761 PARAMETER Experiment Name: At_50mM_NH4NO3_L-to-H_P Parameter: Tissue Value: Siliques
  misc_feature: MA Experiment 20001761 PARAMETER Experiment Name: At_50mM_NH4NO3_L-to-H_P Parameter: Treatment Value: 50mM NH4NO3 vs 100mM Mannitol
  misc_feature: MA Experiment ID: 20001773 Result: Up-regulated in Transcription
  misc_feature: MA Experiment 20001773 PARAMETER Experiment Name: At_Far-red-enriched-adult_P Parameter: Age (day) Value: 30
  misc_feature: MA Experiment 20001773 PARAMETER Experiment Name: At_Far-red-enriched-adult_P Parameter: Light Value: Far-red enriched vs. White
  misc_feature: MA Experiment 20001773 PARAMETER Experiment Name: At_Far-red-enriched-adult_P Parameter: Organism Value: A. thaliana
  misc_feature: MA Experiment 20001773 PARAMETER Experiment Name: At_Far-red-enriched-adult_P Parameter: Plant Line Value: Columbia
  misc_feature: MA Experiment 20001773 PARAMETER Experiment Name: At_Far-red-enriched-adult_P Parameter: Timepoint (hr) Value: 48
  misc_feature: MA Experiment 20001773 PARAMETER Experiment Name: At_Far-red-enriched-adult_P Parameter: Tissue Value: Aerial
  misc_feature: MA Experiment ID: 20001910 Result: Down-regulated in Transcription
  misc_feature: MA Experiment 20001910 PARAMETER Experiment Name: At_Drought_Reproduction_P Parameter: Age (day) Value: 37
  misc_feature: MA Experiment 20001910 PARAMETER Experiment Name: At_Drought_Reproduction_P Parameter: Organism Value: A. thaliana
  misc_feature: MA Experiment 20001910 PARAMETER Experiment Name: At_Drought_Reproduction_P Parameter: Plant Line Value: WS
  misc_feature: MA Experiment 20001910 PARAMETER Experiment Name: At_Drought_Reproduction_P Parameter: Timepoint (day) Value: 7
  misc_feature: MA Experiment 20001910 PARAMETER Experiment Name: At_Drought_Reproduction_P Parameter: Tissue Value: Flowers
  misc_feature: MA Experiment 20001910 PARAMETER Experiment Name: At_Drought_Reproduction_P Parameter: Treatment Value: Drought vs. No Drought
aattaattttgacatgcgtgatgatctttcaaaataataaggaaacggaggatttggctagggacgttcgagaccgcagaggaggcagcaagagcatacgacgaggccgccgttttaatgagcggccgcaacgccaaaaccaactttcccctcaacaacaacaacaccggagaaacttccgagggcaaaaccgatatttcagcttcgtccacaatgtcatcctcaacatcatcttcatcgctctcttccatcctcagcgccaaactgaggaaatgctgcaagtctccttccccatccctcacctgcctccgtcttgacacagccagctcccatatcggcgtctggcagaaacgggccggttcaaagtctgactccagctgggtcatgacggtggagctaggtcccgcaagctcctcccaagagactactagtaaagcttcacaagacgctattcttgctccgaccactgaagttgaaattggtggcagcagagaagaagtattggatgaggaagaaaaggttgctttgcaaatgatagaggagcttctcaatacaaactaaatcttatttgcttatatatatgtacctattttcattgctgatttacagccaaaataatcaattataccgtgtattttatagatgttttatattaaaaggttgttagctatatattgtttctctttttccacatttgtatctaataaagtattggtgtttgtaactaaaatccagaagtgacctttttctttccg

SEQ ID NO: 41555 - protein, 147 aa, Arabidopsis thaliana; identical to SEQ ID NO: 30301
  peptide (1)..(147): Ceres Seq. ID no. 12325800
  misc_feature (1)..(44): Homolog of NCBI NO: 25403338 NR Description: protein F3M18.20 [imported] - Arabidopsis
  misc_feature (1)..(44): Homolog of NCBI NO: 15218649 NR Description: ethylene-responsive element binding factor
  misc_feature (1)..(41): Homolog of NCBI NO: 15239863 NR Description: Nicotiana EREBP-3 like; protein id: At5g43410.1
  misc_feature (1)..(49): Homolog of NCBI NO: 15238727 NR Description: ethylene-responsive element - like protein
  misc_feature (1)..(49): Homolog of NCBI NO: 18650662 NR Description: ethylene response factor 1 [Lycopersicon
  misc_feature (1)..(145): Homolog of NCBI NO: 30689846 NR Description: AP2 domain transcription factor, putative
  misc_feature (1)..(145): Homolog of NCBI NO: 15239413 NR Description: AP2 domain containing protein; protein id:
  misc_feature (1)..(145): Homolog of NCBI NO: 15238976 NR Description: putative protein; protein id: At5g11190.1
  misc_feature (1)..(147): Homolog of NCBI NO: 21553845 NR Description: putative ethylene responsive element [Arabidopsis
  misc_feature (1)..(147): Homolog of NCBI NO: 15218134 NR Description: putative ethylene responsive element

SEQ ID NO: 41556 - protein, 115 aa, Arabidopsis thaliana; identical to SEQ ID NO: 30302
  peptide (1)..(115): Ceres Seq. ID no. 12325801
  misc_feature (1)..(16): Homolog of NCBI NO: 40353323 NR Description: ethylene-responsive element binding factor
  misc_feature (1)..(12): Homolog of NCBI NO: 25403338 NR Description: protein F3M18.20 [imported] - Arabidopsis
  misc_feature (1)..(12): Homolog of NCBI NO: 15218649 NR Description: ethylene-responsive element binding factor
  misc_feature (1)..(17): Homolog of NCBI NO: 15238727 NR Description: ethylene-responsive element - like protein
  misc_feature (1)..(17): Homolog of NCBI NO: 18650662 NR Description: ethylene response factor 1 [Lycopersicon
  misc_feature (1)..(113): Homolog of NCBI NO: 30689846 NR Description: AP2 domain transcription factor, putative
  misc_feature (1)..(113): Homolog of NCBI NO: 15239413 NR Description: AP2 domain containing protein; protein id:
  misc_feature (1)..(113): Homolog of NCBI NO: 15238976 NR Description: putative protein; protein id: At5g11190.1
  misc_feature (1)..(115): Homolog of NCBI NO: 21553845 NR Description: putative ethylene responsive element [Arabidopsis
  misc_feature (1)..(115): Homolog of NCBI NO: 15218134 NR Description: putative ethylene responsive element

SEQ ID NO: 41557 - protein, 104 aa, Arabidopsis thaliana
  peptide (1)..(104): Ceres Seq. ID no. 12325802
LILTCVMIFQNNKETEDLARDVRDRRGGSKSIRRGRRFNERPQRQNQLSPQQQQHRRNFRGQNRYFSFVHNVILNIIFIALFHPQRQTEEMLQVSFPIPHLPPS

SEQ ID NO: 41558 - DNA, 1590 bp, Arabidopsis thaliana
  misc_feature (1)..(1590): Ceres Seq. ID no. 12371145
  misc_feature: MA Experiment ID: 108434 Result: Down-regulated in Transcription
  misc_feature: MA Experiment 108434 PARAMETER Experiment Name: At_Root_Tips_cDNA_P Parameter: Tissue Value: Root Tips
  misc_feature: MA Experiment ID: 108463 Result: Up-regulated in Transcription
  misc_feature: MA Experiment 108463 PARAMETER Experiment Name: At_Germinating_Seeds_cDNA_P Parameter: Age (day) Value: 3 vs. 0
  misc_feature: MA Experiment 108463 PARAMETER Experiment Name: At_Germinating_Seeds_cDNA_P Parameter: Tissue Value: Germinating Seeds
  misc_feature: MA Experiment ID: 108561 Result: Up-regulated in Transcription
  misc_feature: MA Experiment 108561 PARAMETER Experiment Name: At_100uM_ABA_cDNA_P Parameter: Timepoint (hr) Value: 6
  misc_feature: MA Experiment 108561 PARAMETER Experiment Name: At_100uM_ABA_cDNA_P Parameter: Tissue Value: Aerial
  misc_feature: MA Experiment 108561 PARAMETER Experiment Name: At_100uM_ABA_cDNA_P Parameter: Treatment Value: 100uM ABA vs. No Treatment
  misc_feature: MA Experiment ID: 108573 Result: Up-regulated in Transcription
  misc_feature: MA Experiment 108573 PARAMETER Experiment Name: At_Drought_cDNA_P Parameter: Timepoint (hr) Value: 6
  misc_feature: MA Experiment 108573 PARAMETER Experiment Name: At_Drought_cDNA_P Parameter: Tissue Value: Aerial
  misc_feature: MA Experiment 108573 PARAMETER Experiment Name: At_Drought_cDNA_P Parameter: Treatment Value: Drought vs. No Drought
  misc_feature: MA Experiment ID: 108605 Result: Up-regulated in Transcription
  misc_feature: MA Experiment 108605 PARAMETER Experiment Name: At_100uM_ABA_cDNA_P Parameter: Timepoint (hr) Value: 6
  misc_feature: MA Experiment 108605 PARAMETER Experiment Name: At_100uM_ABA_cDNA_P Parameter: Tissue Value: Aerial
  misc_feature: MA Experiment 108605 PARAMETER Experiment Name: At_100uM_ABA_cDNA_P Parameter: Treatment Value: 100uM ABA vs. No Treatment
  misc_feature: MA Experiment ID: 108607 Result: Up-regulated in Transcription
  misc_feature: MA Experiment 108607 PARAMETER Experiment Name: At_100uM_ABA_cDNA_P Parameter: Timepoint (hr) Value: 4
  misc_feature: MA Experiment 108607 PARAMETER Experiment Name: At_100uM_ABA_cDNA_P Parameter: Tissue Value: Aerial
  misc_feature: MA Experiment 108607 PARAMETER Experiment Name: At_100uM_ABA_cDNA_P Parameter: Treatment Value: 100uM ABA vs. No Treatment
  misc_feature: MA Experiment ID: 20000069 Result: Up-regulated in Transcription
  misc_feature: MA Experiment 20000069 PARAMETER Experiment Name: At_100uM_ABA_Mutants_cDNA_P Parameter: Plant Line Value: CS23
  misc_feature: MA Experiment 20000069 PARAMETER Experiment Name: At_100uM_ABA_Mutants_cDNA_P Parameter: Timepoint (hr) Value: 6
  misc_feature: MA Experiment 20000069 PARAMETER Experiment Name: At_100uM_ABA_Mutants_cDNA_P Parameter: Tissue Value: Aerial
  misc_feature: MA Experiment 20000069 PARAMETER Experiment Name: At_100uM_ABA_Mutants_cDNA_P Parameter: Treatment Value: 100uM ABA vs. No Treatment
  misc_feature: MA Experiment ID: 20000070 Result: Up-regulated in Transcription
  misc_feature: MA Experiment 20000070 PARAMETER Experiment Name: At_100uM_ABA_Mutants_cDNA_P Parameter: Plant Line Value: CS24
  misc_feature: MA Experiment 20000070 PARAMETER Experiment Name: At_100uM_ABA_Mutants_cDNA_P Parameter: Timepoint (hr) Value: 6
  misc_feature: MA Experiment 20000070 PARAMETER Experiment Name: At_100uM_ABA_Mutants_cDNA_P Parameter: Tissue Value: Aerial
  misc_feature: MA Experiment 20000070 PARAMETER Experiment Name: At_100uM_ABA_Mutants_cDNA_P Parameter: Treatment Value: 100uM ABA vs. No Treatment
  misc_feature: MA Experiment ID: 20000071 Result: Up-regulated in Transcription
  misc_feature: MA Experiment 20000071 PARAMETER Experiment Name: At_100uM_ABA_Mutants_cDNA_P Parameter: Plant Line Value: CS8104
  misc_feature: MA Experiment 20000071 PARAMETER Experiment Name: At_100uM_ABA_Mutants_cDNA_P Parameter: Timepoint (hr) Value: 6
  misc_feature: MA Experiment 20000071 PARAMETER Experiment Name: At_100uM_ABA_Mutants_cDNA_P Parameter: Tissue Value: Aerial
  misc_feature: MA Experiment 20000071 PARAMETER Experiment Name: At_100uM_ABA_Mutants_cDNA_P Parameter: Treatment Value: 100uM ABA vs. No Treatment
  misc_feature: MA Experiment ID: 20000072 Result: Up-regulated in Transcription
  misc_feature: MA Experiment 20000072 PARAMETER Experiment Name: At_100uM_ABA_Mutants_cDNA_P Parameter: Plant Line Value: CS8105
  misc_feature: MA Experiment 20000072 PARAMETER Experiment Name: At_100uM_ABA_Mutants_cDNA_P Parameter: Timepoint (hr) Value: 6
  misc_feature: MA Experiment 20000072 PARAMETER Experiment Name: At_100uM_ABA_Mutants_cDNA_P Parameter: Tissue Value: Aerial
  misc_feature: MA Experiment 20000072 PARAMETER Experiment Name: At_100uM_ABA_Mutants_cDNA_P Parameter: Treatment Value: 100uM ABA vs. No Treatment
  misc_feature: MA Experiment ID: 20000086 Result: Up-regulated in Transcription
  misc_feature: MA Experiment 20000086 PARAMETER Experiment Name: At_100uM_ABA_Mutants_cDNA_P Parameter: Plant Line Value: CS22
  misc_feature: MA Experiment 20000086 PARAMETER Experiment Name: At_100uM_ABA_Mutants_cDNA_P Parameter: Timepoint (hr) Value: 6
  misc_feature: MA Experiment 20000086 PARAMETER Experiment Name: At_100uM_ABA_Mutants_cDNA_P Parameter: Tissue Value: Aerial
  misc_feature: MA Experiment 20000086 PARAMETER Experiment Name: At_100uM_ABA_Mutants_cDNA_P Parameter: Treatment Value: 100uM ABA vs. No Treatment
  misc_feature: MA Experiment ID: 20000088 Result: Up-regulated in Transcription
  misc_feature: MA Experiment 20000088 PARAMETER Experiment Name: At_100uM_ABA_Mutants_cDNA_P Parameter: Plant Line Value: Landsberg
  misc_feature: MA Experiment 20000088 PARAMETER Experiment Name: At_100uM_ABA_Mutants_cDNA_P Parameter: Timepoint (hr) Value: 6
  misc_feature: MA Experiment 20000088 PARAMETER Experiment Name: At_100uM_ABA_Mutants_cDNA_P Parameter: Tissue Value: Aerial
  misc_feature: MA Experiment 20000088 PARAMETER Experiment Name: At_100uM_ABA_Mutants_cDNA_P Parameter: Treatment Value: 100uM ABA vs. No Treatment
  misc_feature: MA Experiment ID: 20000111 Result: Down-regulated in Transcription
  misc_feature: MA Experiment 20000111 PARAMETER Experiment Name: At_42deg_Heat_cDNA_P Parameter: Temperature (deg C) Value: 42 vs. 22
  misc_feature: MA Experiment 20000111 PARAMETER Experiment Name: At_42deg_Heat_cDNA_P Parameter: Timepoint (hr) Value: 6
  misc_feature: MA Experiment 20000111 PARAMETER Experiment Name: At_42deg_Heat_cDNA_P Parameter: Tissue Value: Aerial
  misc_feature: MA Experiment ID: 20000184 Result: Down-regulated in Transcription
  misc_feature: MA Experiment 20000184 PARAMETER Experiment Name: At_Shoots__P Parameter: Age (day) Value: 7
  misc_feature: MA Experiment 20000184 PARAMETER Experiment Name: At_Shoots__P Parameter: Tissue Value: Shoots vs. Whole Plant
  misc_feature: MA Experiment ID: 20000224 Result: Up-regulated in Transcription
  misc_feature: MA Experiment ID: 20000794 Result: Up-regulated in Transcription
  misc_feature: MA Experiment 20000794 PARAMETER Experiment Name: At_Petals_P Parameter: Age (day) Value: 23-25 days
  misc_feature: MA Experiment 20000794 PARAMETER Experiment Name: At_Petals_P Parameter: Plant Line Value: WS
  misc_feature: MA Experiment 20000794 PARAMETER Experiment Name: At_Petals_P Parameter: Tissue Value: Petals vs. Whole plant
  misc_feature: MA Experiment ID: 20001905 Result: Up-regulated in Transcription
  misc_feature: MA Experiment 20001905 PARAMETER Experiment Name: At_Drought_Reproduction_P Parameter: Age (day) Value: 40
  misc_feature: MA Experiment 20001905 PARAMETER Experiment Name: At_Drought_Reproduction_P Parameter: Organism Value: A. thaliana
  misc_feature: MA Experiment 20001905 PARAMETER Experiment Name: At_Drought_Reproduction_P Parameter: Plant Line Value: WS
  misc_feature: MA Experiment 20001905 PARAMETER Experiment Name: At_Drought_Reproduction_P Parameter: Timepoint (day) Value: 10
  misc_feature: MA Experiment 20001905 PARAMETER Experiment Name: At_Drought_Reproduction_P Parameter: Tissue Value: Rosettes
  misc_feature: MA Experiment 20001905 PARAMETER Experiment Name: At_Drought_Reproduction_P Parameter: Treatment Value: Drought vs. No Drought
ataaatttaattttaaaattcgaaactttttttctgcttttcctctttctctctctctatctatcaaacactagacttgaagaaatgcagtgaaattgaaattgagtagaagcagaagagaatatggtggtaaggaaggtgggcaagtatgaattaggtagaacaatcggcgaaggtactttcgctaaagtcaagttcgctcagaatacagagaccggtgagagcgtcgccatgaaaatcgtggatcgtagcacaatcatcaagcgcaagatggtggatcagattaagagagagatctcgattatgaagcttgttcgtcatccttgtgttgttcgtctttatgaggttctagcaagccgtacaaagatttatatcatcctggagtacattactggtggtgaactgtttgataagattgttcgtaatggacgacttagtgagtcagaagctaggaaatactttcaccagcttattgatggagttgattactgtcatagtaaaggtgtttaccacagagatctaaagccggaaaatcttctgttggattctcaaggaaatctcaagatatctgattttggcctcagtgcattacctgaacaaggagttaccatcctaaagacaacatgtggaactcccaattacgttgctcctgaggttctcagtcacaagggttacaatggtgccgttgcagatatttggtcctgtggggtcatcctttatgttcttatggcaggatatcttccatttgatgaaatggatctaccaactttatatagtaagatcgacaaagctgagttctcttgcccctcatattttgccctgggggcaaagtccttgattaatagaattttggatccaaatccagaaactcggattacaattgcagaaatcaggaaagatgagtggtttctaaaggattacactcctgtacaacttatcgattacgaacatgtaaacctggatgatgtatatgctgcttttgatgatccggaggaacaaacatatgcacaggatggaacaagagacacaggtccactaactctaaatgcgtttgacctaattattctatctcagggcctgaacctcgcaactctttttgaccgtggaaaggactccatgaagcaccagacaaggttcatctcacacaagccagcaaacgtggttctctcaagcatggaagttgtgtcacagtctatgggctttaagacacacattcgtaattacaagatgagagtggaaggattatctgcaaataagacatctcatttctccgtcatactagaacaggagacgcagaagaataccttaagttctacaagactttttgtagtaagcttgatgacatcatttggaagccgccagatgcatctatgaaaaatcgagtcaccaaggccaagagtaaaagacgttgaatccacgtgcgtggtattcaagcagagctttcacagaagacagttagaaacaatatttaactctctgtgtttcttaagtgctttagtcgagtgaatatgtacaagcttgttgatttggttttaatttatgaatacatagaagattgtactaaacttatacgatatcaagactaaattg

SEQ ID NO: 41559 - protein, 416 aa, Arabidopsis thaliana
  peptide (1)..(416): Ceres Seq. ID no. 12371146
  misc_feature (9)..(262): Pfam Name: Protein kinase domain Pfam Description: Protein kinase domain
  misc_feature (5)..(387): Homolog of NCBI NO: 34902248 NR Description: Putative serine/threonine kinase
  misc_feature (5)..(387): Homolog of NCBI NO: 18397430 NR Description: serine/threonine kinase, putative
  misc_feature (2)..(387): Homolog of NCBI NO: 30683336 NR Description: CBL-interacting protein kinase 3 [Arabidopsis
  misc_feature (5)..(387): Homolog of NCBI NO: 25387051 NR Description: probable serine/threonine kinase
  misc_feature (5)..(387): Homolog of NCBI NO: 34393400 NR Description: putative CBL-interacting protein kinase 23
  misc_feature (2)..(387): Homolog of NCBI NO: 7446371 NR Description: probable serine/threonine kinase (EC 2.7.1.-)
  misc_feature (2)..(387): Homolog of NCBI NO: 7446372 NR Description: probable serine/threonine kinase (EC 2.7.1.-)
  misc_feature (3)..(387): Homolog of NCBI NO: 15238499 NR Description: serine/threonine protein kinase SOS2
  misc_feature (3)..(368): Homolog of NCBI NO: 34913564 NR Description: putative serine/threonine-specific protein kinase
  misc_feature (1)..(387): Homolog of NCBI NO: 15233820 NR Description: serine/threonine kinase-like protein
MVVRKVGKYELGRTIGEGTFAKVKFAQNTETGESVAMKIVDRSTIIKRKMVDQIKREISIMKLVRHPCVVRLYEVLASRTKIYIILEYITGGELFDKIVRNGRLSESEARKYFHQLIDGVDYCHSKGVYHRDLKPENLLLDSQGNLKISDFGLSALPEQGVTILKTTCGTPNYVAPEVLSHKGYNGAVADIWSCGVILYVLMAGYLPFDEMDLPTLYSKIDKAEFSCPSYFALGAKSLINRILDPNPETRITIAEIRKDEWFLKDYTPVQLIDYEHVNLDDVYAAFDDPEEQTYAQDGTRDTGPLTLNAFDLIILSQGLNLATLFDRGKDSMKHQTRFISHKPANVVLSSMEVVSQSMGFKTHIRNYKMRVEGLSANKTSHFSVILEQETQKNTLSSTRLFVVSLMTSFGSRQMHL

SEQ ID NO: 41560 - protein, 380 aa, Arabidopsis thaliana
  peptide (1)..(380): Ceres Seq. ID no. 12371147
  misc_feature (1)..(226): Pfam Name: Protein kinase domain Pfam Description: Protein kinase domain
  misc_feature (1)..(351): Homolog of NCBI NO: 34902248 NR Description: Putative serine/threonine kinase
  misc_feature (1)..(351): Homolog of NCBI NO: 18397430 NR Description: serine/threonine kinase, putative
  misc_feature (1)..(351): Homolog of NCBI NO: 30683336 NR Description: CBL-interacting protein kinase 3 [Arabidopsis
  misc_feature (1)..(351): Homolog of NCBI NO: 25387051 NR Description: probable serine/threonine kinase
  misc_feature (1)..(351): Homolog of NCBI NO: 34393400 NR Description: putative CBL-interacting protein kinase 23
  misc_feature (1)..(351): Homolog of NCBI NO: 7446371 NR Description: probable serine/threonine kinase (EC 2.7.1.-)
  misc_feature (1)..(351): Homolog of NCBI NO: 7446372 NR Description: probable serine/threonine kinase (EC 2.7.1.-)
  misc_feature (1)..(351): Homolog of NCBI NO: 15238499 NR Description: serine/threonine protein kinase SOS2
  misc_feature (1)..(332): Homolog of NCBI NO: 34913564 NR Description: putative serine/threonine-specific protein kinase
  misc_feature (1)..(351): Homolog of NCBI NO: 15233820 NR Description: serine/threonine kinase-like protein
MKIVDRSTIIKRKMVDQIKREISIMKLVRHPCVVRLYEVLASRTKIYIILEYITGGELFDKIVRNGRLSESEARKYFHQLIDGVDYCHSKGVYHRDLKPENLLLDSQGNLKISDFGLSALPEQGVTILKTTCGTPNYVAPEVLSHKGYNGAVADIWSCGVILYVLMAGYLPFDEMDLPTLYSKIDKAEFSCPSYFALGAKSLINRILDPNPETRITIAEIRKDEWFLKDYTPVQLIDYEHVNLDDVYAAFDDPEEQTYAQDGTRDTGPLTLNAFDLIILSQGLNLATLFDRGKDSMKHQTRFISHKPANVVLSSMEVVSQSMGFKTHIRNYKMRVEGLSANKTSHFSVILEQETQKNTLSSTRLFVVSLMTSFGSRQMHL

SEQ ID NO: 41561 - protein, 367 aa, Arabidopsis thaliana
  peptide (1)..(367): Ceres Seq. ID no. 12371148
  misc_feature (1)..(213): Pfam Name: Protein kinase domain Pfam Description: Protein kinase domain
  misc_feature (1)..(338): Homolog of NCBI NO: 34902248 NR Description: Putative serine/threonine kinase
  misc_feature (1)..(338): Homolog of NCBI NO: 18397430 NR Description: serine/threonine kinase, putative
  misc_feature (1)..(338): Homolog of NCBI NO: 30683336 NR Description: CBL-interacting protein kinase 3 [Arabidopsis
  misc_feature (1)..(338): Homolog of NCBI NO: 25387051 NR Description: probable serine/threonine kinase
  misc_feature (1)..(338): Homolog of NCBI NO: 34393400 NR Description: putative CBL-interacting protein kinase 23
  misc_feature (1)..(338): Homolog of NCBI NO: 7446371 NR Description: probable serine/threonine kinase (EC 2.7.1.-)
  misc_feature (1)..(338): Homolog of NCBI NO: 7446372 NR Description: probable serine/threonine kinase (EC 2.7.1.-)
  misc_feature (1)..(338): Homolog of NCBI NO: 15238499 NR Description: serine/threonine protein kinase SOS2
  misc_feature (1)..(319): Homolog of NCBI NO: 34913564 NR Description: putative serine/threonine-specific protein kinase
  misc_feature (1)..(338): Homolog of NCBI NO: 15233820 NR Description: serine/threonine kinase-like protein
MVDQIKREISIMKLVRHPCVVRLYEVLASRTKIYIILEYITGGELFDKIVRNGRLSESEARKYFHQLIDGVDYCHSKGVYHRDLKPENLLLDSQGNLKISDFGLSALPEQGVTILKTTCGTPNYVAPEVLSHKGYNGAVADIWSCGVILYVLMAGYLPFDEMDLPTLYSKIDKAEFSCPSYFALGAKSLINRILDPNPETRITIAEIRKDEWFLKDYTPVQLIDYEHVNLDDVYAAFDDPEEQTYAQDGTRDTGPLTLNAFDLIILSQGLNLATLFDRGKDSMKHQTRFISHKPANVVLSSMEVVSQSMGFKTHIRNYKMRVEGLSANKTSHFSVILEQETQKNTLSSTRLFVVSLMTSFGSRQMHL

SEQ ID NO: 41562 - DNA, 1330 bp, Arabidopsis thaliana
  misc_feature (1)..(1330): Ceres Seq. ID no. 13645865
  misc_feature: MA Experiment ID: 20000437 Result: Down-regulated in Transcription
  misc_feature: MA Experiment 20000437 PARAMETER Experiment Name: At_Drought_P Parameter: Age (day) Value: 8
  misc_feature: MA Experiment 20000437 PARAMETER Experiment Name: At_Drought_P Parameter: Organism Value: A. thaliana
  misc_feature: MA Experiment 20000437 PARAMETER Experiment Name: At_Drought_P Parameter: Plant Line Value: WS
  misc_feature: MA Experiment 20000437 PARAMETER Experiment Name: At_Drought_P Parameter: Timepoint (hr) Value: 24
  misc_feature: MA Experiment 20000437 PARAMETER Experiment Name: At_Drought_P Parameter: Tissue Value: Whole Plant
  misc_feature: MA Experiment 20000437 PARAMETER Experiment Name: At_Drought_P Parameter: Treatment Value: Drought vs. No Drought
ctttgctcatttcttcacgagaagatgaaatcttaaacctctcaagttcagggtcttctttcccaaacgaaaatgacaggttcgatctcgacctcttggctcttgtcgtctccttcgaattcgaattcggcttcgagctcagagtcctactctttcatagctaccttgaaaccagttcgttattatccgtttcaatcactgacaccaaaccggatttcgtcgagatctccgttgccctcaattcaaattcgagctggaatccgagagttacgagaacgaatcgacagtgtgaagaatacccagaagataacggaagcgatgagactcgtggcggcagctagagttcgtcgagctcaagatgcagtcataaagggtagacctttcactgaaactcttgtggagattctctactcaattaaccaatctgctcaattagaagacattgattttcctctgagcattgttagacccgtgaagagagttgctttggttgttgttactggcgataaaggattgtgtggtggtttcaacaatgcagtgaccaagaaagctactctgcgagttcaagagttgaagcagagaggaatagactgtgttgtgataagtgtaggtaagaaagggaatgcttattttagtcggagagatgaatttgatgttgataaatgtattgaaggaggaggtgttttcccaacgactaaagaagctcaagttattgcagatgatgtgttttccttgtttgtcagtgaagaggttgataaagttgagcttgtttacacaaagtttgtgtctttggtgaaatctgatcctgtgatccacactctgttgcctttgtcgatgaaaggagagtcttgtgatgtgaaaggtgagtgtgttgatgctatcgaggatgagatgtttaggctaacgagcaaagatgggaagttagctgtggaaaggaccaagcttgaagttgagaagcctgagatctcaccgttgatgcagtttgagcaagaccctgttcagattcttgatgcaatgatgcctttgtatctcaacagtcagattctaagagcactgcaggaatctttagcgagtgagcttgcgtcgaggatgaatgcgatgagtaatgcgactgataatgcggttgaattgaagaagaatctgacgatggcttataaccgagcgagacaggctaagatcactggggagttgctggagattgtggctggagcagaagctcttcgagagtcttaggtagaaactacagctgtgtaaaatcatttgttgtttgtggtaataaatgtcatgaaagaatatacagatcatgagaaattgagaatcgtttacacct

SEQ ID NO: 41563 - protein, 386 aa, Arabidopsis thaliana
  peptide (1)..(386): Ceres Seq. ID no. 13645866
  misc_feature (61)..(383): Pfam Name: ATP synthase Pfam Description: ATP synthase
  misc_feature (45)..(382): Homolog of NCBI NO: 228698 NR Description: CF1 ATP synthase:SUBUNIT=gamma
  misc_feature (45)..(382): Homolog of NCBI NO: 114638 NR Description: ATP synthase gamma chain, chloroplast precursor
  misc_feature (83)..(382): Homolog of NCBI NO: 5708095 NR Description: ATP synthase gamma chain, chloroplast precursor
  misc_feature (59)..(383): Homolog of NCBI NO: 27818005 NR Description: putative ATP synthase gamma-subunit
  misc_feature (61)..(382): Homolog of NCBI NO: 755801 NR Description: ATP synthase [Spinacia oleracea]
  misc_feature (37)..(379): Homolog of NCBI NO: 114640 NR Description: ATP synthase gamma chain, chloroplast precursor
  misc_feature (45)..(382): Homolog of NCBI NO: 114643 NR Description: ATP synthase gamma chain, chloroplast precursor
  misc_feature (5)..(383): Homolog of NCBI NO: 231610 NR Description: ATP synthase gamma chain, chloroplast precursor
  misc_feature (4)..(382): Homolog of NCBI NO: 18412632 NR Description: ATP synthase gamma chain 1, chloroplast
  misc_feature (1)..(386): Homolog of NCBI NO: 15218281 NR Description: ATP synthase gamma-subunit -related [Arabidopsis
MTGSISTSWLLSSPSNSNSASSSESYSFIATLKPVRYYPFQSLTPNRISSRSPLPSIQIRAGIRELRERIDSVKNTQKITEAMRLVAAARVRRAQDAVIKGRPFTETLVEILYSINQSAQLEDIDFPLSIVRPVKRVALVVVTGDKGLCGGFNNAVTKKATLRVQELKQRGIDCVVISVGKKGNAYFSRRDEFDVDKCIEGGGVFPTTKEAQVIADDVFSLFVSEEVDKVELVYTKFVSLVKSDPVIHTLLPLSMKGESCDVKGECVDAIEDEMFRLTSKDGKLAVERTKLEVEKPEISPLMQFEQDPVQILDAMMPLYLNSQILRALQESLASELASRMNAMSNATDNAVELKKNLTMAYNRARQAKITGELLEIVAGAEALRES

SEQ ID NO: 41564 - protein, 304 aa, Arabidopsis thaliana
  peptide (1)..(304): Ceres Seq. ID no. 13645867
  misc_feature (1)..(301): Pfam Name: ATP synthase Pfam Description: ATP synthase
  misc_feature (1)..(300): Homolog of NCBI NO: 228698 NR Description: CF1 ATP synthase:SUBUNIT=gamma
  misc_feature (1)..(300): Homolog of NCBI NO: 114638 NR Description: ATP synthase gamma chain, chloroplast precursor
  misc_feature (1)..(300): Homolog of NCBI NO: 5708095 NR Description: ATP synthase gamma chain, chloroplast precursor
  misc_feature (1)..(301): Homolog of NCBI NO: 27818005 NR Description: putative ATP synthase gamma-subunit
  misc_feature (1)..(300): Homolog of NCBI NO: 755801 NR Description: ATP synthase [Spinacia oleracea]
  misc_feature (1)..(297): Homolog of NCBI NO: 114640 NR Description: ATP synthase gamma chain, chloroplast precursor
  misc_feature (1)..(300): Homolog of NCBI NO: 114643 NR Description: ATP synthase gamma chain, chloroplast precursor
  misc_feature (1)..(301): Homolog of NCBI NO: 231610 NR Description: ATP synthase gamma chain, chloroplast precursor
  misc_feature (1)..(300): Homolog of NCBI NO: 18412632 NR Description: ATP synthase gamma chain 1, chloroplast
  misc_feature (1)..(304): Homolog of NCBI NO: 15218281 NR Description: ATP synthase gamma-subunit -related [Arabidopsis
MRLVAAARVRRAQDAVIKGRPFTETLVEILYSINQSAQLEDIDFPLSIVRPVKRVALVVVTGDKGLCGGFNNAVTKKATLRVQELKQRGIDCVVISVGKKGNAYFSRRDEFDVDKCIEGGGVFPTTKEAQVIADDVFSLFVSEEVDKVELVYTKFVSLVKSDPVIHTLLPLSMKGESCDVKGECVDAIEDEMFRLTSKDGKLAVERTKLEVEKPEISPLMQFEQDPVQILDAMMPLYLNSQILRALQESLASELASRMNAMSNATDNAVELKKNLTMAYNRARQAKITGELLEIVAGAEALRES

SEQ ID NO: 41565 - DNA, 601 bp, Arabidopsis thaliana
  misc_feature (1)..(601): Ceres Seq. ID no. 12396705
  misc_feature: MA Experiment ID: 108462 Result: Up-regulated in Transcription
  misc_feature: MA Experiment 108462 PARAMETER Experiment Name: At_Germinating_Seeds_cDNA_P Parameter: Age (day) Value: 2 vs. 0
  misc_feature: MA Experiment 108462 PARAMETER Experiment Name: At_Germinating_Seeds_cDNA_P Parameter: Tissue Value: Germinating Seeds
  misc_feature: MA Experiment ID: 108463 Result: Up-regulated in Transcription
  misc_feature: MA Experiment 108463 PARAMETER Experiment Name: At_Germinating_Seeds_cDNA_P Parameter: Age (day) Value: 3 vs. 0
  misc_feature: MA Experiment 108463 PARAMETER Experiment Name: At_Germinating_Seeds_cDNA_P Parameter: Tissue Value: Germinating Seeds
  misc_feature: MA Experiment ID: 108574 Result: Up-regulated in Transcription
  misc_feature: MA Experiment 108574 PARAMETER Experiment Name: At_Wounding__cDNA_P Parameter: Timepoint (hr) Value: 1
  misc_feature: MA Experiment 108574 PARAMETER Experiment Name: At_Wounding__cDNA_P Parameter: Tissue Value: Aerial
  misc_feature: MA Experiment 108574 PARAMETER Experiment Name: At_Wounding__cDNA_P Parameter: Treatment Value: Wounding vs. No Wounding
  misc_feature: MA Experiment ID: 108579 Result: Up-regulated in Transcription
  misc_feature: MA Experiment 108579 PARAMETER Experiment Name: At_4deg_Cold_cDNA_P Parameter: Temperature (deg C) Value: 4 vs. 22
  misc_feature: MA Experiment 108579 PARAMETER Experiment Name: At_4deg_Cold_cDNA_P Parameter: Timepoint (hr) Value: 6
  misc_feature: MA Experiment 108579 PARAMETER Experiment Name: At_4deg_Cold_cDNA_P Parameter: Tissue Value: Aerial
  misc_feature: MA Experiment ID: 20000069 Result: Up-regulated in Transcription
  misc_feature: MA Experiment 20000069 PARAMETER Experiment Name: At_100uM_ABA_Mutants_cDNA_P Parameter: Plant Line Value: CS23
  misc_feature: MA Experiment 20000069 PARAMETER Experiment Name: At_100uM_ABA_Mutants_cDNA_P Parameter: Timepoint (hr) Value: 6
  misc_feature: MA Experiment 20000069 PARAMETER Experiment Name: At_100uM_ABA_Mutants_cDNA_P Parameter: Tissue Value: Aerial
  misc_feature: MA Experiment 20000069 PARAMETER Experiment Name: At_100uM_ABA_Mutants_cDNA_P Parameter: Treatment Value: 100uM ABA vs. No Treatment
  misc_feature: MA Experiment ID: 20000070 Result: Up-regulated in Transcription
  misc_feature: MA Experiment 20000070 PARAMETER Experiment Name: At_100uM_ABA_Mutants_cDNA_P Parameter: Plant Line Value: CS24
  misc_feature: MA Experiment 20000070 PARAMETER Experiment Name: At_100uM_ABA_Mutants_cDNA_P Parameter: Timepoint (hr) Value: 6
  misc_feature: MA Experiment 20000070 PARAMETER Experiment Name: At_100uM_ABA_Mutants_cDNA_P Parameter: Tissue Value: Aerial
  misc_feature: MA Experiment 20000070 PARAMETER Experiment Name: At_100uM_ABA_Mutants_cDNA_P Parameter: Treatment Value: 100uM ABA vs. No Treatment
  misc_feature: MA Experiment ID: 20000072 Result: Up-regulated in Transcription
  misc_feature: MA Experiment 20000072 PARAMETER Experiment Name: At_100uM_ABA_Mutants_cDNA_P Parameter: Plant Line Value: CS8105
  misc_feature: MA Experiment 20000072 PARAMETER Experiment Name: At_100uM_ABA_Mutants_cDNA_P Parameter: Timepoint (hr) Value: 6
  misc_feature: MA Experiment 20000072 PARAMETER Experiment Name: At_100uM_ABA_Mutants_cDNA_P Parameter: Tissue Value: Aerial
  misc_feature: MA Experiment 20000072 PARAMETER Experiment Name: At_100uM_ABA_Mutants_cDNA_P Parameter: Treatment Value: 100uM ABA vs. No Treatment
  misc_feature: MA Experiment ID: 20000087 Result: Up-regulated in Transcription
  misc_feature: MA Experiment 20000087 PARAMETER Experiment Name: At_100uM_ABA_Mutants_cDNA_P Parameter: Plant Line Value: WS
  misc_feature: MA Experiment 20000087 PARAMETER Experiment Name: At_100uM_ABA_Mutants_cDNA_P Parameter: Timepoint (hr) Value: 6
  misc_feature: MA Experiment 20000087 PARAMETER Experiment Name: At_100uM_ABA_Mutants_cDNA_P Parameter: Tissue Value: Aerial
  misc_feature: MA Experiment 20000087 PARAMETER Experiment Name: At_100uM_ABA_Mutants_cDNA_P Parameter: Treatment Value: 100uM ABA vs. No Treatment
  misc_feature: MA Experiment ID: 20000144 Result: Up-regulated in Transcription
  misc_feature: MA Experiment 20000144 PARAMETER Experiment Name: At_42deg_Heat_cDNA_P Parameter: Temperature (deg C) Value: 42 vs. 22
  misc_feature: MA Experiment 20000144 PARAMETER Experiment Name: At_42deg_Heat_cDNA_P Parameter: Timepoint (hr) Value: 1
  misc_feature: MA Experiment 20000144 PARAMETER Experiment Name: At_42deg_Heat_cDNA_P Parameter: Tissue Value: Aerial
  misc_feature: MA Experiment ID: 20000227 Result: Down-regulated in Transcription
  misc_feature: MA Experiment 20000227 PARAMETER Experiment Name: At_Root-Tips-vs-Tops_P Parameter: Tissue Value: Root Tips vs. Root Tops
  misc_feature: MA Experiment ID: 20000265 Result: Down-regulated in Transcription
  misc_feature: MA Experiment 20000265 PARAMETER Experiment Name: At_Open_Flower_P Parameter: Age (day) Value: 21
  misc_feature: MA Experiment 20000265 PARAMETER Experiment Name: At_Open_Flower_P Parameter: Plant Line Value: WS
  misc_feature: MA Experiment 20000265 PARAMETER Experiment Name: At_Open_Flower_P Parameter: Tissue Value: Closed Flower vs. Whole Plant
  misc_feature: MA Experiment ID: 20000436 Result: Up-regulated in Transcription
  misc_feature: MA Experiment 20000436 PARAMETER Experiment Name: At_Drought_P Parameter: Age (day) Value: 7
  misc_feature: MA Experiment 20000436 PARAMETER Experiment Name: At_Drought_P Parameter: Organism Value: A. thaliana
  misc_feature: MA Experiment 20000436 PARAMETER Experiment Name: At_Drought_P Parameter: Plant Line Value: WS
  misc_feature: MA Experiment 20000436 PARAMETER Experiment Name: At_Drought_P Parameter: Timepoint (hr) Value: 12
  misc_feature: MA Experiment 20000436 PARAMETER Experiment Name: At_Drought_P Parameter: Tissue Value: Whole Plant
  misc_feature: MA Experiment 20000436 PARAMETER Experiment Name: At_Drought_P Parameter: Treatment Value: Drought vs. No Drought
  misc_feature: MA Experiment ID: 20000437 Result: Up-regulated in Transcription
  misc_feature: MA Experiment 20000437 PARAMETER Experiment Name: At_Drought_P Parameter: Age (day) Value: 8
  misc_feature: MA Experiment 20000437 PARAMETER Experiment Name: At_Drought_P Parameter: Organism Value: A. thaliana
  misc_feature: MA Experiment 20000437 PARAMETER Experiment Name: At_Drought_P Parameter: Plant Line Value: WS
  misc_feature: MA Experiment 20000437 PARAMETER Experiment Name: At_Drought_P Parameter: Timepoint (hr) Value: 24
  misc_feature: MA Experiment 20000437 PARAMETER Experiment Name: At_Drought_P Parameter: Tissue Value: Whole Plant
  misc_feature: MA Experiment 20000437 PARAMETER Experiment Name: At_Drought_P Parameter: Treatment Value: Drought vs. No Drought
  misc_feature: MA Experiment ID: 20000438 Result: Down-regulated in Transcription
  misc_feature: MA Experiment 20000438 PARAMETER Experiment Name: At_Shoots__P Parameter: Age (day) Value: 14
  misc_feature: MA Experiment 20000438 PARAMETER Experiment Name: At_Shoots__P Parameter: Tissue Value: Shoots vs. Whole Plant
  misc_feature: MA Experiment ID: 20000453 Result: Up-regulated in Transcription
  misc_feature: MA Experiment 20000453 PARAMETER Experiment Name: At_100uM_ABA_P Parameter: Age (day) Value: 15
  misc_feature: MA Experiment 20000453 PARAMETER Experiment Name: At_100uM_ABA_P Parameter: Organism Value: A. thaliana
  misc_feature: MA Experiment 20000453 PARAMETER Experiment Name: At_100uM_ABA_P Parameter: Plant Line Value: WS
  misc_feature: MA Experiment 20000453 PARAMETER Experiment Name: At_100uM_ABA_P Parameter: Timepoint (hr) Value: 24
  misc_feature: MA Experiment 20000453 PARAMETER Experiment Name: At_100uM_ABA_P Parameter: Tissue Value: Aerial
  misc_feature: MA Experiment 20000453 PARAMETER Experiment Name: At_100uM_ABA_P Parameter: Treatment Value: 100uM ABA vs. No Treatment
  misc_feature: MA Experiment ID: 20000495 Result: Up-regulated in Transcription
  misc_feature: MA Experiment 20000495 PARAMETER Experiment Name: At_Guard_Cells_P Parameter: Harvest Date Value: 8/2/2002
  misc_feature: MA Experiment 20000495 PARAMETER Experiment Name: At_Guard_Cells_P Parameter: Organism Value: A. thaliana
  misc_feature: MA Experiment 20000495 PARAMETER Experiment Name: At_Guard_Cells_P Parameter: Tissue Value: Guard Cells vs. Leaves
  misc_feature: MA Experiment ID: 20001554 Result: Up-regulated in Transcription
  misc_feature: MA Experiment 20001554 PARAMETER Experiment Name: At_Drought_Soil_Dry_P Parameter: Age (day) Value: 21
  misc_feature: MA Experiment 20001554 PARAMETER Experiment Name: At_Drought_Soil_Dry_P Parameter: Organism Value: A. thaliana
  misc_feature: MA Experiment 20001554 PARAMETER Experiment Name: At_Drought_Soil_Dry_P Parameter: Plant Line Value: WS
  misc_feature: MA Experiment 20001554 PARAMETER Experiment Name: At_Drought_Soil_Dry_P Parameter: Post Timepoint (hr) Value: None
  misc_feature: MA Experiment 20001554 PARAMETER Experiment Name: At_Drought_Soil_Dry_P Parameter: Post-Treatment Value: None
  misc_feature: MA Experiment 20001554 PARAMETER Experiment Name: At_Drought_Soil_Dry_P Parameter: Timepoint (day) Value: 7
  misc_feature: MA Experiment 20001554 PARAMETER Experiment Name: At_Drought_Soil_Dry_P Parameter: Treatment Value: Drought vs. No Drought
  misc_feature: MA Experiment ID: 20001555 Result: Up-regulated in Transcription
  misc_feature: MA Experiment 20001555 PARAMETER Experiment Name: At_Drought_Soil_Dry_P Parameter: Age (day) Value: 24
  misc_feature: MA Experiment 20001555 PARAMETER Experiment Name: At_Drought_Soil_Dry_P Parameter: Organism Value: A. thaliana
  misc_feature: MA Experiment 20001555 PARAMETER Experiment Name: At_Drought_Soil_Dry_P Parameter: Plant Line Value: WS
  misc_feature: MA Experiment 20001555 PARAMETER Experiment Name: At_Drought_Soil_Dry_P Parameter: Post Timepoint (hr) Value: None
  misc_feature: MA Experiment 20001555 PARAMETER Experiment Name: At_Drought_Soil_Dry_P Parameter: Post-Treatment Value: None
  misc_feature: MA Experiment 20001555 PARAMETER Experiment Name: At_Drought_Soil_Dry_P Parameter: Timepoint (day) Value: 10
  misc_feature: MA Experiment 20001555 PARAMETER Experiment Name: At_Drought_Soil_Dry_P Parameter: Treatment Value: Drought vs. No Drought
  misc_feature: MA Experiment ID: 20001557 Result: Up-regulated in Transcription
  misc_feature: MA Experiment 20001557 PARAMETER Experiment Name: At_Drought_Soil_Dry_P Parameter: Age (day) Value: 27
  misc_feature: MA Experiment 20001557 PARAMETER Experiment Name: At_Drought_Soil_Dry_P Parameter: Organism Value: A. thaliana
  misc_feature: MA Experiment 20001557 PARAMETER Experiment Name: At_Drought_Soil_Dry_P Parameter: Plant Line Value: WS
  misc_feature: MA Experiment 20001557 PARAMETER Experiment Name: At_Drought_Soil_Dry_P Parameter: Post Timepoint (hr) Value: 3
  misc_feature: MA Experiment 20001557 PARAMETER Experiment Name: At_Drought_Soil_Dry_P Parameter: Post-Treatment Value: Re-Water vs. No Drought
  misc_feature: MA Experiment 20001557 PARAMETER Experiment Name: At_Drought_Soil_Dry_P Parameter: Timepoint (day) Value: 13
  misc_feature: MA Experiment 20001557 PARAMETER Experiment Name: At_Drought_Soil_Dry_P Parameter: Treatment Value: Drought vs. No Drought
aacaagagcgtcctttgattggttttggattttgttgtgttcctctcaaaatgacaaaactatggacttctctctctgctcttcattccctcgctggacccgtggtgatgctgctctatccgttatatgcgtcggtgatagcaatagagagcccatcaaaagtagatgacgagcaatggcttgcttattggattctctattctttccttactctatcagaactcatccttcaatctctcctagagtggataccgatatggtacacggcgaagctagtgtttgtggcatggttggttttaccacaatttagaggagctgcttttatatacaacaaagtcgtgagggaacagttcaagaagtacggcatcctcaaacctaaggtagagcatcaggctgagtgagtcaaaaagagcaggggacacaagagggcttcactgttggggtctccagtttctaatctctttatgctttttctattttgtcttatttctcttttgatatacggaaaaatggggttgttcttattatgagcctctgcttgaatgtatgaaaagaccttttattcgacgttaaactattatattaaagattaaaaaattgt

SEQ ID NO: 41566 - protein, 132 aa, Arabidopsis thaliana
  peptide (1)..(132): Ceres Seq. ID no. 12396706
  misc_feature (20)..(117): Pfam Name: TB2/DP1, HVA22 family Pfam Description: TB2/DP1, HVA22 family
  misc_feature (30)..(118): Homolog of NCBI NO: 15222421 NR Description: AtHVA22c
  misc_feature (30)..(114): Homolog of NCBI NO: 4884934 NR Description: AtHVA22b [Arabidopsis thaliana]
  misc_feature (30)..(114): Homolog of NCBI NO: 15241840 NR Description: AtHVA22b-like protein
  misc_feature (30)..(117): Homolog of NCBI NO: 15221266 NR Description: AtHVA22a; protein id: At1g74520.1, supported by
  misc_feature (17)..(120): Homolog of NCBI NO: 33342176 NR Description: hypothetical protein [Triticum aestivum]
  misc_feature (17)..(132): Homolog of NCBI NO: 1076715 NR Description: abscisic acid-induced protein HVA22 - barley
  misc_feature (36)..(124): Homolog of NCBI NO: 7484787 NR Description: abscisic acid-induced protein homolog F13M23.100
  misc_feature (36)..(127): Homolog of NCBI NO: 8777395 NR Description: gene_id:MFB16.12~pir||T05517~similar to unknown
  misc_feature (17)..(124): Homolog of NCBI NO: 18416458 NR Description: abscisic acid-induced - like protein
  misc_feature (17)..(132): Homolog of NCBI NO: 18423191 NR Description: putative protein
QERPLIGFGFCCVPLKMTKLWTSLSALHSLAGPVVMLLYPLYASVIAIESPSKVDDEQWLAYWILYSFLTLSELILQSLLEWIPIWYTAKLVFVAWLVLPQFRGAAFIYNKVVREQFKKYGILKPKVEHQAE

SEQ ID NO: 41567 - protein, 116 aa, Arabidopsis thaliana
  peptide (1)..(116): Ceres Seq. ID no. 12396707
  misc_feature (4)..(101): Pfam Name: TB2/DP1, HVA22 family Pfam Description: TB2/DP1, HVA22 family
  misc_feature (14)..(102): Homolog of NCBI NO: 15222421 NR Description: AtHVA22c
  misc_feature (14)..(98): Homolog of NCBI NO: 4884934 NR Description: AtHVA22b [Arabidopsis thaliana]
  misc_feature (14)..(98): Homolog of NCBI NO: 15241840 NR Description: AtHVA22b-like protein
  misc_feature (14)..(101): Homolog of NCBI NO: 15221266 NR Description: AtHVA22a; protein id: At1g74520.1, supported by
  misc_feature (1)..(104): Homolog of NCBI NO: 33342176 NR Description: hypothetical protein [Triticum aestivum]
  misc_feature (1)..(116): Homolog of NCBI NO: 1076715 NR Description: abscisic acid-induced protein HVA22 - barley
  misc_feature (20)..(108): Homolog of NCBI NO: 7484787 NR Description: abscisic acid-induced protein homolog F13M23.100
  misc_feature (20)..(111): Homolog of NCBI NO: 8777395 NR Description: gene_id:MFB16.12~pir||T05517~similar to unknown
  misc_feature (1)..(108): Homolog of NCBI NO: 18416458 NR Description: abscisic acid-induced - like protein
  misc_feature (1)..(116): Homolog of NCBI NO: 18423191 NR Description: putative protein
MTKLWTSLSALHSLAGPVVMLLYPLYASVIAIESPSKVDDEQWLAYWILYSFLTLSELILQSLLEWIPIWYTAKLVFVAWLVLPQFRGAAFIYNKVVREQFKKYGILKPKVEHQAE

SEQ ID NO: 41568 - protein, 97 aa, Arabidopsis thaliana
  peptide (1)..(97): Ceres Seq. ID no. 12396708
  misc_feature (1)..(82): Pfam Name: TB2/DP1, HVA22 family Pfam Description: TB2/DP1, HVA22 family
  misc_feature (1)..(83): Homolog of NCBI NO: 15222421 NR Description: AtHVA22c
  misc_feature (1)..(79): Homolog of NCBI NO: 4884934 NR Description: AtHVA22b [Arabidopsis thaliana]
  misc_feature (1)..(79): Homolog of NCBI NO: 15241840 NR Description: AtHVA22b-like protein
  misc_feature (1)..(82): Homolog of NCBI NO: 15221266 NR Description: AtHVA22a; protein id: At1g74520.1, supported by
  misc_feature (1)..(85): Homolog of NCBI NO: 33342176 NR Description: hypothetical protein [Triticum aestivum]
  misc_feature (1)..(97): Homolog of NCBI NO: 1076715 NR Description: abscisic acid-induced protein HVA22 - barley
  misc_feature (1)..(89): Homolog of NCBI NO: 7484787 NR Description: abscisic acid-induced protein homolog F13M23.100
  misc_feature (1)..(92): Homolog of NCBI NO: 8777395 NR Description: gene_id:MFB16.12~pir||T05517~similar to unknown
  misc_feature (1)..(89): Homolog of NCBI NO: 18416458 NR Description: abscisic acid-induced - like protein
  misc_feature (1)..(97): Homolog of NCBI NO: 18423191 NR Description: putative protein
MLLYPLYASVIAIESPSKVDDEQWLAYWILYSFLTLSELILQSLLEWIPIWYTAKLVFVAWLVLPQFRGAAFIYNKVVREQFKKYGILKPKVEHQAE

SEQ ID NO: 41569 - DNA, 1649 bp, Arabidopsis thaliana
  misc_feature (1)..(1649): Ceres Seq. ID no. 13592752
  misc_feature: MA Experiment ID: 108434 Result: Up-regulated in Transcription
  misc_feature: MA Experiment 108434 PARAMETER Experiment Name: At_Root_Tips_cDNA_P Parameter: Tissue Value: Root Tips
  misc_feature: MA Experiment ID: 108461 Result: Up-regulated in Transcription
  misc_feature: MA Experiment 108461 PARAMETER Experiment Name: At_Germinating_Seeds_cDNA_P Parameter: Age (day) Value: 1 vs. 0
  misc_feature: MA Experiment 108461 PARAMETER Experiment Name: At_Germinating_Seeds_cDNA_P Parameter: Tissue Value: Germinating Seeds
  misc_feature: MA Experiment ID: 108488 Result: Down-regulated in Transcription
  misc_feature: MA Experiment ID: 108501 Result: Down-regulated in Transcription
  misc_feature: MA Experiment 108501 PARAMETER Experiment Name: At_ap2_floral_buds_cDNA_P Parameter: Plant Line Value: ap2 (Ler.)
  misc_feature: MA Experiment 108501 PARAMETER Experiment Name: At_ap2_floral_buds_cDNA_P Parameter: Tissue Value: Closed Flower
  misc_feature: MA Experiment ID: 20000069 Result: Up-regulated in Transcription
  misc_feature: MA Experiment 20000069 PARAMETER Experiment Name: At_100uM_ABA_Mutants_cDNA_P Parameter: Plant Line Value: CS23
  misc_feature: MA Experiment 20000069 PARAMETER Experiment Name: At_100uM_ABA_Mutants_cDNA_P Parameter: Timepoint (hr) Value: 6
  misc_feature: MA Experiment 20000069 PARAMETER Experiment Name: At_100uM_ABA_Mutants_cDNA_P Parameter: Tissue Value: Aerial
  misc_feature: MA Experiment 20000069 PARAMETER Experiment Name: At_100uM_ABA_Mutants_cDNA_P Parameter: Treatment Value: 100uM ABA vs. No Treatment
  misc_feature: MA Experiment ID: 20000070 Result: Up-regulated in Transcription
  misc_feature: MA Experiment 20000070 PARAMETER Experiment Name: At_100uM_ABA_Mutants_cDNA_P Parameter: Plant Line Value: CS24
  misc_feature: MA Experiment 20000070 PARAMETER Experiment Name: At_100uM_ABA_Mutants_cDNA_P Parameter: Timepoint (hr) Value: 6
  misc_feature: MA Experiment 20000070 PARAMETER Experiment Name: At_100uM_ABA_Mutants_cDNA_P Parameter: Tissue Value: Aerial
  misc_feature: MA Experiment 20000070 PARAMETER Experiment Name: At_100uM_ABA_Mutants_cDNA_P Parameter: Treatment Value: 100uM ABA vs. No Treatment
  misc_feature: MA Experiment ID: 20000072 Result: Up-regulated in Transcription
  misc_feature: MA Experiment 20000072 PARAMETER Experiment Name: At_100uM_ABA_Mutants_cDNA_P Parameter: Plant Line Value: CS8105
  misc_feature: MA Experiment 20000072 PARAMETER Experiment Name: At_100uM_ABA_Mutants_cDNA_P Parameter: Timepoint (hr) Value: 6
  misc_feature: MA Experiment 20000072 PARAMETER Experiment Name: At_100uM_ABA_Mutants_cDNA_P Parameter: Tissue Value: Aerial
  misc_feature: MA Experiment 20000072 PARAMETER Experiment Name: At_100uM_ABA_Mutants_cDNA_P Parameter: Treatment Value: 100uM ABA vs. No Treatment
  misc_feature: MA Experiment ID: 20000112 Result: Down-regulated in Transcription
  misc_feature: MA Experiment 20000112 PARAMETER Experiment Name: At_42deg_Heat_cDNA_P Parameter: Temperature (deg C) Value: 42 vs. 22
  misc_feature: MA Experiment 20000112 PARAMETER Experiment Name: At_42deg_Heat_cDNA_P Parameter: Timepoint (hr) Value: 2
  misc_feature: MA Experiment 20000112 PARAMETER Experiment Name: At_42deg_Heat_cDNA_P Parameter: Tissue Value: Aerial
  misc_feature: MA Experiment ID: 20000117 Result: Up-regulated in Transcription
  misc_feature: MA Experiment 20000117 PARAMETER Experiment Name: At_100uM_ABA_Mutants_cDNA_P Parameter: Plant Line Value: Columbia
  misc_feature: MA Experiment 20000117 PARAMETER Experiment Name: At_100uM_ABA_Mutants_cDNA_P Parameter: Timepoint (hr) Value: 6
  misc_feature: MA Experiment 20000117 PARAMETER Experiment Name: At_100uM_ABA_Mutants_cDNA_P Parameter: Tissue Value: Aerial
  misc_feature: MA Experiment 20000117 PARAMETER Experiment Name: At_100uM_ABA_Mutants_cDNA_P Parameter: Treatment Value: 100uM ABA vs. No Treatment
  misc_feature: MA Experiment ID: 20000173 Result: Down-regulated in Transcription
  misc_feature: MA Experiment 20000173 PARAMETER Experiment Name: At_42deg_Heat_P Parameter: Age (day) Value: 14
  misc_feature: MA Experiment 20000173 PARAMETER Experiment Name: At_42deg_Heat_P Parameter: Organism Value: A. thaliana
  misc_feature: MA Experiment 20000173 PARAMETER Experiment Name: At_42deg_Heat_P Parameter: Plant Line Value: WS
  misc_feature: MA Experiment 20000173 PARAMETER Experiment Name: At_42deg_Heat_P Parameter: Temperature (deg C) Value: 42 vs. 22
  misc_feature: MA Experiment 20000173 PARAMETER Experiment Name: At_42deg_Heat_P Parameter: Timepoint (hr) Value: 6
  misc_feature: MA Experiment 20000173 PARAMETER Experiment Name: At_42deg_Heat_P Parameter: Tissue Value: Aerial
  misc_feature: MA Experiment ID: 20000179 Result: Up-regulated in Transcription
  misc_feature: MA Experiment 20000179 PARAMETER Experiment Name: At_Germinating_Seeds_P Parameter: Age (hr) Value: 6 vs. 0
  misc_feature: MA Experiment 20000179 PARAMETER Experiment Name: At_Germinating_Seeds_P Parameter: Tissue Value: Germinating Seeds
  misc_feature: MA Experiment ID: 20000180 Result: Up-regulated in Transcription
  misc_feature: MA Experiment 20000180 PARAMETER Experiment Name: At_Germinating_Seeds_P Parameter: Age (hr) Value: 24 vs. 0
  misc_feature: MA Experiment 20000180 PARAMETER Experiment Name: At_Germinating_Seeds_P Parameter: Tissue Value: Germinating Seeds
  misc_feature: MA Experiment ID: 20000184 Result: Down-regulated in Transcription
  misc_feature: MA Experiment 20000184 PARAMETER Experiment Name: At_Shoots__P Parameter: Age (day) Value: 7
  misc_feature: MA Experiment 20000184 PARAMETER Experiment Name: At_Shoots__P Parameter: Tissue Value: Shoots vs. Whole Plant
  misc_feature: MA Experiment ID: 20000451 Result: Down-regulated in Transcription
  misc_feature: MA Experiment 20000451 PARAMETER Experiment Name: At_CS6879_Shoots-Roots_P Parameter: Age (day) Value: 14
  misc_feature: MA Experiment 20000451 PARAMETER Experiment Name: At_CS6879_Shoots-Roots_P Parameter: Organism Value: A. thaliana
  misc_feature: MA Experiment 20000451 PARAMETER Experiment Name: At_CS6879_Shoots-Roots_P Parameter: Plant Line Value: CS6879 vs. WS
  misc_feature: MA Experiment 20000451 PARAMETER Experiment Name: At_CS6879_Shoots-Roots_P Parameter: Tissue Value: Roots
  misc_feature: MA Experiment ID: 20000527 Result: Down-regulated in Transcription
  misc_feature: MA Experiment 20000527 PARAMETER Experiment Name: At_10percent_PEG_P Parameter: Age (day) Value: 20
  misc_feature: MA Experiment 20000527 PARAMETER Experiment Name: At_10percent_PEG_P Parameter: Organism Value: A. thaliana
  misc_feature: MA Experiment 20000527 PARAMETER Experiment Name: At_10percent_PEG_P Parameter: Plant Line Value: WS
  misc_feature: MA Experiment 20000527 PARAMETER Experiment Name: At_10percent_PEG_P Parameter: Timepoint (day) Value: 20
  misc_feature: MA Experiment 20000527 PARAMETER Experiment Name: At_10percent_PEG_P Parameter: Tissue Value: Whole Plant
  misc_feature: MA Experiment 20000527 PARAMETER Experiment Name: At_10percent_PEG_P Parameter: Treatment Value: 10percent PEG vs. No Treatment
  misc_feature: MA Experiment ID: 20000794 Result: Up-regulated in Transcription
  misc_feature: MA Experiment 20000794 PARAMETER Experiment Name: At_Petals_P Parameter: Age (day) Value: 23-25 days
  misc_feature: MA Experiment 20000794 PARAMETER Experiment Name: At_Petals_P Parameter: Plant Line Value: WS
  misc_feature: MA Experiment 20000794 PARAMETER Experiment Name: At_Petals_P Parameter: Tissue Value: Petals vs. Whole plant
aatttcccaaaaagaaaatataaagcacgttcttcgtctcggattcagagaaactaatcttgaagatgagttcaagatctgacctcaaaatcaaacgagtttctttgataatcttcttgctaagtgttcttgttgagttttgctatggagggttcacaagtgaatatgtcagaggaagtgatttaccagatgacatgccactagacagcgatgtttttgaagttcctcctggtcctaattcacctcaacaggttcatgtaacgcaagggaaccatgaaggtaatggagtgatcatttcttgggtgactccggttaagcccggttctaagactgttcaatattggtgtgagaatgagaaatcgaggaaacaagcagaagcaacagttaatacttaccggttctttaattacacgtctggttatattcaccattgcctcatcgatgatttggaatttgatacgaaatactactacgaaattgggagtggcaagtggtccagacggttctggttctttatcccgcctaaatcaggccctgacgtaccttacacatttggattaattggggatctaggacaaacttatgactcaaatagtacgttaagccattatgagatgaatccgggaaaaggacaagcggttctgtttgtaggagacttgtcttacgcggatcgctaccctaaccacgacaacaatagatgggatacttggggaaggttcgttgagcgaagtgttgcttatcaaccttggatatggactgctggcaaccacgaaatcgacttcgttcctgacattggtgaaatagaaccattcaagccttttatgaatcggtatcatacgccacataaggcatcaggaagtatctctccattgtggtattccatcaaaagggcgtcagcttatattattgttatgtcatgttactcatcttatgggatatacacacctcaatacaaatggctggaaaaggagttacaaggagtgaatcgaacagagacgccatggcttatagtcttagtgcatagcccgttttacagtagctatgtgcatcattacatggaaggtgaaacattgagagtcatgtacgaacaatggtttgtcaaatacaaggttgatgttgtgtttgcaggtcatgttcatgcctatgagagatcggaacgtgtttctaatattgcttacaacattgtcaatggattgtgtgagccaatatcggatgagtcagctcctatatacatcacaatcggggatggcggaaactcggaaggcttgcttaccgacatgatgcagccacaaccaaaatactccgcgtttcgagaagctagctttgggcacgggttgctagagattaaaaacagaactcatgcttacttcagctggaatcggaaccaagatgggaacgccgtggcagcagattctgtgtggttgcttaatcggttttggcgagctcaaaagaagacatggcttgatgcattttaaagacaaattgaagaaggttttatttttgcagcaattctaaacgaataaatcagttagtgactgttttacgagggttgttattgagatttgattaaaacctcctctcatacagaaaaaagtttgttattaccataagtggttttgcacctatacaagttaatataccatttcwcc

SEQ ID NO: 41570 - protein, 469 aa, Arabidopsis thaliana
  peptide (1)..(469): Ceres Seq. ID no. 15221141
  misc_feature (161)..(360): Pfam Name: Calcineurin-like phosphoesterase Pfam Description: Calcineurin-like phosphoesterase
  misc_feature (9)..(458): Homolog of NCBI NO: 27597239 NR Description: purple acid phosphatase [Nicotiana tabacum]
  misc_feature (14)..(458): Homolog of NCBI NO: 11262828 NR Description: acid phosphatase (EC 3.1.3.2) purple 2, precursor
  misc_feature (14)..(458): Homolog of NCBI NO: 11262827 NR Description: acid phosphatase (EC 3.1.3.2) purple 1, precursor
  misc_feature (15)..(458): Homolog of NCBI NO: 27597229 NR Description: purple acid phosphatase [Nicotiana tabacum]
  misc_feature (14)..(459): Homolog of NCBI NO: 27597231 NR Description: purple acid phosphatase [Nicotiana tabacum]
  misc_feature (43)..(468): Homolog of NCBI NO: 4210712 NR Description: purple acid phosphatase [Ipomoea batatas]
  misc_feature (38)..(468): Homolog of NCBI NO: 25752258 NR Description: acid phosphatase (EC 3.1.3.2) purple 3
  misc_feature (1)..(469): Homolog of NCBI NO: 1218042 NR Description: secreted purple acid phosphatase precursor
  misc_feature (1)..(469): Homolog of NCBI NO: 15225855 NR Description: iron(III)-zinc(II) purple acid phosphatase
  misc_feature (1)..(469): Homolog of NCBI NO: 18086494 NR Description: At2g27190/T22O13.4 [Arabidopsis thaliana]
MSSRSDLKIKRVSLIIFLLSVLVEFCYGGFTSEYVRGSDLPDDMPLDSDVFEVPPGPNSPQQVHVTQGNHEGNGVIISWVTPVKPGSKTVQYWCENEKSRKQAEATVNTYRFFNYTSGYIHHCLIDDLEFDTKYYYEIGSGKWSRRFWFFIPPKSGPDVPYTFGLIGDLGQTYDSNSTLSHYEMNPGKGQAVLFVGDLSYADRYPNHDNNRWDTWGRFVERSVAYQPWIWTAGNHEIDFVPDIGEIEPFKPFMNRYHTPHKASGSISPLWYSIKRASAYIIVMSCYSSYGIYTPQYKWLEKELQGVNRTETPWLIVLVHSPFYSSYVHHYMEGETLRVMYEQWFVKYKVDVVFAGHVHAYERSERVSNIAYNIVNGLCEPISDESAPIYITIGDGGNSEGLLTDMMQPQPKYSAFREASFGHGLLEIKNRTHAYFSWNRNQDGNAVAADSVWLLNRFWRAQKKTWLDAF

SEQ ID NO: 41571 - protein, 426 aa, Arabidopsis thaliana
  peptide (1)..(426): Ceres Seq. ID no. 15221142
  misc_feature (118)..(317): Pfam Name: Calcineurin-like phosphoesterase Pfam Description: Calcineurin-like phosphoesterase
  misc_feature (1)..(415): Homolog of NCBI NO: 27597239 NR Description: purple acid phosphatase [Nicotiana tabacum]
  misc_feature (1)..(415): Homolog of NCBI NO: 11262828 NR Description: acid phosphatase (EC 3.1.3.2) purple 2, precursor
  misc_feature (1)..(415): Homolog of NCBI NO: 11262827 NR Description: acid phosphatase (EC 3.1.3.2) purple 1, precursor
  misc_feature (1)..(415): Homolog of NCBI NO: 27597229 NR Description: purple acid phosphatase [Nicotiana tabacum]
  misc_feature (1)..(416): Homolog of NCBI NO: 27597231 NR Description: purple acid phosphatase [Nicotiana tabacum]
  misc_feature (1)..(425): Homolog of NCBI NO: 4210712 NR Description: purple acid phosphatase [Ipomoea batatas]
  misc_feature (1)..(425): Homolog of NCBI NO: 25752258 NR Description: acid phosphatase (EC 3.1.3.2) purple 3
  misc_feature (1)..(426): Homolog of NCBI NO: 1218042 NR Description: secreted purple acid phosphatase precursor
  misc_feature (1)..(426): Homolog of NCBI NO: 15225855 NR Description: iron(III)-zinc(II) purple acid phosphatase
  misc_feature (1)..(426): Homolog of NCBI NO: 18086494 NR Description: At2g27190/T22O13.4 [Arabidopsis thaliana]
MPLDSDVFEVPPGPNSPQQVHVTQGNHEGNGVIISWVTPVKPGSKTVQYWCENEKSRKQAEATVNTYRFFNYTSGYIHHCLIDDLEFDTKYYYEIGSGKWSRRFWFFIPPKSGPDVPYTFGLIGDLGQTYDSNSTLSHYEMNPGKGQAVLFVGDLSYADRYPNHDNNRWDTWGRFVERSVAYQPWIWTAGNHEIDFVPDIGEIEPFKPFMNRYHTPHKASGSISPLWYSIKRASAYIIVMSCYSSYGIYTPQYKWLEKELQGVNRTETPWLIVLVHSPFYSSYVHHYMEGETLRVMYEQWFVKYKVDVVFAGHVHAYERSERVSNIAYNIVNGLCEPISDESAPIYITIGDGGNSEGLLTDMMQPQPKYSAFREASFGHGLLEIKNRTHAYFSWNRNQDGNAVAADSVWLLNRFWRAQKKTWLDAF

SEQ ID NO: 41572 - protein, 286 aa, Arabidopsis thaliana
  peptide (1)..(286): Ceres Seq. ID no. 15221143
  misc_feature (1)..(177): Pfam Name: Calcineurin-like phosphoesterase Pfam Description: Calcineurin-like phosphoesterase
  misc_feature (1)..(275): Homolog of NCBI NO: 27597239 NR Description: purple acid phosphatase [Nicotiana tabacum]
  misc_feature (1)..(275): Homolog of NCBI NO: 11262828 NR Description: acid phosphatase (EC 3.1.3.2) purple 2, precursor
  misc_feature (1)..(275): Homolog of NCBI NO: 11262827 NR Description: acid phosphatase (EC 3.1.3.2) purple 1, precursor
  misc_feature (1)..(275): Homolog of NCBI NO: 27597229 NR Description: purple acid phosphatase [Nicotiana tabacum]
  misc_feature (1)..(276): Homolog of NCBI NO: 27597231 NR Description: purple acid phosphatase [Nicotiana tabacum]
  misc_feature (1)..(285): Homolog of NCBI NO: 4210712 NR Description: purple acid phosphatase [Ipomoea batatas]
  misc_feature (1)..(285): Homolog of NCBI NO: 25752258 NR Description: acid phosphatase (EC 3.1.3.2) purple 3
  misc_feature (1)..(286): Homolog of NCBI NO: 1218042 NR Description: secreted purple acid phosphatase precursor
  misc_feature (1)..(286): Homolog of NCBI NO: 15225855 NR Description: iron(III)-zinc(II) purple acid phosphatase
  misc_feature (1)..(286): Homolog of NCBI NO: 18086494 NR Description: At2g27190/T22O13.4 [Arabidopsis thaliana]
MNPGKGQAVLFVGDLSYADRYPNHDNNRWDTWGRFVERSVAYQPWIWTAGNHEIDFVPDIGEIEPFKPFMNRYHTPHKASGSISPLWYSIKRASAYIIVMSCYSSYGIYTPQYKWLEKELQGVNRTETPWLIVLVHSPFYSSYVHHYMEGETLRVMYEQWFVKYKVDVVFAGHVHAYERSERVSNIAYNIVNGLCEPISDESAPIYITIGDGGNSEGLLTDMMQPQPKYSAFREASFGHGLLEIKNRTHAYFSWNRNQDGNAVAADSVWLLNRFWRAQKKTWLDAF

SEQ ID NO: 41573 - DNA, 569 bp, Arabidopsis thaliana
  misc_feature (1)..(569): Ceres Seq. ID no. 13645801
  misc_feature: MA Experiment ID: 20001557 Result: Down-regulated in Transcription
  misc_feature: MA Experiment 20001557 PARAMETER Experiment Name: At_Drought_Soil_Dry_P Parameter: Age (day) Value: 27
  misc_feature: MA Experiment 20001557 PARAMETER Experiment Name: At_Drought_Soil_Dry_P Parameter: Organism Value: A. thaliana
  misc_feature: MA Experiment 20001557 PARAMETER Experiment Name: At_Drought_Soil_Dry_P Parameter: Plant Line Value: WS
  misc_feature: MA Experiment 20001557 PARAMETER Experiment Name: At_Drought_Soil_Dry_P Parameter: Post Timepoint (hr) Value: 3
  misc_feature: MA Experiment 20001557 PARAMETER Experiment Name: At_Drought_Soil_Dry_P Parameter: Post-Treatment Value: Re-Water vs. No Drought
  misc_feature: MA Experiment 20001557 PARAMETER Experiment Name: At_Drought_Soil_Dry_P Parameter: Timepoint (day) Value: 13
  misc_feature: MA Experiment 20001557 PARAMETER Experiment Name: At_Drought_Soil_Dry_P Parameter: Treatment Value: Drought vs. No Drought
  misc_feature: MA Experiment ID: 20001558 Result: Down-regulated in Transcription
  misc_feature: MA Experiment 20001558 PARAMETER Experiment Name: At_Drought_Soil_Dry_P Parameter: Age (day) Value: 27
  misc_feature: MA Experiment 20001558 PARAMETER Experiment Name: At_Drought_Soil_Dry_P Parameter: Organism Value: A. thaliana
  misc_feature: MA Experiment 20001558 PARAMETER Experiment Name: At_Drought_Soil_Dry_P Parameter: Plant Line Value: WS
  misc_feature: MA Experiment 20001558 PARAMETER Experiment Name: At_Drought_Soil_Dry_P Parameter: Post Timepoint (hr) Value: 6
  misc_feature: MA Experiment 20001558 PARAMETER Experiment Name: At_Drought_Soil_Dry_P Parameter: Post-Treatment Value: Re-Water vs. No Drought
  misc_feature: MA Experiment 20001558 PARAMETER Experiment Name: At_Drought_Soil_Dry_P Parameter: Timepoint (day) Value: 13
  misc_feature: MA Experiment 20001558 PARAMETER Experiment Name: At_Drought_Soil_Dry_P Parameter: Treatment Value: Drought vs. No Drought
  misc_feature: MA Experiment ID: 20001560 Result: Down-regulated in Transcription
  misc_feature: MA Experiment 20001560 PARAMETER Experiment Name: At_Drought_Soil_Dry_P Parameter: Age (day) Value: 28
  misc_feature: MA Experiment 20001560 PARAMETER Experiment Name: At_Drought_Soil_Dry_P Parameter: Organism Value: A. thaliana
  misc_feature: MA Experiment 20001560 PARAMETER Experiment Name: At_Drought_Soil_Dry_P Parameter: Plant Line Value: WS
  misc_feature: MA Experiment 20001560 PARAMETER Experiment Name: At_Drought_Soil_Dry_P Parameter: Post Timepoint (hr) Value: None
  misc_feature: MA Experiment 20001560 PARAMETER Experiment Name: At_Drought_Soil_Dry_P Parameter: Post-Treatment Value: None
  misc_feature: MA Experiment 20001560 PARAMETER Experiment Name: At_Drought_Soil_Dry_P Parameter: Timepoint (day) Value: 14
  misc_feature: MA Experiment 20001560 PARAMETER Experiment Name: At_Drought_Soil_Dry_P Parameter: Treatment Value: Drought vs. No Drought
  misc_feature: MA Experiment ID: 20001911 Result: Up-regulated in Transcription
  misc_feature: MA Experiment 20001911 PARAMETER Experiment Name: At_Drought_Reproduction_P Parameter: Age (day) Value: 40
  misc_feature: MA Experiment 20001911 PARAMETER Experiment Name: At_Drought_Reproduction_P Parameter: Organism Value: A. thaliana
  misc_feature: MA Experiment 20001911 PARAMETER Experiment Name: At_Drought_Reproduction_P Parameter: Plant Line Value: WS
  misc_feature: MA Experiment 20001911 PARAMETER Experiment Name: At_Drought_Reproduction_P Parameter: Timepoint (day) Value: 10
  misc_feature: MA Experiment 20001911 PARAMETER Experiment Name: At_Drought_Reproduction_P Parameter: Tissue Value: Flowers
  misc_feature: MA Experiment 20001911 PARAMETER Experiment Name: At_Drought_Reproduction_P Parameter: Treatment Value: Drought vs. No Drought
attaaaatataataaaaagacgtaagattctctccgcctcctccttctctctataagaaccgacacagagacgaagaagaataaatggccgcagaaggagaagttatcgcttgccacaccgttgaagattggaccgagaagctcaaagccgccaacgaatccaagaaactgattgtgatagacttcactgcaacatggtgcccaccttgccgtttcattgcacccgtctttgctgacttagccaagaagcacctcgacgtagtcttcttcaaggtcgatgttgacgaattgaacactgttgctgaggagtttaaagttcaggcaatgccaacgtttatcttcatgaaagaaggagagatcaaggagactgtggttggtgctgctaaagaagaaatcattgccaatctcgagaagcacaagacagttgttgctgctgcttgatttgcttttctctcttacctattttgctaaaatatgtttggtgttttaataaatcctttgttcgcccgagtcttttcaccttaaatgtgctcttatgtgtggtggtgaataaatgttgttgcaaactt

SEQ ID NO: 41574 - protein, 118 aa, Arabidopsis thaliana; identical to SEQ ID NO: 29115
  peptide (1)..(118): Ceres Seq. ID no. 13645802
  misc_feature (1)..(111): Homolog of NCBI NO: 15230385 NR Description: thioredoxin H-type 1 (TRX-H-1) [Arabidopsis
  misc_feature (3)..(111): Homolog of NCBI NO: 12082335 NR Description: thioredoxin h [Oryza sativa (japonica
  misc_feature (1)..(29): Homolog of NCBI NO: 25405885 NR Description: protein F27F5.21 [imported] - Arabidopsis
  misc_feature (29)..(111): Homolog of NCBI NO: 25405885 NR Description: protein F27F5.21 [imported] - Arabidopsis
  misc_feature (5)..(117): Homolog of NCBI NO: 11135129 NR Description: Thioredoxin H-type (TRX-H)
  misc_feature (5)..(117): Homolog of NCBI NO: 11494247 NR Description: thioredoxin-h-like protein 1 [Brassica oleracea
  misc_feature (5)..(117): Homolog of NCBI NO: 11135277 NR Description: Thioredoxin H-type 1 (TRX-H-1) (Pollen coat
  misc_feature (1)..(118): Homolog of NCBI NO: 15219537 NR Description: thioredoxin H-type 5 (TRX-H-5) [Arabidopsis
  misc_feature (1)..(118): Homolog of NCBI NO: 1388084 NR Description: thioredoxin h
  misc_feature (1)..(118): Homolog of NCBI NO: 15239136 NR Description: thioredoxin H-type 3 (TRX-H-3) [Arabidopsis

SEQ ID NO: 41575 - DNA, 1111 bp, Arabidopsis thaliana
  misc_feature (1)..(1111): Ceres Seq. ID no. 13591787
  misc_feature: MA Experiment ID: 20001450 Result: Down-regulated in Transcription
  misc_feature: MA Experiment 20001450 PARAMETER Experiment Name: At_Far-red-induction_P Parameter: Age (day) Value: 7
  misc_feature: MA Experiment 20001450 PARAMETER Experiment Name: At_Far-red-induction_P Parameter: Light Value: Far-red vs. White
  misc_feature: MA Experiment 20001450 PARAMETER Experiment Name: At_Far-red-induction_P Parameter: Organism Value: A. thaliana
  misc_feature: MA Experiment 20001450 PARAMETER Experiment Name: At_Far-red-induction_P Parameter: Plant Line Value: Columbia
  misc_feature: MA Experiment 20001450 PARAMETER Experiment Name: At_Far-red-induction_P Parameter: Timepoint (hr) Value: 8
  misc_feature: MA Experiment 20001450 PARAMETER Experiment Name: At_Far-red-induction_P Parameter: Tissue Value: Whole Plant
  misc_feature: MA Experiment ID: 20001451 Result: Down-regulated in Transcription
  misc_feature: MA Experiment 20001451 PARAMETER Experiment Name: At_Far-red-induction_P Parameter: Age (day) Value: 7
  misc_feature: MA Experiment 20001451 PARAMETER Experiment Name: At_Far-red-induction_P Parameter: Light Value: Far-red vs. White
  misc_feature: MA Experiment 20001451 PARAMETER Experiment Name: At_Far-red-induction_P Parameter: Organism Value: A. thaliana
  misc_feature: MA Experiment 20001451 PARAMETER Experiment Name: At_Far-red-induction_P Parameter: Plant Line Value: Columbia
  misc_feature: MA Experiment 20001451 PARAMETER Experiment Name: At_Far-red-induction_P Parameter: Timepoint (hr) Value: 24
  misc_feature: MA Experiment 20001451 PARAMETER Experiment Name: At_Far-red-induction_P Parameter: Tissue Value: Whole Plant
gccattgcttaatcctctcctctccttcacgttgagatatttttgagttttctgtgctgaattttggggaatcgaagaaattgaatttcaaaaatcaatggcggaagaaattgaaaaatctgtgccgacagaggaatctctgatggagaagatctccgagaagattcaccatcacgattcgtcgtcatcgtctgaatccgagtacgagaaacctgattctccttcggctgtgaaagcgaagatctatcgtatgtttggcagagagaagcctgttcacaaggttctcggtggtggaaagcctgctgatgtgttcttgtggagggataaaaaactatcaggtgctgttcttggtgtcgcgactgctatttgggttctgttcgagctggttgagtatcatttgttgagtcttttgtgtcacatttcgatactcgctcttggaggcctctttttgtggtccaatgctcacacacttatcaacaagacttcaccacaaattccagaaatccatgttcccgaggaggctttccttgtggttgcttcttctctgagaaacgaactaaaccaagcttttgttatcctacgaagcattgctttaggaagggacctaaaaaaattcctgatggttgttgtcggtctatggatcatctcggtggtgggcaattggttcaatttcctgactttggtgtacatttgcttcgtgatattgcacacagtcccaatgttgtatgagaaacacgaggacaaggttgatccattggcagagaaagcaatgaaggagttgcagaaacagtatgtggttttcgatgaaaaggttctctctaagattcccattgcttctctcaaggcaaaggcaaaattgggttaaaaagagagacagacgtctatggttttctttttgcatttttgatcatgtgaaattggtggtcacttgcagggttttgccgctaatggcccaactgtcctttttatgattttatcacgttttgagtacacttgttttttcttttcaaataccattttttccagctttttatggagaattcttgagctcatgaaacgtgagacattgtttcgttttgaatattccacaaatatagaagatataaatcac

SEQ ID NO: 41576 - protein, 255 aa, Arabidopsis thaliana
  peptide (1)..(255): Ceres Seq. ID no. 13591788
  misc_feature (13)..(251): Homolog of NCBI NO: 34897094 NR Description: unknown protein [Oryza sativa (japonica
  misc_feature (3)..(244): Homolog of NCBI NO: 15234108 NR Description: hypothetical protein [Arabidopsis thaliana]
  misc_feature (31)..(251): Homolog of NCBI NO: 34904202 NR Description: P0492F05.25 [Oryza sativa (japonica
  misc_feature (1)..(251): Homolog of NCBI NO: 15233147 NR Description: hypothetical protein [Arabidopsis thaliana]
  misc_feature (12)..(251): Homolog of NCBI NO: 34909318 NR Description: OSJNBb0021A09.5 [Oryza sativa (japonica
  misc_feature (1)..(243): Homolog of NCBI NO: 15222616 NR Description: expressed protein [Arabidopsis thaliana]
  misc_feature (12)..(251): Homolog of NCBI NO: 15238125 NR Description: expressed protein [Arabidopsis thaliana]
  misc_feature (9)..(253): Homolog of NCBI NO: 15237093 NR Description: expressed protein [Arabidopsis thaliana]
  misc_feature (1)..(253): Homolog of NCBI NO: 15236556 NR Description: expressed protein [Arabidopsis thaliana]
  misc_feature (1)..(255): Homolog of NCBI NO: 18406991 NR Description: expressed protein [Arabidopsis thaliana]
  misc_feature (13)..(251): Homolog of NCBI NO: 34897094 NR Description: unknown protein [Oryza sativa (japonica
  misc_feature (3)..(244): Homolog of NCBI NO: 15234108 NR Description: hypothetical protein [Arabidopsis thaliana]
  misc_feature (31)..(251): Homolog of NCBI NO: 34904202 NR Description: P0492F05.25 [Oryza sativa (japonica
  misc_feature (1)..(251): Homolog of NCBI NO: 15233147 NR Description: hypothetical protein [Arabidopsis thaliana]
  misc_feature (12)..(251): Homolog of NCBI NO: 34909318 NR Description: OSJNBb0021A09.5 [Oryza sativa (japonica
  misc_feature (1)..(243): Homolog of NCBI NO: 15222616 NR Description: expressed protein [Arabidopsis thaliana]
  misc_feature (12)..(251): Homolog of NCBI NO: 15238125 NR Description: expressed protein [Arabidopsis thaliana]
  misc_feature (9)..(253): Homolog of NCBI NO: 15237093 NR Description: expressed protein [Arabidopsis thaliana]
  misc_feature (1)..(253): Homolog of NCBI NO: 15236556 NR Description: expressed protein [Arabidopsis thaliana]
  misc_feature (1)..(255): Homolog of NCBI NO: 18406991 NR Description: expressed protein [Arabidopsis thaliana]
MAEEIEKSVPTEESLMEKISEKIHHHDSSSSSESEYEKPDSPSAVKAKIYRMFGREKPVHKVLGGGKPADVFLWRDKKLSGAVLGVATAIWVLFELVEYHLLSLLCHISILALGGLFLWSNAHTLINKTSPQIPEIHVPEEAFLVVASSLRNELNQAFVILRSIALGRDLKKFLMVVVGLWIISVVGNWFNFLTLVYICFVILHTVPMLYEKHEDKVDPLAEKAMKELQKQYVVFDEKVLSKIPIASLKAKAKLG

SEQ ID NO: 41577 - protein, 240 aa, Arabidopsis thaliana
  peptide (1)..(240): Ceres Seq. ID no. 13591789
  misc_feature (1)..(236): Homolog of NCBI NO: 34897094 NR Description: unknown protein [Oryza sativa (japonica
  misc_feature (1)..(229): Homolog of NCBI NO: 15234108 NR Description: hypothetical protein [Arabidopsis thaliana]
  misc_feature (16)..(236): Homolog of NCBI NO: 34904202 NR Description: P0492F05.25 [Oryza sativa (japonica
  misc_feature (1)..(236): Homolog of NCBI NO: 15233147 NR Description: hypothetical protein [Arabidopsis thaliana]
  misc_feature (1)..(236): Homolog of NCBI NO: 34909318 NR Description: OSJNBb0021A09.5 [Oryza sativa (japonica
  misc_feature (1)..(228): Homolog of NCBI NO: 15222616 NR Description: expressed protein [Arabidopsis thaliana]
  misc_feature (1)..(236): Homolog of NCBI NO: 15238125 NR Description: expressed protein [Arabidopsis thaliana]
  misc_feature (1)..(238): Homolog of NCBI NO: 15237093 NR Description: expressed protein [Arabidopsis thaliana]
  misc_feature (1)..(238): Homolog of NCBI NO: 15236556 NR Description: expressed protein [Arabidopsis thaliana]
  misc_feature (1)..(240): Homolog of NCBI NO: 18406991 NR Description: expressed protein [Arabidopsis thaliana]
  misc_feature (1)..(236): Homolog of NCBI NO: 34897094 NR Description: unknown protein [Oryza sativa (japonica
  misc_feature (1)..(229): Homolog of NCBI NO: 15234108 NR Description: hypothetical protein [Arabidopsis thaliana]
  misc_feature (16)..(236): Homolog of NCBI NO: 34904202 NR Description: P0492F05.25 [Oryza sativa (japonica
  misc_feature (1)..(236): Homolog of NCBI NO: 15233147 NR Description: hypothetical protein [Arabidopsis thaliana]
  misc_feature (1)..(236): Homolog of NCBI NO: 34909318 NR Description: OSJNBb0021A09.5 [Oryza sativa (japonica
  misc_feature (1)..(228): Homolog of NCBI NO: 15222616 NR Description: expressed protein [Arabidopsis thaliana]
  misc_feature (1)..(236): Homolog of NCBI NO: 15238125 NR Description: expressed protein [Arabidopsis thaliana]
  misc_feature (1)..(238): Homolog of NCBI NO: 15237093 NR Description: expressed protein [Arabidopsis thaliana]
  misc_feature (1)..(238): Homolog of NCBI NO: 15236556 NR Description: expressed protein [Arabidopsis thaliana]
  misc_feature (1)..(240): Homolog of NCBI NO: 18406991 NR Description: expressed protein [Arabidopsis thaliana]
MEKISEKIHHHDSSSSSESEYEKPDSPSAVKAKIYRMFGREKPVHKVLGGGKPADVFLWRDKKLSGAVLGVATAIWVLFELVEYHLLSLLCHISILALGGLFLWSNAHTLINKTSPQIPEIHVPEEAFLVVASSLRNELNQAFVILRSIALGRDLKKFLMVVVGLWIISVVGNWFNFLTLVYICFVILHTVPMLYEKHEDKVDPLAEKAMKELQKQYVVFDEKVLSKIPIASLKAKAKLG

SEQ ID NO: 41578 - protein, 204 aa, Arabidopsis thaliana
  peptide (1)..(204): Ceres Seq. ID no. 13591790
  misc_feature (1)..(200): Homolog of NCBI NO: 34897094 NR Description: unknown protein [Oryza sativa (japonica
  misc_feature (1)..(193): Homolog of NCBI NO: 15234108 NR Description: hypothetical protein [Arabidopsis thaliana]
  misc_feature (1)..(200): Homolog of NCBI NO: 34904202 NR Description: P0492F05.25 [Oryza sativa (japonica
  misc_feature (1)..(200): Homolog of NCBI NO: 15233147 NR Description: hypothetical protein [Arabidopsis thaliana]
  misc_feature (1)..(200): Homolog of NCBI NO: 34909318 NR Description: OSJNBb0021A09.5 [Oryza sativa (japonica
  misc_feature (1)..(192): Homolog of NCBI NO: 15222616 NR Description: expressed protein [Arabidopsis thaliana]
  misc_feature (1)..(200): Homolog of NCBI NO: 15238125 NR Description: expressed protein [Arabidopsis thaliana]
  misc_feature (1)..(202): Homolog of NCBI NO: 15237093 NR Description: expressed protein [Arabidopsis thaliana]
  misc_feature (1)..(202): Homolog of NCBI NO: 15236556 NR Description: expressed protein [Arabidopsis thaliana]
  misc_feature (1)..(204): Homolog of NCBI NO: 18406991 NR Description: expressed protein [Arabidopsis thaliana]
  misc_feature (1)..(200): Homolog of NCBI NO: 34897094 NR Description: unknown protein [Oryza sativa (japonica
  misc_feature (1)..(193): Homolog of NCBI NO: 15234108 NR Description: hypothetical protein [Arabidopsis thaliana]
  misc_feature (1)..(200): Homolog of NCBI NO: 34904202 NR Description: P0492F05.25 [Oryza sativa (japonica
  misc_feature (1)..(200): Homolog of NCBI NO: 15233147 NR Description: hypothetical protein [Arabidopsis thaliana]
  misc_feature (1)..(200): Homolog of NCBI NO: 34909318 NR Description: OSJNBb0021A09.5 [Oryza sativa (japonica
  misc_feature (1)..(192): Homolog of NCBI NO: 15222616 NR Description: expressed protein [Arabidopsis thaliana]
  misc_feature (1)..(200): Homolog of NCBI NO: 15238125 NR Description: expressed protein [Arabidopsis thaliana]
  misc_feature (1)..(202): Homolog of NCBI NO: 15237093 NR Description: expressed protein [Arabidopsis thaliana]
  misc_feature (1)..(202): Homolog of NCBI NO: 15236556 NR Description: expressed protein [Arabidopsis thaliana]
  misc_feature (1)..(204): Homolog of NCBI NO: 18406991 NR Description: expressed protein [Arabidopsis thaliana]
MFGREKPVHKVLGGGKPADVFLWRDKKLSGAVLGVATAIWVLFELVEYHLLSLLCHISILALGGLFLWSNAHTLINKTSPQIPEIHVPEEAFLVVASSLRNELNQAFVILRSIALGRDLKKFLMVVVGLWIISVVGNWFNFLTLVYICFVILHTVPMLYEKHEDKVDPLAEKAMKELQKQYVVFDEKVLSKIPIASLKAKAKLG

SEQ ID NO: 41579 - DNA, 1969 bp, Arabidopsis thaliana
  misc_feature (1)..(1969): Ceres Seq. ID no. 12385044
  misc_feature: MA Experiment ID: 108461 Result: Up-regulated in Transcription
  misc_feature: MA Experiment 108461 PARAMETER Experiment Name: At_Germinating_Seeds_cDNA_P Parameter: Age (day) Value: 1 vs. 0
  misc_feature: MA Experiment 108461 PARAMETER Experiment Name: At_Germinating_Seeds_cDNA_P Parameter: Tissue Value: Germinating Seeds
  misc_feature: MA Experiment ID: 108462 Result: Up-regulated in Transcription
  misc_feature: MA Experiment 108462 PARAMETER Experiment Name: At_Germinating_Seeds_cDNA_P Parameter: Age (day) Value: 2 vs. 0
  misc_feature: MA Experiment 108462 PARAMETER Experiment Name: At_Germinating_Seeds_cDNA_P Parameter: Tissue Value: Germinating Seeds
  misc_feature: MA Experiment ID: 108463 Result: Up-regulated in Transcription
  misc_feature: MA Experiment 108463 PARAMETER Experiment Name: At_Germinating_Seeds_cDNA_P Parameter: Age (day) Value: 3 vs. 0
  misc_feature: MA Experiment 108463 PARAMETER Experiment Name: At_Germinating_Seeds_cDNA_P Parameter: Tissue Value: Germinating Seeds
  misc_feature: MA Experiment ID: 108464 Result: Up-regulated in Transcription
  misc_feature: MA Experiment 108464 PARAMETER Experiment Name: At_Germinating_Seeds_cDNA_P Parameter: Age (day) Value: 4 vs. 0
  misc_feature: MA Experiment 108464 PARAMETER Experiment Name: At_Germinating_Seeds_cDNA_P Parameter: Tissue Value: Germinating Seeds
  misc_feature: MA Experiment ID: 108569 Result: Up-regulated in Transcription
  misc_feature: MA Experiment 108569 PARAMETER Experiment Name: At_0.001%_MeJA__cDNA_P Parameter: Timepoint (hr) Value: 6
  misc_feature: MA Experiment 108569 PARAMETER Experiment Name: At_0.001%_MeJA__cDNA_P Parameter: Tissue Value: Aerial
  misc_feature: MA Experiment 108569 PARAMETER Experiment Name: At_0.001%_MeJA__cDNA_P Parameter: Treatment Value: 0.001% MeJA vs. No Treatment
  misc_feature: MA Experiment ID: 108573 Result: Up-regulated in Transcription
  misc_feature: MA Experiment 108573 PARAMETER Experiment Name: At_Drought_cDNA_P Parameter: Timepoint (hr) Value: 6
  misc_feature: MA Experiment 108573 PARAMETER Experiment Name: At_Drought_cDNA_P Parameter: Tissue Value: Aerial
  misc_feature: MA Experiment 108573 PARAMETER Experiment Name: At_Drought_cDNA_P Parameter: Treatment Value: Drought vs. No Drought
  misc_feature: MA Experiment ID: 108579 Result: Up-regulated in Transcription
  misc_feature: MA Experiment 108579 PARAMETER Experiment Name: At_4deg_Cold_cDNA_P Parameter: Temperature (deg C) Value: 4 vs. 22
  misc_feature: MA Experiment 108579 PARAMETER Experiment Name: At_4deg_Cold_cDNA_P Parameter: Timepoint (hr) Value: 6
  misc_feature: MA Experiment 108579 PARAMETER Experiment Name: At_4deg_Cold_cDNA_P Parameter: Tissue Value: Aerial
  misc_feature: MA Experiment ID: 108595 Result: Down-regulated in Transcription
  misc_feature: MA Experiment 108595 PARAMETER Experiment Name: At_Ler-pi_Ovule_cDNA_P Parameter: Plant Line Value: null
  misc_feature: MA Experiment ID: 20000087 Result: Down-regulated in Transcription
  misc_feature: MA Experiment 20000087 PARAMETER Experiment Name: At_100uM_ABA_Mutants_cDNA_P Parameter: Plant Line Value: WS
  misc_feature: MA Experiment 20000087 PARAMETER Experiment Name: At_100uM_ABA_Mutants_cDNA_P Parameter: Timepoint (hr) Value: 6
  misc_feature: MA Experiment 20000087 PARAMETER Experiment Name: At_100uM_ABA_Mutants_cDNA_P Parameter: Tissue Value: Aerial
  misc_feature: MA Experiment 20000087 PARAMETER Experiment Name: At_100uM_ABA_Mutants_cDNA_P Parameter: Treatment Value: 100uM ABA vs. No Treatment
  misc_feature: MA Experiment ID: 20000179 Result: Up-regulated in Transcription
  misc_feature: MA Experiment 20000179 PARAMETER Experiment Name: At_Germinating_Seeds_P Parameter: Age (hr) Value: 6 vs. 0
  misc_feature: MA Experiment 20000179 PARAMETER Experiment Name: At_Germinating_Seeds_P Parameter: Tissue Value: Germinating Seeds
  misc_feature: MA Experiment ID: 20000180 Result: Up-regulated in Transcription
  misc_feature: MA Experiment 20000180 PARAMETER Experiment Name: At_Germinating_Seeds_P Parameter: Age (hr) Value: 24 vs. 0
  misc_feature: MA Experiment 20000180 PARAMETER Experiment Name: At_Germinating_Seeds_P Parameter: Tissue Value: Germinating Seeds
  misc_feature: MA Experiment ID: 20001451 Result: Down-regulated in Transcription
  misc_feature: MA Experiment 20001451 PARAMETER Experiment Name: At_Far-red-induction_P Parameter: Age (day) Value: 7
  misc_feature: MA Experiment 20001451 PARAMETER Experiment Name: At_Far-red-induction_P Parameter: Light Value: Far-red vs. White
  misc_feature: MA Experiment 20001451 PARAMETER Experiment Name: At_Far-red-induction_P Parameter: Organism Value: A. thaliana
  misc_feature: MA Experiment 20001451 PARAMETER Experiment Name: At_Far-red-induction_P Parameter: Plant Line Value: Columbia
  misc_feature: MA Experiment 20001451 PARAMETER Experiment Name: At_Far-red-induction_P Parameter: Timepoint (hr) Value: 24
  misc_feature: MA Experiment 20001451 PARAMETER Experiment Name: At_Far-red-induction_P Parameter: Tissue Value: Whole Plant
aaaggcttttaatattttatcatcttcaggcttattcgattttcttcagatttgaaatggtgtcgttcaaggtctctctcgtctctacttcgcctattgatggccagaaacctgggacttctggactccgtaagaaggtgaaagtgtttaagcaaccaaattaccttgaaaattttgtccaggcaacgttcaatgctcttactacagagaaagttaaaggtgcgacacttgtggtttctggtgatggtcgttattattcagagcaagctattcagattatagtaaagatggcagcagctaatggtgttagacgtgtgtgggttggtcaaaacagtctgctatcaactcctgcagtatcagctattattcgtgaaagagtaggggctgatggatctaaagccacaggagcatttatcttaacagcaagtcataatcctggtggcccaactgaggatttcggaattaagtacaatatggaaaatggtggaccagctcctgaatcaatcactgataagatttacgagaacacaaagacaatcaaggagtacccaatagcggaagatctacccagggttgatatttctactattggtataaccagctttgaaggacctgaaggaaagtttgacgtcgaagtttttgattctgcagatgactatgttaaactaatgaagtcaatcttcgactttgaatccatcaagaaattgctatcttatccaaaatttactttctgctatgatgcattgcatggagtggctggagcatatgcacatcgcatctttgtcgaagaactaggtgcaccagaaagttcgttgttgaactgcgtacccaaggaggactttggagggggccacccggatcccaatcttacctatgctaaggagctcgtggcacgcatgggattgagtaaaactgatgatgctggtggcgagcctccagagtttggcgccgctgctgatggtgatgcagaccgaaacatgatcctcggtaaaaggtttttcgtaactccttcggattcagttgctataattgctgcaaatgctgttggggccataccatacttcagctctggtttaaaaggtgttgctaggagcatgccgacctcagctgcacttgatgtcgttgcaaaaaacttgggtttgaagttctttgaggttccaacaggctggaaattctttggcaatctaatggatgctgggatgtgctctgtatgcggagaagaaagttttggaaccggttcggatcatatccgtgagaaagatgggatctgggcagttcttgcttggctatcaatactggctcacaagaacaaggaaacccttgatgggaatgcaaaactggtgacggttgaagacattgtccgccagcactgggctacatatggccgtcactattacactcgatacgactatgagaacgtagacgcaactgcagctaaagaactcatgggacttttggttaagttgcaatcttcacttcccgaagtcaacaagattataaagggaattcatccagaggtggcaaatgttgcaagcgcagatgagttcgagtacaaagatccagtagatggctctgtttcaaagcaccaagggatccgatacttattcgaggatggatcacgacttgtgttccgtctctcgggaactggctcagaaggagcaacaataaggctatacattgaacaatacgagaaggacgcctcaaagatcggccgagattctcaggatgctcttggtcccctggttgatgttgcattaaagctgtcgaaaatgcaagagttcaccggccgatcatcaccaactgttattacataagacagctttcagaagacgctgtctccaatactactctcattccaacttcatttcttatgaatttgggttttgcttttttcctgttatctgttatcttacacaagtatacttcaatacatataattttaatggaatatacattaggttggcaattg

SEQ ID NO: 41580 - protein, 603 aa, Arabidopsis thaliana
  peptide (1)..(603): Ceres Seq. ID no. 12385045
  misc_feature (335)..(460): Pfam Name: Phosphoglucomutase/phosphomannomutase, Pfam Description: Phosphoglucomutase/phosphomannomutase,
  misc_feature (22)..(603): Homolog of NCBI NO: 12585310 NR Description: Phosphoglucomutase, cytoplasmic 2 (Glucose
  misc_feature (22)..(603): Homolog of NCBI NO: 12585309 NR Description: Phosphoglucomutase, cytoplasmic 1 (Glucose
  misc_feature (19)..(603): Homolog of NCBI NO: 12585308 NR Description: Phosphoglucomutase, cytoplasmic (Glucose
  misc_feature (19)..(603): Homolog of NCBI NO: 12585316 NR Description: Phosphoglucomutase, cytoplasmic (Glucose
  misc_feature (19)..(603): Homolog of NCBI NO: 12585296 NR Description: Phosphoglucomutase, cytoplasmic (Glucose
  misc_feature (19)..(603): Homolog of NCBI NO: 13324798 NR Description: phosphoglucomutase [Oryza sativa]
  misc_feature (19)..(603): Homolog of NCBI NO: 12585330 NR Description: Phosphoglucomutase, cytoplasmic (Glucose
  misc_feature (22)..(603): Homolog of NCBI NO: 12643355 NR Description: Probable phosphoglucomutase, cytoplasmic 1
  misc_feature (22)..(603): Homolog of NCBI NO: 15220668 NR Description: putative phosphoglucomutase
  misc_feature (19)..(603): Homolog of NCBI NO: 15223226 NR Description: putative phosphoglucomutase
RLLIFYHLQAYSIFFRFEMVSFKVSLVSTSPIDGQKPGTSGLRKKVKVFKQPNYLENFVQATFNALTTEKVKGATLVVSGDGRYYSEQAIQIIVKMAAANGVRRVWVGQNSLLSTPAVSAIIRERVGADGSKATGAFILTASHNPGGPTEDFGIKYNMENGGPAPESITDKIYENTKTIKEYPIAEDLPRVDISTIGITSFEGPEGKFDVEVFDSADDYVKLMKSIFDFESIKKLLSYPKFTFCYDALHGVAGAYAHRIFVEELGAPESSLLNCVPKEDFGGGHPDPNLTYAKELVARMGLSKTDDAGGEPPEFGAAADGDADRNMILGKRFFVTPSDSVAIIAANAVGAIPYFSSGLKGVARSMPTSAALDVVAKNLGLKFFEVPTGWKFFGNLMDAGMCSVCGEESFGTGSDHIREKDGIWAVLAWLSILAHKNKETLDGNAKLVTVEDIVRQHWATYGRHYYTRYDYENVDATAAKELMGLLVKLQSSLPEVNKIIKGIHPEVANVASADEFEYKDPVDGSVSKHQGIRYLFEDGSRLVFRLSGTGSEGATIRLYIEQYEKDASKIGRDSQDALGPLVDVALKLSKMQEFTGRSSPTVIT

SEQ ID NO: 41581 - protein, 585 aa, Arabidopsis thaliana
  peptide (1)..(585): Ceres Seq. ID no. 12385046
  misc_feature (317)..(442): Pfam Name: Phosphoglucomutase/phosphomannomutase, Pfam Description: Phosphoglucomutase/phosphomannomutase,
  misc_feature (4)..(585): Homolog of NCBI NO: 12585310 NR Description: Phosphoglucomutase, cytoplasmic 2 (Glucose
  misc_feature (4)..(585): Homolog of NCBI NO: 12585309 NR Description: Phosphoglucomutase, cytoplasmic 1 (Glucose
  misc_feature (1)..(585): Homolog of NCBI NO: 12585308 NR Description: Phosphoglucomutase, cytoplasmic (Glucose
  misc_feature (1)..(585): Homolog of NCBI NO: 12585316 NR Description: Phosphoglucomutase, cytoplasmic (Glucose
  misc_feature (1)..(585): Homolog of NCBI NO: 12585296 NR Description: Phosphoglucomutase, cytoplasmic (Glucose
  misc_feature (1)..(585): Homolog of NCBI NO: 13324798 NR Description: phosphoglucomutase [Oryza sativa]
  misc_feature (1)..(585): Homolog of NCBI NO: 12585330 NR Description: Phosphoglucomutase, cytoplasmic (Glucose
  misc_feature (4)..(585): Homolog of NCBI NO: 12643355 NR Description: Probable phosphoglucomutase, cytoplasmic 1
  misc_feature (4)..(585): Homolog of NCBI NO: 15220668 NR Description: putative phosphoglucomutase
  misc_feature (1)..(585): Homolog of NCBI NO: 15223226 NR Description: putative phosphoglucomutase
MVSFKVSLVSTSPIDGQKPGTSGLRKKVKVFKQPNYLENFVQATFNALTTEKVKGATLVVSGDGRYYSEQAIQIIVKMAAANGVRRVWVGQNSLLSTPAVSAIIRERVGADGSKATGAFILTASHNPGGPTEDFGIKYNMENGGPAPESITDKIYENTKTIKEYPIAEDLPRVDISTIGITSFEGPEGKFDVEVFDSADDYVKLMKSIFDFESIKKLLSYPKFTFCYDALHGVAGAYAHRIFVEELGAPESSLLNCVPKEDFGGGHPDPNLTYAKELVARMGLSKTDDAGGEPPEFGAAADGDADRNMILGKRFFVTPSDSVAIIAANAVGAIPYFSSGLKGVARSMPTSAALDVVAKNLGLKFFEVPTGWKFFGNLMDAGMCSVCGEESFGTGSDHIREKDGIWAVLAWLSILAHKNKETLDGNAKLVTVEDIVRQHWATYGRHYYTRYDYENVDATAAKELMGLLVKLQSSLPEVNKIIKGIHPEVANVASADEFEYKDPVDGSVSKHQGIRYLFEDGSRLVFRLSGTGSEGATIRLYIEQYEKDASKIGRDSQDALGPLVDVALKLSKMQEFTGRSSPTVIT

SEQ ID NO: 41582 - protein, 508 aa, Arabidopsis thaliana
  peptide (1)..(508): Ceres Seq. ID no. 12385047
  misc_feature (240)..(365): Pfam Name: Phosphoglucomutase/phosphomannomutase, Pfam Description: Phosphoglucomutase/phosphomannomutase,
  misc_feature (1)..(508): Homolog of NCBI NO: 12585310 NR Description: Phosphoglucomutase, cytoplasmic 2 (Glucose
  misc_feature (1)..(508): Homolog of NCBI NO: 12585309 NR Description: Phosphoglucomutase, cytoplasmic 1 (Glucose
  misc_feature (1)..(508): Homolog of NCBI NO: 12585308 NR Description: Phosphoglucomutase, cytoplasmic (Glucose
  misc_feature (1)..(508): Homolog of NCBI NO: 12585316 NR Description: Phosphoglucomutase, cytoplasmic (Glucose
  misc_feature (1)..(508): Homolog of NCBI NO: 12585296 NR Description: Phosphoglucomutase, cytoplasmic (Glucose
  misc_feature (1)..(508): Homolog of NCBI NO: 13324798 NR Description: phosphoglucomutase [Oryza sativa]
  misc_feature (1)..(508): Homolog of NCBI NO: 12585330 NR Description: Phosphoglucomutase, cytoplasmic (Glucose
  misc_feature (1)..(508): Homolog of NCBI NO: 12643355 NR Description: Probable phosphoglucomutase, cytoplasmic 1
  misc_feature (1)..(508): Homolog of NCBI NO: 15220668 NR Description: putative phosphoglucomutase
  misc_feature (1)..(508): Homolog of NCBI NO: 15223226 NR Description: putative phosphoglucomutase
MAAANGVRRVWVGQNSLLSTPAVSAIIRERVGADGSKATGAFILTASHNPGGPTEDFGIKYNMENGGPAPESITDKIYENTKTIKEYPIAEDLPRVDISTIGITSFEGPEGKFDVEVFDSADDYVKLMKSIFDFESIKKLLSYPKFTFCYDALHGVAGAYAHRIFVEELGAPESSLLNCVPKEDFGGGHPDPNLTYAKELVARMGLSKTDDAGGEPPEFGAAADGDADRNMILGKRFFVTPSDSVAIIAANAVGAIPYFSSGLKGVARSMPTSAALDVVAKNLGLKFFEVPTGWKFFGNLMDAGMCSVCGEESFGTGSDHIREKDGIWAVLAWLSILAHKNKETLDGNAKLVTVEDIVRQHWATYGRHYYTRYDYENVDATAAKELMGLLVKLQSSLPEVNKIIKGIHPEVANVASADEFEYKDPVDGSVSKHQGIRYLFEDGSRLVFRLSGTGSEGATIRLYIEQYEKDASKIGRDSQDALGPLVDVALKLSKMQEFTGRSSPTVIT

SEQ ID NO: 41583 - DNA, 1832 bp, Arabidopsis thaliana
  misc_feature (1)..(1832): Ceres Seq. ID no. 12329310
  misc_feature: MA Experiment ID: 20000173 Result: Up-regulated in Transcription
  misc_feature: MA Experiment 20000173 PARAMETER Experiment Name: At_42deg_Heat_P Parameter: Age (day) Value: 14
  misc_feature: MA Experiment 20000173 PARAMETER Experiment Name: At_42deg_Heat_P Parameter: Organism Value: A. thaliana
  misc_feature: MA Experiment 20000173 PARAMETER Experiment Name: At_42deg_Heat_P Parameter: Plant Line Value: WS
  misc_feature: MA Experiment 20000173 PARAMETER Experiment Name: At_42deg_Heat_P Parameter: Temperature (deg C) Value: 42 vs. 22
  misc_feature: MA Experiment 20000173 PARAMETER Experiment Name: At_42deg_Heat_P Parameter: Timepoint (hr) Value: 6
  misc_feature: MA Experiment 20000173 PARAMETER Experiment Name: At_42deg_Heat_P Parameter: Tissue Value: Aerial
  misc_feature: MA Experiment ID: 20001557 Result: Up-regulated in Transcription
  misc_feature: MA Experiment 20001557 PARAMETER Experiment Name: At_Drought_Soil_Dry_P Parameter: Age (day) Value: 27
  misc_feature: MA Experiment 20001557 PARAMETER Experiment Name: At_Drought_Soil_Dry_P Parameter: Organism Value: A. thaliana
  misc_feature: MA Experiment 20001557 PARAMETER Experiment Name: At_Drought_Soil_Dry_P Parameter: Plant Line Value: WS
  misc_feature: MA Experiment 20001557 PARAMETER Experiment Name: At_Drought_Soil_Dry_P Parameter: Post Timepoint (hr) Value: 3
  misc_feature: MA Experiment 20001557 PARAMETER Experiment Name: At_Drought_Soil_Dry_P Parameter: Post-Treatment Value: Re-Water vs. No Drought
  misc_feature: MA Experiment 20001557 PARAMETER Experiment Name: At_Drought_Soil_Dry_P Parameter: Timepoint (day) Value: 13
  misc_feature: MA Experiment 20001557 PARAMETER Experiment Name: At_Drought_Soil_Dry_P Parameter: Treatment Value: Drought vs. No Drought
  misc_feature: MA Experiment ID: 20001905 Result: Up-regulated in Transcription
  misc_feature: MA Experiment 20001905 PARAMETER Experiment Name: At_Drought_Reproduction_P Parameter: Age (day) Value: 40
  misc_feature: MA Experiment 20001905 PARAMETER Experiment Name: At_Drought_Reproduction_P Parameter: Organism Value: A. thaliana
  misc_feature: MA Experiment 20001905 PARAMETER Experiment Name: At_Drought_Reproduction_P Parameter: Plant Line Value: WS
  misc_feature: MA Experiment 20001905 PARAMETER Experiment Name: At_Drought_Reproduction_P Parameter: Timepoint (day) Value: 10
  misc_feature: MA Experiment 20001905 PARAMETER Experiment Name: At_Drought_Reproduction_P Parameter: Tissue Value: Rosettes
  misc_feature: MA Experiment 20001905 PARAMETER Experiment Name: At_Drought_Reproduction_P Parameter: Treatment Value: Drought vs. No Drought
  misc_feature: MA Experiment ID: 20001911 Result: Up-regulated in Transcription
  misc_feature: MA Experiment 20001911 PARAMETER Experiment Name: At_Drought_Reproduction_P Parameter: Age (day) Value: 40
  misc_feature: MA Experiment 20001911 PARAMETER Experiment Name: At_Drought_Reproduction_P Parameter: Organism Value: A. thaliana
  misc_feature: MA Experiment 20001911 PARAMETER Experiment Name: At_Drought_Reproduction_P Parameter: Plant Line Value: WS
  misc_feature: MA Experiment 20001911 PARAMETER Experiment Name: At_Drought_Reproduction_P Parameter: Timepoint (day) Value: 10
  misc_feature: MA Experiment 20001911 PARAMETER Experiment Name: At_Drought_Reproduction_P Parameter: Tissue Value: Flowers
  misc_feature: MA Experiment 20001911 PARAMETER Experiment Name: At_Drought_Reproduction_P Parameter: Treatment Value: Drought vs. No Drought
atctgcgatgctgctcttaaattctcctctcgtcctcatttccatcttcgtctcctccctcagccatcccctctgagcttataaaaccttcatggcatttgcgcacttctgcagcatccactgtttccttaaaatcgggaaacaacaagagcttcttctccttgttattggattgccttttgccagcctttgttttagtcagttttctcctcattaacttctgtcggtacagaatctctctccaggctggtgaactcttgcagctttctcagtgattctgtatcgatttttcccgtgtaaattatggtttcctctcagcgtcctgtccccaacaaaatccagaaacagcaatatctatccatcagcccttcaaattctgtcttgaaagatgatgttgaacttgagttctctgatgtgtttggtccactccccgaagaggccaatgatattgcttacgacgagcctgctgttgtctacagtcgatcccactccttggttggcccgtgttcgctcgatagtcattctttgaagctgaccaagctcaccttactagagactgaggactcaattgacttggtggagtgtctcgaaggtgaatctttaaaagaaaatgatgatttctctggtaatgacgacagtgacaatgagaaagctttagagggagatctggtgaaagtctcaggtgtagtaggcatagatgattttgaggttatgaaggttgttgggaaaggtgcgtttgggaaagtctaccaggtgaggaaaaaggagacctctgagatatacgctatgaaagtcatgaggaaagatcacattatggagaagaaccatgctgaatacatgaaagctgagcgcgatattcttacaaaaattgatcacccattcattgttcaacttaaatactcttttcagaccaagtacaggctgtatcttgtgctcgactttataaacggaggtcatcttttcttccaactctatcaccaagggcttttcagagaggacttggctcgagtgtacactgcagaaatcgtctctgcagtttcccatctccatgagaaaggcataatgcacagagatctgaaacccgaaaacatactcatggatacagatggccacgtgatgctaacagattttggtttagcaaaggaatttgaagaaaacacaagatcaaactccatgtgcggaactacggagtatatggcacctgaaattgttcgaggaaaaggacatgataaagcagctgactggtggagcgtagggattcttctgtatgagatgctcacaggaaagccaccgtttctcgggagcaaaggaaagatacagcagaaaattgtgaaggacaagatcaagcttccgcagtttctgtctaatgaagctcatgcaatactgaaagggctgctgcaaaaagagccagaaaggcgacttggaagtggactgagcggagcagaggagataaaacagcacaaatggttcaagggaataaactggaagaagctggaggctagagaagtgatgccaagtttcaagccggaagtatcgggaaggcaatgcatagcaaattttgacaagtgttggactgacatgtctgttttggattctccggcgagcagtcccagttcggatcctaaggccaacccttttaccaatttcacttacgtcaggcctcctccttcattccttcaccagtccacaactactttgtagatttactatatttttatgtagttcctacttctttggttgttgtttccttctgacacatgaacattaaagaaaactttggttaccaagacgcttaatttataattgattttatgagattgttattgattgag

SEQ ID NO: 41584 - protein, 465 aa, Arabidopsis thaliana
  peptide (1)..(465): Ceres Seq. ID no. 12329311
  misc_feature (134)..(389): Pfam Name: Protein kinase domain Pfam Description: Protein kinase domain
  misc_feature (2)..(454): Homolog of NCBI NO: 21166148 NR Description: RAC-family serine/threonine kinase homolog
  misc_feature (103)..(451): Homolog of NCBI NO: 464395 NR Description: Protein kinase 2
  misc_feature (162)..(458): Homolog of NCBI NO: 33146662 NR Description: putative S6 ribosomal protein kinase
  misc_feature (20)..(453): Homolog of NCBI NO: 7649389 NR Description: S6 ribosomal protein kinase [Asparagus
  misc_feature (22)..(457): Homolog of NCBI NO: 1362152 NR Description: ribosomal protein S6 kinase homolog (clone
  misc_feature (9)..(455): Homolog of NCBI NO: 37575481 NR Description: ribosomal protein S6 kinase [Zea mays]
  misc_feature (1)..(465): Homolog of NCBI NO: 2129541 NR Description: protein kinase ATPK19 (EC 2.7.1.-) - Arabidopsis
  misc_feature (1)..(465): Homolog of NCBI NO: 15231959 NR Description: putative ribosomal-protein S6 kinase (ATPK19)
  misc_feature (1)..(465): Homolog of NCBI NO: 21537155 NR Description: putative ribosomal-protein S6 kinase ATPK6
  misc_feature (1)..(465): Homolog of NCBI NO: 15231960 NR Description: putative ribosomal-protein S6 kinase (ATPK6)
MVSSQRPVPNKIQKQQYLSISPSNSVLKDDVELEFSDVFGPLPEEANDIAYDEPAVVYSRSHSLVGPCSLDSHSLKLTKLTLLETEDSIDLVECLEGESLKENDDFSGNDDSDNEKALEGDLVKVSGVVGIDDFEVMKVVGKGAFGKVYQVRKKETSEIYAMKVMRKDHIMEKNHAEYMKAERDILTKIDHPFIVQLKYSFQTKYRLYLVLDFINGGHLFFQLYHQGLFREDLARVYTAEIVSAVSHLHEKGIMHRDLKPENILMDTDGHVMLTDFGLAKEFEENTRSNSMCGTTEYMAPEIVRGKGHDKAADWWSVGILLYEMLTGKPPFLGSKGKIQQKIVKDKIKLPQFLSNEAHAILKGLLQKEPERRLGSGLSGAEEIKQHKWFKGINWKKLEAREVMPSFKPEVSGRQCIANFDKCWTDMSVLDSPASSPSSDPKANPFTNFTYVRPPPSFLHQSTTTL

SEQ ID NO: 41585 - protein, 329 aa, Arabidopsis thaliana
  peptide (1)..(329): Ceres Seq. ID no. 12329312
  misc_feature (1)..(253): Pfam Name: Protein kinase domain Pfam Description: Protein kinase domain
  misc_feature (1)..(318): Homolog of NCBI NO: 21166148 NR Description: RAC-family serine/threonine kinase homolog
  misc_feature (1)..(315): Homolog of NCBI NO: 464395 NR Description: Protein kinase 2
  misc_feature (26)..(322): Homolog of NCBI NO: 33146662 NR Description: putative S6 ribosomal protein kinase
  misc_feature (1)..(317): Homolog of NCBI NO: 7649389 NR Description: S6 ribosomal protein kinase [Asparagus
  misc_feature (1)..(321): Homolog of NCBI NO: 1362152 NR Description: ribosomal protein S6 kinase homolog (clone
  misc_feature (1)..(319): Homolog of NCBI NO: 37575481 NR Description: ribosomal protein S6 kinase [Zea mays]
  misc_feature (1)..(329): Homolog of NCBI NO: 2129541 NR Description: protein kinase ATPK19 (EC 2.7.1.-) - Arabidopsis
  misc_feature (1)..(329): Homolog of NCBI NO: 15231959 NR Description: putative ribosomal-protein S6 kinase (ATPK19)
  misc_feature (1)..(329): Homolog of NCBI NO: 21537155 NR Description: putative ribosomal-protein S6 kinase ATPK6
  misc_feature (1)..(329): Homolog of NCBI NO: 15231960 NR Description: putative ribosomal-protein S6 kinase (ATPK6)
MKVVGKGAFGKVYQVRKKETSEIYAMKVMRKDHIMEKNHAEYMKAERDILTKIDHPFIVQLKYSFQTKYRLYLVLDFINGGHLFFQLYHQGLFREDLARVYTAEIVSAVSHLHEKGIMHRDLKPENILMDTDGHVMLTDFGLAKEFEENTRSNSMCGTTEYMAPEIVRGKGHDKAADWWSVGILLYEMLTGKPPFLGSKGKIQQKIVKDKIKLPQFLSNEAHAILKGLLQKEPERRLGSGLSGAEEIKQHKWFKGINWKKLEAREVMPSFKPEVSGRQCIANFDKCWTDMSVLDSPASSPSSDPKANPFTNFTYVRPPPSFLHQSTTTL

SEQ ID NO: 41586 - protein, 304 aa, Arabidopsis thaliana
  peptide (1)..(304): Ceres Seq. ID no. 12329313
  misc_feature (1)..(228): Pfam Name: Protein kinase domain Pfam Description: Protein kinase domain
  misc_feature (1)..(293): Homolog of NCBI NO: 21166148 NR Description: RAC-family serine/threonine kinase homolog
  misc_feature (1)..(290): Homolog of NCBI NO: 464395 NR Description: Protein kinase 2
  misc_feature (1)..(297): Homolog of NCBI NO: 33146662 NR Description: putative S6 ribosomal protein kinase
  misc_feature (1)..(292): Homolog of NCBI NO: 7649389 NR Description: S6 ribosomal protein kinase [Asparagus
  misc_feature (1)..(296): Homolog of NCBI NO: 1362152 NR Description: ribosomal protein S6 kinase homolog (clone
  misc_feature (1)..(294): Homolog of NCBI NO: 37575481 NR Description: ribosomal protein S6 kinase [Zea mays]
  misc_feature (1)..(304): Homolog of NCBI NO: 2129541 NR Description: protein kinase ATPK19 (EC 2.7.1.-) - Arabidopsis
  misc_feature (1)..(304): Homolog of NCBI NO: 15231959 NR Description: putative ribosomal-protein S6 kinase (ATPK19)
  misc_feature (1)..(304): Homolog of NCBI NO: 21537155 NR Description: putative ribosomal-protein S6 kinase ATPK6
  misc_feature (1)..(304): Homolog of NCBI NO: 15231960 NR Description: putative ribosomal-protein S6 kinase (ATPK6)
MKVMRKDHIMEKNHAEYMKAERDILTKIDHPFIVQLKYSFQTKYRLYLVLDFINGGHLFFQLYHQGLFREDLARVYTAEIVSAVSHLHEKGIMHRDLKPENILMDTDGHVMLTDFGLAKEFEENTRSNSMCGTTEYMAPEIVRGKGHDKAADWWSVGILLYEMLTGKPPFLGSKGKIQQKIVKDKIKLPQFLSNEAHAILKGLLQKEPERRLGSGLSGAEEIKQHKWFKGINWKKLEAREVMPSFKPEVSGRQCIANFDKCWTDMSVLDSPASSPSSDPKANPFTNFTYVRPPPSFLHQSTTTL

SEQ ID NO: 41587 - DNA, 1798 bp, Arabidopsis thaliana
  misc_feature (1)..(1798): Ceres Seq. ID no. 13487443
  misc_feature: MA Experiment ID: 108434 Result: Down-regulated in Transcription
  misc_feature: MA Experiment 108434 PARAMETER Experiment Name: At_Root_Tips_cDNA_P Parameter: Tissue Value: Root Tips
  misc_feature: MA Experiment ID: 108461 Result: Down-regulated in Transcription
  misc_feature: MA Experiment 108461 PARAMETER Experiment Name: At_Germinating_Seeds_cDNA_P Parameter: Age (day) Value: 1 vs. 0
  misc_feature: MA Experiment 108461 PARAMETER Experiment Name: At_Germinating_Seeds_cDNA_P Parameter: Tissue Value: Germinating Seeds
  misc_feature: MA Experiment ID: 108464 Result: Up-regulated in Transcription
  misc_feature: MA Experiment 108464 PARAMETER Experiment Name: At_Germinating_Seeds_cDNA_P Parameter: Age (day) Value: 4 vs. 0
  misc_feature: MA Experiment 108464 PARAMETER Experiment Name: At_Germinating_Seeds_cDNA_P Parameter: Tissue Value: Germinating Seeds
  misc_feature: MA Experiment ID: 108572 Result: Down-regulated in Transcription
  misc_feature: MA Experiment 108572 PARAMETER Experiment Name: At_Drought_cDNA_P Parameter: Timepoint (hr) Value: 1
  misc_feature: MA Experiment 108572 PARAMETER Experiment Name: At_Drought_cDNA_P Parameter: Tissue Value: Aerial
  misc_feature: MA Experiment 108572 PARAMETER Experiment Name: At_Drought_cDNA_P Parameter: Treatment Value: Drought vs. No Drought
  misc_feature: MA Experiment ID: 108573 Result: Down-regulated in Transcription
  misc_feature: MA Experiment 108573 PARAMETER Experiment Name: At_Drought_cDNA_P Parameter: Timepoint (hr) Value: 6
  misc_feature: MA Experiment 108573 PARAMETER Experiment Name: At_Drought_cDNA_P Parameter: Tissue Value: Aerial
  misc_feature: MA Experiment 108573 PARAMETER Experiment Name: At_Drought_cDNA_P Parameter: Treatment Value: Drought vs. No Drought
  misc_feature: MA Experiment ID: 108576 Result: Down-regulated in Transcription
  misc_feature: MA Experiment 108576 PARAMETER Experiment Name: At_42deg_Heat_cDNA_P Parameter: Temperature (deg C) Value: 42 vs. 22
  misc_feature: MA Experiment 108576 PARAMETER Experiment Name: At_42deg_Heat_cDNA_P Parameter: Timepoint (hr) Value: 1
  misc_feature: MA Experiment 108576 PARAMETER Experiment Name: At_42deg_Heat_cDNA_P Parameter: Tissue Value: Aerial
  misc_feature: MA Experiment ID: 108577 Result: Down-regulated in Transcription
  misc_feature: MA Experiment 108577 PARAMETER Experiment Name: At_42deg_Heat_cDNA_P Parameter: Temperature (deg C) Value: 42 vs. 22
  misc_feature: MA Experiment 108577 PARAMETER Experiment Name: At_42deg_Heat_cDNA_P Parameter: Timepoint (hr) Value: 6
  misc_feature: MA Experiment 108577 PARAMETER Experiment Name: At_42deg_Heat_cDNA_P Parameter: Tissue Value: Aerial
  misc_feature: MA Experiment ID: 108585 Result: Up-regulated in Transcription
  misc_feature: MA Experiment 108585 PARAMETER Experiment Name: At_5mM_NaNP_cDNA_P Parameter: Timepoint (hr) Value: 6
  misc_feature: MA Experiment 108585 PARAMETER Experiment Name: At_5mM_NaNP_cDNA_P Parameter: Tissue Value: Aerial
  misc_feature: MA Experiment 108585 PARAMETER Experiment Name: At_5mM_NaNP_cDNA_P Parameter: Treatment Value: null
  misc_feature: MA Experiment ID: 108595 Result: Down-regulated in Transcription
  misc_feature: MA Experiment 108595 PARAMETER Experiment Name: At_Ler-pi_Ovule_cDNA_P Parameter: Plant Line Value: null
  misc_feature: MA Experiment ID: 108607 Result: Down-regulated in Transcription
  misc_feature: MA Experiment 108607 PARAMETER Experiment Name: At_100uM_ABA_cDNA_P Parameter: Timepoint (hr) Value: 4
  misc_feature: MA Experiment 108607 PARAMETER Experiment Name: At_100uM_ABA_cDNA_P Parameter: Tissue Value: Aerial
  misc_feature: MA Experiment 108607 PARAMETER Experiment Name: At_100uM_ABA_cDNA_P Parameter: Treatment Value: 100uM ABA vs. No Treatment
  misc_feature: MA Experiment ID: 108608 Result: Down-regulated in Transcription
  misc_feature: MA Experiment 108608 PARAMETER Experiment Name: At_100uM_ABA_cDNA_P Parameter: Timepoint (hr) Value: 1
  misc_feature: MA Experiment 108608 PARAMETER Experiment Name: At_100uM_ABA_cDNA_P Parameter: Tissue Value: Aerial
  misc_feature: MA Experiment 108608 PARAMETER Experiment Name: At_100uM_ABA_cDNA_P Parameter: Treatment Value: 100uM ABA vs. No Treatment
  misc_feature: MA Experiment ID: 108668 Result: Down-regulated in Transcription
  misc_feature: MA Experiment 108668 PARAMETER Experiment Name: At_2mM_SA_cDNA_P Parameter: Plant Line Value: WS
  misc_feature: MA Experiment 108668 PARAMETER Experiment Name: At_2mM_SA_cDNA_P Parameter: Timepoint (hr) Value: 6
  misc_feature: MA Experiment 108668 PARAMETER Experiment Name: At_2mM_SA_cDNA_P Parameter: Treatment Value: 2mM SA vs. No Treatment
  misc_feature: MA Experiment ID: 20000112 Result: Down-regulated in Transcription
  misc_feature: MA Experiment 20000112 PARAMETER Experiment Name: At_42deg_Heat_cDNA_P Parameter: Temperature (deg C) Value: 42 vs. 22
  misc_feature: MA Experiment 20000112 PARAMETER Experiment Name: At_42deg_Heat_cDNA_P Parameter: Timepoint (hr) Value: 2
  misc_feature: MA Experiment 20000112 PARAMETER Experiment Name: At_42deg_Heat_cDNA_P Parameter: Tissue Value: Aerial
  misc_feature: MA Experiment ID: 20000113 Result: Down-regulated in Transcription
  misc_feature: MA Experiment 20000113 PARAMETER Experiment Name: At_42deg_Heat_cDNA_P Parameter: Temperature (deg C) Value: 42 vs. 22
  misc_feature: MA Experiment 20000113 PARAMETER Experiment Name: At_42deg_Heat_cDNA_P Parameter: Timepoint (hr) Value: 8
  misc_feature: MA Experiment 20000113 PARAMETER Experiment Name: At_42deg_Heat_cDNA_P Parameter: Tissue Value: Aerial
  misc_feature: MA Experiment ID: 20000144 Result: Down-regulated in Transcription
  misc_feature: MA Experiment 20000144 PARAMETER Experiment Name: At_42deg_Heat_cDNA_P Parameter: Temperature (deg C) Value: 42 vs. 22
  misc_feature: MA Experiment 20000144 PARAMETER Experiment Name: At_42deg_Heat_cDNA_P Parameter: Timepoint (hr) Value: 1
  misc_feature: MA Experiment 20000144 PARAMETER Experiment Name: At_42deg_Heat_cDNA_P Parameter: Tissue Value: Aerial
  misc_feature: MA Experiment ID: 20000166 Result: Down-regulated in Transcription
  misc_feature: MA Experiment 20000166 PARAMETER Experiment Name: At_100uM_ABA_P Parameter: Age (day) Value: 14
  misc_feature: MA Experiment 20000166 PARAMETER Experiment Name: At_100uM_ABA_P Parameter: Organism Value: A. thaliana
  misc_feature: MA Experiment 20000166 PARAMETER Experiment Name: At_100uM_ABA_P Parameter: Plant Line Value: WS
  misc_feature: MA Experiment 20000166 PARAMETER Experiment Name: At_100uM_ABA_P Parameter: Timepoint (hr) Value: 1
  misc_feature: MA Experiment 20000166 PARAMETER Experiment Name: At_100uM_ABA_P Parameter: Tissue Value: Aerial
  misc_feature: MA Experiment 20000166 PARAMETER Experiment Name: At_100uM_ABA_P Parameter: Treatment Value: 100uM ABA vs. No Treatment
  misc_feature: MA Experiment ID: 20000171 Result: Down-regulated in Transcription
  misc_feature: MA Experiment 20000171 PARAMETER Experiment Name: At_42deg_Heat_P Parameter: Age (day) Value: 14
  misc_feature: MA Experiment 20000171 PARAMETER Experiment Name: At_42deg_Heat_P Parameter: Organism Value: A. thaliana
  misc_feature: MA Experiment 20000171 PARAMETER Experiment Name: At_42deg_Heat_P Parameter: Plant Line Value: WS
  misc_feature: MA Experiment 20000171 PARAMETER Experiment Name: At_42deg_Heat_P Parameter: Temperature (deg C) Value: 42 vs. 22
  misc_feature: MA Experiment 20000171 PARAMETER Experiment Name: At_42deg_Heat_P Parameter: Timepoint (hr) Value: 1
  misc_feature: MA Experiment 20000171 PARAMETER Experiment Name: At_42deg_Heat_P Parameter: Tissue Value: Aerial
  misc_feature: MA Experiment ID: 20000173 Result: Down-regulated in Transcription
  misc_feature: MA Experiment 20000173 PARAMETER Experiment Name: At_42deg_Heat_P Parameter: Age (day) Value: 14
  misc_feature: MA Experiment 20000173 PARAMETER Experiment Name: At_42deg_Heat_P Parameter: Organism Value: A. thaliana
  misc_feature: MA Experiment 20000173 PARAMETER Experiment Name: At_42deg_Heat_P Parameter: Plant Line Value: WS
  misc_feature: MA Experiment 20000173 PARAMETER Experiment Name: At_42deg_Heat_P Parameter: Temperature (deg C) Value: 42 vs. 22
  misc_feature: MA Experiment 20000173 PARAMETER Experiment Name: At_42deg_Heat_P Parameter: Timepoint (hr) Value: 6
  misc_feature: MA Experiment 20000173 PARAMETER Experiment Name: At_42deg_Heat_P Parameter: Tissue Value: Aerial
  misc_feature: MA Experiment ID: 20000179 Result: Down-regulated in Transcription
  misc_feature: MA Experiment 20000179 PARAMETER Experiment Name: At_Germinating_Seeds_P Parameter: Age (hr) Value: 6 vs. 0
  misc_feature: MA Experiment 20000179 PARAMETER Experiment Name: At_Germinating_Seeds_P Parameter: Tissue Value: Germinating Seeds
  misc_feature: MA Experiment ID: 20000180 Result: Down-regulated in Transcription
  misc_feature: MA Experiment 20000180 PARAMETER Experiment Name: At_Germinating_Seeds_P Parameter: Age (hr) Value: 24 vs. 0
  misc_feature: MA Experiment 20000180 PARAMETER Experiment Name: At_Germinating_Seeds_P Parameter: Tissue Value: Germinating Seeds
  misc_feature: MA Experiment ID: 20000185 Result: Down-regulated in Transcription
  misc_feature: MA Experiment 20000185 PARAMETER Experiment Name: At_Roots__P Parameter: Age (day) Value: 7 vs. 21
  misc_feature: MA Experiment 20000185 PARAMETER Experiment Name: At_Roots__P Parameter: Organism Value: A. thaliana
  misc_feature: MA Experiment 20000185 PARAMETER Experiment Name: At_Roots__P Parameter: Tissue Value: Roots vs. Whole Plant
  misc_feature: MA Experiment ID: 20000234 Result: Down-regulated in Transcription
  misc_feature: MA Experiment 20000234 PARAMETER Experiment Name: At_Siliques_P Parameter: Age (day) Value: 21
  misc_feature: MA Experiment 20000234 PARAMETER Experiment Name: At_Siliques_P Parameter: Organism Value: A. thaliana
  misc_feature: MA Experiment 20000234 PARAMETER Experiment Name: At_Siliques_P Parameter: Plant Line Value: WS
  misc_feature: MA Experiment 20000234 PARAMETER Experiment Name: At_Siliques_P Parameter: Tissue Value: Less Than 5mm Siliques vs. Whole Plant
  misc_feature: MA Experiment ID: 20000264 Result: Down-regulated in Transcription
  misc_feature: MA Experiment 20000264 PARAMETER Experiment Name: At_Open_Flower_P Parameter: Age (day) Value: 21
  misc_feature: MA Experiment 20000264 PARAMETER Experiment Name: At_Open_Flower_P Parameter: Plant Line Value: WS
  misc_feature: MA Experiment 20000264 PARAMETER Experiment Name: At_Open_Flower_P Parameter: Tissue Value: Open Flower vs. Whole Plant
  misc_feature: MA Experiment ID: 20000265 Result: Down-regulated in Transcription
  misc_feature: MA Experiment 20000265 PARAMETER Experiment Name: At_Open_Flower_P Parameter: Age (day) Value: 21
  misc_feature: MA Experiment 20000265 PARAMETER Experiment Name: At_Open_Flower_P Parameter: Plant Line Value: WS
  misc_feature: MA Experiment 20000265 PARAMETER Experiment Name: At_Open_Flower_P Parameter: Tissue Value: Closed Flower vs. Whole Plant
  misc_feature: MA Experiment ID: 20000268 Result: Down-regulated in Transcription
  misc_feature: MA Experiment 20000268 PARAMETER Experiment Name: At_100mM_NaCl__P Parameter: Age (day) Value: 14
  misc_feature: MA Experiment 20000268 PARAMETER Experiment Name: At_100mM_NaCl__P Parameter: Organism Value: A. thaliana
  misc_feature: MA Experiment 20000268 PARAMETER Experiment Name: At_100mM_NaCl__P Parameter: Plant Line Value: WS
  misc_feature: MA Experiment 20000268 PARAMETER Experiment Name: At_100mM_NaCl__P Parameter: Timepoint (hr) Value: 6
  misc_feature: MA Experiment 20000268 PARAMETER Experiment Name: At_100mM_NaCl__P Parameter: Tissue Value: Whole Plant
  misc_feature: MA Experiment 20000268 PARAMETER Experiment Name: At_100mM_NaCl__P Parameter: Treatment Value: 100mM NaCl vs. No Treatment
  misc_feature: MA Experiment ID: 20000286 Result: Down-regulated in Transcription
  misc_feature: MA Experiment 20000286 PARAMETER Experiment Name: At_Open_Flower_P Parameter: Age (day) Value: 21
  misc_feature: MA Experiment 20000286 PARAMETER Experiment Name: At_Open_Flower_P Parameter: Plant Line Value: WS
  misc_feature: MA Experiment 20000286 PARAMETER Experiment Name: At_Open_Flower_P Parameter: Tissue Value: Half Open vs. Whole Plant
  misc_feature: MA Experiment ID: 20000437 Result: Down-regulated in Transcription
  misc_feature: MA Experiment 20000437 PARAMETER Experiment Name: At_Drought_P Parameter: Age (day) Value: 8
  misc_feature: MA Experiment 20000437 PARAMETER Experiment Name: At_Drought_P Parameter: Organism Value: A. thaliana
  misc_feature: MA Experiment 20000437 PARAMETER Experiment Name: At_Drought_P Parameter: Plant Line Value: WS
  misc_feature: MA Experiment 20000437 PARAMETER Experiment Name: At_Drought_P Parameter: Timepoint (hr) Value: 24
  misc_feature: MA Experiment 20000437 PARAMETER Experiment Name: At_Drought_P Parameter: Tissue Value: Whole Plant
  misc_feature: MA Experiment 20000437 PARAMETER Experiment Name: At_Drought_P Parameter: Treatment Value: Drought vs. No Drought
  misc_feature: MA Experiment ID: 20000439 Result: Down-regulated in Transcription
  misc_feature: MA Experiment 20000439 PARAMETER Experiment Name: At_Roots__P Parameter: Age (day) Value: 14 vs. 21
  misc_feature: MA Experiment 20000439 PARAMETER Experiment Name: At_Roots__P Parameter: Organism Value: A. thaliana
  misc_feature: MA Experiment 20000439 PARAMETER Experiment Name: At_Roots__P Parameter: Tissue Value: Roots vs. Whole Plant
  misc_feature: MA Experiment ID: 20000441 Result: Up-regulated in Transcription
  misc_feature: MA Experiment 20000441 PARAMETER Experiment Name: At_1uM_BR-BRZ__P Parameter: Tissue Value: Shoot Apices
  misc_feature: MA Experiment 20000441 PARAMETER Experiment Name: At_1uM_BR-BRZ__P Parameter: Treatment Value: 1uM BR vs. No Treatment
  misc_feature: MA Experiment ID: 20000443 Result: Up-regulated in Transcription
  misc_feature: MA Experiment 20000443 PARAMETER Experiment Name: At_1uM_BR-BRZ__P Parameter: Tissue Value: Shoot Apices
  misc_feature: MA Experiment 20000443 PARAMETER Experiment Name: At_1uM_BR-BRZ__P Parameter: Treatment Value: 1uM BRZ vs. No Treatment
  misc_feature: MA Experiment ID: 20000573 Result: Down-regulated in Transcription
  misc_feature: MA Experiment 20000573 PARAMETER Experiment Name: At_100uM_ABA_Mutants__P Parameter: Organism Value: A. thaliana
  misc_feature: MA Experiment 20000573 PARAMETER Experiment Name: At_100uM_ABA_Mutants__P Parameter: Plant Line Value: CS22 vs. Ler wt
  misc_feature: MA Experiment 20000573 PARAMETER Experiment Name: At_100uM_ABA_Mutants__P Parameter: Timepoint (hr) Value: N/A
  misc_feature: MA Experiment 20000573 PARAMETER Experiment Name: At_100uM_ABA_Mutants__P Parameter: Tissue Value: Whole Plant
  misc_feature: MA Experiment 20000573 PARAMETER Experiment Name: At_100uM_ABA_Mutants__P Parameter: Treatment Value: None
  misc_feature: MA Experiment ID: 20000794 Result: Down-regulated in Transcription
  misc_feature: MA Experiment 20000794 PARAMETER Experiment Name: At_Petals_P Parameter: Age (day) Value: 23-25 days
  misc_feature: MA Experiment 20000794 PARAMETER Experiment Name: At_Petals_P Parameter: Plant Line Value: WS
  misc_feature: MA Experiment 20000794 PARAMETER Experiment Name: At_Petals_P Parameter: Tissue Value: Petals vs. Whole plant
  misc_feature: MA Experiment ID: 20001248 Result: Down-regulated in Transcription
  misc_feature: MA Experiment 20001248 PARAMETER Experiment Name: At_Far-red-induction_P Parameter: Age (day) Value: 7
  misc_feature: MA Experiment 20001248 PARAMETER Experiment Name: At_Far-red-induction_P Parameter: Light Value: Far-red vs. White
  misc_feature: MA Experiment 20001248 PARAMETER Experiment Name: At_Far-red-induction_P Parameter: Organism Value: A. thaliana
  misc_feature: MA Experiment 20001248 PARAMETER Experiment Name: At_Far-red-induction_P Parameter: Plant Line Value: Columbia
  misc_feature: MA Experiment 20001248 PARAMETER Experiment Name: At_Far-red-induction_P Parameter: Timepoint (hr) Value: 4
  misc_feature: MA Experiment 20001248 PARAMETER Experiment Name: At_Far-red-induction_P Parameter: Tissue Value: Whole Plant
  misc_feature: MA Experiment ID: 20001450 Result: Down-regulated in Transcription
  misc_feature: MA Experiment 20001450 PARAMETER Experiment Name: At_Far-red-induction_P Parameter: Age (day) Value: 7
  misc_feature: MA Experiment 20001450 PARAMETER Experiment Name: At_Far-red-induction_P Parameter: Light Value: Far-red vs. White
  misc_feature: MA Experiment 20001450 PARAMETER Experiment Name: At_Far-red-induction_P Parameter: Organism Value: A. thaliana
  misc_feature: MA Experiment 20001450 PARAMETER Experiment Name: At_Far-red-induction_P Parameter: Plant Line Value: Columbia
  misc_feature: MA Experiment 20001450 PARAMETER Experiment Name: At_Far-red-induction_P Parameter: Timepoint (hr) Value: 8
  misc_feature: MA Experiment 20001450 PARAMETER Experiment Name: At_Far-red-induction_P Parameter: Tissue Value: Whole Plant
  misc_feature: MA Experiment ID: 20001451 Result: Down-regulated in Transcription
  misc_feature: MA Experiment 20001451 PARAMETER Experiment Name: At_Far-red-induction_P Parameter: Age (day) Value: 7
  misc_feature: MA Experiment 20001451 PARAMETER Experiment Name: At_Far-red-induction_P Parameter: Light Value: Far-red vs. White
  misc_feature: MA Experiment 20001451 PARAMETER Experiment Name: At_Far-red-induction_P Parameter: Organism Value: A. thaliana
  misc_feature: MA Experiment 20001451 PARAMETER Experiment Name: At_Far-red-induction_P Parameter: Plant Line Value: Columbia
  misc_feature: MA Experiment 20001451 PARAMETER Experiment Name: At_Far-red-induction_P Parameter: Timepoint (hr) Value: 24
  misc_feature: MA Experiment 20001451 PARAMETER Experiment Name: At_Far-red-induction_P Parameter: Tissue Value: Whole Plant
  misc_feature: MA Experiment ID: 20001560 Result: Down-regulated in Transcription
  misc_feature: MA Experiment 20001560 PARAMETER Experiment Name: At_Drought_Soil_Dry_P Parameter: Age (day) Value: 28
  misc_feature: MA Experiment 20001560 PARAMETER Experiment Name: At_Drought_Soil_Dry_P Parameter: Organism Value: A. thaliana
  misc_feature: MA Experiment 20001560 PARAMETER Experiment Name: At_Drought_Soil_Dry_P Parameter: Plant Line Value: WS
  misc_feature: MA Experiment 20001560 PARAMETER Experiment Name: At_Drought_Soil_Dry_P Parameter: Post Timepoint (hr) Value: None
  misc_feature: MA Experiment 20001560 PARAMETER Experiment Name: At_Drought_Soil_Dry_P Parameter: Post-Treatment Value: None
  misc_feature: MA Experiment 20001560 PARAMETER Experiment Name: At_Drought_Soil_Dry_P Parameter: Timepoint (day) Value: 14
  misc_feature: MA Experiment 20001560 PARAMETER Experiment Name: At_Drought_Soil_Dry_P Parameter: Treatment Value: Drought vs. No Drought
caaaaaatccaacccaagaaccacagtgagatctttctcagaagacaaaaatgggaacagcgtcgtctaagtctaacatcaacctctcgcaggtcctcaacactgaggagccgtacagctccgtgatgctggccgtcgctgctctcttggccgttgtatgctacttatggattcaggggaagtccaagtccaaaaaggaacctccactgcctccgggaccttggccacttcctatcgtcggaaacctcccgttcctaaactctgacgtcctccacacgcaattccaagccctaaccctaaaatatggccctctcatgaagatccacctcggttccaaacttgcgatcgtcgtctcttcccctgacatggctcgcgaggttctcaaaacccacgacatcactttcgccaaccacgatctccctgaagtcggaaagatcaacacttacggtggtgaagacatcctctggtctccttacggtacccattggaggagacttcgtaagctctgcgtcatgaagatgttcactaccccaagtctcgaagcttcctactccactcgccgggaagaaacccgacaaaccattgtccacatgtcggaaatggctcgtgaaggatcaccagtcaacctcggagagcaaatatttctttccattttcaacgtcgtgacaagaatgatgtggggcgccactgttgaaggagacgagagaacgagcttaggaaacgagctcaaaaccctaatatctgatatctccgacatagaagggattcaaaactactcagatttctttccgttgttctcaagattcgatttccaaggattggttaagcagatgaaaggccatgtgaagaagcttgatctcttgttcgatagagttatggagagtcacgtcaaaatggtgggaaagaagagcgaagaagaagaagatttcttgcaatacttacttagagttaaagatgatgatgagaaagctcctctgtccatgactcatgtcaagtctctcctcatggatatggttcttggtggtgtcgacacatcggttaacgcatccgaattcgccatggcagagattgtgagcagaccggaagtgttaaacaagatccgactagaacttgaccaagttgttggcaaagacaacatcgttgaggaatcacatttacctaagcttccttacctacaagcggttatgaaagagactcttaggcttcaccctacgcttcctcttcttgttcctcacagaaacagcgaaacctcggtggttgcgggatacactgtgcctaaagactccaagattttcatcaacgtttgggcgattcatagagatcctaagaattgggatgaaccaaacgagttcaaacctgagaggtttttggagaattcgcttgatttcaatggaggtgattttaagtatttgccttttgggtcaggaaggaggatttgtgcggcgataaacatggctgagagacttgttctgttcaacattgcttcacttcttcactcttttgattggaaagctcctcaaggacagaagtttgaggttgaagagaagtttggtcttgttcttaagttgaagtctccacttgtggctattcctgttccaaggttgtccgatccaaaactctacacagcttaagtaagtaagaaggaaatttggtttgagcttatgagaggaagttgaattgagttttcttgtttaaagtttatttttctttattcgtgtttggagtttgatgctttgtaaaaaaagatgtgtcaagttaaatttaattttcttatatataataaaataaagttttagtc

SEQ ID NO: 41588 - protein, 526 aa, Arabidopsis thaliana
  peptide (1)..(526): Ceres Seq. ID no. 13487444
  misc_feature (32)..(485): Homolog of NCBI NO: 16226350 NR Description: AT5g44620/K15C23_6 [Arabidopsis thaliana]
  misc_feature (21)..(524): Homolog of NCBI NO: 15234517 NR Description: cytochrome P450, putative [Arabidopsis thaliana]
  misc_feature (15)..(524): Homolog of NCBI NO: 15234521 NR Description: cytochrome P450 family [Arabidopsis thaliana]
  misc_feature (8)..(524): Homolog of NCBI NO: 15234514 NR Description: cytochrome p450 family [Arabidopsis thaliana]
  misc_feature (28)..(524): Homolog of NCBI NO: 11345411 NR Description: putative cytochrome P450 [Matthiola incana]
  misc_feature (32)..(524): Homolog of NCBI NO: 15241541 NR Description: cytochrome P450 family [Arabidopsis thaliana]
  misc_feature (1)..(526): Homolog of NCBI NO: 15810341 NR Description: putative cytochrome P450 protein [Arabidopsis
  misc_feature (1)..(526): Homolog of NCBI NO: 7430667 NR Description: cytochrome P450 homolog T12H17.80 - Arabidopsis
  misc_feature (1)..(526): Homolog of NCBI NO: 30685891 NR Description: cytochrome P450 family [Arabidopsis thaliana]
  misc_feature (1)..(526): Homolog of NCBI NO: 15235775 NR Description: cytochrome P450 family [Arabidopsis thaliana]
MGTASSKSNINLSQVLNTEEPYSSVMLAVAALLAVVCYLWIQGKSKSKKEPPLPPGPWPLPIVGNLPFLNSDVLHTQFQALTLKYGPLMKIHLGSKLAIVVSSPDMAREVLKTHDITFANHDLPEVGKINTYGGEDILWSPYGTHWRRLRKLCVMKMFTTPSLEASYSTRREETRQTIVHMSEMAREGSPVNLGEQIFLSIFNVVTRMMWGATVEGDERTSLGNELKTLISDISDIEGIQNYSDFFPLFSRFDFQGLVKQMKGHVKKLDLLFDRVMESHVKMVGKKSEEEEDFLQYLLRVKDDDEKAPLSMTHVKSLLMDMVLGGVDTSVNASEFAMAEIVSRPEVLNKIRLELDQVVGKDNIVEESHLPKLPYLQAVMKETLRLHPTLPLLVPHRNSETSVVAGYTVPKDSKIFINVWAIHRDPKNWDEPNEFKPERFLENSLDFNGGDFKYLPFGSGRRICAAINMAERLVLFNIASLLHSFDWKAPQGQKFEVEEKFGLVLKLKSPLVAIPVPRLSDPKLYTA

SEQ ID NO: 41589 - protein, 501 aa, Arabidopsis thaliana
  peptide (1)..(501): Ceres Seq. ID no. 13487445
  misc_feature (7)..(460): Homolog of NCBI NO: 16226350 NR Description: AT5g44620/K15C23_6 [Arabidopsis thaliana]
  misc_feature (1)..(499): Homolog of NCBI NO: 15234517 NR Description: cytochrome P450, putative [Arabidopsis thaliana]
  misc_feature (1)..(499): Homolog of NCBI NO: 15234521 NR Description: cytochrome P450 family [Arabidopsis thaliana]
  misc_feature (1)..(499): Homolog of NCBI NO: 15234514 NR Description: cytochrome p450 family [Arabidopsis thaliana]
  misc_feature (3)..(499): Homolog of NCBI NO: 11345411 NR Description: putative cytochrome P450 [Matthiola incana]
  misc_feature (7)..(499): Homolog of NCBI NO: 15241541 NR Description: cytochrome P450 family [Arabidopsis thaliana]
  misc_feature (1)..(501): Homolog of NCBI NO: 15810341 NR Description: putative cytochrome P450 protein [Arabidopsis
  misc_feature (1)..(501): Homolog of NCBI NO: 7430667 NR Description: cytochrome P450 homolog T12H17.80 - Arabidopsis
  misc_feature (1)..(501): Homolog of NCBI NO: 30685891 NR Description: cytochrome P450 family [Arabidopsis thaliana]
  misc_feature (1)..(501): Homolog of NCBI NO: 15235775 NR Description: cytochrome P450 family [Arabidopsis thaliana]
MLAVAALLAVVCYLWIQGKSKSKKEPPLPPGPWPLPIVGNLPFLNSDVLHTQFQALTLKYGPLMKIHLGSKLAIVVSSPDMAREVLKTHDITFANHDLPEVGKINTYGGEDILWSPYGTHWRRLRKLCVMKMFTTPSLEASYSTRREETRQTIVHMSEMAREGSPVNLGEQIFLSIFNVVTRMMWGATVEGDERTSLGNELKTLISDISDIEGIQNYSDFFPLFSRFDFQGLVKQMKGHVKKLDLLFDRVMESHVKMVGKKSEEEEDFLQYLLRVKDDDEKAPLSMTHVKSLLMDMVLGGVDTSVNASEFAMAEIVSRPEVLNKIRLELDQVVGKDNIVEESHLPKLPYLQAVMKETLRLHPTLPLLVPHRNSETSVVAGYTVPKDSKIFINVWAIHRDPKNWDEPNEFKPERFLENSLDFNGGDFKYLPFGSGRRICAAINMAERLVLFNIASLLHSFDWKAPQGQKFEVEEKFGLVLKLKSPLVAIPVPRLSDPKLYTA

SEQ ID NO: 41590 - protein, 438 aa, Arabidopsis thaliana
  peptide (1)..(438): Ceres Seq. ID no. 13487446
  misc_feature (1)..(397): Homolog of NCBI NO: 16226350 NR Description: AT5g44620/K15C23_6 [Arabidopsis thaliana]
  misc_feature (1)..(436): Homolog of NCBI NO: 15234517 NR Description: cytochrome P450, putative [Arabidopsis thaliana]
  misc_feature (1)..(436): Homolog of NCBI NO: 15234521 NR Description: cytochrome P450 family [Arabidopsis thaliana]
  misc_feature (1)..(436): Homolog of NCBI NO: 15234514 NR Description: cytochrome p450 family [Arabidopsis thaliana]
  misc_feature (1)..(436): Homolog of NCBI NO: 11345411 NR Description: putative cytochrome P450 [Matthiola incana]
  misc_feature (1)..(436): Homolog of NCBI NO: 15241541 NR Description: cytochrome P450 family [Arabidopsis thaliana]
  misc_feature (1)..(438): Homolog of NCBI NO: 15810341 NR Description: putative cytochrome P450 protein [Arabidopsis
  misc_feature (1)..(438): Homolog of NCBI NO: 7430667 NR Description: cytochrome P450 homolog T12H17.80 - Arabidopsis
  misc_feature (1)..(438): Homolog of NCBI NO: 30685891 NR Description: cytochrome P450 family [Arabidopsis thaliana]
  misc_feature (1)..(438): Homolog of NCBI NO: 15235775 NR Description: cytochrome P450 family [Arabidopsis thaliana]
MKIHLGSKLAIVVSSPDMAREVLKTHDITFANHDLPEVGKINTYGGEDILWSPYGTHWRRLRKLCVMKMFTTPSLEASYSTRREETRQTIVHMSEMAREGSPVNLGEQIFLSIFNVVTRMMWGATVEGDERTSLGNELKTLISDISDIEGIQNYSDFFPLFSRFDFQGLVKQMKGHVKKLDLLFDRVMESHVKMVGKKSEEEEDFLQYLLRVKDDDEKAPLSMTHVKSLLMDMVLGGVDTSVNASEFAMAEIVSRPEVLNKIRLELDQVVGKDNIVEESHLPKLPYLQAVMKETLRLHPTLPLLVPHRNSETSVVAGYTVPKDSKIFINVWAIHRDPKNWDEPNEFKPERFLENSLDFNGGDFKYLPFGSGRRICAAINMAERLVLFNIASLLHSFDWKAPQGQKFEVEEKFGLVLKLKSPLVAIPVPRLSDPKLYTA

SEQ ID NO: 41591 - DNA, 2395 bp, Arabidopsis thaliana; identical to SEQ ID NO: 37382
  misc_feature (1)..(2395): Ceres Seq. ID no. 13497276
  misc_feature: MA Experiment ID: 108474 Result: Up-regulated in Transcription
  misc_feature: MA Experiment 108474 PARAMETER Experiment Name: At_Drought_Flowers_cDNA_P Parameter: Timepoint (hr) Value: null
  misc_feature: MA Experiment 108474 PARAMETER Experiment Name: At_Drought_Flowers_cDNA_P Parameter: Treatment Value: Drought vs. No Drought
  misc_feature: MA Experiment ID: 108488 Result: Up-regulated in Transcription
  misc_feature: MA Experiment ID: 108576 Result: Down-regulated in Transcription
  misc_feature: MA Experiment 108576 PARAMETER Experiment Name: At_42deg_Heat_cDNA_P Parameter: Temperature (deg C) Value: 42 vs. 22
  misc_feature: MA Experiment 108576 PARAMETER Experiment Name: At_42deg_Heat_cDNA_P Parameter: Timepoint (hr) Value: 1
  misc_feature: MA Experiment 108576 PARAMETER Experiment Name: At_42deg_Heat_cDNA_P Parameter: Tissue Value: Aerial
  misc_feature: MA Experiment ID: 108577 Result: Down-regulated in Transcription
  misc_feature: MA Experiment 108577 PARAMETER Experiment Name: At_42deg_Heat_cDNA_P Parameter: Temperature (deg C) Value: 42 vs. 22
  misc_feature: MA Experiment 108577 PARAMETER Experiment Name: At_42deg_Heat_cDNA_P Parameter: Timepoint (hr) Value: 6
  misc_feature: MA Experiment 108577 PARAMETER Experiment Name: At_42deg_Heat_cDNA_P Parameter: Tissue Value: Aerial
  misc_feature: MA Experiment ID: 108668 Result: Down-regulated in Transcription
  misc_feature: MA Experiment 108668 PARAMETER Experiment Name: At_2mM_SA_cDNA_P Parameter: Plant Line Value: WS
  misc_feature: MA Experiment 108668 PARAMETER Experiment Name: At_2mM_SA_cDNA_P Parameter: Timepoint (hr) Value: 6
  misc_feature: MA Experiment 108668 PARAMETER Experiment Name: At_2mM_SA_cDNA_P Parameter: Treatment Value: 2mM SA vs. No Treatment
  misc_feature: MA Experiment ID: 20000072 Result: Down-regulated in Transcription
  misc_feature: MA Experiment 20000072 PARAMETER Experiment Name: At_100uM_ABA_Mutants_cDNA_P Parameter: Plant Line Value: CS8105
  misc_feature: MA Experiment 20000072 PARAMETER Experiment Name: At_100uM_ABA_Mutants_cDNA_P Parameter: Timepoint (hr) Value: 6
  misc_feature: MA Experiment 20000072 PARAMETER Experiment Name: At_100uM_ABA_Mutants_cDNA_P Parameter: Tissue Value: Aerial
  misc_feature: MA Experiment 20000072 PARAMETER Experiment Name: At_100uM_ABA_Mutants_cDNA_P Parameter: Treatment Value: 100uM ABA vs. No Treatment
  misc_feature: MA Experiment ID: 20000087 Result: Down-regulated in Transcription
  misc_feature: MA Experiment 20000087 PARAMETER Experiment Name: At_100uM_ABA_Mutants_cDNA_P Parameter: Plant Line Value: WS
  misc_feature: MA Experiment 20000087 PARAMETER Experiment Name: At_100uM_ABA_Mutants_cDNA_P Parameter: Timepoint (hr) Value: 6
  misc_feature: MA Experiment 20000087 PARAMETER Experiment Name: At_100uM_ABA_Mutants_cDNA_P Parameter: Tissue Value: Aerial
  misc_feature: MA Experiment 20000087 PARAMETER Experiment Name: At_100uM_ABA_Mutants_cDNA_P Parameter: Treatment Value: 100uM ABA vs. No Treatment
  misc_feature: MA Experiment ID: 20000113 Result: Down-regulated in Transcription
  misc_feature: MA Experiment 20000113 PARAMETER Experiment Name: At_42deg_Heat_cDNA_P Parameter: Temperature (deg C) Value: 42 vs. 22
  misc_feature: MA Experiment 20000113 PARAMETER Experiment Name: At_42deg_Heat_cDNA_P Parameter: Timepoint (hr) Value: 8
  misc_feature: MA Experiment 20000113 PARAMETER Experiment Name: At_42deg_Heat_cDNA_P Parameter: Tissue Value: Aerial
  misc_feature: MA Experiment ID: 20000173 Result: Down-regulated in Transcription
  misc_feature: MA Experiment 20000173 PARAMETER Experiment Name: At_42deg_Heat_P Parameter: Age (day) Value: 14
  misc_feature: MA Experiment 20000173 PARAMETER Experiment Name: At_42deg_Heat_P Parameter: Organism Value: A. thaliana
  misc_feature: MA Experiment 20000173 PARAMETER Experiment Name: At_42deg_Heat_P Parameter: Plant Line Value: WS
  misc_feature: MA Experiment 20000173 PARAMETER Experiment Name: At_42deg_Heat_P Parameter: Temperature (deg C) Value: 42 vs. 22
  misc_feature: MA Experiment 20000173 PARAMETER Experiment Name: At_42deg_Heat_P Parameter: Timepoint (hr) Value: 6
  misc_feature: MA Experiment 20000173 PARAMETER Experiment Name: At_42deg_Heat_P Parameter: Tissue Value: Aerial
  misc_feature: MA Experiment ID: 20000224 Result: Up-regulated in Transcription
  misc_feature: MA Experiment ID: 20000496 Result: Up-regulated in Transcription
  misc_feature: MA Experiment 20000496 PARAMETER Experiment Name: At_Guard_Cells_P Parameter: Harvest Date Value: 7/19/2002
  misc_feature: MA Experiment 20000496 PARAMETER Experiment Name: At_Guard_Cells_P Parameter: Organism Value: Canola
  misc_feature: MA Experiment 20000496 PARAMETER Experiment Name: At_Guard_Cells_P Parameter: Tissue Value: Guard Cells vs. Leaves
  misc_feature: MA Experiment ID: 20000573 Result: Down-regulated in Transcription
  misc_feature: MA Experiment 20000573 PARAMETER Experiment Name: At_100uM_ABA_Mutants__P Parameter: Organism Value: A. thaliana
  misc_feature: MA Experiment 20000573 PARAMETER Experiment Name: At_100uM_ABA_Mutants__P Parameter: Plant Line Value: CS22 vs. Ler wt
  misc_feature: MA Experiment 20000573 PARAMETER Experiment Name: At_100uM_ABA_Mutants__P Parameter: Timepoint (hr) Value: N/A
  misc_feature: MA Experiment 20000573 PARAMETER Experiment Name: At_100uM_ABA_Mutants__P Parameter: Tissue Value: Whole Plant
  misc_feature: MA Experiment 20000573 PARAMETER Experiment Name: At_100uM_ABA_Mutants__P Parameter: Treatment Value: None
  misc_feature: MA Experiment ID: 20001248 Result: Down-regulated in Transcription
  misc_feature: MA Experiment 20001248 PARAMETER Experiment Name: At_Far-red-induction_P Parameter: Age (day) Value: 7
  misc_feature: MA Experiment 20001248 PARAMETER Experiment Name: At_Far-red-induction_P Parameter: Light Value: Far-red vs. White
  misc_feature: MA Experiment 20001248 PARAMETER Experiment Name: At_Far-red-induction_P Parameter: Organism Value: A. thaliana
  misc_feature: MA Experiment 20001248 PARAMETER Experiment Name: At_Far-red-induction_P Parameter: Plant Line Value: Columbia
  misc_feature: MA Experiment 20001248 PARAMETER Experiment Name: At_Far-red-induction_P Parameter: Timepoint (hr) Value: 4
  misc_feature: MA Experiment 20001248 PARAMETER Experiment Name: At_Far-red-induction_P Parameter: Tissue Value: Whole Plant
  misc_feature: MA Experiment ID: 20001905 Result: Down-regulated in Transcription
  misc_feature: MA Experiment 20001905 PARAMETER Experiment Name: At_Drought_Reproduction_P Parameter: Age (day) Value: 40
  misc_feature: MA Experiment 20001905 PARAMETER Experiment Name: At_Drought_Reproduction_P Parameter: Organism Value: A. thaliana
  misc_feature: MA Experiment 20001905 PARAMETER Experiment Name: At_Drought_Reproduction_P Parameter: Plant Line Value: WS
  misc_feature: MA Experiment 20001905 PARAMETER Experiment Name: At_Drought_Reproduction_P Parameter: Timepoint (day) Value: 10
  misc_feature: MA Experiment 20001905 PARAMETER Experiment Name: At_Drought_Reproduction_P Parameter: Tissue Value: Rosettes
  misc_feature: MA Experiment 20001905 PARAMETER Experiment Name: At_Drought_Reproduction_P Parameter: Treatment Value: Drought vs. No Drought

SEQ ID NO: 41592 - protein, 540 aa, Arabidopsis thaliana; identical to SEQ ID NO: 37383
  peptide (1)..(540): Ceres Seq. ID no. 13497277
  misc_feature (272)..(328): Pfam Name: RNA recognition motif. (a.k.a. RRM, RBD, or RNP domain) Pfam Description: RNA recognition motif. (a.k.a. RRM, RBD, or RNP
  misc_feature (272)..(328): Pfam Name: RNA recognition motif. (a.k.a. RRM, RBD, or RNP domain) Pfam Description: RNA recognition motif. (a.k.a. RRM, RBD, or RNP
  misc_feature (435)..(521): Homolog of NCBI NO: 38230504 NR Description: predicted protein [Populus alba x Populus tremula]
  misc_feature (1)..(147): Homolog of NCBI NO: 38230504 NR Description: predicted protein [Populus alba x Populus tremula]
  misc_feature (176)..(424): Homolog of NCBI NO: 38230504 NR Description: predicted protein [Populus alba x Populus tremula]
  misc_feature (375)..(423): Homolog of NCBI NO: 15229435 NR Description: RNA recognition motif (RRM)-containing protein
  misc_feature (1)..(61): Homolog of NCBI NO: 15229435 NR Description: RNA recognition motif (RRM)-containing protein
  misc_feature (435)..(521): Homolog of NCBI NO: 38230504 NR Description: predicted protein [Populus alba x Populus tremula]
  misc_feature (176)..(424): Homolog of NCBI NO: 38230504 NR Description: predicted protein [Populus alba x Populus tremula]
  misc_feature (1)..(61): Homolog of NCBI NO: 15229435 NR Description: RNA recognition motif (RRM)-containing protein
  misc_feature (1)..(540): Homolog of NCBI NO: 15231090 NR Description: RNA recognition motif (RRM)-containing protein
  misc_feature (1)..(540): Homolog of NCBI NO: 19423979 NR Description: unknown protein [Arabidopsis thaliana]
  misc_feature (1)..(540): Homolog of NCBI NO: 21594547 NR Description: unknown [Arabidopsis thaliana]
  misc_feature (174)..(357): Homolog of NCBI NO: 15229435 NR Description: RNA recognition motif (RRM)-containing protein
  misc_feature (447)..(540): Homolog of NCBI NO: 15229435 NR Description: RNA recognition motif (RRM)-containing protein
  misc_feature (375)..(423): Homolog of NCBI NO: 15229435 NR Description: RNA recognition motif (RRM)-containing protein
  misc_feature (1)..(147): Homolog of NCBI NO: 38230504 NR Description: predicted protein [Populus alba x Populus tremula]
  misc_feature (447)..(540): Homolog of NCBI NO: 15229435 NR Description: RNA recognition motif (RRM)-containing protein
  misc_feature (174)..(357): Homolog of NCBI NO: 15229435 NR Description: RNA recognition motif (RRM)-containing protein
  misc_feature (1)..(540): Homolog of NCBI NO: 21594547 NR Description: unknown [Arabidopsis thaliana]
  misc_feature (1)..(540): Homolog of NCBI NO: 19423979 NR Description: unknown protein [Arabidopsis thaliana]
  misc_feature (1)..(540): Homolog of NCBI NO: 15231090 NR Description: RNA recognition motif (RRM)-containing protein

SEQ ID NO: 41593 - protein, 515 aa, Arabidopsis thaliana; identical to SEQ ID NO: 37384
  peptide (1)..(515): Ceres Seq. ID no. 13497278
  misc_feature (247)..(303): Pfam Name: RNA recognition motif. (a.k.a. RRM, RBD, or RNP domain) Pfam Description: RNA recognition motif. (a.k.a. RRM, RBD, or RNP
  misc_feature (247)..(303): Pfam Name: RNA recognition motif. (a.k.a. RRM, RBD, or RNP domain) Pfam Description: RNA recognition motif. (a.k.a. RRM, RBD, or RNP
  misc_feature (410)..(496): Homolog of NCBI NO: 38230504 NR Description: predicted protein [Populus alba x Populus tremula]
  misc_feature (1)..(122): Homolog of NCBI NO: 38230504 NR Description: predicted protein [Populus alba x Populus tremula]
  misc_feature (151)..(399): Homolog of NCBI NO: 38230504 NR Description: predicted protein [Populus alba x Populus tremula]
  misc_feature (350)..(398): Homolog of NCBI NO: 15229435 NR Description: RNA recognition motif (RRM)-containing protein
  misc_feature (1)..(36): Homolog of NCBI NO: 15229435 NR Description: RNA recognition motif (RRM)-containing protein
  misc_feature (410)..(496): Homolog of NCBI NO: 38230504 NR Description: predicted protein [Populus alba x Populus tremula]
  misc_feature (151)..(399): Homolog of NCBI NO: 38230504 NR Description: predicted protein [Populus alba x Populus tremula]
  misc_feature (1)..(36): Homolog of NCBI NO: 15229435 NR Description: RNA recognition motif (RRM)-containing protein
  misc_feature (1)..(515): Homolog of NCBI NO: 15231090 NR Description: RNA recognition motif (RRM)-containing protein
  misc_feature (1)..(515): Homolog of NCBI NO: 19423979 NR Description: unknown protein [Arabidopsis thaliana]
  misc_feature (1)..(515): Homolog of NCBI NO: 21594547 NR Description: unknown [Arabidopsis thaliana]
  misc_feature (149)..(332): Homolog of NCBI NO: 15229435 NR Description: RNA recognition motif (RRM)-containing protein
  misc_feature (422)..(515): Homolog of NCBI NO: 15229435 NR Description: RNA recognition motif (RRM)-containing protein
  misc_feature (350)..(398): Homolog of NCBI NO: 15229435 NR Description: RNA recognition motif (RRM)-containing protein
  misc_feature (1)..(122): Homolog of NCBI NO: 38230504 NR Description: predicted protein [Populus alba x Populus tremula]
  misc_feature (422)..(515): Homolog of NCBI NO: 15229435 NR Description: RNA recognition motif (RRM)-containing protein
  misc_feature (149)..(332): Homolog of NCBI NO: 15229435 NR Description: RNA recognition motif (RRM)-containing protein
  misc_feature (1)..(515): Homolog of NCBI NO: 21594547 NR Description: unknown [Arabidopsis thaliana]
  misc_feature (1)..(515): Homolog of NCBI NO: 19423979 NR Description: unknown protein [Arabidopsis thaliana]
  misc_feature (1)..(515): Homolog of NCBI NO: 15231090 NR Description: RNA recognition motif (RRM)-containing protein

SEQ ID NO: 41594 - protein, 502 aa, Arabidopsis thaliana; identical to SEQ ID NO: 37385
  peptide (1)..(502): Ceres Seq. ID no. 13497279
  misc_feature (234)..(290): Pfam Name: RNA recognition motif. (a.k.a. RRM, RBD, or RNP domain) Pfam Description: RNA recognition motif. (a.k.a. RRM, RBD, or RNP
  misc_feature (234)..(290): Pfam Name: RNA recognition motif. (a.k.a. RRM, RBD, or RNP domain) Pfam Description: RNA recognition motif. (a.k.a. RRM, RBD, or RNP
  misc_feature (397)..(483): Homolog of NCBI NO: 38230504 NR Description: predicted protein [Populus alba x Populus tremula]
  misc_feature (1)..(109): Homolog of NCBI NO: 38230504 NR Description: predicted protein [Populus alba x Populus tremula]
  misc_feature (138)..(386): Homolog of NCBI NO: 38230504 NR Description: predicted protein [Populus alba x Populus tremula]
  misc_feature (337)..(385): Homolog of NCBI NO: 15229435 NR Description: RNA recognition motif (RRM)-containing protein
  misc_feature (1)..(23): Homolog of NCBI NO: 15229435 NR Description: RNA recognition motif (RRM)-containing protein
  misc_feature (397)..(483): Homolog of NCBI NO: 38230504 NR Description: predicted protein [Populus alba x Populus tremula]
  misc_feature (138)..(386): Homolog of NCBI NO: 38230504 NR Description: predicted protein [Populus alba x Populus tremula]
  misc_feature (1)..(23): Homolog of NCBI NO: 15229435 NR Description: RNA recognition motif (RRM)-containing protein
  misc_feature (1)..(502): Homolog of NCBI NO: 15231090 NR Description: RNA recognition motif (RRM)-containing protein
  misc_feature (1)..(502): Homolog of NCBI NO: 19423979 NR Description: unknown protein [Arabidopsis thaliana]
  misc_feature (1)..(502): Homolog of NCBI NO: 21594547 NR Description: unknown [Arabidopsis thaliana]
  misc_feature (136)..(319): Homolog of NCBI NO: 15229435 NR Description: RNA recognition motif (RRM)-containing protein
  misc_feature (409)..(502): Homolog of NCBI NO: 15229435 NR Description: RNA recognition motif (RRM)-containing protein
  misc_feature (337)..(385): Homolog of NCBI NO: 15229435 NR Description: RNA recognition motif (RRM)-containing protein
  misc_feature (1)..(109): Homolog of NCBI NO: 38230504 NR Description: predicted protein [Populus alba x Populus tremula]
  misc_feature (409)..(502): Homolog of NCBI NO: 15229435 NR Description: RNA recognition motif (RRM)-containing protein
  misc_feature (136)..(319): Homolog of NCBI NO: 15229435 NR Description: RNA recognition motif (RRM)-containing protein
  misc_feature (1)..(502): Homolog of NCBI NO: 21594547 NR Description: unknown [Arabidopsis thaliana]
  misc_feature (1)..(502): Homolog of NCBI NO: 19423979 NR Description: unknown protein [Arabidopsis thaliana]
  misc_feature (1)..(502): Homolog of NCBI NO: 15231090 NR Description: RNA recognition motif (RRM)-containing protein

SEQ ID NO: 41595 - DNA, 1440 bp, Arabidopsis thaliana
  misc_feature (1)..(1440): Ceres Seq. ID no. 12329401
  misc_feature: MA Experiment ID: 108435 Result: Down-regulated in Transcription
  misc_feature: MA Experiment 108435 PARAMETER Experiment Name: At_stm_Mutants_cDNA_P Parameter: Plant Line Value: wt Landsburg vs stm
  misc_feature: MA Experiment 108435 PARAMETER Experiment Name: At_stm_Mutants_cDNA_P Parameter: Tissue Value: Shoot Apical Meristem Region
  misc_feature: MA Experiment ID: 108461 Result: Up-regulated in Transcription
  misc_feature: MA Experiment 108461 PARAMETER Experiment Name: At_Germinating_Seeds_cDNA_P Parameter: Age (day) Value: 1 vs. 0
  misc_feature: MA Experiment 108461 PARAMETER Experiment Name: At_Germinating_Seeds_cDNA_P Parameter: Tissue Value: Germinating Seeds
  misc_feature: MA Experiment ID: 108462 Result: Up-regulated in Transcription
  misc_feature: MA Experiment 108462 PARAMETER Experiment Name: At_Germinating_Seeds_cDNA_P Parameter: Age (day) Value: 2 vs. 0
  misc_feature: MA Experiment 108462 PARAMETER Experiment Name: At_Germinating_Seeds_cDNA_P Parameter: Tissue Value: Germinating Seeds
  misc_feature: MA Experiment ID: 108463 Result: Up-regulated in Transcription
  misc_feature: MA Experiment 108463 PARAMETER Experiment Name: At_Germinating_Seeds_cDNA_P Parameter: Age (day) Value: 3 vs. 0
  misc_feature: MA Experiment 108463 PARAMETER Experiment Name: At_Germinating_Seeds_cDNA_P Parameter: Tissue Value: Germinating Seeds
  misc_feature: MA Experiment ID: 108464 Result: Up-regulated in Transcription
  misc_feature: MA Experiment 108464 PARAMETER Experiment Name: At_Germinating_Seeds_cDNA_P Parameter: Age (day) Value: 4 vs. 0
  misc_feature: MA Experiment 108464 PARAMETER Experiment Name: At_Germinating_Seeds_cDNA_P Parameter: Tissue Value: Germinating Seeds
  misc_feature: MA Experiment ID: 108577 Result: Down-regulated in Transcription
  misc_feature: MA Experiment 108577 PARAMETER Experiment Name: At_42deg_Heat_cDNA_P Parameter: Temperature (deg C) Value: 42 vs. 22
  misc_feature: MA Experiment 108577 PARAMETER Experiment Name: At_42deg_Heat_cDNA_P Parameter: Timepoint (hr) Value: 6
  misc_feature: MA Experiment 108577 PARAMETER Experiment Name: At_42deg_Heat_cDNA_P Parameter: Tissue Value: Aerial
  misc_feature: MA Experiment ID: 108585 Result: Down-regulated in Transcription
  misc_feature: MA Experiment 108585 PARAMETER Experiment Name: At_5mM_NaNP_cDNA_P Parameter: Timepoint (hr) Value: 6
  misc_feature: MA Experiment 108585 PARAMETER Experiment Name: At_5mM_NaNP_cDNA_P Parameter: Tissue Value: Aerial
  misc_feature: MA Experiment 108585 PARAMETER Experiment Name: At_5mM_NaNP_cDNA_P Parameter: Treatment Value: null
  misc_feature: MA Experiment ID: 108594 Result: Down-regulated in Transcription
  misc_feature: MA Experiment 108594 PARAMETER Experiment Name: At_Ler-rhl_Root_cDNA_P Parameter: Plant Line Value: null
  misc_feature: MA Experiment ID: 108595 Result: Down-regulated in Transcription
  misc_feature: MA Experiment 108595 PARAMETER Experiment Name: At_Ler-pi_Ovule_cDNA_P Parameter: Plant Line Value: null
  misc_feature: MA Experiment ID: 20000070 Result: Down-regulated in Transcription
  misc_feature: MA Experiment 20000070 PARAMETER Experiment Name: At_100uM_ABA_Mutants_cDNA_P Parameter: Plant Line Value: CS24
  misc_feature: MA Experiment 20000070 PARAMETER Experiment Name: At_100uM_ABA_Mutants_cDNA_P Parameter: Timepoint (hr) Value: 6
  misc_feature: MA Experiment 20000070 PARAMETER Experiment Name: At_100uM_ABA_Mutants_cDNA_P Parameter: Tissue Value: Aerial
  misc_feature: MA Experiment 20000070 PARAMETER Experiment Name: At_100uM_ABA_Mutants_cDNA_P Parameter: Treatment Value: 100uM ABA vs. No Treatment
  misc_feature: MA Experiment ID: 20000071 Result: Down-regulated in Transcription
  misc_feature: MA Experiment 20000071 PARAMETER Experiment Name: At_100uM_ABA_Mutants_cDNA_P Parameter: Plant Line Value: CS8104
  misc_feature: MA Experiment 20000071 PARAMETER Experiment Name: At_100uM_ABA_Mutants_cDNA_P Parameter: Timepoint (hr) Value: 6
  misc_feature: MA Experiment 20000071 PARAMETER Experiment Name: At_100uM_ABA_Mutants_cDNA_P Parameter: Tissue Value: Aerial
  misc_feature: MA Experiment 20000071 PARAMETER Experiment Name: At_100uM_ABA_Mutants_cDNA_P Parameter: Treatment Value: 100uM ABA vs. No Treatment
  misc_feature: MA Experiment ID: 20000111 Result: Down-regulated in Transcription
  misc_feature: MA Experiment 20000111 PARAMETER Experiment Name: At_42deg_Heat_cDNA_P Parameter: Temperature (deg C) Value: 42 vs. 22
  misc_feature: MA Experiment 20000111 PARAMETER Experiment Name: At_42deg_Heat_cDNA_P Parameter: Timepoint (hr) Value: 6
  misc_feature: MA Experiment 20000111 PARAMETER Experiment Name: At_42deg_Heat_cDNA_P Parameter: Tissue Value: Aerial
  misc_feature: MA Experiment ID: 20000112 Result: Down-regulated in Transcription
  misc_feature: MA Experiment 20000112 PARAMETER Experiment Name: At_42deg_Heat_cDNA_P Parameter: Temperature (deg C) Value: 42 vs. 22
  misc_feature: MA Experiment 20000112 PARAMETER Experiment Name: At_42deg_Heat_cDNA_P Parameter: Timepoint (hr) Value: 2
  misc_feature: MA Experiment 20000112 PARAMETER Experiment Name: At_42deg_Heat_cDNA_P Parameter: Tissue Value: Aerial
  misc_feature: MA Experiment ID: 20000113 Result: Down-regulated in Transcription
  misc_feature: MA Experiment 20000113 PARAMETER Experiment Name: At_42deg_Heat_cDNA_P Parameter: Temperature (deg C) Value: 42 vs. 22
  misc_feature: MA Experiment 20000113 PARAMETER Experiment Name: At_42deg_Heat_cDNA_P Parameter: Timepoint (hr) Value: 8
  misc_feature: MA Experiment 20000113 PARAMETER Experiment Name: At_42deg_Heat_cDNA_P Parameter: Tissue Value: Aerial
  misc_feature: MA Experiment ID: 20000117 Result: Down-regulated in Transcription
  misc_feature: MA Experiment 20000117 PARAMETER Experiment Name: At_100uM_ABA_Mutants_cDNA_P Parameter: Plant Line Value: Columbia
  misc_feature: MA Experiment 20000117 PARAMETER Experiment Name: At_100uM_ABA_Mutants_cDNA_P Parameter: Timepoint (hr) Value: 6
  misc_feature: MA Experiment 20000117 PARAMETER Experiment Name: At_100uM_ABA_Mutants_cDNA_P Parameter: Tissue Value: Aerial
  misc_feature: MA Experiment 20000117 PARAMETER Experiment Name: At_100uM_ABA_Mutants_cDNA_P Parameter: Treatment Value: 100uM ABA vs. No Treatment
  misc_feature: MA Experiment ID: 20000173 Result: Down-regulated in Transcription
  misc_feature: MA Experiment 20000173 PARAMETER Experiment Name: At_42deg_Heat_P Parameter: Age (day) Value: 14
  misc_feature: MA Experiment 20000173 PARAMETER Experiment Name: At_42deg_Heat_P Parameter: Organism Value: A. thaliana
  misc_feature: MA Experiment 20000173 PARAMETER Experiment Name: At_42deg_Heat_P Parameter: Plant Line Value: WS
  misc_feature: MA Experiment 20000173 PARAMETER Experiment Name: At_42deg_Heat_P Parameter: Temperature (deg C) Value: 42 vs. 22
  misc_feature: MA Experiment 20000173 PARAMETER Experiment Name: At_42deg_Heat_P Parameter: Timepoint (hr) Value: 6
  misc_feature: MA Experiment 20000173 PARAMETER Experiment Name: At_42deg_Heat_P Parameter: Tissue Value: Aerial
  misc_feature: MA Experiment ID: 20000179 Result: Up-regulated in Transcription
  misc_feature: MA Experiment 20000179 PARAMETER Experiment Name: At_Germinating_Seeds_P Parameter: Age (hr) Value: 6 vs. 0
  misc_feature: MA Experiment 20000179 PARAMETER Experiment Name: At_Germinating_Seeds_P Parameter: Tissue Value: Germinating Seeds
  misc_feature: MA Experiment ID: 20000180 Result: Up-regulated in Transcription
  misc_feature: MA Experiment 20000180 PARAMETER Experiment Name: At_Germinating_Seeds_P Parameter: Age (hr) Value: 24 vs. 0
  misc_feature: MA Experiment 20000180 PARAMETER Experiment Name: At_Germinating_Seeds_P Parameter: Tissue Value: Germinating Seeds
  misc_feature: MA Experiment ID: 20000182 Result: Down-regulated in Transcription
  misc_feature: MA Experiment 20000182 PARAMETER Experiment Name: At_2mM_SA_P Parameter: Age (day) Value: 14
  misc_feature: MA Experiment 20000182 PARAMETER Experiment Name: At_2mM_SA_P Parameter: Organism Value: A. thaliana
  misc_feature: MA Experiment 20000182 PARAMETER Experiment Name: At_2mM_SA_P Parameter: Plant Line Value: WS
  misc_feature: MA Experiment 20000182 PARAMETER Experiment Name: At_2mM_SA_P Parameter: Timepoint (hr) Value: 6
  misc_feature: MA Experiment 20000182 PARAMETER Experiment Name: At_2mM_SA_P Parameter: Tissue Value: Aerial
  misc_feature: MA Experiment 20000182 PARAMETER Experiment Name: At_2mM_SA_P Parameter: Treatment Value: 2mM SA vs. No Treatment
  misc_feature: MA Experiment ID: 20000224 Result: Down-regulated in Transcription
  misc_feature: MA Experiment ID: 20000227 Result: Down-regulated in Transcription
  misc_feature: MA Experiment 20000227 PARAMETER Experiment Name: At_Root-Tips-vs-Tops_P Parameter: Tissue Value: Root Tips vs. Root Tops
  misc_feature: MA Experiment ID: 20000265 Result: Up-regulated in Transcription
  misc_feature: MA Experiment 20000265 PARAMETER Experiment Name: At_Open_Flower_P Parameter: Age (day) Value: 21
  misc_feature: MA Experiment 20000265 PARAMETER Experiment Name: At_Open_Flower_P Parameter: Plant Line Value: WS
  misc_feature: MA Experiment 20000265 PARAMETER Experiment Name: At_Open_Flower_P Parameter: Tissue Value: Closed Flower vs. Whole Plant
  misc_feature: MA Experiment ID: 20000438 Result: Up-regulated in Transcription
  misc_feature: MA Experiment 20000438 PARAMETER Experiment Name: At_Shoots__P Parameter: Age (day) Value: 14
  misc_feature: MA Experiment 20000438 PARAMETER Experiment Name: At_Shoots__P Parameter: Tissue Value: Shoots vs. Whole Plant
  misc_feature: MA Experiment ID: 20000794 Result: Down-regulated in Transcription
  misc_feature: MA Experiment 20000794 PARAMETER Experiment Name: At_Petals_P Parameter: Age (day) Value: 23-25 days
  misc_feature: MA Experiment 20000794 PARAMETER Experiment Name: At_Petals_P Parameter: Plant Line Value: WS
  misc_feature: MA Experiment 20000794 PARAMETER Experiment Name: At_Petals_P Parameter: Tissue Value: Petals vs. Whole plant
  misc_feature: MA Experiment ID: 20001905 Result: Down-regulated in Transcription
  misc_feature: MA Experiment 20001905 PARAMETER Experiment Name: At_Drought_Reproduction_P Parameter: Age (day) Value: 40
  misc_feature: MA Experiment 20001905 PARAMETER Experiment Name: At_Drought_Reproduction_P Parameter: Organism Value: A. thaliana
  misc_feature: MA Experiment 20001905 PARAMETER Experiment Name: At_Drought_Reproduction_P Parameter: Plant Line Value: WS
  misc_feature: MA Experiment 20001905 PARAMETER Experiment Name: At_Drought_Reproduction_P Parameter: Timepoint (day) Value: 10
  misc_feature: MA Experiment 20001905 PARAMETER Experiment Name: At_Drought_Reproduction_P Parameter: Tissue Value: Rosettes
  misc_feature: MA Experiment 20001905 PARAMETER Experiment Name: At_Drought_Reproduction_P Parameter: Treatment Value: Drought vs. No Drought
aaaagataagatacgaagaacaagagccccctctctctctctcgtccactcacctattgtgtatctcatcatcaccatggacaagacatttttctctagcaacgaagggaaaccaattacatgcaaagcagcaatatgtagaaaagcaggagaagcattggtgattgaagacatccacgtggatccaccccaagcttatgaagttaggattaagattttatgtacttctctatgtcacactgatcttactttctggaaactaagctttggaccaatttcaaggtttcctaggattcttggacacgaagcagtcggcataataacatgtatttgctgtttttattgggattttaaaccagtgtggtcgagagcattggtgaaaacgtggacggatttaaacaagatatgccgaagatttcatatcaaacacaagacgatatggaatggcttcaagattcaaagattcttcaggagaagtgattcatcattttctctttgtctcaggtttttccgaatacaccgtcgtggatattgcacatcttgtcaaaatatctcctgaaatccccgttaataaagcggctttgctcagctgcggtgtctccacaggaattggagcagcttggaaggtggctaacgtggaagaaggctccaccattgcaatttttggccttggtgctgttggacttgcggttgcagaaggagccaggctacgaggagccgcaaagattattggtattgataccaattctgataaattcgagctaggtaagaaatttggttttacggatttcatcaatccgaccttatgcggagaaaagaagattagtgaggtcattaaagaaatgacagaaggaggagttgactatagtttcgaatgcgttggcttagcttctttacttaacgaggctttcatcagtacccgcacgggaacaggtaaaactgtaatgttggggatggagaagcatgcagcgccaattagtttgggtagttttgatcttttaagaggcagagttatttgcggaagcttgttcggtggtctgaaatccaaacttgatattcccattctagtggatcattacctaaaaaaggagctcaatctggatagtttcattacacacgaactgaatttcaaagaaattaataaggctttcgctttattagaggaaggaaagtctctccgctgcattctatggatggataagtaactatccagcttcatatttgcactttataatcttctcgtggatcttgtttagattatcttcctttgtctttcaagatgctttgtcttgttaccttgcaatttttgttctttccacacgagctacaaacttatcatttggtagtccaaaccccttaacattgtgttttctgatggttacaaatattatgacaccttgtatttgttgatcaatgatcattatagtactaattgcttcc

SEQ ID NO: 41596 - protein, 253 aa, Arabidopsis thaliana
  peptide (1)..(253): Ceres Seq. ID no. 12329402
  misc_feature (3)..(253): Homolog of NCBI NO: 1076580 NR Description: probable alcohol dehydrogenase (EC 1.1.1.1) ADH3b
  misc_feature (3)..(253): Homolog of NCBI NO: 7705215 NR Description: alcohol dehydrogenase ADH [Lycopersicon
  misc_feature (1)..(251): Homolog of NCBI NO: 15238330 NR Description: alcohol dehydrogenase
  misc_feature (3)..(253): Homolog of NCBI NO: 1076579 NR Description: probable alcohol dehydrogenase (EC 1.1.1.1) ADH3a
  misc_feature (3)..(253): Homolog of NCBI NO: 7705214 NR Description: alcohol dehydrogenase ADH [Lycopersicon
  misc_feature (1)..(253): Homolog of NCBI NO: 11250327 NR Description: probable alcohol dehydrogenase (EC 1.1.1.1)
  misc_feature (1)..(253): Homolog of NCBI NO: 15219884 NR Description: alcohol dehydrogenase ADH, putative; protein id:
  misc_feature (1)..(253): Homolog of NCBI NO: 21618210 NR Description: alcohol dehydrogenase like protein [Arabidopsis
  misc_feature (1)..(253): Homolog of NCBI NO: 18415840 NR Description: alcohol dehydrogenase like protein
  misc_feature (1)..(253): Homolog of NCBI NO: 15219882 NR Description: alcohol dehydrogenase ADH, putative
MASRFKDSSGEVIHHFLFVSGFSEYTVVDIAHLVKISPEIPVNKAALLSCGVSTGIGAAWKVANVEEGSTIAIFGLGAVGLAVAEGARLRGAAKIIGIDTNSDKFELGKKFGFTDFINPTLCGEKKISEVIKEMTEGGVDYSFECVGLASLLNEAFISTRTGTGKTVMLGMEKHAAPISLGSFDLLRGRVICGSLFGGLKSKLDIPILVDHYLKKELNLDSFITHELNFKEINKAFALLEEGKSLRCILWMDK

SEQ ID NO: 41597 - protein, 185 aa, Arabidopsis thaliana
  peptide (1)..(185): Ceres Seq. ID no. 12329403
  misc_feature (32)..(110): Homolog of NCBI NO: 1076580 NR Description: probable alcohol dehydrogenase (EC 1.1.1.1) ADH3b
  misc_feature (32)..(110): Homolog of NCBI NO: 7705215 NR Description: alcohol dehydrogenase ADH [Lycopersicon
  misc_feature (37)..(110): Homolog of NCBI NO: 15238330 NR Description: alcohol dehydrogenase
  misc_feature (28)..(110): Homolog of NCBI NO: 1076579 NR Description: probable alcohol dehydrogenase (EC 1.1.1.1) ADH3a
  misc_feature (28)..(110): Homolog of NCBI NO: 7705214 NR Description: alcohol dehydrogenase ADH [Lycopersicon
  misc_feature (26)..(110): Homolog of NCBI NO: 11250327 NR Description: probable alcohol dehydrogenase (EC 1.1.1.1)
  misc_feature (26)..(110): Homolog of NCBI NO: 15219884 NR Description: alcohol dehydrogenase ADH, putative; protein id:
  misc_feature (31)..(110): Homolog of NCBI NO: 21618210 NR Description: alcohol dehydrogenase like protein [Arabidopsis
  misc_feature (26)..(110): Homolog of NCBI NO: 18415840 NR Description: alcohol dehydrogenase like protein
  misc_feature (26)..(110): Homolog of NCBI NO: 15219882 NR Description: alcohol dehydrogenase ADH, putative
KDKIRRTRAPSLSLVHSPIVYLIITMDKTFFSSNEGKPITCKAAICRKAGEALVIEDIHVDPPQAYEVRIKILCTSLCHTDLTFWKLSFGPISRFPRILGHEAVGIITCICCFYWDFKPVWSRALVKTWTDLNKICRRFHIKHKTIWNGFKIQRFFRRSDSSFSLCLRFFRIHRRGYCTSCQNIS

SEQ ID NO: 41598 - protein, 160 aa, Arabidopsis thaliana
  peptide (1)..(160): Ceres Seq. ID no. 12329404
  misc_feature (7)..(85): Homolog of NCBI NO: 1076580 NR Description: probable alcohol dehydrogenase (EC 1.1.1.1) ADH3b
  misc_feature (7)..(85): Homolog of NCBI NO: 7705215 NR Description: alcohol dehydrogenase ADH [Lycopersicon
  misc_feature (12)..(85): Homolog of NCBI NO: 15238330 NR Description: alcohol dehydrogenase
  misc_feature (3)..(85): Homolog of NCBI NO: 1076579 NR Description: probable alcohol dehydrogenase (EC 1.1.1.1) ADH3a
  misc_feature (3)..(85): Homolog of NCBI NO: 7705214 NR Description: alcohol dehydrogenase ADH [Lycopersicon
  misc_feature (1)..(85): Homolog of NCBI NO: 11250327 NR Description: probable alcohol dehydrogenase (EC 1.1.1.1)
  misc_feature (1)..(85): Homolog of NCBI NO: 15219884 NR Description: alcohol dehydrogenase ADH, putative; protein id:
  misc_feature (6)..(85): Homolog of NCBI NO: 21618210 NR Description: alcohol dehydrogenase like protein [Arabidopsis
  misc_feature (1)..(85): Homolog of NCBI NO: 18415840 NR Description: alcohol dehydrogenase like protein
  misc_feature (1)..(85): Homolog of NCBI NO: 15219882 NR Description: alcohol dehydrogenase ADH, putative
MDKTFFSSNEGKPITCKAAICRKAGEALVIEDIHVDPPQAYEVRIKILCTSLCHTDLTFWKLSFGPISRFPRILGHEAVGIITCICCFYWDFKPVWSRALVKTWTDLNKICRRFHIKHKTIWNGFKIQRFFRRSDSSFSLCLRFFRIHRRGYCTSCQNIS

SEQ ID NO: 41599 - DNA, 1445 bp, Arabidopsis thaliana
  misc_feature (1)..(1445): Ceres Seq. ID no. 13488594
  misc_feature: MA Experiment ID: 108435 Result: Down-regulated in Transcription
  misc_feature: MA Experiment 108435 PARAMETER Experiment Name: At_stm_Mutants_cDNA_P Parameter: Plant Line Value: wt Landsburg vs stm
  misc_feature: MA Experiment 108435 PARAMETER Experiment Name: At_stm_Mutants_cDNA_P Parameter: Tissue Value: Shoot Apical Meristem Region
  misc_feature: MA Experiment ID: 108462 Result: Up-regulated in Transcription
  misc_feature: MA Experiment 108462 PARAMETER Experiment Name: At_Germinating_Seeds_cDNA_P Parameter: Age (day) Value: 2 vs. 0
  misc_feature: MA Experiment 108462 PARAMETER Experiment Name: At_Germinating_Seeds_cDNA_P Parameter: Tissue Value: Germinating Seeds
  misc_feature: MA Experiment ID: 108463 Result: Up-regulated in Transcription
  misc_feature: MA Experiment 108463 PARAMETER Experiment Name: At_Germinating_Seeds_cDNA_P Parameter: Age (day) Value: 3 vs. 0
  misc_feature: MA Experiment 108463 PARAMETER Experiment Name: At_Germinating_Seeds_cDNA_P Parameter: Tissue Value: Germinating Seeds
  misc_feature: MA Experiment ID: 108464 Result: Up-regulated in Transcription
  misc_feature: MA Experiment 108464 PARAMETER Experiment Name: At_Germinating_Seeds_cDNA_P Parameter: Age (day) Value: 4 vs. 0
  misc_feature: MA Experiment 108464 PARAMETER Experiment Name: At_Germinating_Seeds_cDNA_P Parameter: Tissue Value: Germinating Seeds
  misc_feature: MA Experiment ID: 108561 Result: Down-regulated in Transcription
  misc_feature: MA Experiment 108561 PARAMETER Experiment Name: At_100uM_ABA_cDNA_P Parameter: Timepoint (hr) Value: 6
  misc_feature: MA Experiment 108561 PARAMETER Experiment Name: At_100uM_ABA_cDNA_P Parameter: Tissue Value: Aerial
  misc_feature: MA Experiment 108561 PARAMETER Experiment Name: At_100uM_ABA_cDNA_P Parameter: Treatment Value: 100uM ABA vs. No Treatment
  misc_feature: MA Experiment ID: 108573 Result: Down-regulated in Transcription
  misc_feature: MA Experiment 108573 PARAMETER Experiment Name: At_Drought_cDNA_P Parameter: Timepoint (hr) Value: 6
  misc_feature: MA Experiment 108573 PARAMETER Experiment Name: At_Drought_cDNA_P Parameter: Tissue Value: Aerial
  misc_feature: MA Experiment 108573 PARAMETER Experiment Name: At_Drought_cDNA_P Parameter: Treatment Value: Drought vs. No Drought
  misc_feature: MA Experiment ID: 108579 Result: Up-regulated in Transcription
  misc_feature: MA Experiment 108579 PARAMETER Experiment Name: At_4deg_Cold_cDNA_P Parameter: Temperature (deg C) Value: 4 vs. 22
  misc_feature: MA Experiment 108579 PARAMETER Experiment Name: At_4deg_Cold_cDNA_P Parameter: Timepoint (hr) Value: 6
  misc_feature: MA Experiment 108579 PARAMETER Experiment Name: At_4deg_Cold_cDNA_P Parameter: Tissue Value: Aerial
  misc_feature: MA Experiment ID: 108585 Result: Down-regulated in Transcription
  misc_feature: MA Experiment 108585 PARAMETER Experiment Name: At_5mM_NaNP_cDNA_P Parameter: Timepoint (hr) Value: 6
  misc_feature: MA Experiment 108585 PARAMETER Experiment Name: At_5mM_NaNP_cDNA_P Parameter: Tissue Value: Aerial
  misc_feature: MA Experiment 108585 PARAMETER Experiment Name: At_5mM_NaNP_cDNA_P Parameter: Treatment Value: null
  misc_feature: MA Experiment ID: 108595 Result: Down-regulated in Transcription
  misc_feature: MA Experiment 108595 PARAMETER Experiment Name: At_Ler-pi_Ovule_cDNA_P Parameter: Plant Line Value: null
  misc_feature: MA Experiment ID: 108607 Result: Down-regulated in Transcription
  misc_feature: MA Experiment 108607 PARAMETER Experiment Name: At_100uM_ABA_cDNA_P Parameter: Timepoint (hr) Value: 4
  misc_feature: MA Experiment 108607 PARAMETER Experiment Name: At_100uM_ABA_cDNA_P Parameter: Tissue Value: Aerial
  misc_feature: MA Experiment 108607 PARAMETER Experiment Name: At_100uM_ABA_cDNA_P Parameter: Treatment Value: 100uM ABA vs. No Treatment
  misc_feature: MA Experiment ID: 108668 Result: Down-regulated in Transcription
  misc_feature: MA Experiment 108668 PARAMETER Experiment Name: At_2mM_SA_cDNA_P Parameter: Plant Line Value: WS
  misc_feature: MA Experiment 108668 PARAMETER Experiment Name: At_2mM_SA_cDNA_P Parameter: Timepoint (hr) Value: 6
  misc_feature: MA Experiment 108668 PARAMETER Experiment Name: At_2mM_SA_cDNA_P Parameter: Treatment Value: 2mM SA vs. No Treatment
  misc_feature: MA Experiment ID: 20000069 Result: Down-regulated in Transcription
  misc_feature: MA Experiment 20000069 PARAMETER Experiment Name: At_100uM_ABA_Mutants_cDNA_P Parameter: Plant Line Value: CS23
  misc_feature: MA Experiment 20000069 PARAMETER Experiment Name: At_100uM_ABA_Mutants_cDNA_P Parameter: Timepoint (hr) Value: 6
  misc_feature: MA Experiment 20000069 PARAMETER Experiment Name: At_100uM_ABA_Mutants_cDNA_P Parameter: Tissue Value: Aerial
  misc_feature: MA Experiment 20000069 PARAMETER Experiment Name: At_100uM_ABA_Mutants_cDNA_P Parameter: Treatment Value: 100uM ABA vs. No Treatment
  misc_feature: MA Experiment ID: 20000070 Result: Down-regulated in Transcription
  misc_feature: MA Experiment 20000070 PARAMETER Experiment Name: At_100uM_ABA_Mutants_cDNA_P Parameter: Plant Line Value: CS24
  misc_feature: MA Experiment 20000070 PARAMETER Experiment Name: At_100uM_ABA_Mutants_cDNA_P Parameter: Timepoint (hr) Value: 6
  misc_feature: MA Experiment 20000070 PARAMETER Experiment Name: At_100uM_ABA_Mutants_cDNA_P Parameter: Tissue Value: Aerial
  misc_feature: MA Experiment 20000070 PARAMETER Experiment Name: At_100uM_ABA_Mutants_cDNA_P Parameter: Treatment Value: 100uM ABA vs. No Treatment
  misc_feature: MA Experiment ID: 20000071 Result: Down-regulated in Transcription
  misc_feature: MA Experiment 20000071 PARAMETER Experiment Name: At_100uM_ABA_Mutants_cDNA_P Parameter: Plant Line Value: CS8104
  misc_feature: MA Experiment 20000071 PARAMETER Experiment Name: At_100uM_ABA_Mutants_cDNA_P Parameter: Timepoint (hr) Value: 6
  misc_feature: MA Experiment 20000071 PARAMETER Experiment Name: At_100uM_ABA_Mutants_cDNA_P Parameter: Tissue Value: Aerial
  misc_feature: MA Experiment 20000071 PARAMETER Experiment Name: At_100uM_ABA_Mutants_cDNA_P Parameter: Treatment Value: 100uM ABA vs. No Treatment
  misc_feature: MA Experiment ID: 20000072 Result: Down-regulated in Transcription
  misc_feature: MA Experiment 20000072 PARAMETER Experiment Name: At_100uM_ABA_Mutants_cDNA_P Parameter: Plant Line Value: CS8105
  misc_feature: MA Experiment 20000072 PARAMETER Experiment Name: At_100uM_ABA_Mutants_cDNA_P Parameter: Timepoint (hr) Value: 6
  misc_feature: MA Experiment 20000072 PARAMETER Experiment Name: At_100uM_ABA_Mutants_cDNA_P Parameter: Tissue Value: Aerial
  misc_feature: MA Experiment 20000072 PARAMETER Experiment Name: At_100uM_ABA_Mutants_cDNA_P Parameter: Treatment Value: 100uM ABA vs. No Treatment
  misc_feature: MA Experiment ID: 20000086 Result: Down-regulated in Transcription
  misc_feature: MA Experiment 20000086 PARAMETER Experiment Name: At_100uM_ABA_Mutants_cDNA_P Parameter: Plant Line Value: CS22
  misc_feature: MA Experiment 20000086 PARAMETER Experiment Name: At_100uM_ABA_Mutants_cDNA_P Parameter: Timepoint (hr) Value: 6
  misc_feature: MA Experiment 20000086 PARAMETER Experiment Name: At_100uM_ABA_Mutants_cDNA_P Parameter: Tissue Value: Aerial
  misc_feature: MA Experiment 20000086 PARAMETER Experiment Name: At_100uM_ABA_Mutants_cDNA_P Parameter: Treatment Value: 100uM ABA vs. No Treatment
  misc_feature: MA Experiment ID: 20000087 Result: Down-regulated in Transcription
  misc_feature: MA Experiment 20000087 PARAMETER Experiment Name: At_100uM_ABA_Mutants_cDNA_P Parameter: Plant Line Value: WS
  misc_feature: MA Experiment 20000087 PARAMETER Experiment Name: At_100uM_ABA_Mutants_cDNA_P Parameter: Timepoint (hr) Value: 6
  misc_feature: MA Experiment 20000087 PARAMETER Experiment Name: At_100uM_ABA_Mutants_cDNA_P Parameter: Tissue Value: Aerial
  misc_feature: MA Experiment 20000087 PARAMETER Experiment Name: At_100uM_ABA_Mutants_cDNA_P Parameter: Treatment Value: 100uM ABA vs. No Treatment
  misc_feature: MA Experiment ID: 20000088 Result: Down-regulated in Transcription
  misc_feature: MA Experiment 20000088 PARAMETER Experiment Name: At_100uM_ABA_Mutants_cDNA_P Parameter: Plant Line Value: Landsberg
  misc_feature: MA Experiment 20000088 PARAMETER Experiment Name: At_100uM_ABA_Mutants_cDNA_P Parameter: Timepoint (hr) Value: 6
  misc_feature: MA Experiment 20000088 PARAMETER Experiment Name: At_100uM_ABA_Mutants_cDNA_P Parameter: Tissue Value: Aerial
  misc_feature: MA Experiment 20000088 PARAMETER Experiment Name: At_100uM_ABA_Mutants_cDNA_P Parameter: Treatment Value: 100uM ABA vs. No Treatment
  misc_feature: MA Experiment ID: 20000089 Result: Down-regulated in Transcription
  misc_feature: MA Experiment ID: 20000090 Result: Down-regulated in Transcription
  misc_feature: MA Experiment ID: 20000117 Result: Down-regulated in Transcription
  misc_feature: MA Experiment 20000117 PARAMETER Experiment Name: At_100uM_ABA_Mutants_cDNA_P Parameter: Plant Line Value: Columbia
  misc_feature: MA Experiment 20000117 PARAMETER Experiment Name: At_100uM_ABA_Mutants_cDNA_P Parameter: Timepoint (hr) Value: 6
  misc_feature: MA Experiment 20000117 PARAMETER Experiment Name: At_100uM_ABA_Mutants_cDNA_P Parameter: Tissue Value: Aerial
  misc_feature: MA Experiment 20000117 PARAMETER Experiment Name: At_100uM_ABA_Mutants_cDNA_P Parameter: Treatment Value: 100uM ABA vs. No Treatment
  misc_feature: MA Experiment ID: 20000169 Result: Down-regulated in Transcription
  misc_feature: MA Experiment 20000169 PARAMETER Experiment Name: At_100uM_ABA_P Parameter: Age (day) Value: 14
  misc_feature: MA Experiment 20000169 PARAMETER Experiment Name: At_100uM_ABA_P Parameter: Organism Value: A. thaliana
  misc_feature: MA Experiment 20000169 PARAMETER Experiment Name: At_100uM_ABA_P Parameter: Plant Line Value: WS
  misc_feature: MA Experiment 20000169 PARAMETER Experiment Name: At_100uM_ABA_P Parameter: Timepoint (hr) Value: 6
  misc_feature: MA Experiment 20000169 PARAMETER Experiment Name: At_100uM_ABA_P Parameter: Tissue Value: Aerial
  misc_feature: MA Experiment 20000169 PARAMETER Experiment Name: At_100uM_ABA_P Parameter: Treatment Value: 100uM ABA vs. No Treatment
  misc_feature: MA Experiment ID: 20000179 Result: Down-regulated in Transcription
  misc_feature: MA Experiment 20000179 PARAMETER Experiment Name: At_Germinating_Seeds_P Parameter: Age (hr) Value: 6 vs. 0
  misc_feature: MA Experiment 20000179 PARAMETER Experiment Name: At_Germinating_Seeds_P Parameter: Tissue Value: Germinating Seeds
  misc_feature: MA Experiment ID: 20000182 Result: Down-regulated in Transcription
  misc_feature: MA Experiment 20000182 PARAMETER Experiment Name: At_2mM_SA_P Parameter: Age (day) Value: 14
  misc_feature: MA Experiment 20000182 PARAMETER Experiment Name: At_2mM_SA_P Parameter: Organism Value: A. thaliana
  misc_feature: MA Experiment 20000182 PARAMETER Experiment Name: At_2mM_SA_P Parameter: Plant Line Value: WS
  misc_feature: MA Experiment 20000182 PARAMETER Experiment Name: At_2mM_SA_P Parameter: Timepoint (hr) Value: 6
  misc_feature: MA Experiment 20000182 PARAMETER Experiment Name: At_2mM_SA_P Parameter: Tissue Value: Aerial
  misc_feature: MA Experiment 20000182 PARAMETER Experiment Name: At_2mM_SA_P Parameter: Treatment Value: 2mM SA vs. No Treatment
  misc_feature: MA Experiment ID: 20000184 Result: Up-regulated in Transcription
  misc_feature: MA Experiment 20000184 PARAMETER Experiment Name: At_Shoots__P Parameter: Age (day) Value: 7
  misc_feature: MA Experiment 20000184 PARAMETER Experiment Name: At_Shoots__P Parameter: Tissue Value: Shoots vs. Whole Plant
  misc_feature: MA Experiment ID: 20000213 Result: Up-regulated in Transcription
  misc_feature: MA Experiment 20000213 PARAMETER Experiment Name: At_4deg_Cold_P Parameter: Timepoint (hr) Value: 2
  misc_feature: MA Experiment ID: 20000224 Result: Up-regulated in Transcription
  misc_feature: MA Experiment ID: 20000235 Result: Up-regulated in Transcription
  misc_feature: MA Experiment 20000235 PARAMETER Experiment Name: At_Siliques_P Parameter: Age (day) Value: 21
  misc_feature: MA Experiment 20000235 PARAMETER Experiment Name: At_Siliques_P Parameter: Organism Value: A. thaliana
  misc_feature: MA Experiment 20000235 PARAMETER Experiment Name: At_Siliques_P Parameter: Plant Line Value: WS
  misc_feature: MA Experiment 20000235 PARAMETER Experiment Name: At_Siliques_P Parameter: Tissue Value: 5-10mm Siliques vs. Whole Plant
  misc_feature: MA Experiment ID: 20000436 Result: Down-regulated in Transcription
  misc_feature: MA Experiment 20000436 PARAMETER Experiment Name: At_Drought_P Parameter: Age (day) Value: 7
  misc_feature: MA Experiment 20000436 PARAMETER Experiment Name: At_Drought_P Parameter: Organism Value: A. thaliana
  misc_feature: MA Experiment 20000436 PARAMETER Experiment Name: At_Drought_P Parameter: Plant Line Value: WS
  misc_feature: MA Experiment 20000436 PARAMETER Experiment Name: At_Drought_P Parameter: Timepoint (hr) Value: 12
  misc_feature: MA Experiment 20000436 PARAMETER Experiment Name: At_Drought_P Parameter: Tissue Value: Whole Plant
  misc_feature: MA Experiment 20000436 PARAMETER Experiment Name: At_Drought_P Parameter: Treatment Value: Drought vs. No Drought
  misc_feature: MA Experiment ID: 20000437 Result: Down-regulated in Transcription
  misc_feature: MA Experiment 20000437 PARAMETER Experiment Name: At_Drought_P Parameter: Age (day) Value: 8
  misc_feature: MA Experiment 20000437 PARAMETER Experiment Name: At_Drought_P Parameter: Organism Value: A. thaliana
  misc_feature: MA Experiment 20000437 PARAMETER Experiment Name: At_Drought_P Parameter: Plant Line Value: WS
  misc_feature: MA Experiment 20000437 PARAMETER Experiment Name: At_Drought_P Parameter: Timepoint (hr) Value: 24
  misc_feature: MA Experiment 20000437 PARAMETER Experiment Name: At_Drought_P Parameter: Tissue Value: Whole Plant
  misc_feature: MA Experiment 20000437 PARAMETER Experiment Name: At_Drought_P Parameter: Treatment Value: Drought vs. No Drought
  misc_feature: MA Experiment ID: 20000438 Result: Up-regulated in Transcription
  misc_feature: MA Experiment 20000438 PARAMETER Experiment Name: At_Shoots__P Parameter: Age (day) Value: 14
  misc_feature: MA Experiment 20000438 PARAMETER Experiment Name: At_Shoots__P Parameter: Tissue Value: Shoots vs. Whole Plant
  misc_feature: MA Experiment ID: 20000495 Result: Down-regulated in Transcription
  misc_feature: MA Experiment 20000495 PARAMETER Experiment Name: At_Guard_Cells_P Parameter: Harvest Date Value: 8/2/2002
  misc_feature: MA Experiment 20000495 PARAMETER Experiment Name: At_Guard_Cells_P Parameter: Organism Value: A. thaliana
  misc_feature: MA Experiment 20000495 PARAMETER Experiment Name: At_Guard_Cells_P Parameter: Tissue Value: Guard Cells vs. Leaves
  misc_feature: MA Experiment ID: 20000527 Result: Up-regulated in Transcription
  misc_feature: MA Experiment 20000527 PARAMETER Experiment Name: At_10percent_PEG_P Parameter: Age (day) Value: 20
  misc_feature: MA Experiment 20000527 PARAMETER Experiment Name: At_10percent_PEG_P Parameter: Organism Value: A. thaliana
  misc_feature: MA Experiment 20000527 PARAMETER Experiment Name: At_10percent_PEG_P Parameter: Plant Line Value: WS
  misc_feature: MA Experiment 20000527 PARAMETER Experiment Name: At_10percent_PEG_P Parameter: Timepoint (day) Value: 20
  misc_feature: MA Experiment 20000527 PARAMETER Experiment Name: At_10percent_PEG_P Parameter: Tissue Value: Whole Plant
  misc_feature: MA Experiment 20000527 PARAMETER Experiment Name: At_10percent_PEG_P Parameter: Treatment Value: 10percent PEG vs. No Treatment
  misc_feature: MA Experiment ID: 20000573 Result: Down-regulated in Transcription
  misc_feature: MA Experiment 20000573 PARAMETER Experiment Name: At_100uM_ABA_Mutants__P Parameter: Organism Value: A. thaliana
  misc_feature: MA Experiment 20000573 PARAMETER Experiment Name: At_100uM_ABA_Mutants__P Parameter: Plant Line Value: CS22 vs. Ler wt
  misc_feature: MA Experiment 20000573 PARAMETER Experiment Name: At_100uM_ABA_Mutants__P Parameter: Timepoint (hr) Value: N/A
  misc_feature: MA Experiment 20000573 PARAMETER Experiment Name: At_100uM_ABA_Mutants__P Parameter: Tissue Value: Whole Plant
  misc_feature: MA Experiment 20000573 PARAMETER Experiment Name: At_100uM_ABA_Mutants__P Parameter: Treatment Value: None
  misc_feature: MA Experiment ID: 20001247 Result: Down-regulated in Transcription
  misc_feature: MA Experiment 20001247 PARAMETER Experiment Name: At_Far-red-induction_P Parameter: Age (day) Value: 7
  misc_feature: MA Experiment 20001247 PARAMETER Experiment Name: At_Far-red-induction_P Parameter: Light Value: Far-red vs. White
  misc_feature: MA Experiment 20001247 PARAMETER Experiment Name: At_Far-red-induction_P Parameter: Organism Value: A. thaliana
  misc_feature: MA Experiment 20001247 PARAMETER Experiment Name: At_Far-red-induction_P Parameter: Plant Line Value: Columbia
  misc_feature: MA Experiment 20001247 PARAMETER Experiment Name: At_Far-red-induction_P Parameter: Timepoint (hr) Value: 1
  misc_feature: MA Experiment 20001247 PARAMETER Experiment Name: At_Far-red-induction_P Parameter: Tissue Value: Whole Plant
  misc_feature: MA Experiment ID: 20001248 Result: Down-regulated in Transcription
  misc_feature: MA Experiment 20001248 PARAMETER Experiment Name: At_Far-red-induction_P Parameter: Age (day) Value: 7
  misc_feature: MA Experiment 20001248 PARAMETER Experiment Name: At_Far-red-induction_P Parameter: Light Value: Far-red vs. White
  misc_feature: MA Experiment 20001248 PARAMETER Experiment Name: At_Far-red-induction_P Parameter: Organism Value: A. thaliana
  misc_feature: MA Experiment 20001248 PARAMETER Experiment Name: At_Far-red-induction_P Parameter: Plant Line Value: Columbia
  misc_feature: MA Experiment 20001248 PARAMETER Experiment Name: At_Far-red-induction_P Parameter: Timepoint (hr) Value: 4
  misc_feature: MA Experiment 20001248 PARAMETER Experiment Name: At_Far-red-induction_P Parameter: Tissue Value: Whole Plant
  misc_feature: MA Experiment ID: 20001450 Result: Down-regulated in Transcription
  misc_feature: MA Experiment 20001450 PARAMETER Experiment Name: At_Far-red-induction_P Parameter: Age (day) Value: 7
  misc_feature: MA Experiment 20001450 PARAMETER Experiment Name: At_Far-red-induction_P Parameter: Light Value: Far-red vs. White
  misc_feature: MA Experiment 20001450 PARAMETER Experiment Name: At_Far-red-induction_P Parameter: Organism Value: A. thaliana
  misc_feature: MA Experiment 20001450 PARAMETER Experiment Name: At_Far-red-induction_P Parameter: Plant Line Value: Columbia
  misc_feature: MA Experiment 20001450 PARAMETER Experiment Name: At_Far-red-induction_P Parameter: Timepoint (hr) Value: 8
  misc_feature: MA Experiment 20001450 PARAMETER Experiment Name: At_Far-red-induction_P Parameter: Tissue Value: Whole Plant
  misc_feature: MA Experiment ID: 20001451 Result: Down-regulated in Transcription
  misc_feature: MA Experiment 20001451 PARAMETER Experiment Name: At_Far-red-induction_P Parameter: Age (day) Value: 7
  misc_feature: MA Experiment 20001451 PARAMETER Experiment Name: At_Far-red-induction_P Parameter: Light Value: Far-red vs. White
  misc_feature: MA Experiment 20001451 PARAMETER Experiment Name: At_Far-red-induction_P Parameter: Organism Value: A. thaliana
  misc_feature: MA Experiment 20001451 PARAMETER Experiment Name: At_Far-red-induction_P Parameter: Plant Line Value: Columbia
  misc_feature: MA Experiment 20001451 PARAMETER Experiment Name: At_Far-red-induction_P Parameter: Timepoint (hr) Value: 24
  misc_feature: MA Experiment 20001451 PARAMETER Experiment Name: At_Far-red-induction_P Parameter: Tissue Value: Whole Plant
  misc_feature: MA Experiment ID: 20001557 Result: Down-regulated in Transcription
  misc_feature: MA Experiment 20001557 PARAMETER Experiment Name: At_Drought_Soil_Dry_P Parameter: Age (day) Value: 27
  misc_feature: MA Experiment 20001557 PARAMETER Experiment Name: At_Drought_Soil_Dry_P Parameter: Organism Value: A. thaliana
  misc_feature: MA Experiment 20001557 PARAMETER Experiment Name: At_Drought_Soil_Dry_P Parameter: Plant Line Value: WS
  misc_feature: MA Experiment 20001557 PARAMETER Experiment Name: At_Drought_Soil_Dry_P Parameter: Post Timepoint (hr) Value: 3
  misc_feature: MA Experiment 20001557 PARAMETER Experiment Name: At_Drought_Soil_Dry_P Parameter: Post-Treatment Value: Re-Water vs. No Drought
  misc_feature: MA Experiment 20001557 PARAMETER Experiment Name: At_Drought_Soil_Dry_P Parameter: Timepoint (day) Value: 13
  misc_feature: MA Experiment 20001557 PARAMETER Experiment Name: At_Drought_Soil_Dry_P Parameter: Treatment Value: Drought vs. No Drought
  misc_feature: MA Experiment ID: 20001560 Result: Down-regulated in Transcription
  misc_feature: MA Experiment 20001560 PARAMETER Experiment Name: At_Drought_Soil_Dry_P Parameter: Age (day) Value: 28
  misc_feature: MA Experiment 20001560 PARAMETER Experiment Name: At_Drought_Soil_Dry_P Parameter: Organism Value: A. thaliana
  misc_feature: MA Experiment 20001560 PARAMETER Experiment Name: At_Drought_Soil_Dry_P Parameter: Plant Line Value: WS
  misc_feature: MA Experiment 20001560 PARAMETER Experiment Name: At_Drought_Soil_Dry_P Parameter: Post Timepoint (hr) Value: None
  misc_feature: MA Experiment 20001560 PARAMETER Experiment Name: At_Drought_Soil_Dry_P Parameter: Post-Treatment Value: None
  misc_feature: MA Experiment 20001560 PARAMETER Experiment Name: At_Drought_Soil_Dry_P Parameter: Timepoint (day) Value: 14
  misc_feature: MA Experiment 20001560 PARAMETER Experiment Name: At_Drought_Soil_Dry_P Parameter: Treatment Value: Drought vs. No Drought
  misc_feature: MA Experiment ID: 20001757 Result: Up-regulated in Transcription
  misc_feature: MA Experiment 20001757 PARAMETER Experiment Name: At_50mM_NH4NO3_L-to-H_P Parameter: Timepoint (hr) Value: 6
  misc_feature: MA Experiment 20001757 PARAMETER Experiment Name: At_50mM_NH4NO3_L-to-H_P Parameter: Tissue Value: Leaf
  misc_feature: MA Experiment 20001757 PARAMETER Experiment Name: At_50mM_NH4NO3_L-to-H_P Parameter: Treatment Value: 50mM NH4NO3 vs 100mM Mannitol
  misc_feature: MA Experiment ID: 20001905 Result: Down-regulated in Transcription
  misc_feature: MA Experiment 20001905 PARAMETER Experiment Name: At_Drought_Reproduction_P Parameter: Age (day) Value: 40
  misc_feature: MA Experiment 20001905 PARAMETER Experiment Name: At_Drought_Reproduction_P Parameter: Organism Value: A. thaliana
  misc_feature: MA Experiment 20001905 PARAMETER Experiment Name: At_Drought_Reproduction_P Parameter: Plant Line Value: WS
  misc_feature: MA Experiment 20001905 PARAMETER Experiment Name: At_Drought_Reproduction_P Parameter: Timepoint (day) Value: 10
  misc_feature: MA Experiment 20001905 PARAMETER Experiment Name: At_Drought_Reproduction_P Parameter: Tissue Value: Rosettes
  misc_feature: MA Experiment 20001905 PARAMETER Experiment Name: At_Drought_Reproduction_P Parameter: Treatment Value: Drought vs. No Drought
aaaccaccaattctctcatccgtaccaaagaacaaaaaaaagataaaatggcggttcatattcacaaccctaactttttccacactcatcatctccgagcatctcttacttctgcctctgcatcaccttcctcatatctctttcatagacactctgcttcaaagtatcctagcttcctctgcaaatccaataacaaagatgactatctcattgatgctcctgtttctgttggagatggattctcttttagtggagggaagtattcggatcaaccgagtccatcagatgagtggttgaagcaagggaaatgggttaaagctcatagagttggcggctctggtgtagaagcaaaagatccgattttcggattaacaatgggagctagctctcaagcttcaaaagatcttttccgatggtttagtgtagaatccgggagtgtagatagtcctcctgttatactcatccatggattcccatctcaggcttattcttaccggaaaactattcccgttctttcaaagaactaccgcgccattgctttcgattggctaggatttggattttctgacaagcctcaggctggatatggattcaactatacaatggacgagtttgtttcttcgctggagtcattcattgacgaagtaactactagtaaggtgtcacttgtggtgcagggctacttctcagctgctgttgtaaaatatgcaagaaaccgaccagacaagatcaagaatctcatactcttgaatcctcctctcacaccagaacatgctaaacttccatcaacattgtctgtattcagcaactttttgcttggggaaattttctctcaggatcctctaagagcaagtgacaagcctttaacaagctgtggtccttacaaaatgaaagaagacgatgcaatggtttatcgaagaccttatcttacctcaggttcttctggttttgcacttaatgccataagcaggtccatgaagaaagaacttaagaaatatgcagaagagatgaggacatcactaatggataaaaactggaaaatcccgatcaccgtgtgctggggacaacgagataggtggttaagctatgaaggagttgaagagttctgcaagagttcgggacacaacctcgtcgaattaccaaatgctggccatcatgtacaagaagattgtggagaggaacttggaggaataatctcaagaatcataagcaaatctgctctattctaactggaaccactccacaagaatattgaaagaacgtaaagaaccatttgtataaactcagctttattcaaaacatactctagttccagtggtacattacatataagtcaccagtaagatttttgtgcttaactttgaggctctataaagtaggagattctccagttctctagtacaaatttgtaacatcctaaaaagaatgtagcttgatctacatgt

SEQ ID NO: 41600 - protein, 408 aa, Arabidopsis thaliana
  peptide (1)..(408): Ceres Seq. ID no. 13488595
  misc_feature (175)..(400): Pfam Name: alpha/beta hydrolase fold Pfam Description: alpha/beta hydrolase fold
  misc_feature (138)..(402): Homolog of NCBI NO: 23041852 NR Description: hypothetical protein [Trichodesmium erythraeum
  misc_feature (137)..(389): Homolog of NCBI NO: 37522378 NR Description: hypothetical protein glr2809 [Gloeobacter
  misc_feature (122)..(394): Homolog of NCBI NO: 22330196 NR Description: hydrolase, alpha/beta fold family [Arabidopsis
  misc_feature (122)..(394): Homolog of NCBI NO: 38344893 NR Description: OSJNBa0033G05.17 [Oryza sativa (japonica
  misc_feature (136)..(404): Homolog of NCBI NO: 16329713 NR Description: unknown protein [Synechocystis sp. PCC 6803]
  misc_feature (138)..(388): Homolog of NCBI NO: 17228848 NR Description: putative hydrolase [Nostoc sp. PCC 7120]
  misc_feature (134)..(388): Homolog of NCBI NO: 23130266 NR Description: hypothetical protein [Nostoc punctiforme]
  misc_feature (16)..(291): Homolog of NCBI NO: 7487267 NR Description: hypothetical protein T20K18.180 - Arabidopsis
  misc_feature (16)..(408): Homolog of NCBI NO: 21537159 NR Description: hydrolase-like protein [Arabidopsis thaliana]
  misc_feature (16)..(408): Homolog of NCBI NO: 18413878 NR Description: hydrolase, alpha/beta fold family [Arabidopsis
TTNSLIRTKEQKKDKMAVHIHNPNFFHTHHLRASLTSASASPSSYLFHRHSASKYPSFLCKSNNKDDYLIDAPVSVGDGFSFSGGKYSDQPSPSDEWLKQGKWVKAHRVGGSGVEAKDPIFGLTMGASSQASKDLFRWFSVESGSVDSPPVILIHGFPSQAYSYRKTIPVLSKNYRAIAFDWLGFGFSDKPQAGYGFNYTMDEFVSSLESFIDEVTTSKVSLVVQGYFSAAVVKYARNRPDKIKNLILLNPPLTPEHAKLPSTLSVFSNFLLGEIFSQDPLRASDKPLTSCGPYKMKEDDAMVYRRPYLTSGSSGFALNAISRSMKKELKKYAEEMRTSLMDKNWKIPITVCWGQRDRWLSYEGVEEFCKSSGHNLVELPNAGHHVQEDCGEELGGIISRIISKSALF

SEQ ID NO: 41601 - protein, 393 aa, Arabidopsis thaliana
  peptide (1)..(393): Ceres Seq. ID no. 13488596
  misc_feature (160)..(385): Pfam Name: alpha/beta hydrolase fold Pfam Description: alpha/beta hydrolase fold
  misc_feature (123)..(387): Homolog of NCBI NO: 23041852 NR Description: hypothetical protein [Trichodesmium erythraeum
  misc_feature (122)..(374): Homolog of NCBI NO: 37522378 NR Description: hypothetical protein glr2809 [Gloeobacter
  misc_feature (107)..(379): Homolog of NCBI NO: 22330196 NR Description: hydrolase, alpha/beta fold family [Arabidopsis
  misc_feature (107)..(379): Homolog of NCBI NO: 38344893 NR Description: OSJNBa0033G05.17 [Oryza sativa (japonica
  misc_feature (121)..(389): Homolog of NCBI NO: 16329713 NR Description: unknown protein [Synechocystis sp. PCC 6803]
  misc_feature (123)..(373): Homolog of NCBI NO: 17228848 NR Description: putative hydrolase [Nostoc sp. PCC 7120]
  misc_feature (119)..(373): Homolog of NCBI NO: 23130266 NR Description: hypothetical protein [Nostoc punctiforme]
  misc_feature (1)..(276): Homolog of NCBI NO: 7487267 NR Description: hypothetical protein T20K18.180 - Arabidopsis
  misc_feature (1)..(393): Homolog of NCBI NO: 21537159 NR Description: hydrolase-like protein [Arabidopsis thaliana]
  misc_feature (1)..(393): Homolog of NCBI NO: 18413878 NR Description: hydrolase, alpha/beta fold family [Arabidopsis
MAVHIHNPNFFHTHHLRASLTSASASPSSYLFHRHSASKYPSFLCKSNNKDDYLIDAPVSVGDGFSFSGGKYSDQPSPSDEWLKQGKWVKAHRVGGSGVEAKDPIFGLTMGASSQASKDLFRWFSVESGSVDSPPVILIHGFPSQAYSYRKTIPVLSKNYRAIAFDWLGFGFSDKPQAGYGFNYTMDEFVSSLESFIDEVTTSKVSLVVQGYFSAAVVKYARNRPDKIKNLILLNPPLTPEHAKLPSTLSVFSNFLLGEIFSQDPLRASDKPLTSCGPYKMKEDDAMVYRRPYLTSGSSGFALNAISRSMKKELKKYAEEMRTSLMDKNWKIPITVCWGQRDRWLSYEGVEEFCKSSGHNLVELPNAGHHVQEDCGEELGGIISRIISKSALF

SEQ ID NO: 41602 - protein, 284 aa, Arabidopsis thaliana
  peptide (1)..(284): Ceres Seq. ID no. 13488597
  misc_feature (51)..(276): Pfam Name: alpha/beta hydrolase fold Pfam Description: alpha/beta hydrolase fold
  misc_feature (14)..(278): Homolog of NCBI NO: 23041852 NR Description: hypothetical protein [Trichodesmium erythraeum
  misc_feature (13)..(265): Homolog of NCBI NO: 37522378 NR Description: hypothetical protein glr2809 [Gloeobacter
  misc_feature (1)..(270): Homolog of NCBI NO: 22330196 NR Description: hydrolase, alpha/beta fold family [Arabidopsis
  misc_feature (1)..(270): Homolog of NCBI NO: 38344893 NR Description: OSJNBa0033G05.17 [Oryza sativa (japonica
  misc_feature (12)..(280): Homolog of NCBI NO: 16329713 NR Description: unknown protein [Synechocystis sp. PCC 6803]
  misc_feature (14)..(264): Homolog of NCBI NO: 17228848 NR Description: putative hydrolase [Nostoc sp. PCC 7120]
  misc_feature (10)..(264): Homolog of NCBI NO: 23130266 NR Description: hypothetical protein [Nostoc punctiforme]
  misc_feature (1)..(167): Homolog of NCBI NO: 7487267 NR Description: hypothetical protein T20K18.180 - Arabidopsis
  misc_feature (1)..(284): Homolog of NCBI NO: 21537159 NR Description: hydrolase-like protein [Arabidopsis thaliana]
  misc_feature (1)..(284): Homolog of NCBI NO: 18413878 NR Description: hydrolase, alpha/beta fold family [Arabidopsis
MGASSQASKDLFRWFSVESGSVDSPPVILIHGFPSQAYSYRKTIPVLSKNYRAIAFDWLGFGFSDKPQAGYGFNYTMDEFVSSLESFIDEVTTSKVSLVVQGYFSAAVVKYARNRPDKIKNLILLNPPLTPEHAKLPSTLSVFSNFLLGEIFSQDPLRASDKPLTSCGPYKMKEDDAMVYRRPYLTSGSSGFALNAISRSMKKELKKYAEEMRTSLMDKNWKIPITVCWGQRDRWLSYEGVEEFCKSSGHNLVELPNAGHHVQEDCGEELGGIISRIISKSALF

SEQ ID NO: 41603 - DNA, 1837 bp, Arabidopsis thaliana
  misc_feature (1)..(1837): Ceres Seq. ID no. 12338342
  misc_feature: MA Experiment ID: 108461 Result: Down-regulated in Transcription
  misc_feature: MA Experiment 108461 PARAMETER Experiment Name: At_Germinating_Seeds_cDNA_P Parameter: Age (day) Value: 1 vs. 0
  misc_feature: MA Experiment 108461 PARAMETER Experiment Name: At_Germinating_Seeds_cDNA_P Parameter: Tissue Value: Germinating Seeds
  misc_feature: MA Experiment ID: 108464 Result: Down-regulated in Transcription
  misc_feature: MA Experiment 108464 PARAMETER Experiment Name: At_Germinating_Seeds_cDNA_P Parameter: Age (day) Value: 4 vs. 0
  misc_feature: MA Experiment 108464 PARAMETER Experiment Name: At_Germinating_Seeds_cDNA_P Parameter: Tissue Value: Germinating Seeds
  misc_feature: MA Experiment ID: 20000180 Result: Down-regulated in Transcription
  misc_feature: MA Experiment 20000180 PARAMETER Experiment Name: At_Germinating_Seeds_P Parameter: Age (hr) Value: 24 vs. 0
  misc_feature: MA Experiment 20000180 PARAMETER Experiment Name: At_Germinating_Seeds_P Parameter: Tissue Value: Germinating Seeds
aaatcttctgatgcacactagttcgaaggatcctttaatgggagagagaatgttctacttcttcttcttcttcttcttcttcttcttcttcctcctctctcgtcggatctctctgatttagtgatttttcaaatttcaagttttcttcacctttaattttgtgtctcgttgatctctctttggacattctgctttggattctggaggcttctcattagatctctattagtgggtttaggtcaagttcttgaaatggataaggagaaatctcctgcaccaccacctagtggaggtcttcctccaccatcgggtcgttactctgcgttttcacctaatggaagtagctttgcaatgaaagctgaatcatcttttcctcctttgactccaagtggaagcaatagctcagatgctaaccgattcagccatgatattagccgaatgccggataatccacctaagaacctaggccatcgccgagctcattcagagattcttactcttcctgatgacttaagctttgatagtgatcttggtgtggttggtgctgctgatggaccttctttctctgatgatactgacgaggacttactctatatgtatcttgatatggaaaaattcaattcttctgctacatcgacttctcaaatgggtgagccatcagaaccgacttggaggaatgaattagcctcgacttctaaccttcagagtacacccggtagctctagtgaaagaccgagaattagacaccaacacagccaatcgatggatggttcaacaactatcaagcctgagatgcttatgtcagggaatgaagatgtgtctggagttgactctaagaaagccatctctgctgctaaactttctgagcttgctctcattgatccaaaacgcgccaagaggatatgggcaaacaggcagtctgctgcgaggtcaaaagaaaggaagatgagatacattgcagagctcgagagaaaagtacagactttacaaacagaggccacatctctctcagcccagttgactctcttacagagagatacaaatggcctgggtgttgaaaacaatgagcttaaactgcgagtacaaactatggagcaacaggtccacctacaggatgctttaaatgatgcactaaaggaggaagtccagcatcttaaggtattgacggggcaaggtccatcaaatggtacatcaatgaactacggttcttttggatcaaaccagcaattctatcccaataatcagtcgatgcacactatcttagccgcacaacagttacagcagctccagatccagtcacagaaacagcaacaacaacaacagcaacaccagcaacaacaacagcagcagcagcagcaatttcactttcaacagcagcaactgtaccagcttcagcagcagcaacggcttcaacaacaggaacaacaaagcggggcttcagagctaagaagacccatgccttctcctggtcagaaagagagtgtgacatcgcctgatcgtgaaactcccttgacaaaagactgagtctagactgtgctaatgtccaatttagtaagttactcttggaaaatcttctttttcatcgcaggctcatggatttgggatttactgcattatagagttaaaaacaagacagcttagaagttgcggatttagaagttgttagtgaagcttttgttctcgtctgttggtagtttacaatcttctctttgtatgatcctaagctcttaaaaagttcttggatttggtcatttggttagaaatgggtccttagtccaagtctgtagtcgtttaaccatattcatattctttgccttttgttcattttggttacttg

SEQ ID NO: 41604 - protein, 423 aa, Arabidopsis thaliana
  peptide (1)..(423): Ceres Seq. ID no. 12338343
  misc_feature (210)..(272): Pfam Name: bZIP transcription factor Pfam Description: bZIP transcription factor
  misc_feature (143)..(381): Homolog of NCBI NO: 34394739 NR Description: putative transcription activator RF2a
  misc_feature (157)..(381): Homolog of NCBI NO: 39579226 NR Description: bZIP transcription factor RF2b
  misc_feature (155)..(379): Homolog of NCBI NO: 2921823 NR Description: shoot-forming PKSF1 [Paulownia kawakamii]
  misc_feature (162)..(388): Homolog of NCBI NO: 21740783 NR Description: OSJNBa0067K08.24 [Oryza sativa (japonica
  misc_feature (5)..(368): Homolog of NCBI NO: 21740783 NR Description: OSJNBa0067K08.24 [Oryza sativa (japonica
  misc_feature (90)..(397): Homolog of NCBI NO: 7489564 NR Description: probable transcription activator RF2a - rice
  misc_feature (1)..(260): Homolog of NCBI NO: 30684938 NR Description: bZIP transcription factor (POSF21) [Arabidopsis
  misc_feature (1)..(410): Homolog of NCBI NO: 15224665 NR Description: bZIP transcription factor (POSF21)
  misc_feature (1)..(423): Homolog of NCBI NO: 21553831 NR Description: transcriptional activator RF2a, putative
  misc_feature (1)..(423): Homolog of NCBI NO: 15221391 NR Description: bZIP protein; protein id: At1g06070.1, supported
MDKEKSPAPPPSGGLPPPSGRYSAFSPNGSSFAMKAESSFPPLTPSGSNSSDANRFSHDISRMPDNPPKNLGHRRAHSEILTLPDDLSFDSDLGVVGAADGPSFSDDTDEDLLYMYLDMEKFNSSATSTSQMGEPSEPTWRNELASTSNLQSTPGSSSERPRIRHQHSQSMDGSTTIKPEMLMSGNEDVSGVDSKKAISAAKLSELALIDPKRAKRIWANRQSAARSKERKMRYIAELERKVQTLQTEATSLSAQLTLLQRDTNGLGVENNELKLRVQTMEQQVHLQDALNDALKEEVQHLKVLTGQGPSNGTSMNYGSFGSNQQFYPNNQSMHTILAAQQLQQLQIQSQKQQQQQQQHQQQQQQQQQQFHFQQQQLYQLQQQQRLQQQEQQSGASELRRPMPSPGQKESVTSPDRETPLTKD

SEQ ID NO: 41605 - protein, 390 aa, Arabidopsis thaliana
  peptide (1)..(390): Ceres Seq. ID no. 12338344
  misc_feature (177)..(239): Pfam Name: bZIP transcription factor Pfam Description: bZIP transcription factor
  misc_feature (110)..(348): Homolog of NCBI NO: 34394739 NR Description: putative transcription activator RF2a
  misc_feature (124)..(348): Homolog of NCBI NO: 39579226 NR Description: bZIP transcription factor RF2b
  misc_feature (122)..(346): Homolog of NCBI NO: 2921823 NR Description: shoot-forming PKSF1 [Paulownia kawakamii]
  misc_feature (129)..(355): Homolog of NCBI NO: 21740783 NR Description: OSJNBa0067K08.24 [Oryza sativa (japonica
  misc_feature (1)..(335): Homolog of NCBI NO: 21740783 NR Description: OSJNBa0067K08.24 [Oryza sativa (japonica
  misc_feature (57)..(364): Homolog of NCBI NO: 7489564 NR Description: probable transcription activator RF2a - rice
  misc_feature (1)..(227): Homolog of NCBI NO: 30684938 NR Description: bZIP transcription factor (POSF21) [Arabidopsis
  misc_feature (1)..(377): Homolog of NCBI NO: 15224665 NR Description: bZIP transcription factor (POSF21)
  misc_feature (1)..(390): Homolog of NCBI NO: 21553831 NR Description: transcriptional activator RF2a, putative
  misc_feature (1)..(390): Homolog of NCBI NO: 15221391 NR Description: bZIP protein; protein id: At1g06070.1, supported
MKAESSFPPLTPSGSNSSDANRFSHDISRMPDNPPKNLGHRRAHSEILTLPDDLSFDSDLGVVGAADGPSFSDDTDEDLLYMYLDMEKFNSSATSTSQMGEPSEPTWRNELASTSNLQSTPGSSSERPRIRHQHSQSMDGSTTIKPEMLMSGNEDVSGVDSKKAISAAKLSELALIDPKRAKRIWANRQSAARSKERKMRYIAELERKVQTLQTEATSLSAQLTLLQRDTNGLGVENNELKLRVQTMEQQVHLQDALNDALKEEVQHLKVLTGQGPSNGTSMNYGSFGSNQQFYPNNQSMHTILAAQQLQQLQIQSQKQQQQQQQHQQQQQQQQQQFHFQQQQLYQLQQQQRLQQQEQQSGASELRRPMPSPGQKESVTSPDRETPLTKD

SEQ ID NO: 41606 - protein, 361 aa, Arabidopsis thaliana
  peptide (1)..(361): Ceres Seq. ID no. 12338345
  misc_feature (148)..(210): Pfam Name: bZIP transcription factor Pfam Description: bZIP transcription factor
  misc_feature (81)..(319): Homolog of NCBI NO: 34394739 NR Description: putative transcription activator RF2a
  misc_feature (95)..(319): Homolog of NCBI NO: 39579226 NR Description: bZIP transcription factor RF2b
  misc_feature (93)..(317): Homolog of NCBI NO: 2921823 NR Description: shoot-forming PKSF1 [Paulownia kawakamii]
  misc_feature (100)..(326): Homolog of NCBI NO: 21740783 NR Description: OSJNBa0067K08.24 [Oryza sativa (japonica
  misc_feature (1)..(306): Homolog of NCBI NO: 21740783 NR Description: OSJNBa0067K08.24 [Oryza sativa (japonica
  misc_feature (28)..(335): Homolog of NCBI NO: 7489564 NR Description: probable transcription activator RF2a - rice
  misc_feature (1)..(198): Homolog of NCBI NO: 30684938 NR Description: bZIP transcription factor (POSF21) [Arabidopsis
  misc_feature (1)..(348): Homolog of NCBI NO: 15224665 NR Description: bZIP transcription factor (POSF21)
  misc_feature (1)..(361): Homolog of NCBI NO: 21553831 NR Description: transcriptional activator RF2a, putative
  misc_feature (1)..(361): Homolog of NCBI NO: 15221391 NR Description: bZIP protein; protein id: At1g06070.1, supported
MPDNPPKNLGHRRAHSEILTLPDDLSFDSDLGVVGAADGPSFSDDTDEDLLYMYLDMEKFNSSATSTSQMGEPSEPTWRNELASTSNLQSTPGSSSERPRIRHQHSQSMDGSTTIKPEMLMSGNEDVSGVDSKKAISAAKLSELALIDPKRAKRIWANRQSAARSKERKMRYIAELERKVQTLQTEATSLSAQLTLLQRDTNGLGVENNELKLRVQTMEQQVHLQDALNDALKEEVQHLKVLTGQGPSNGTSMNYGSFGSNQQFYPNNQSMHTILAAQQLQQLQIQSQKQQQQQQQHQQQQQQQQQQFHFQQQQLYQLQQQQRLQQQEQQSGASELRRPMPSPGQKESVTSPDRETPLTKD

SEQ ID NO: 41607 - DNA, 1010 bp, Arabidopsis thaliana
  misc_feature (1)..(1010): Ceres Seq. ID no. 13646176
  misc_feature: MA Experiment ID: 108501 Result: Down-regulated in Transcription
  misc_feature: MA Experiment 108501 PARAMETER Experiment Name: At_ap2_floral_buds_cDNA_P Parameter: Plant Line Value: ap2 (Ler.)
  misc_feature: MA Experiment 108501 PARAMETER Experiment Name: At_ap2_floral_buds_cDNA_P Parameter: Tissue Value: Closed Flower
  misc_feature: MA Experiment ID: 20000113 Result: Down-regulated in Transcription
  misc_feature: MA Experiment 20000113 PARAMETER Experiment Name: At_42deg_Heat_cDNA_P Parameter: Temperature (deg C) Value: 42 vs. 22
  misc_feature: MA Experiment 20000113 PARAMETER Experiment Name: At_42deg_Heat_cDNA_P Parameter: Timepoint (hr) Value: 8
  misc_feature: MA Experiment 20000113 PARAMETER Experiment Name: At_42deg_Heat_cDNA_P Parameter: Tissue Value: Aerial
  misc_feature: MA Experiment ID: 20000234 Result: Up-regulated in Transcription
  misc_feature: MA Experiment 20000234 PARAMETER Experiment Name: At_Siliques_P Parameter: Age (day) Value: 21
  misc_feature: MA Experiment 20000234 PARAMETER Experiment Name: At_Siliques_P Parameter: Organism Value: A. thaliana
  misc_feature: MA Experiment 20000234 PARAMETER Experiment Name: At_Siliques_P Parameter: Plant Line Value: WS
  misc_feature: MA Experiment 20000234 PARAMETER Experiment Name: At_Siliques_P Parameter: Tissue Value: Less Than 5mm Siliques vs. Whole Plant
  misc_feature: MA Experiment ID: 20000235 Result: Up-regulated in Transcription
  misc_feature: MA Experiment 20000235 PARAMETER Experiment Name: At_Siliques_P Parameter: Age (day) Value: 21
  misc_feature: MA Experiment 20000235 PARAMETER Experiment Name: At_Siliques_P Parameter: Organism Value: A. thaliana
  misc_feature: MA Experiment 20000235 PARAMETER Experiment Name: At_Siliques_P Parameter: Plant Line Value: WS
  misc_feature: MA Experiment 20000235 PARAMETER Experiment Name: At_Siliques_P Parameter: Tissue Value: 5-10mm Siliques vs. Whole Plant
  misc_feature: MA Experiment ID: 20000264 Result: Up-regulated in Transcription
  misc_feature: MA Experiment 20000264 PARAMETER Experiment Name: At_Open_Flower_P Parameter: Age (day) Value: 21
  misc_feature: MA Experiment 20000264 PARAMETER Experiment Name: At_Open_Flower_P Parameter: Plant Line Value: WS
  misc_feature: MA Experiment 20000264 PARAMETER Experiment Name: At_Open_Flower_P Parameter: Tissue Value: Open Flower vs. Whole Plant
  misc_feature: MA Experiment ID: 20000265 Result: Up-regulated in Transcription
  misc_feature: MA Experiment 20000265 PARAMETER Experiment Name: At_Open_Flower_P Parameter: Age (day) Value: 21
  misc_feature: MA Experiment 20000265 PARAMETER Experiment Name: At_Open_Flower_P Parameter: Plant Line Value: WS
  misc_feature: MA Experiment 20000265 PARAMETER Experiment Name: At_Open_Flower_P Parameter: Tissue Value: Closed Flower vs. Whole Plant
  misc_feature: MA Experiment ID: 20000286 Result: Up-regulated in Transcription
  misc_feature: MA Experiment 20000286 PARAMETER Experiment Name: At_Open_Flower_P Parameter: Age (day) Value: 21
  misc_feature: MA Experiment 20000286 PARAMETER Experiment Name: At_Open_Flower_P Parameter: Plant Line Value: WS
  misc_feature: MA Experiment 20000286 PARAMETER Experiment Name: At_Open_Flower_P Parameter: Tissue Value: Half Open vs. Whole Plant
  misc_feature: MA Experiment ID: 20000794 Result: Up-regulated in Transcription
  misc_feature: MA Experiment 20000794 PARAMETER Experiment Name: At_Petals_P Parameter: Age (day) Value: 23-25 days
  misc_feature: MA Experiment 20000794 PARAMETER Experiment Name: At_Petals_P Parameter: Plant Line Value: WS
  misc_feature: MA Experiment 20000794 PARAMETER Experiment Name: At_Petals_P Parameter: Tissue Value: Petals vs. Whole plant
cacaaaattacccactacgttgctcttcaacaaaaagattaaacaaagagagaagaatatggcgagagggaagatccagatcaagaggatagagaaccagacaaacagacaagtgacgtattcaaagagaagaaatggtttattcaagaaagcacatgagctcacggttttgtgtgatgctagggtttcgattatcatgttctctagctccaacaagcttcatgagtatatcagccctaacaccacaacgaaggagatcgtagatctgtaccaaactatttctgatgtcgatgtttgggccactcaatatgagcgaatgcaagaaaccaagaggaaactgttggagacaaatagaaatctccggactcagatcaagcagaggctaggtgagtgtttggacgagcttgacattcaggagctgcgtcgtcttgaggatgaaatggaaaacactttcaaactcgttcgcgagcgcaagttcaaatctcttgggaatcagatcgagaccaccaagaaaaagaacaaaagtcaacaagacatacaaaagaatctcatacatgagctggaactaagagctgaagatcctcactatggactagtagacaatggaggagattacgactcagttcttggataccaaatcgaagggtcacgtgcttacgctcttcgtttccaccagaaccatcaccactattaccccaaccatggccttcatgcaccctctgcctctgacatcattaccttccatcttcttgaataattaaaggctaaaaggtttgctggtgccatcattgtctatctaattatttagtaactacttaaaacataaggcatggtgttgctaaaaccttaaactgtcatgtttcttagttatgtattttaaagcctaaagaaatatggattgtgtgatcagtagtgcttaggcttattgtgtgtggaatgttttcaagacttttatcatgtatcgtattattatattgaccactctacttaattatgctacaaatttactc

SEQ ID NO: 41608 - protein, 251 aa, Arabidopsis thaliana
  peptide (1)..(251): Ceres Seq. ID no. 13646177
  misc_feature (90)..(189): Pfam Name: K-box region Pfam Description: K-box region
  misc_feature (90)..(189): Pfam Name: K-box region Pfam Description: K-box region
  misc_feature (20)..(251): Homolog of NCBI NO: 5805240 NR Description: floral homeotic protein AP3 [Arabidopsis thaliana]
  misc_feature (20)..(251): Homolog of NCBI NO: 21592970 NR Description: floral homeotic protein APETALA3 (AP3)
  misc_feature (20)..(251): Homolog of NCBI NO: 5805238 NR Description: floral homeotic protein AP3 [Arabidopsis thaliana]
  misc_feature (20)..(251): Homolog of NCBI NO: 5805228 NR Description: floral homeotic protein AP3 [Arabidopsis thaliana]
  misc_feature (20)..(251): Homolog of NCBI NO: 5805234 NR Description: floral homeotic protein AP3 [Arabidopsis thaliana]
  misc_feature (20)..(251): Homolog of NCBI NO: 5805240 NR Description: floral homeotic protein AP3 [Arabidopsis thaliana]
  misc_feature (20)..(251): Homolog of NCBI NO: 5805238 NR Description: floral homeotic protein AP3 [Arabidopsis thaliana]
  misc_feature (20)..(251): Homolog of NCBI NO: 5805234 NR Description: floral homeotic protein AP3 [Arabidopsis thaliana]
  misc_feature (20)..(251): Homolog of NCBI NO: 15232493 NR Description: floral homeotic protein APETALA3 (AP3)
  misc_feature (20)..(251): Homolog of NCBI NO: 5805230 NR Description: floral homeotic protein AP3 [Arabidopsis thaliana]
  misc_feature (20)..(251): Homolog of NCBI NO: 5805210 NR Description: floral homeotic protein AP3 [Arabidopsis
  misc_feature (20)..(251): Homolog of NCBI NO: 1384044 NR Description: APETALA3 [Arabidopsis thaliana]
  misc_feature (20)..(251): Homolog of NCBI NO: 5805226 NR Description: floral homeotic protein AP3 [Arabidopsis thaliana]
  misc_feature (20)..(251): Homolog of NCBI NO: 5805228 NR Description: floral homeotic protein AP3 [Arabidopsis thaliana]
  misc_feature (20)..(251): Homolog of NCBI NO: 21592970 NR Description: floral homeotic protein APETALA3 (AP3)
  misc_feature (20)..(251): Homolog of NCBI NO: 5805226 NR Description: floral homeotic protein AP3 [Arabidopsis thaliana]
  misc_feature (20)..(251): Homolog of NCBI NO: 1384044 NR Description: APETALA3 [Arabidopsis thaliana]
  misc_feature (20)..(251): Homolog of NCBI NO: 5805210 NR Description: floral homeotic protein AP3 [Arabidopsis
  misc_feature (20)..(251): Homolog of NCBI NO: 5805230 NR Description: floral homeotic protein AP3 [Arabidopsis thaliana]
  misc_feature (20)..(251): Homolog of NCBI NO: 15232493 NR Description: floral homeotic protein APETALA3 (AP3)
TKLPTTLLFNKKIKQREKNMARGKIQIKRIENQTNRQVTYSKRRNGLFKKAHELTVLCDARVSIIMFSSSNKLHEYISPNTTTKEIVDLYQTISDVDVWATQYERMQETKRKLLETNRNLRTQIKQRLGECLDELDIQELRRLEDEMENTFKLVRERKFKSLGNQIETTKKKNKSQQDIQKNLIHELELRAEDPHYGLVDNGGDYDSVLGYQIEGSRAYALRFHQNHHHYYPNHGLHAPSASDIITFHLLE

SEQ ID NO: 41609 - protein, 232 aa, Arabidopsis thaliana
  peptide (1)..(232): Ceres Seq. ID no. 13646178
  misc_feature (71)..(170): Pfam Name: K-box region Pfam Description: K-box region
  misc_feature (71)..(170): Pfam Name: K-box region Pfam Description: K-box region
  misc_feature (1)..(232): Homolog of NCBI NO: 5805240 NR Description: floral homeotic protein AP3 [Arabidopsis thaliana]
  misc_feature (1)..(232): Homolog of NCBI NO: 21592970 NR Description: floral homeotic protein APETALA3 (AP3)
  misc_feature (1)..(232): Homolog of NCBI NO: 5805238 NR Description: floral homeotic protein AP3 [Arabidopsis thaliana]
  misc_feature (1)..(232): Homolog of NCBI NO: 5805228 NR Description: floral homeotic protein AP3 [Arabidopsis thaliana]
  misc_feature (1)..(232): Homolog of NCBI NO: 5805226 NR Description: floral homeotic protein AP3 [Arabidopsis thaliana]
  misc_feature (1)..(232): Homolog of NCBI NO: 5805240 NR Description: floral homeotic protein AP3 [Arabidopsis thaliana]
  misc_feature (1)..(232): Homolog of NCBI NO: 5805238 NR Description: floral homeotic protein AP3 [Arabidopsis thaliana]
  misc_feature (1)..(232): Homolog of NCBI NO: 5805226 NR Description: floral homeotic protein AP3 [Arabidopsis thaliana]
  misc_feature (1)..(232): Homolog of NCBI NO: 15232493 NR Description: floral homeotic protein APETALA3 (AP3)
  misc_feature (1)..(232): Homolog of NCBI NO: 5805230 NR Description: floral homeotic protein AP3 [Arabidopsis thaliana]
  misc_feature (1)..(232): Homolog of NCBI NO: 5805210 NR Description: floral homeotic protein AP3 [Arabidopsis
  misc_feature (1)..(232): Homolog of NCBI NO: 1384044 NR Description: APETALA3 [Arabidopsis thaliana]
  misc_feature (1)..(232): Homolog of NCBI NO: 5805234 NR Description: floral homeotic protein AP3 [Arabidopsis thaliana]
  misc_feature (1)..(232): Homolog of NCBI NO: 5805228 NR Description: floral homeotic protein AP3 [Arabidopsis thaliana]
  misc_feature (1)..(232): Homolog of NCBI NO: 21592970 NR Description: floral homeotic protein APETALA3 (AP3)
  misc_feature (1)..(232): Homolog of NCBI NO: 5805234 NR Description: floral homeotic protein AP3 [Arabidopsis thaliana]
  misc_feature (1)..(232): Homolog of NCBI NO: 1384044 NR Description: APETALA3 [Arabidopsis thaliana]
  misc_feature (1)..(232): Homolog of NCBI NO: 5805210 NR Description: floral homeotic protein AP3 [Arabidopsis
  misc_feature (1)..(232): Homolog of NCBI NO: 5805230 NR Description: floral homeotic protein AP3 [Arabidopsis thaliana]
  misc_feature (1)..(232): Homolog of NCBI NO: 15232493 NR Description: floral homeotic protein APETALA3 (AP3)
MARGKIQIKRIENQTNRQVTYSKRRNGLFKKAHELTVLCDARVSIIMFSSSNKLHEYISPNTTTKEIVDLYQTISDVDVWATQYERMQETKRKLLETNRNLRTQIKQRLGECLDELDIQELRRLEDEMENTFKLVRERKFKSLGNQIETTKKKNKSQQDIQKNLIHELELRAEDPHYGLVDNGGDYDSVLGYQIEGSRAYALRFHQNHHHYYPNHGLHAPSASDIITFHLLE

SEQ ID NO: 41610 - protein, 186 aa, Arabidopsis thaliana
  peptide (1)..(186): Ceres Seq. ID no. 13646179
  misc_feature (25)..(124): Pfam Name: K-box region Pfam Description: K-box region
  misc_feature (25)..(124): Pfam Name: K-box region Pfam Description: K-box region
  misc_feature (1)..(186): Homolog of NCBI NO: 5805240 NR Description: floral homeotic protein AP3 [Arabidopsis thaliana]
  misc_feature (1)..(186): Homolog of NCBI NO: 21592970 NR Description: floral homeotic protein APETALA3 (AP3)
  misc_feature (1)..(186): Homolog of NCBI NO: 5805238 NR Description: floral homeotic protein AP3 [Arabidopsis thaliana]
  misc_feature (1)..(186): Homolog of NCBI NO: 5805228 NR Description: floral homeotic protein AP3 [Arabidopsis thaliana]
  misc_feature (1)..(186): Homolog of NCBI NO: 5805234 NR Description: floral homeotic protein AP3 [Arabidopsis thaliana]
  misc_feature (1)..(186): Homolog of NCBI NO: 5805240 NR Description: floral homeotic protein AP3 [Arabidopsis thaliana]
  misc_feature (1)..(186): Homolog of NCBI NO: 5805238 NR Description: floral homeotic protein AP3 [Arabidopsis thaliana]
  misc_feature (1)..(186): Homolog of NCBI NO: 5805234 NR Description: floral homeotic protein AP3 [Arabidopsis thaliana]
  misc_feature (1)..(186): Homolog of NCBI NO: 15232493 NR Description: floral homeotic protein APETALA3 (AP3)
  misc_feature (1)..(186): Homolog of NCBI NO: 5805230 NR Description: floral homeotic protein AP3 [Arabidopsis thaliana]
  misc_feature (1)..(186): Homolog of NCBI NO: 5805210 NR Description: floral homeotic protein AP3 [Arabidopsis
  misc_feature (1)..(186): Homolog of NCBI NO: 1384044 NR Description: APETALA3 [Arabidopsis thaliana]
  misc_feature (1)..(186): Homolog of NCBI NO: 5805226 NR Description: floral homeotic protein AP3 [Arabidopsis thaliana]
  misc_feature (1)..(186): Homolog of NCBI NO: 5805228 NR Description: floral homeotic protein AP3 [Arabidopsis thaliana]
  misc_feature (1)..(186): Homolog of NCBI NO: 21592970 NR Description: floral homeotic protein APETALA3 (AP3)
  misc_feature (1)..(186): Homolog of NCBI NO: 5805226 NR Description: floral homeotic protein AP3 [Arabidopsis thaliana]
  misc_feature (1)..(186): Homolog of NCBI NO: 1384044 NR Description: APETALA3 [Arabidopsis thaliana]
  misc_feature (1)..(186): Homolog of NCBI NO: 5805210 NR Description: floral homeotic protein AP3 [Arabidopsis
  misc_feature (1)..(186): Homolog of NCBI NO: 5805230 NR Description: floral homeotic protein AP3 [Arabidopsis thaliana]
  misc_feature (1)..(186): Homolog of NCBI NO: 15232493 NR Description: floral homeotic protein APETALA3 (AP3)
MFSSSNKLHEYISPNTTTKEIVDLYQTISDVDVWATQYERMQETKRKLLETNRNLRTQIKQRLGECLDELDIQELRRLEDEMENTFKLVRERKFKSLGNQIETTKKKNKSQQDIQKNLIHELELRAEDPHYGLVDNGGDYDSVLGYQIEGSRAYALRFHQNHHHYYPNHGLHAPSASDIITFHLLE

SEQ ID NO: 41611 - DNA, 1483 bp, Arabidopsis thaliana; identical to SEQ ID NO: 25149
  misc_feature (1)..(1483): Ceres Seq. ID no. 12329362
  misc_feature: MA Experiment ID: 20000437 Result: Down-regulated in Transcription
  misc_feature: MA Experiment 20000437 PARAMETER Experiment Name: At_Drought_P Parameter: Age (day) Value: 8
  misc_feature: MA Experiment 20000437 PARAMETER Experiment Name: At_Drought_P Parameter: Organism Value: A. thaliana
  misc_feature: MA Experiment 20000437 PARAMETER Experiment Name: At_Drought_P Parameter: Plant Line Value: WS
  misc_feature: MA Experiment 20000437 PARAMETER Experiment Name: At_Drought_P Parameter: Timepoint (hr) Value: 24
  misc_feature: MA Experiment 20000437 PARAMETER Experiment Name: At_Drought_P Parameter: Tissue Value: Whole Plant
  misc_feature: MA Experiment 20000437 PARAMETER Experiment Name: At_Drought_P Parameter: Treatment Value: Drought vs. No Drought
  misc_feature: MA Experiment ID: 20001557 Result: Up-regulated in Transcription
  misc_feature: MA Experiment 20001557 PARAMETER Experiment Name: At_Drought_Soil_Dry_P Parameter: Age (day) Value: 27
  misc_feature: MA Experiment 20001557 PARAMETER Experiment Name: At_Drought_Soil_Dry_P Parameter: Organism Value: A. thaliana
  misc_feature: MA Experiment 20001557 PARAMETER Experiment Name: At_Drought_Soil_Dry_P Parameter: Plant Line Value: WS
  misc_feature: MA Experiment 20001557 PARAMETER Experiment Name: At_Drought_Soil_Dry_P Parameter: Post Timepoint (hr) Value: 3
  misc_feature: MA Experiment 20001557 PARAMETER Experiment Name: At_Drought_Soil_Dry_P Parameter: Post-Treatment Value: Re-Water vs. No Drought
  misc_feature: MA Experiment 20001557 PARAMETER Experiment Name: At_Drought_Soil_Dry_P Parameter: Timepoint (day) Value: 13
  misc_feature: MA Experiment 20001557 PARAMETER Experiment Name: At_Drought_Soil_Dry_P Parameter: Treatment Value: Drought vs. No Drought
  misc_feature: MA Experiment ID: 20001558 Result: Up-regulated in Transcription
  misc_feature: MA Experiment 20001558 PARAMETER Experiment Name: At_Drought_Soil_Dry_P Parameter: Age (day) Value: 27
  misc_feature: MA Experiment 20001558 PARAMETER Experiment Name: At_Drought_Soil_Dry_P Parameter: Organism Value: A. thaliana
  misc_feature: MA Experiment 20001558 PARAMETER Experiment Name: At_Drought_Soil_Dry_P Parameter: Plant Line Value: WS
  misc_feature: MA Experiment 20001558 PARAMETER Experiment Name: At_Drought_Soil_Dry_P Parameter: Post Timepoint (hr) Value: 6
  misc_feature: MA Experiment 20001558 PARAMETER Experiment Name: At_Drought_Soil_Dry_P Parameter: Post-Treatment Value: Re-Water vs. No Drought
  misc_feature: MA Experiment 20001558 PARAMETER Experiment Name: At_Drought_Soil_Dry_P Parameter: Timepoint (day) Value: 13
  misc_feature: MA Experiment 20001558 PARAMETER Experiment Name: At_Drought_Soil_Dry_P Parameter: Treatment Value: Drought vs. No Drought

SEQ ID NO: 41612 - protein, 357 aa, Arabidopsis thaliana; identical to SEQ ID NO: 25150
  peptide (1)..(357): Ceres Seq. ID no. 12329363
  misc_feature (131)..(303): Pfam Name: Hyaluronan / mRNA binding family Pfam Description: Hyaluronan / mRNA binding family
  misc_feature (131)..(303): Pfam Name: Hyaluronan / mRNA binding family Pfam Description: Hyaluronan / mRNA binding family
  misc_feature (1)..(357): Homolog of NCBI NO: 7488863 NR Description: probable transcription factor - fava bean
  misc_feature (1)..(357): Homolog of NCBI NO: 6492266 NR Description: nuclear RNA binding protein A [Spinacia oleracea]
  misc_feature (1)..(357): Homolog of NCBI NO: 34910712 NR Description: putative nuclear RNA binding protein A
  misc_feature (1)..(357): Homolog of NCBI NO: 21537052 NR Description: nuclear antigen homolog [Arabidopsis thaliana]
  misc_feature (1)..(357): Homolog of NCBI NO: 15235894 NR Description: nuclear antigen homolog
  misc_feature (1)..(357): Homolog of NCBI NO: 7488863 NR Description: probable transcription factor - fava bean
  misc_feature (1)..(357): Homolog of NCBI NO: 34910712 NR Description: putative nuclear RNA binding protein A
  misc_feature (1)..(357): Homolog of NCBI NO: 15235894 NR Description: nuclear antigen homolog
  misc_feature (1)..(357): Homolog of NCBI NO: 15238039 NR Description: putative protein
  misc_feature (1)..(357): Homolog of NCBI NO: 21553991 NR Description: nuclear RNA binding protein A-like protein
  misc_feature (1)..(337): Homolog of NCBI NO: 15236552 NR Description: nuclear RNA binding protein A-like protein
  misc_feature (1)..(337): Homolog of NCBI NO: 21593013 NR Description: nuclear RNA binding protein A-like protein
  misc_feature (1)..(357): Homolog of NCBI NO: 39725278 NR Description: salt tolerance protein 2 [Beta vulgaris]
  misc_feature (1)..(357): Homolog of NCBI NO: 21537052 NR Description: nuclear antigen homolog [Arabidopsis thaliana]
  misc_feature (1)..(357): Homolog of NCBI NO: 6492266 NR Description: nuclear RNA binding protein A [Spinacia oleracea]
  misc_feature (1)..(357): Homolog of NCBI NO: 39725278 NR Description: salt tolerance protein 2 [Beta vulgaris]
  misc_feature (1)..(337): Homolog of NCBI NO: 21593013 NR Description: nuclear RNA binding protein A-like protein
  misc_feature (1)..(337): Homolog of NCBI NO: 15236552 NR Description: nuclear RNA binding protein A-like protein
  misc_feature (1)..(357): Homolog of NCBI NO: 21553991 NR Description: nuclear RNA binding protein A-like protein
  misc_feature (1)..(357): Homolog of NCBI NO: 15238039 NR Description: putative protein

SEQ ID NO: 41613 - protein, 195 aa, Arabidopsis thaliana; identical to SEQ ID NO: 24160
  peptide (1)..(195): Ceres Seq. ID no. 12329364
  misc_feature (1)..(141): Pfam Name: Hyaluronan / mRNA binding family Pfam Description: Hyaluronan / mRNA binding family
  misc_feature (1)..(141): Pfam Name: Hyaluronan / mRNA binding family Pfam Description: Hyaluronan / mRNA binding family
  misc_feature (1)..(195): Homolog of NCBI NO: 7488863 NR Description: probable transcription factor - fava bean
  misc_feature (1)..(195): Homolog of NCBI NO: 6492266 NR Description: nuclear RNA binding protein A [Spinacia oleracea]
  misc_feature (1)..(195): Homolog of NCBI NO: 34910712 NR Description: putative nuclear RNA binding protein A
  misc_feature (1)..(195): Homolog of NCBI NO: 21537052 NR Description: nuclear antigen homolog [Arabidopsis thaliana]
  misc_feature (1)..(195): Homolog of NCBI NO: 15235894 NR Description: nuclear antigen homolog
  misc_feature (1)..(195): Homolog of NCBI NO: 7488863 NR Description: probable transcription factor - fava bean
  misc_feature (1)..(195): Homolog of NCBI NO: 34910712 NR Description: putative nuclear RNA binding protein A
  misc_feature (1)..(195): Homolog of NCBI NO: 15235894 NR Description: nuclear antigen homolog
  misc_feature (1)..(195): Homolog of NCBI NO: 15238039 NR Description: putative protein
  misc_feature (1)..(195): Homolog of NCBI NO: 21553991 NR Description: nuclear RNA binding protein A-like protein
  misc_feature (1)..(175): Homolog of NCBI NO: 15236552 NR Description: nuclear RNA binding protein A-like protein
  misc_feature (1)..(175): Homolog of NCBI NO: 21593013 NR Description: nuclear RNA binding protein A-like protein
  misc_feature (1)..(195): Homolog of NCBI NO: 39725278 NR Description: salt tolerance protein 2 [Beta vulgaris]
  misc_feature (1)..(195): Homolog of NCBI NO: 21537052 NR Description: nuclear antigen homolog [Arabidopsis thaliana]
  misc_feature (1)..(195): Homolog of NCBI NO: 6492266 NR Description: nuclear RNA binding protein A [Spinacia oleracea]
  misc_feature (1)..(195): Homolog of NCBI NO: 39725278 NR Description: salt tolerance protein 2 [Beta vulgaris]
  misc_feature (1)..(175): Homolog of NCBI NO: 21593013 NR Description: nuclear RNA binding protein A-like protein
  misc_feature (1)..(175): Homolog of NCBI NO: 15236552 NR Description: nuclear RNA binding protein A-like protein
  misc_feature (1)..(195): Homolog of NCBI NO: 21553991 NR Description: nuclear RNA binding protein A-like protein
  misc_feature (1)..(195): Homolog of NCBI NO: 15238039 NR Description: putative protein

SEQ ID NO: 41614 - DNA, 1869 bp, Arabidopsis thaliana
  misc_feature (1)..(1869): Ceres Seq. ID no. 12357799
  misc_feature: MA Experiment ID: 108435 Result: Down-regulated in Transcription
  misc_feature: MA Experiment 108435 PARAMETER Experiment Name: At_stm_Mutants_cDNA_P Parameter: Plant Line Value: wt Landsburg vs stm
  misc_feature: MA Experiment 108435 PARAMETER Experiment Name: At_stm_Mutants_cDNA_P Parameter: Tissue Value: Shoot Apical Meristem Region
  misc_feature: MA Experiment ID: 108461 Result: Up-regulated in Transcription
  misc_feature: MA Experiment 108461 PARAMETER Experiment Name: At_Germinating_Seeds_cDNA_P Parameter: Age (day) Value: 1 vs. 0
  misc_feature: MA Experiment 108461 PARAMETER Experiment Name: At_Germinating_Seeds_cDNA_P Parameter: Tissue Value: Germinating Seeds
  misc_feature: MA Experiment ID: 108462 Result: Up-regulated in Transcription
  misc_feature: MA Experiment 108462 PARAMETER Experiment Name: At_Germinating_Seeds_cDNA_P Parameter: Age (day) Value: 2 vs. 0
  misc_feature: MA Experiment 108462 PARAMETER Experiment Name: At_Germinating_Seeds_cDNA_P Parameter: Tissue Value: Germinating Seeds
  misc_feature: MA Experiment ID: 108463 Result: Up-regulated in Transcription
  misc_feature: MA Experiment 108463 PARAMETER Experiment Name: At_Germinating_Seeds_cDNA_P Parameter: Age (day) Value: 3 vs. 0
  misc_feature: MA Experiment 108463 PARAMETER Experiment Name: At_Germinating_Seeds_cDNA_P Parameter: Tissue Value: Germinating Seeds
  misc_feature: MA Experiment ID: 108569 Result: Up-regulated in Transcription
  misc_feature: MA Experiment 108569 PARAMETER Experiment Name: At_0.001%_MeJA__cDNA_P Parameter: Timepoint (hr) Value: 6
  misc_feature: MA Experiment 108569 PARAMETER Experiment Name: At_0.001%_MeJA__cDNA_P Parameter: Tissue Value: Aerial
  misc_feature: MA Experiment 108569 PARAMETER Experiment Name: At_0.001%_MeJA__cDNA_P Parameter: Treatment Value: 0.001% MeJA vs. No Treatment
  misc_feature: MA Experiment ID: 108573 Result: Up-regulated in Transcription
  misc_feature: MA Experiment 108573 PARAMETER Experiment Name: At_Drought_cDNA_P Parameter: Timepoint (hr) Value: 6
  misc_feature: MA Experiment 108573 PARAMETER Experiment Name: At_Drought_cDNA_P Parameter: Tissue Value: Aerial
  misc_feature: MA Experiment 108573 PARAMETER Experiment Name: At_Drought_cDNA_P Parameter: Treatment Value: Drought vs. No Drought
  misc_feature: MA Experiment ID: 108595 Result: Down-regulated in Transcription
  misc_feature: MA Experiment 108595 PARAMETER Experiment Name: At_Ler-pi_Ovule_cDNA_P Parameter: Plant Line Value: null
  misc_feature: MA Experiment ID: 20000087 Result: Down-regulated in Transcription
  misc_feature: MA Experiment 20000087 PARAMETER Experiment Name: At_100uM_ABA_Mutants_cDNA_P Parameter: Plant Line Value: WS
  misc_feature: MA Experiment 20000087 PARAMETER Experiment Name: At_100uM_ABA_Mutants_cDNA_P Parameter: Timepoint (hr) Value: 6
  misc_feature: MA Experiment 20000087 PARAMETER Experiment Name: At_100uM_ABA_Mutants_cDNA_P Parameter: Tissue Value: Aerial
  misc_feature: MA Experiment 20000087 PARAMETER Experiment Name: At_100uM_ABA_Mutants_cDNA_P Parameter: Treatment Value: 100uM ABA vs. No Treatment
  misc_feature: MA Experiment ID: 20000179 Result: Up-regulated in Transcription
  misc_feature: MA Experiment 20000179 PARAMETER Experiment Name: At_Germinating_Seeds_P Parameter: Age (hr) Value: 6 vs. 0
  misc_feature: MA Experiment 20000179 PARAMETER Experiment Name: At_Germinating_Seeds_P Parameter: Tissue Value: Germinating Seeds
  misc_feature: MA Experiment ID: 20001451 Result: Down-regulated in Transcription
  misc_feature: MA Experiment 20001451 PARAMETER Experiment Name: At_Far-red-induction_P Parameter: Age (day) Value: 7
  misc_feature: MA Experiment 20001451 PARAMETER Experiment Name: At_Far-red-induction_P Parameter: Light Value: Far-red vs. White
  misc_feature: MA Experiment 20001451 PARAMETER Experiment Name: At_Far-red-induction_P Parameter: Organism Value: A. thaliana
  misc_feature: MA Experiment 20001451 PARAMETER Experiment Name: At_Far-red-induction_P Parameter: Plant Line Value: Columbia
  misc_feature: MA Experiment 20001451 PARAMETER Experiment Name: At_Far-red-induction_P Parameter: Timepoint (hr) Value: 24
  misc_feature: MA Experiment 20001451 PARAMETER Experiment Name: At_Far-red-induction_P Parameter: Tissue Value: Whole Plant
ataacaaatcacatttctctctcttctctgcttgaatccattacagagggattgtggagtggtttggtttgatttgatttcgatctgtgacaatggtggagactagtatcgacatggaggaaggaactctcgagatcggaatggagtatagaactgtctccggagttgctggacctttggtcatccttgacaaagtgaagggtccaaagtaccaggagattgttaatattcgcttaggagatggatcaacgagacgtggtcaggtcttggaggttgatggggagaaagctgttgtccaggtttttgaaggaacatctgggattgacaacaagtttaccaccgtgcaattcacaggagaggtgttactataaaagccttctcctcttttaagcttttggcagattagttaaaattttggttggaagttttctaaaaactaagaggatgcttggttacagttttttcttgttctttttttgtcattatctgttattggtgtgtgttttcaggtactgaaaacgcctgtatcattggacatgcttggccgcatatttaacggctcgggaaagccaattgataatggccctcctattttgccagaggcataccttgatatttctggaagttcaatcaaccccagtgaaagaacctaccctgaagagatgatacaaacggggatttctaccattgatgtcatgaactccattgctcgtggacagaagattcctcttttctctgctgctggtctacctcataatgagattgctgctcaaatttgtcgtcaggctggacttgtgaagcggttggaaaagactgagaacttaattcaggaggatcatggagaggacaattttgcaattgtttttgcagctatgggtgtaaacatggagacagctcagtttttcaagcgtgattttgaagaaaatggatcgatggaaagggttacccttttcctgaacttggccaatgatccaaccattgagagaattatcactcctcgaattgccctaacaaccgctgaatatttggcttatgaatgtggaaagcatgtgcttgttatattgacagacatgagttcttatgcagatgctcttcgtgaggtttctgctgctcgagaagaagttcctggaagacgtggatatccggggtatatgtatacagatcttgcaactatttatgaacgtgcgggacgtattgaaggaagaaagggttccattacccaaattcctatcctgactatgcccaatgacgatatcactcaccctactccggatcttactggttacattactgagggtcagatatatattgataggcaacttcacaacagacagatatacccacccattaacgtgcttccatcactttctcggctgatgaagagtgctattggtgaaggaatgactcgcaaagaccattctgatgtgtccaaccagctatacgcaaattatgcaatcggaaaagatgttcaagccatgaaagctgttgttggagaagaagctctgtcttccgaggatctgctgtatttagagtttctggataaatttgaaaggaagtttgtgatgcaaggcgcatacgatacaaggaatatcttccagtcgcttgacttggcatggacactgctccgtatcttcccacgtgagcttcttcaccgtattcctgccaaaacacttgatcaattctacagccgcgactccacaagctaaaccttttaaaacaagctctatgttgctccattcttatcttatttggaacttaaatcataccgagagaagacaaacaggattggttgcgtgaaaacaaaactcagagaattgtgaagttgggaattttcttttgtttttccatttgtataataaaggtttgtgt

SEQ ID NO: 41615 - protein, 389 aa, Arabidopsis thaliana
  peptide (1)..(389): Ceres Seq. ID no. 12357800
  misc_feature (105)..(284): Pfam Name: ATP synthase alpha/beta family, Pfam Description: ATP synthase alpha/beta family,
  misc_feature (1)..(387): Homolog of NCBI NO: 2493129 NR Description: Vacuolar ATP synthase subunit B isoform 1
  misc_feature (1)..(388): Homolog of NCBI NO: 2493132 NR Description: Vacuolar ATP synthase subunit B isoform 2
  misc_feature (1)..(388): Homolog of NCBI NO: 34910488 NR Description: putative H+-transporting ATP synthase
  misc_feature (1)..(389): Homolog of NCBI NO: 25290450 NR Description: hypothetical protein F14O10.13 - Arabidopsis
  misc_feature (1)..(389): Homolog of NCBI NO: 15233891 NR Description: probable H+-transporting ATPase
  misc_feature (1)..(144): Homolog of NCBI NO: 25290419 NR Description: protein T4O12.24 [imported] - Arabidopsis
  misc_feature (143)..(389): Homolog of NCBI NO: 25290419 NR Description: protein T4O12.24 [imported] - Arabidopsis
  misc_feature (1)..(389): Homolog of NCBI NO: 15222929 NR Description: vacuolar ATP synthase subunit B
  misc_feature (1)..(389): Homolog of NCBI NO: 81637 NR Description: H+-exporting ATPase (EC 3.6.3.6) 57K chain -
  misc_feature (1)..(389): Homolog of NCBI NO: 17065080 NR Description: Unknown protein [Arabidopsis thaliana]
MLGRIFNGSGKPIDNGPPILPEAYLDISGSSINPSERTYPEEMIQTGISTIDVMNSIARGQKIPLFSAAGLPHNEIAAQICRQAGLVKRLEKTENLIQEDHGEDNFAIVFAAMGVNMETAQFFKRDFEENGSMERVTLFLNLANDPTIERIITPRIALTTAEYLAYECGKHVLVILTDMSSYADALREVSAAREEVPGRRGYPGYMYTDLATIYERAGRIEGRKGSITQIPILTMPNDDITHPTPDLTGYITEGQIYIDRQLHNRQIYPPINVLPSLSRLMKSAIGEGMTRKDHSDVSNQLYANYAIGKDVQAMKAVVGEEALSSEDLLYLEFLDKFERKFVMQGAYDTRNIFQSLDLAWTLLRIFPRELLHRIPAKTLDQFYSRDSTS

SEQ ID NO: 41616 - protein, 347 aa, Arabidopsis thaliana
  peptide (1)..(347): Ceres Seq. ID no. 12357801
  misc_feature (63)..(242): Pfam Name: ATP synthase alpha/beta family, Pfam Description: ATP synthase alpha/beta family,
  misc_feature (1)..(345): Homolog of NCBI NO: 2493129 NR Description: Vacuolar ATP synthase subunit B isoform 1
  misc_feature (1)..(346): Homolog of NCBI NO: 2493132 NR Description: Vacuolar ATP synthase subunit B isoform 2
  misc_feature (1)..(346): Homolog of NCBI NO: 34910488 NR Description: putative H+-transporting ATP synthase
  misc_feature (1)..(347): Homolog of NCBI NO: 25290450 NR Description: hypothetical protein F14O10.13 - Arabidopsis
  misc_feature (1)..(347): Homolog of NCBI NO: 15233891 NR Description: probable H+-transporting ATPase
  misc_feature (1)..(102): Homolog of NCBI NO: 25290419 NR Description: protein T4O12.24 [imported] - Arabidopsis
  misc_feature (101)..(347): Homolog of NCBI NO: 25290419 NR Description: protein T4O12.24 [imported] - Arabidopsis
  misc_feature (1)..(347): Homolog of NCBI NO: 15222929 NR Description: vacuolar ATP synthase subunit B
  misc_feature (1)..(347): Homolog of NCBI NO: 81637 NR Description: H+-exporting ATPase (EC 3.6.3.6) 57K chain -
  misc_feature (1)..(347): Homolog of NCBI NO: 17065080 NR Description: Unknown protein [Arabidopsis thaliana]
MIQTGISTIDVMNSIARGQKIPLFSAAGLPHNEIAAQICRQAGLVKRLEKTENLIQEDHGEDNFAIVFAAMGVNMETAQFFKRDFEENGSMERVTLFLNLANDPTIERIITPRIALTTAEYLAYECGKHVLVILTDMSSYADALREVSAAREEVPGRRGYPGYMYTDLATIYERAGRIEGRKGSITQIPILTMPNDDITHPTPDLTGYITEGQIYIDRQLHNRQIYPPINVLPSLSRLMKSAIGEGMTRKDHSDVSNQLYANYAIGKDVQAMKAVVGEEALSSEDLLYLEFLDKFERKFVMQGAYDTRNIFQSLDLAWTLLRIFPRELLHRIPAKTLDQFYSRDSTS

SEQ ID NO: 41617 - protein, 336 aa, Arabidopsis thaliana
  peptide (1)..(336): Ceres Seq. ID no. 12357802
  misc_feature (52)..(231): Pfam Name: ATP synthase alpha/beta family, Pfam Description: ATP synthase alpha/beta family,
  misc_feature (1)..(334): Homolog of NCBI NO: 2493129 NR Description: Vacuolar ATP synthase subunit B isoform 1
  misc_feature (1)..(335): Homolog of NCBI NO: 2493132 NR Description: Vacuolar ATP synthase subunit B isoform 2
  misc_feature (1)..(335): Homolog of NCBI NO: 34910488 NR Description: putative H+-transporting ATP synthase
  misc_feature (1)..(336): Homolog of NCBI NO: 25290450 NR Description: hypothetical protein F14O10.13 - Arabidopsis
  misc_feature (1)..(336): Homolog of NCBI NO: 15233891 NR Description: probable H+-transporting ATPase
  misc_feature (1)..(91): Homolog of NCBI NO: 25290419 NR Description: protein T4O12.24 [imported] - Arabidopsis
  misc_feature (90)..(336): Homolog of NCBI NO: 25290419 NR Description: protein T4O12.24 [imported] - Arabidopsis
  misc_feature (1)..(336): Homolog of NCBI NO: 15222929 NR Description: vacuolar ATP synthase subunit B
  misc_feature (1)..(336): Homolog of NCBI NO: 81637 NR Description: H+-exporting ATPase (EC 3.6.3.6) 57K chain -
  misc_feature (1)..(336): Homolog of NCBI NO: 17065080 NR Description: Unknown protein [Arabidopsis thaliana]
MNSIARGQKIPLFSAAGLPHNEIAAQICRQAGLVKRLEKTENLIQEDHGEDNFAIVFAAMGVNMETAQFFKRDFEENGSMERVTLFLNLANDPTIERIITPRIALTTAEYLAYECGKHVLVILTDMSSYADALREVSAAREEVPGRRGYPGYMYTDLATIYERAGRIEGRKGSITQIPILTMPNDDITHPTPDLTGYITEGQIYIDRQLHNRQIYPPINVLPSLSRLMKSAIGEGMTRKDHSDVSNQLYANYAIGKDVQAMKAVVGEEALSSEDLLYLEFLDKFERKFVMQGAYDTRNIFQSLDLAWTLLRIFPRELLHRIPAKTLDQFYSRDSTS

SEQ ID NO: 41618 - DNA, 2000 bp, Arabidopsis thaliana
  misc_feature (1)..(2000): Ceres Seq. ID no. 13493828
  misc_feature: MA Experiment ID: 108434 Result: Down-regulated in Transcription
  misc_feature: MA Experiment 108434 PARAMETER Experiment Name: At_Root_Tips_cDNA_P Parameter: Tissue Value: Root Tips
  misc_feature: MA Experiment ID: 108488 Result: Down-regulated in Transcription
  misc_feature: MA Experiment ID: 108489 Result: Down-regulated in Transcription
  misc_feature: MA Experiment ID: 108501 Result: Up-regulated in Transcription
  misc_feature: MA Experiment 108501 PARAMETER Experiment Name: At_ap2_floral_buds_cDNA_P Parameter: Plant Line Value: ap2 (Ler.)
  misc_feature: MA Experiment 108501 PARAMETER Experiment Name: At_ap2_floral_buds_cDNA_P Parameter: Tissue Value: Closed Flower
  misc_feature: MA Experiment ID: 108585 Result: Up-regulated in Transcription
  misc_feature: MA Experiment 108585 PARAMETER Experiment Name: At_5mM_NaNP_cDNA_P Parameter: Timepoint (hr) Value: 6
  misc_feature: MA Experiment 108585 PARAMETER Experiment Name: At_5mM_NaNP_cDNA_P Parameter: Tissue Value: Aerial
  misc_feature: MA Experiment 108585 PARAMETER Experiment Name: At_5mM_NaNP_cDNA_P Parameter: Treatment Value: null
  misc_feature: MA Experiment ID: 108668 Result: Down-regulated in Transcription
  misc_feature: MA Experiment 108668 PARAMETER Experiment Name: At_2mM_SA_cDNA_P Parameter: Plant Line Value: WS
  misc_feature: MA Experiment 108668 PARAMETER Experiment Name: At_2mM_SA_cDNA_P Parameter: Timepoint (hr) Value: 6
  misc_feature: MA Experiment 108668 PARAMETER Experiment Name: At_2mM_SA_cDNA_P Parameter: Treatment Value: 2mM SA vs. No Treatment
  misc_feature: MA Experiment ID: 20000113 Result: Down-regulated in Transcription
  misc_feature: MA Experiment 20000113 PARAMETER Experiment Name: At_42deg_Heat_cDNA_P Parameter: Temperature (deg C) Value: 42 vs. 22
  misc_feature: MA Experiment 20000113 PARAMETER Experiment Name: At_42deg_Heat_cDNA_P Parameter: Timepoint (hr) Value: 8
  misc_feature: MA Experiment 20000113 PARAMETER Experiment Name: At_42deg_Heat_cDNA_P Parameter: Tissue Value: Aerial
  misc_feature: MA Experiment ID: 20000182 Result: Down-regulated in Transcription
  misc_feature: MA Experiment 20000182 PARAMETER Experiment Name: At_2mM_SA_P Parameter: Age (day) Value: 14
  misc_feature: MA Experiment 20000182 PARAMETER Experiment Name: At_2mM_SA_P Parameter: Organism Value: A. thaliana
  misc_feature: MA Experiment 20000182 PARAMETER Experiment Name: At_2mM_SA_P Parameter: Plant Line Value: WS
  misc_feature: MA Experiment 20000182 PARAMETER Experiment Name: At_2mM_SA_P Parameter: Timepoint (hr) Value: 6
  misc_feature: MA Experiment 20000182 PARAMETER Experiment Name: At_2mM_SA_P Parameter: Tissue Value: Aerial
  misc_feature: MA Experiment 20000182 PARAMETER Experiment Name: At_2mM_SA_P Parameter: Treatment Value: 2mM SA vs. No Treatment
  misc_feature: MA Experiment ID: 20000224 Result: Up-regulated in Transcription
  misc_feature: MA Experiment ID: 20000227 Result: Down-regulated in Transcription
  misc_feature: MA Experiment 20000227 PARAMETER Experiment Name: At_Root-Tips-vs-Tops_P Parameter: Tissue Value: Root Tips vs. Root Tops
  misc_feature: MA Experiment ID: 20000495 Result: Down-regulated in Transcription
  misc_feature: MA Experiment 20000495 PARAMETER Experiment Name: At_Guard_Cells_P Parameter: Harvest Date Value: 8/2/2002
  misc_feature: MA Experiment 20000495 PARAMETER Experiment Name: At_Guard_Cells_P Parameter: Organism Value: A. thaliana
  misc_feature: MA Experiment 20000495 PARAMETER Experiment Name: At_Guard_Cells_P Parameter: Tissue Value: Guard Cells vs. Leaves
  misc_feature: MA Experiment ID: 20000527 Result: Down-regulated in Transcription
  misc_feature: MA Experiment 20000527 PARAMETER Experiment Name: At_10percent_PEG_P Parameter: Age (day) Value: 20
  misc_feature: MA Experiment 20000527 PARAMETER Experiment Name: At_10percent_PEG_P Parameter: Organism Value: A. thaliana
  misc_feature: MA Experiment 20000527 PARAMETER Experiment Name: At_10percent_PEG_P Parameter: Plant Line Value: WS
  misc_feature: MA Experiment 20000527 PARAMETER Experiment Name: At_10percent_PEG_P Parameter: Timepoint (day) Value: 20
  misc_feature: MA Experiment 20000527 PARAMETER Experiment Name: At_10percent_PEG_P Parameter: Tissue Value: Whole Plant
  misc_feature: MA Experiment 20000527 PARAMETER Experiment Name: At_10percent_PEG_P Parameter: Treatment Value: 10percent PEG vs. No Treatment
  misc_feature: MA Experiment ID: 20001459 Result: Up-regulated in Transcription
  misc_feature: MA Experiment 20001459 PARAMETER Experiment Name: At_50mM_NH4NO3_L-to-H_P Parameter: Age (day) Value: Undefined
  misc_feature: MA Experiment 20001459 PARAMETER Experiment Name: At_50mM_NH4NO3_L-to-H_P Parameter: Organism Value: Undefined
  misc_feature: MA Experiment 20001459 PARAMETER Experiment Name: At_50mM_NH4NO3_L-to-H_P Parameter: Plant Line Value: Undefined
  misc_feature: MA Experiment 20001459 PARAMETER Experiment Name: At_50mM_NH4NO3_L-to-H_P Parameter: Timepoint (hr) Value: 4
  misc_feature: MA Experiment 20001459 PARAMETER Experiment Name: At_50mM_NH4NO3_L-to-H_P Parameter: Tissue Value: Siliques
  misc_feature: MA Experiment 20001459 PARAMETER Experiment Name: At_50mM_NH4NO3_L-to-H_P Parameter: Treatment Value: 50mM NH4NO3 vs. 100mM Manitol
  misc_feature: MA Experiment ID: 20001558 Result: Down-regulated in Transcription
  misc_feature: MA Experiment 20001558 PARAMETER Experiment Name: At_Drought_Soil_Dry_P Parameter: Age (day) Value: 27
  misc_feature: MA Experiment 20001558 PARAMETER Experiment Name: At_Drought_Soil_Dry_P Parameter: Organism Value: A. thaliana
  misc_feature: MA Experiment 20001558 PARAMETER Experiment Name: At_Drought_Soil_Dry_P Parameter: Plant Line Value: WS
  misc_feature: MA Experiment 20001558 PARAMETER Experiment Name: At_Drought_Soil_Dry_P Parameter: Post Timepoint (hr) Value: 6
  misc_feature: MA Experiment 20001558 PARAMETER Experiment Name: At_Drought_Soil_Dry_P Parameter: Post-Treatment Value: Re-Water vs. No Drought
  misc_feature: MA Experiment 20001558 PARAMETER Experiment Name: At_Drought_Soil_Dry_P Parameter: Timepoint (day) Value: 13
  misc_feature: MA Experiment 20001558 PARAMETER Experiment Name: At_Drought_Soil_Dry_P Parameter: Treatment Value: Drought vs. No Drought
aacgtttatggatttgagtcgttctcaaacaaattttcaattagggtttggttgttcacacgcatcaatgactccaacaccaacaccaagagctccaatcgcagacgattcgattaatctacaagtcgatcaaagtttccgatcattaccaacaactttctctccgattccgttacaattactcgaacaaaaagccgagaagaccaccaccgttgatgagccaaagaaagatggaggaggaggaggagatcaaaaggaagacgagcatttcagaatcttaggtcaccatatgtgtctcaaaaggcaaagagattgtccacttttgttaacgcaatcaaagcatccgaagagaagttccatcggtgattcagatctggaatcgcgacgtgctgctgtacgagcttggggtgatcaaccgattcatttggcggatcctgatattcatgagcttatggagaaagagaagcaacgacaagtaagaggaattgaattgattgcttctgagaatttcgtgtgtagagctgtaatggaagctttaggtagtcatttaacgaataaatactctgaaggtatgcctggagctagatactatactgggaatcaatatattgatcagattgagaatctctgtattgagcgtgctcttactgcgtttggtcttgaatctgataaatggggtgttaatgttcagccttattcttgtacttctgctaacttcgcggtgtataccggacttttattgcccggtgaacggattatggggcttgattcgccttctggtggtcatatgagtcatggttattgtactcctggtgggaagaagatttcggctgcttccatcttctttgagagttttccttataaagtgaatcctcaaactgggtatattgattatgataagcttgaagataaggcgcttgattaccgtcctaagattcttatttgtggtgggagttcttatcctagggattgggattttgcaagggttagacagattgcagataagtgtggagctgttttgatgtgtgatatggctcatattagcggtcttgttgcaactaaggaatgttcaaatccatttgatcactgtgacatagtaacctccactactcacaaaggtctacgtggtcctagaggaggtatcatcttctacaggagaggcccaaagataagaaagcagggccatcactctagccattgtgacacttccacgcattacgatctagaggaaaagatcaactttgctgtttttccatctctacaaggaggtccacacaacaaccatatcgctgctcttgccattgcattgaaacaagtggccactccagagtacaaagcttacatacaacagatgaagaaaaacgcccaagctttagcagcagctcttcttagaagaaaatgcagactggttactggtggtacagacaaccatttgttgctgtgggatctcactcctatgggcttaacagggaaagtctacgagaaagtgtgtgagatgtgccatatcactttaaacaagacggctatattcggggacaatggtacaatatctcctggaggtgtaagaatagggacacctgcaatgacaacccgaggctgtatagagtctgatttcgagacaatggcggattttctgataaaggcggctcagataacaagtgcgttgcagagagagcatggaaagtcacacaaggagtttgtgaaaagtttatgcaccaacaaagacatagctgagcttagaaaccgagtcgaagcatttgctttgcagtatgagatgcctgcttctcttattcgaattgaatgaaagaaaactccacacaacagctttatttacagttgaattttatcttatctctgggtcaatttttttttttttttggagttctatcttgtaaattagagtaaatatatatttatattgggattgatttgcattatttttttccattgtaattctgtaaacattttgataaatgggaatgattactacaaatttactt

SEQ ID NO: 41619 - protein, 600 aa, Arabidopsis thaliana
  peptide (1)..(600): Ceres Seq. ID no. 13493829
  misc_feature (140)..(545): Pfam Name: Serine hydroxymethyltransferase Pfam Description: Serine hydroxymethyltransferase
  misc_feature (131)..(593): Homolog of NCBI NO: 30585015 NR Description: Homo sapiens serine hydroxymethyltransferase 2
  misc_feature (144)..(593): Homolog of NCBI NO: 14030719 NR Description: AT4g32520/F8B4_220 [Arabidopsis thaliana]
  misc_feature (144)..(593): Homolog of NCBI NO: 18418028 NR Description: glycine hydroxymethyltransferase (EC 2.1.2.1) -
  misc_feature (144)..(590): Homolog of NCBI NO: 17066746 NR Description: serine hydroxymethyltransferase [Chlamydomonas
  misc_feature (132)..(597): Homolog of NCBI NO: 15236371 NR Description: glycine hydroxymethyltransferase - like protein
  misc_feature (132)..(597): Homolog of NCBI NO: 11762130 NR Description: AT4g13930 [Arabidopsis thaliana]
  misc_feature (132)..(597): Homolog of NCBI NO: 21592544 NR Description: hydroxymethyltransferase [Arabidopsis thaliana]
  misc_feature (132)..(597): Homolog of NCBI NO: 15236375 NR Description: hydroxymethyltransferase [Arabidopsis thaliana]
  misc_feature (110)..(593): Homolog of NCBI NO: 34907298 NR Description: putative hydroxymethyltransferase
  misc_feature (8)..(594): Homolog of NCBI NO: 15219182 NR Description: glycine hydroxymethyltransferase -related
TFMDLSRSQTNFQLGFGCSHASMTPTPTPRAPIADDSINLQVDQSFRSLPTTFSPIPLQLLEQKAEKTTTVDEPKKDGGGGGDQKEDEHFRILGHHMCLKRQRDCPLLLTQSKHPKRSSIGDSDLESRRAAVRAWGDQPIHLADPDIHELMEKEKQRQVRGIELIASENFVCRAVMEALGSHLTNKYSEGMPGARYYTGNQYIDQIENLCIERALTAFGLESDKWGVNVQPYSCTSANFAVYTGLLLPGERIMGLDSPSGGHMSHGYCTPGGKKISAASIFFESFPYKVNPQTGYIDYDKLEDKALDYRPKILICGGSSYPRDWDFARVRQIADKCGAVLMCDMAHISGLVATKECSNPFDHCDIVTSTTHKGLRGPRGGIIFYRRGPKIRKQGHHSSHCDTSTHYDLEEKINFAVFPSLQGGPHNNHIAALAIALKQVATPEYKAYIQQMKKNAQALAAALLRRKCRLVTGGTDNHLLLWDLTPMGLTGKVYEKVCEMCHITLNKTAIFGDNGTISPGGVRIGTPAMTTRGCIESDFETMADFLIKAAQITSALQREHGKSHKEFVKSLCTNKDIAELRNRVEAFALQYEMPASLIRIE

SEQ ID NO: 41620 - protein, 598 aa, Arabidopsis thaliana
  peptide (1)..(598): Ceres Seq. ID no. 13493830
  misc_feature (138)..(543): Pfam Name: Serine hydroxymethyltransferase Pfam Description: Serine hydroxymethyltransferase
  misc_feature (129)..(591): Homolog of NCBI NO: 30585015 NR Description: Homo sapiens serine hydroxymethyltransferase 2
  misc_feature (142)..(591): Homolog of NCBI NO: 14030719 NR Description: AT4g32520/F8B4_220 [Arabidopsis thaliana]
  misc_feature (142)..(591): Homolog of NCBI NO: 18418028 NR Description: glycine hydroxymethyltransferase (EC 2.1.2.1) -
  misc_feature (142)..(588): Homolog of NCBI NO: 17066746 NR Description: serine hydroxymethyltransferase [Chlamydomonas
  misc_feature (130)..(595): Homolog of NCBI NO: 15236371 NR Description: glycine hydroxymethyltransferase - like protein
  misc_feature (130)..(595): Homolog of NCBI NO: 11762130 NR Description: AT4g13930 [Arabidopsis thaliana]
  misc_feature (130)..(595): Homolog of NCBI NO: 21592544 NR Description: hydroxymethyltransferase [Arabidopsis thaliana]
  misc_feature (130)..(595): Homolog of NCBI NO: 15236375 NR Description: hydroxymethyltransferase [Arabidopsis thaliana]
  misc_feature (108)..(591): Homolog of NCBI NO: 34907298 NR Description: putative hydroxymethyltransferase
  misc_feature (6)..(592): Homolog of NCBI NO: 15219182 NR Description: glycine hydroxymethyltransferase -related
MDLSRSQTNFQLGFGCSHASMTPTPTPRAPIADDSINLQVDQSFRSLPTTFSPIPLQLLEQKAEKTTTVDEPKKDGGGGGDQKEDEHFRILGHHMCLKRQRDCPLLLTQSKHPKRSSIGDSDLESRRAAVRAWGDQPIHLADPDIHELMEKEKQRQVRGIELIASENFVCRAVMEALGSHLTNKYSEGMPGARYYTGNQYIDQIENLCIERALTAFGLESDKWGVNVQPYSCTSANFAVYTGLLLPGERIMGLDSPSGGHMSHGYCTPGGKKISAASIFFESFPYKVNPQTGYIDYDKLEDKALDYRPKILICGGSSYPRDWDFARVRQIADKCGAVLMCDMAHISGLVATKECSNPFDHCDIVTSTTHKGLRGPRGGIIFYRRGPKIRKQGHHSSHCDTSTHYDLEEKINFAVFPSLQGGPHNNHIAALAIALKQVATPEYKAYIQQMKKNAQALAAALLRRKCRLVTGGTDNHLLLWDLTPMGLTGKVYEKVCEMCHITLNKTAIFGDNGTISPGGVRIGTPAMTTRGCIESDFETMADFLIKAAQITSALQREHGKSHKEFVKSLCTNKDIAELRNRVEAFALQYEMPASLIRIE

SEQ ID NO: 41621 - protein, 578 aa, Arabidopsis thaliana
  peptide (1)..(578): Ceres Seq. ID no. 13493831
  misc_feature (118)..(523): Pfam Name: Serine hydroxymethyltransferase Pfam Description: Serine hydroxymethyltransferase
  misc_feature (109)..(571): Homolog of NCBI NO: 30585015 NR Description: Homo sapiens serine hydroxymethyltransferase 2
  misc_feature (122)..(571): Homolog of NCBI NO: 14030719 NR Description: AT4g32520/F8B4_220 [Arabidopsis thaliana]
  misc_feature (122)..(571): Homolog of NCBI NO: 18418028 NR Description: glycine hydroxymethyltransferase (EC 2.1.2.1) -
  misc_feature (122)..(568): Homolog of NCBI NO: 17066746 NR Description: serine hydroxymethyltransferase [Chlamydomonas
  misc_feature (110)..(575): Homolog of NCBI NO: 15236371 NR Description: glycine hydroxymethyltransferase - like protein
  misc_feature (110)..(575): Homolog of NCBI NO: 11762130 NR Description: AT4g13930 [Arabidopsis thaliana]
  misc_feature (110)..(575): Homolog of NCBI NO: 21592544 NR Description: hydroxymethyltransferase [Arabidopsis thaliana]
  misc_feature (110)..(575): Homolog of NCBI NO: 15236375 NR Description: hydroxymethyltransferase [Arabidopsis thaliana]
  misc_feature (88)..(571): Homolog of NCBI NO: 34907298 NR Description: putative hydroxymethyltransferase
  misc_feature (1)..(572): Homolog of NCBI NO: 15219182 NR Description: glycine hydroxymethyltransferase -related
MTPTPTPRAPIADDSINLQVDQSFRSLPTTFSPIPLQLLEQKAEKTTTVDEPKKDGGGGGDQKEDEHFRILGHHMCLKRQRDCPLLLTQSKHPKRSSIGDSDLESRRAAVRAWGDQPIHLADPDIHELMEKEKQRQVRGIELIASENFVCRAVMEALGSHLTNKYSEGMPGARYYTGNQYIDQIENLCIERALTAFGLESDKWGVNVQPYSCTSANFAVYTGLLLPGERIMGLDSPSGGHMSHGYCTPGGKKISAASIFFESFPYKVNPQTGYIDYDKLEDKALDYRPKILICGGSSYPRDWDFARVRQIADKCGAVLMCDMAHISGLVATKECSNPFDHCDIVTSTTHKGLRGPRGGIIFYRRGPKIRKQGHHSSHCDTSTHYDLEEKINFAVFPSLQGGPHNNHIAALAIALKQVATPEYKAYIQQMKKNAQALAAALLRRKCRLVTGGTDNHLLLWDLTPMGLTGKVYEKVCEMCHITLNKTAIFGDNGTISPGGVRIGTPAMTTRGCIESDFETMADFLIKAAQITSALQREHGKSHKEFVKSLCTNKDIAELRNRVEAFALQYEMPASLIRIE

SEQ ID NO: 41622 - DNA, 1491 bp, Arabidopsis thaliana
  misc_feature (1)..(1491): Ceres Seq. ID no. 12681276
  misc_feature: MA Experiment ID: 108434 Result: Up-regulated in Transcription
  misc_feature: MA Experiment 108434 PARAMETER Experiment Name: At_Root_Tips_cDNA_P Parameter: Tissue Value: Root Tips
  misc_feature: MA Experiment ID: 108462 Result: Down-regulated in Transcription
  misc_feature: MA Experiment 108462 PARAMETER Experiment Name: At_Germinating_Seeds_cDNA_P Parameter: Age (day) Value: 2 vs. 0
  misc_feature: MA Experiment 108462 PARAMETER Experiment Name: At_Germinating_Seeds_cDNA_P Parameter: Tissue Value: Germinating Seeds
  misc_feature: MA Experiment ID: 108463 Result: Down-regulated in Transcription
  misc_feature: MA Experiment 108463 PARAMETER Experiment Name: At_Germinating_Seeds_cDNA_P Parameter: Age (day) Value: 3 vs. 0
  misc_feature: MA Experiment 108463 PARAMETER Experiment Name: At_Germinating_Seeds_cDNA_P Parameter: Tissue Value: Germinating Seeds
  misc_feature: MA Experiment ID: 108464 Result: Down-regulated in Transcription
  misc_feature: MA Experiment 108464 PARAMETER Experiment Name: At_Germinating_Seeds_cDNA_P Parameter: Age (day) Value: 4 vs. 0
  misc_feature: MA Experiment 108464 PARAMETER Experiment Name: At_Germinating_Seeds_cDNA_P Parameter: Tissue Value: Germinating Seeds
  misc_feature: MA Experiment ID: 108573 Result: Up-regulated in Transcription
  misc_feature: MA Experiment 108573 PARAMETER Experiment Name: At_Drought_cDNA_P Parameter: Timepoint (hr) Value: 6
  misc_feature: MA Experiment 108573 PARAMETER Experiment Name: At_Drought_cDNA_P Parameter: Tissue Value: Aerial
  misc_feature: MA Experiment 108573 PARAMETER Experiment Name: At_Drought_cDNA_P Parameter: Treatment Value: Drought vs. No Drought
  misc_feature: MA Experiment ID: 108595 Result: Down-regulated in Transcription
  misc_feature: MA Experiment 108595 PARAMETER Experiment Name: At_Ler-pi_Ovule_cDNA_P Parameter: Plant Line Value: null
  misc_feature: Pfam Name: tRNA-synt_1b Pfam Description: tRNA synthetases class I (W and Y)
atctccagtcgcaaaaccaccgccgtatatccacggccgtcttatcaccggcaacaaccgtaggtttttgttttccgtcgcgatggaggtggataagaaggacgagagagaggctgaatcttcggagcaagtggtgaatccatgggaagtgtccgccaaagacggcgggaagatcgattacgacaagcttattgacaaatttggatgtcaaaggcttgacgagtcactgattgatcgtgttcagagactgacttctcgtcaaccacacgtgttcctccgccgtagtgtcttcttcgcccaccgggatttcaatgagattttggacgcttatgagagaggagacaagttctatctctacactggaagaggaccttcatcagaagcattgcatttggggcatttgattcctttcatgtttaccaaatacttgcaagaagctttcaaggttccccttgttatacagctcacggatgatgaaaaaagtatatggaagaacttatcggtggaggaaagtcaaagacttgccagagaaaatgcgaaagatattattgcttgtggattcgatgtaacaaagaccttcattttctcggacttcgactatgttggcggtgctttctataaaaatatggtgaaggttggcaagtgcgttacacttaataaggctatgggaatctttggcttttccggtgaagatcctatcgcgaaactcagtttccctcctgtgcaggcagttccatcttttcctagctcattcccacatttgttccctggcaaggacaatctccgctgcttgattccttgtgctattgaccaggatccttattttagaatgactcgtgatgtcgcaccccggttaggctatagcaagcccgccctgattgagtcaacattttttcctgcgttgcagggagagaatggaaaaatgtctgctagtgatccaaattctgctatctatgtgactgattccgcaaaggacattaaaaacaagataaacagatatgcgtttagtggtgggcaagactccattgagaagcaccgagaacttggagcaaatctcgaggttgacatacccgtcaagtatctgagtttcttcctcgaagacgattctgaactagaacacattaaaaaggaatatggagaaggaagaatgctaacaggagaagtaaagaagagacttacggaagtgttgacagaaattgtggagagacaccgcagggctcgagctgctgttactgatgagatggttgatgcgttcatggcggtgagacctctcccaagcatgttcgaatagaaaaagtcagaaaccctttttggctcctcagcaacttcacatcactccgtttgatttggattcagacatctttgggtgtctattgatagatttgatccttgaaattgaaccatacttgttagttacaattttcatatttacatttatttatgaatcacattctaaaatgatttgcattgttaattgaataaagtgaaact

SEQ ID NO: 41623 - protein, 429 aa, Arabidopsis thaliana
  peptide (1)..(429): Ceres Seq. ID no. 12681277
  misc_feature: Pfam Name: tRNA-synt_1b Pfam Description: tRNA synthetases class I (W and Y)
  misc_feature (34)..(424): Homolog of NCBI NO: 7428462 NR Description: tryptophan-tRNA ligase (EC 6.1.1.2) [validated] -
  misc_feature (34)..(429): Homolog of NCBI NO: 29144895 NR Description: tryptophanyl-tRNA synthetase [Mus musculus]
  misc_feature (28)..(424): Homolog of NCBI NO: 28302309 NR Description: Similar to tryptophanyl-tRNA synthetase [Xenopus
  misc_feature (34)..(429): Homolog of NCBI NO: 34328206 NR Description: tryptophanyl-tRNA synthetase [Mus musculus]
  misc_feature (34)..(429): Homolog of NCBI NO: 12835778 NR Description: unnamed protein product [Mus musculus]
  misc_feature (34)..(424): Homolog of NCBI NO: 2851538 NR Description: TRYPTOPHANYL-TRNA SYNTHETASE (TRYPTOPHAN--TRNA
  misc_feature (34)..(429): Homolog of NCBI NO: 4759316 NR Description: tryptophanyl-tRNA synthetase; interferon-induced
  misc_feature (34)..(429): Homolog of NCBI NO: 135191 NR Description: Tryptophanyl-tRNA synthetase (Tryptophan--tRNA
  misc_feature (34)..(429): Homolog of NCBI NO: 32709 NR Description: IFP53 [Homo sapiens]
  misc_feature (28)..(429): Homolog of NCBI NO: 15229319 NR Description: putative tryptophanyl-tRNA synthetase
SPVAKPPPYIHGRLITGNNRRFLFSVAMEVDKKDEREAESSEQVVNPWEVSAKDGGKIDYDKLIDKFGCQRLDESLIDRVQRLTSRQPHVFLRRSVFFAHRDFNEILDAYERGDKFYLYTGRGPSSEALHLGHLIPFMFTKYLQEAFKVPLVIQLTDDEKSIWKNLSVEESQRLARENAKDIIACGFDVTKTFIFSDFDYVGGAFYKNMVKVGKCVTLNKAMGIFGFSGEDPIAKLSFPPVQAVPSFPSSFPHLFPGKDNLRCLIPCAIDQDPYFRMTRDVAPRLGYSKPALIESTFFPALQGENGKMSASDPNSAIYVTDSAKDIKNKINRYAFSGGQDSIEKHRELGANLEVDIPVKYLSFFLEDDSELEHIKKEYGEGRMLTGEVKKRLTEVLTEIVERHRRARAAVTDEMVDAFMAVRPLPSMFE

SEQ ID NO: 41624 - protein, 402 aa, Arabidopsis thaliana
  peptide (1)..(402): Ceres Seq. ID no. 12681278
  misc_feature: Pfam Name: tRNA-synt_1b Pfam Description: tRNA synthetases class I (W and Y)
  misc_feature (7)..(397): Homolog of NCBI NO: 7428462 NR Description: tryptophan-tRNA ligase (EC 6.1.1.2) [validated] -
  misc_feature (7)..(402): Homolog of NCBI NO: 29144895 NR Description: tryptophanyl-tRNA synthetase [Mus musculus]
  misc_feature (1)..(397): Homolog of NCBI NO: 28302309 NR Description: Similar to tryptophanyl-tRNA synthetase [Xenopus
  misc_feature (7)..(402): Homolog of NCBI NO: 34328206 NR Description: tryptophanyl-tRNA synthetase [Mus musculus]
  misc_feature (7)..(402): Homolog of NCBI NO: 12835778 NR Description: unnamed protein product [Mus musculus]
  misc_feature (7)..(397): Homolog of NCBI NO: 2851538 NR Description: TRYPTOPHANYL-TRNA SYNTHETASE (TRYPTOPHAN--TRNA
  misc_feature (7)..(402): Homolog of NCBI NO: 4759316 NR Description: tryptophanyl-tRNA synthetase; interferon-induced
  misc_feature (7)..(402): Homolog of NCBI NO: 135191 NR Description: Tryptophanyl-tRNA synthetase (Tryptophan--tRNA
  misc_feature (7)..(402): Homolog of NCBI NO: 32709 NR Description: IFP53 [Homo sapiens]
  misc_feature (1)..(402): Homolog of NCBI NO: 15229319 NR Description: putative tryptophanyl-tRNA synthetase
MEVDKKDEREAESSEQVVNPWEVSAKDGGKIDYDKLIDKFGCQRLDESLIDRVQRLTSRQPHVFLRRSVFFAHRDFNEILDAYERGDKFYLYTGRGPSSEALHLGHLIPFMFTKYLQEAFKVPLVIQLTDDEKSIWKNLSVEESQRLARENAKDIIACGFDVTKTFIFSDFDYVGGAFYKNMVKVGKCVTLNKAMGIFGFSGEDPIAKLSFPPVQAVPSFPSSFPHLFPGKDNLRCLIPCAIDQDPYFRMTRDVAPRLGYSKPALIESTFFPALQGENGKMSASDPNSAIYVTDSAKDIKNKINRYAFSGGQDSIEKHRELGANLEVDIPVKYLSFFLEDDSELEHIKKEYGEGRMLTGEVKKRLTEVLTEIVERHRRARAAVTDEMVDAFMAVRPLPSMFE

SEQ ID NO: 41625 - protein, 292 aa, Arabidopsis thaliana
  peptide (1)..(292): Ceres Seq. ID no. 12681279
  misc_feature: Pfam Name: tRNA-synt_1b Pfam Description: tRNA synthetases class I (W and Y)
  misc_feature (1)..(287): Homolog of NCBI NO: 7428462 NR Description: tryptophan-tRNA ligase (EC 6.1.1.2) [validated] -
  misc_feature (1)..(292): Homolog of NCBI NO: 29144895 NR Description: tryptophanyl-tRNA synthetase [Mus musculus]
  misc_feature (1)..(287): Homolog of NCBI NO: 28302309 NR Description: Similar to tryptophanyl-tRNA synthetase [Xenopus
  misc_feature (1)..(292): Homolog of NCBI NO: 34328206 NR Description: tryptophanyl-tRNA synthetase [Mus musculus]
  misc_feature (1)..(292): Homolog of NCBI NO: 12835778 NR Description: unnamed protein product [Mus musculus]
  misc_feature (1)..(287): Homolog of NCBI NO: 2851538 NR Description: TRYPTOPHANYL-TRNA SYNTHETASE (TRYPTOPHAN--TRNA
  misc_feature (1)..(292): Homolog of NCBI NO: 4759316 NR Description: tryptophanyl-tRNA synthetase; interferon-induced
  misc_feature (1)..(292): Homolog of NCBI NO: 135191 NR Description: Tryptophanyl-tRNA synthetase (Tryptophan--tRNA
  misc_feature (1)..(292): Homolog of NCBI NO: 32709 NR Description: IFP53 [Homo sapiens]
  misc_feature (1)..(292): Homolog of NCBI NO: 15229319 NR Description: putative tryptophanyl-tRNA synthetase
MFTKYLQEAFKVPLVIQLTDDEKSIWKNLSVEESQRLARENAKDIIACGFDVTKTFIFSDFDYVGGAFYKNMVKVGKCVTLNKAMGIFGFSGEDPIAKLSFPPVQAVPSFPSSFPHLFPGKDNLRCLIPCAIDQDPYFRMTRDVAPRLGYSKPALIESTFFPALQGENGKMSASDPNSAIYVTDSAKDIKNKINRYAFSGGQDSIEKHRELGANLEVDIPVKYLSFFLEDDSELEHIKKEYGEGRMLTGEVKKRLTEVLTEIVERHRRARAAVTDEMVDAFMAVRPLPSMFE

SEQ ID NO: 41626 - DNA, 1781 bp, Arabidopsis thaliana
  misc_feature (1)..(1781): Ceres Seq. ID no. 12329754
  misc_feature: MA Experiment ID: 108434 Result: Up-regulated in Transcription
  misc_feature: MA Experiment 108434 PARAMETER Experiment Name: At_Root_Tips_cDNA_P Parameter: Tissue Value: Root Tips
  misc_feature: MA Experiment ID: 108435 Result: Up-regulated in Transcription
  misc_feature: MA Experiment 108435 PARAMETER Experiment Name: At_stm_Mutants_cDNA_P Parameter: Plant Line Value: wt Landsburg vs stm
  misc_feature: MA Experiment 108435 PARAMETER Experiment Name: At_stm_Mutants_cDNA_P Parameter: Tissue Value: Shoot Apical Meristem Region
  misc_feature: MA Experiment ID: 108473 Result: Down-regulated in Transcription
  misc_feature: MA Experiment 108473 PARAMETER Experiment Name: At_Drought_Flowers_cDNA_P Parameter: Timepoint (hr) Value: 7 d
  misc_feature: MA Experiment 108473 PARAMETER Experiment Name: At_Drought_Flowers_cDNA_P Parameter: Tissue Value: Flower
  misc_feature: MA Experiment 108473 PARAMETER Experiment Name: At_Drought_Flowers_cDNA_P Parameter: Treatment Value: Drought vs. No Drought
  misc_feature: MA Experiment ID: 108595 Result: Up-regulated in Transcription
  misc_feature: MA Experiment 108595 PARAMETER Experiment Name: At_Ler-pi_Ovule_cDNA_P Parameter: Plant Line Value: null
  misc_feature: MA Experiment ID: 20000069 Result: Down-regulated in Transcription
  misc_feature: MA Experiment 20000069 PARAMETER Experiment Name: At_100uM_ABA_Mutants_cDNA_P Parameter: Plant Line Value: CS23
  misc_feature: MA Experiment 20000069 PARAMETER Experiment Name: At_100uM_ABA_Mutants_cDNA_P Parameter: Timepoint (hr) Value: 6
  misc_feature: MA Experiment 20000069 PARAMETER Experiment Name: At_100uM_ABA_Mutants_cDNA_P Parameter: Tissue Value: Aerial
  misc_feature: MA Experiment 20000069 PARAMETER Experiment Name: At_100uM_ABA_Mutants_cDNA_P Parameter: Treatment Value: 100uM ABA vs. No Treatment
  misc_feature: MA Experiment ID: 20000087 Result: Down-regulated in Transcription
  misc_feature: MA Experiment 20000087 PARAMETER Experiment Name: At_100uM_ABA_Mutants_cDNA_P Parameter: Plant Line Value: WS
  misc_feature: MA Experiment 20000087 PARAMETER Experiment Name: At_100uM_ABA_Mutants_cDNA_P Parameter: Timepoint (hr) Value: 6
  misc_feature: MA Experiment 20000087 PARAMETER Experiment Name: At_100uM_ABA_Mutants_cDNA_P Parameter: Tissue Value: Aerial
  misc_feature: MA Experiment 20000087 PARAMETER Experiment Name: At_100uM_ABA_Mutants_cDNA_P Parameter: Treatment Value: 100uM ABA vs. No Treatment
  misc_feature: MA Experiment ID: 20000090 Result: Down-regulated in Transcription
  misc_feature: MA Experiment ID: 20000093 Result: Down-regulated in Transcription
  misc_feature: MA Experiment 20000093 PARAMETER Experiment Name: At_42deg_Heat_cDNA_P Parameter: Temperature (deg C) Value: 42 vs. 22
  misc_feature: MA Experiment 20000093 PARAMETER Experiment Name: At_42deg_Heat_cDNA_P Parameter: Timepoint (hr) Value: 0.5
  misc_feature: MA Experiment 20000093 PARAMETER Experiment Name: At_42deg_Heat_cDNA_P Parameter: Tissue Value: Aerial
  misc_feature: MA Experiment ID: 20000112 Result: Down-regulated in Transcription
  misc_feature: MA Experiment 20000112 PARAMETER Experiment Name: At_42deg_Heat_cDNA_P Parameter: Temperature (deg C) Value: 42 vs. 22
  misc_feature: MA Experiment 20000112 PARAMETER Experiment Name: At_42deg_Heat_cDNA_P Parameter: Timepoint (hr) Value: 2
  misc_feature: MA Experiment 20000112 PARAMETER Experiment Name: At_42deg_Heat_cDNA_P Parameter: Tissue Value: Aerial
  misc_feature: MA Experiment ID: 20000113 Result: Down-regulated in Transcription
  misc_feature: MA Experiment 20000113 PARAMETER Experiment Name: At_42deg_Heat_cDNA_P Parameter: Temperature (deg C) Value: 42 vs. 22
  misc_feature: MA Experiment 20000113 PARAMETER Experiment Name: At_42deg_Heat_cDNA_P Parameter: Timepoint (hr) Value: 8
  misc_feature: MA Experiment 20000113 PARAMETER Experiment Name: At_42deg_Heat_cDNA_P Parameter: Tissue Value: Aerial
  misc_feature: MA Experiment ID: 20000185 Result: Down-regulated in Transcription
  misc_feature: MA Experiment 20000185 PARAMETER Experiment Name: At_Roots__P Parameter: Age (day) Value: 7 vs. 21
  misc_feature: MA Experiment 20000185 PARAMETER Experiment Name: At_Roots__P Parameter: Organism Value: A. thaliana
  misc_feature: MA Experiment 20000185 PARAMETER Experiment Name: At_Roots__P Parameter: Tissue Value: Roots vs. Whole Plant
  misc_feature: MA Experiment ID: 20000234 Result: Up-regulated in Transcription
  misc_feature: MA Experiment 20000234 PARAMETER Experiment Name: At_Siliques_P Parameter: Age (day) Value: 21
  misc_feature: MA Experiment 20000234 PARAMETER Experiment Name: At_Siliques_P Parameter: Organism Value: A. thaliana
  misc_feature: MA Experiment 20000234 PARAMETER Experiment Name: At_Siliques_P Parameter: Plant Line Value: WS
  misc_feature: MA Experiment 20000234 PARAMETER Experiment Name: At_Siliques_P Parameter: Tissue Value: Less Than 5mm Siliques vs. Whole Plant
  misc_feature: MA Experiment ID: 20000264 Result: Up-regulated in Transcription
  misc_feature: MA Experiment 20000264 PARAMETER Experiment Name: At_Open_Flower_P Parameter: Age (day) Value: 21
  misc_feature: MA Experiment 20000264 PARAMETER Experiment Name: At_Open_Flower_P Parameter: Plant Line Value: WS
  misc_feature: MA Experiment 20000264 PARAMETER Experiment Name: At_Open_Flower_P Parameter: Tissue Value: Open Flower vs. Whole Plant
  misc_feature: MA Experiment ID: 20000265 Result: Up-regulated in Transcription
  misc_feature: MA Experiment 20000265 PARAMETER Experiment Name: At_Open_Flower_P Parameter: Age (day) Value: 21
  misc_feature: MA Experiment 20000265 PARAMETER Experiment Name: At_Open_Flower_P Parameter: Plant Line Value: WS
  misc_feature: MA Experiment 20000265 PARAMETER Experiment Name: At_Open_Flower_P Parameter: Tissue Value: Closed Flower vs. Whole Plant
  misc_feature: MA Experiment ID: 20000286 Result: Up-regulated in Transcription
  misc_feature: MA Experiment 20000286 PARAMETER Experiment Name: At_Open_Flower_P Parameter: Age (day) Value: 21
  misc_feature: MA Experiment 20000286 PARAMETER Experiment Name: At_Open_Flower_P Parameter: Plant Line Value: WS
  misc_feature: MA Experiment 20000286 PARAMETER Experiment Name: At_Open_Flower_P Parameter: Tissue Value: Half Open vs. Whole Plant
  misc_feature: MA Experiment ID: 20001558 Result: Up-regulated in Transcription
  misc_feature: MA Experiment 20001558 PARAMETER Experiment Name: At_Drought_Soil_Dry_P Parameter: Age (day) Value: 27
  misc_feature: MA Experiment 20001558 PARAMETER Experiment Name: At_Drought_Soil_Dry_P Parameter: Organism Value: A. thaliana
  misc_feature: MA Experiment 20001558 PARAMETER Experiment Name: At_Drought_Soil_Dry_P Parameter: Plant Line Value: WS
  misc_feature: MA Experiment 20001558 PARAMETER Experiment Name: At_Drought_Soil_Dry_P Parameter: Post Timepoint (hr) Value: 6
  misc_feature: MA Experiment 20001558 PARAMETER Experiment Name: At_Drought_Soil_Dry_P Parameter: Post-Treatment Value: Re-Water vs. No Drought
  misc_feature: MA Experiment 20001558 PARAMETER Experiment Name: At_Drought_Soil_Dry_P Parameter: Timepoint (day) Value: 13
  misc_feature: MA Experiment 20001558 PARAMETER Experiment Name: At_Drought_Soil_Dry_P Parameter: Treatment Value: Drought vs. No Drought
  misc_feature: MA Experiment ID: 20001905 Result: Down-regulated in Transcription
  misc_feature: MA Experiment 20001905 PARAMETER Experiment Name: At_Drought_Reproduction_P Parameter: Age (day) Value: 40
  misc_feature: MA Experiment 20001905 PARAMETER Experiment Name: At_Drought_Reproduction_P Parameter: Organism Value: A. thaliana
  misc_feature: MA Experiment 20001905 PARAMETER Experiment Name: At_Drought_Reproduction_P Parameter: Plant Line Value: WS
  misc_feature: MA Experiment 20001905 PARAMETER Experiment Name: At_Drought_Reproduction_P Parameter: Timepoint (day) Value: 10
  misc_feature: MA Experiment 20001905 PARAMETER Experiment Name: At_Drought_Reproduction_P Parameter: Tissue Value: Rosettes
  misc_feature: MA Experiment 20001905 PARAMETER Experiment Name: At_Drought_Reproduction_P Parameter: Treatment Value: Drought vs. No Drought
  misc_feature: MA Experiment ID: 20001906 Result: Down-regulated in Transcription
  misc_feature: MA Experiment 20001906 PARAMETER Experiment Name: At_Drought_Reproduction_P Parameter: Age (day) Value: 35
  misc_feature: MA Experiment 20001906 PARAMETER Experiment Name: At_Drought_Reproduction_P Parameter: Organism Value: A. thaliana
  misc_feature: MA Experiment 20001906 PARAMETER Experiment Name: At_Drought_Reproduction_P Parameter: Plant Line Value: WS
  misc_feature: MA Experiment 20001906 PARAMETER Experiment Name: At_Drought_Reproduction_P Parameter: Timepoint (day) Value: 5
  misc_feature: MA Experiment 20001906 PARAMETER Experiment Name: At_Drought_Reproduction_P Parameter: Tissue Value: Siliques
  misc_feature: MA Experiment 20001906 PARAMETER Experiment Name: At_Drought_Reproduction_P Parameter: Treatment Value: Drought vs. No Drought
actcttaatctttaaaaaaaagaaaaaaaaaaacagaacaatttcttcttcctctgggatccataagttttgagtgaatagtggaagagagaaagcttcttagagatctgtttttggttactttcattaaaagtcatatggttattgatcagaaagcaaatctctcctttatgtcttcaaaaaaaggatgaagagtatagagatttgagcatattacagtacctagagtgaagagtatagagatttgagcatgaataagcagaggattttataataaggaacacatggaaatttctctcagacacttcaattttggtggtcagtgtctgatggagtgtaatgcaaagccaccgtttcaatgggaattggaaaacttgatatcttttggcacttctacagctgaagttcctagaaagctaaagccaatggagtgggaaattgatggatttgattgcacctctctgtattcttcaagctttgatgcagtagcttatggtggtagttcaggttctgatatagctcatgctttctctaaaagctcaaagtcaacttccattagctcttcatcagctgaagttagaacacacaattttacatcagaaactggtgaaagtcttcctggagaatttgcaaaggggattgatacttctccaactcttgaactttcttttggctctggtgatccggttctcggtttaaagcttggtaaacgaacgtactttgaagacttttgggaagtggagaatgctaaaggtttgggacttcccgtgagccttgcttcgtcttctgtttctccggtgaagaaatcgaaatccattcctcagaggttacaaactcctcactgtcaagttgaaggctgtaatcttgatctttcatcagctaaagactatcatcggaaacataggatttgtgaaaaccattcaaagtttcctaaagtcgttgtgagtggcgtagagcgtcggttctgccaacaatgtagcaggttccactgtctctccgagtttgatgagaagaaacgtagctgtcgccgacgtctctcagatcacaatgcaagacgtcgcaagccaaatcctggaaggacatatgatgggaaaccacaggtggattttgtatggaacagatttgcacttatccatccaagaagtgaggaaaagtttctatggcccagttcaaagcctgtaccatcaagagtcttaatgccgcagcctgcaaagaccgagatttccaataagctgttcaccgagcacagtagatttggattgttggaccccaaaacaaaatccgcaagagcggagttattcagtaaagaaaaggtcacaatctcttcacacatgggtgcttctcaagatcttgatggtgctctctctcttctgtcaaattcaacaacatgggtttcttcctctgaccaaccaagacgttttacccttgatcaccatccctcaagcaacctccaacccgtagctaaccggtctgcggctcaactcagttcagtgtccggctattggcagccggacccacccgcagttgaaggcccgaccgctctgcatagaaatggggcaggccagtttaatgaaaactacttcagcttgaaccagttttataactgaaagctgtatgcctttaaatcctatttaggatcaagcaagctagtgataagttaagataggagctgtgaaacttgcaagacaccaaatcctctcttatttctttgtccaaatattttcatgggttagagagctttgacaattgtctttaatatcaactttatcgtgttatacatt

SEQ ID NO: 41627 - protein, 440 aa, Arabidopsis thaliana
  peptide (1)..(440): Ceres Seq. ID no. 12329755
  misc_feature (186)..(264): Pfam Name: SBP domain Pfam Description: SBP domain
  misc_feature (112)..(365): Homolog of NCBI NO: 15028115 NR Description: putative squamosa-promoter binding protein
  misc_feature (113)..(271): Homolog of NCBI NO: 5931778 NR Description: SBP-domain protein 1 [Zea mays]
  misc_feature (131)..(371): Homolog of NCBI NO: 25352584 NR Description: squamosa promoter binding protein-homolog 4
  misc_feature (25)..(367): Homolog of NCBI NO: 25403307 NR Description: protein F17L21.14 [imported] - Arabidopsis
  misc_feature (16)..(367): Homolog of NCBI NO: 18396302 NR Description: putative squamosa-promoter binding protein 2
  misc_feature (24)..(367): Homolog of NCBI NO: 9802546 NR Description: F17L21.15 [Arabidopsis thaliana]
  misc_feature (16)..(367): Homolog of NCBI NO: 18650611 NR Description: At1g27370/F17L21_16 [Arabidopsis thaliana]
  misc_feature (16)..(367): Homolog of NCBI NO: 22329813 NR Description: putative squamosa-promoter binding protein 2
  misc_feature (16)..(440): Homolog of NCBI NO: 15239820 NR Description: squamosa promoter binding protein-like 2
  misc_feature (16)..(440): Homolog of NCBI NO: 25456646 NR Description: squamosa promoter binding protein 2
MEISLRHFNFGGQCLMECNAKPPFQWELENLISFGTSTAEVPRKLKPMEWEIDGFDCTSLYSSSFDAVAYGGSSGSDIAHAFSKSSKSTSISSSSAEVRTHNFTSETGESLPGEFAKGIDTSPTLELSFGSGDPVLGLKLGKRTYFEDFWEVENAKGLGLPVSLASSSVSPVKKSKSIPQRLQTPHCQVEGCNLDLSSAKDYHRKHRICENHSKFPKVVVSGVERRFCQQCSRFHCLSEFDEKKRSCRRRLSDHNARRRKPNPGRTYDGKPQVDFVWNRFALIHPRSEEKFLWPSSKPVPSRVLMPQPAKTEISNKLFTEHSRFGLLDPKTKSARAELFSKEKVTISSHMGASQDLDGALSLLSNSTTWVSSSDQPRRFTLDHHPSSNLQPVANRSAAQLSSVSGYWQPDPPAVEGPTALHRNGAGQFNENYFSLNQFYN

SEQ ID NO: 41628 - protein, 425 aa, Arabidopsis thaliana; identical to SEQ ID NO: 37436
  peptide (1)..(425): Ceres Seq. ID no. 12329756
  misc_feature (171)..(249): Pfam Name: SBP domain Pfam Description: SBP domain
  misc_feature (97)..(350): Homolog of NCBI NO: 15028115 NR Description: putative squamosa-promoter binding protein
  misc_feature (98)..(256): Homolog of NCBI NO: 5931778 NR Description: SBP-domain protein 1 [Zea mays]
  misc_feature (116)..(356): Homolog of NCBI NO: 25352584 NR Description: squamosa promoter binding protein-homolog 4
  misc_feature (10)..(352): Homolog of NCBI NO: 25403307 NR Description: protein F17L21.14 [imported] - Arabidopsis
  misc_feature (1)..(352): Homolog of NCBI NO: 18396302 NR Description: putative squamosa-promoter binding protein 2
  misc_feature (9)..(352): Homolog of NCBI NO: 9802546 NR Description: F17L21.15 [Arabidopsis thaliana]
  misc_feature (1)..(352): Homolog of NCBI NO: 18650611 NR Description: At1g27370/F17L21_16 [Arabidopsis thaliana]
  misc_feature (1)..(352): Homolog of NCBI NO: 22329813 NR Description: putative squamosa-promoter binding protein 2
  misc_feature (1)..(425): Homolog of NCBI NO: 15239820 NR Description: squamosa promoter binding protein-like 2
  misc_feature (1)..(425): Homolog of NCBI NO: 25456646 NR Description: squamosa promoter binding protein 2

SEQ ID NO: 41629 - protein, 393 aa, Arabidopsis thaliana; identical to SEQ ID NO: 37437
  peptide (1)..(393): Ceres Seq. ID no. 12329757
  misc_feature (139)..(217): Pfam Name: SBP domain Pfam Description: SBP domain
  misc_feature (65)..(318): Homolog of NCBI NO: 15028115 NR Description: putative squamosa-promoter binding protein
  misc_feature (66)..(224): Homolog of NCBI NO: 5931778 NR Description: SBP-domain protein 1 [Zea mays]
  misc_feature (84)..(324): Homolog of NCBI NO: 25352584 NR Description: squamosa promoter binding protein-homolog 4
  misc_feature (1)..(320): Homolog of NCBI NO: 25403307 NR Description: protein F17L21.14 [imported] - Arabidopsis
  misc_feature (1)..(320): Homolog of NCBI NO: 18396302 NR Description: putative squamosa-promoter binding protein 2
  misc_feature (1)..(320): Homolog of NCBI NO: 9802546 NR Description: F17L21.15 [Arabidopsis thaliana]
  misc_feature (1)..(320): Homolog of NCBI NO: 18650611 NR Description: At1g27370/F17L21_16 [Arabidopsis thaliana]
  misc_feature (1)..(320): Homolog of NCBI NO: 22329813 NR Description: putative squamosa-promoter binding protein 2
  misc_feature (1)..(393): Homolog of NCBI NO: 15239820 NR Description: squamosa promoter binding protein-like 2
  misc_feature (1)..(393): Homolog of NCBI NO: 25456646 NR Description: squamosa promoter binding protein 2

SEQ ID NO: 41630 - DNA, 1499 bp, Arabidopsis thaliana
  misc_feature (1)..(1499): Ceres Seq. ID no. 12329744
  misc_feature: MA Experiment ID: 20000173 Result: Down-regulated in Transcription
  misc_feature: MA Experiment 20000173 PARAMETER Experiment Name: At_42deg_Heat_P Parameter: Age (day) Value: 14
  misc_feature: MA Experiment 20000173 PARAMETER Experiment Name: At_42deg_Heat_P Parameter: Organism Value: A. thaliana
  misc_feature: MA Experiment 20000173 PARAMETER Experiment Name: At_42deg_Heat_P Parameter: Plant Line Value: WS
  misc_feature: MA Experiment 20000173 PARAMETER Experiment Name: At_42deg_Heat_P Parameter: Temperature (deg C) Value: 42 vs. 22
  misc_feature: MA Experiment 20000173 PARAMETER Experiment Name: At_42deg_Heat_P Parameter: Timepoint (hr) Value: 6
  misc_feature: MA Experiment 20000173 PARAMETER Experiment Name: At_42deg_Heat_P Parameter: Tissue Value: Aerial
  misc_feature: MA Experiment ID: 20000185 Result: Up-regulated in Transcription
  misc_feature: MA Experiment 20000185 PARAMETER Experiment Name: At_Roots__P Parameter: Age (day) Value: 7 vs. 21
  misc_feature: MA Experiment 20000185 PARAMETER Experiment Name: At_Roots__P Parameter: Organism Value: A. thaliana
  misc_feature: MA Experiment 20000185 PARAMETER Experiment Name: At_Roots__P Parameter: Tissue Value: Roots vs. Whole Plant
  misc_feature: MA Experiment ID: 20000234 Result: Up-regulated in Transcription
  misc_feature: MA Experiment 20000234 PARAMETER Experiment Name: At_Siliques_P Parameter: Age (day) Value: 21
  misc_feature: MA Experiment 20000234 PARAMETER Experiment Name: At_Siliques_P Parameter: Organism Value: A. thaliana
  misc_feature: MA Experiment 20000234 PARAMETER Experiment Name: At_Siliques_P Parameter: Plant Line Value: WS
  misc_feature: MA Experiment 20000234 PARAMETER Experiment Name: At_Siliques_P Parameter: Tissue Value: Less Than 5mm Siliques vs. Whole Plant
  misc_feature: MA Experiment ID: 20000235 Result: Up-regulated in Transcription
  misc_feature: MA Experiment 20000235 PARAMETER Experiment Name: At_Siliques_P Parameter: Age (day) Value: 21
  misc_feature: MA Experiment 20000235 PARAMETER Experiment Name: At_Siliques_P Parameter: Organism Value: A. thaliana
  misc_feature: MA Experiment 20000235 PARAMETER Experiment Name: At_Siliques_P Parameter: Plant Line Value: WS
  misc_feature: MA Experiment 20000235 PARAMETER Experiment Name: At_Siliques_P Parameter: Tissue Value: 5-10mm Siliques vs. Whole Plant
  misc_feature: MA Experiment ID: 20000264 Result: Up-regulated in Transcription
  misc_feature: MA Experiment 20000264 PARAMETER Experiment Name: At_Open_Flower_P Parameter: Age (day) Value: 21
  misc_feature: MA Experiment 20000264 PARAMETER Experiment Name: At_Open_Flower_P Parameter: Plant Line Value: WS
  misc_feature: MA Experiment 20000264 PARAMETER Experiment Name: At_Open_Flower_P Parameter: Tissue Value: Open Flower vs. Whole Plant
  misc_feature: MA Experiment ID: 20000265 Result: Up-regulated in Transcription
  misc_feature: MA Experiment 20000265 PARAMETER Experiment Name: At_Open_Flower_P Parameter: Age (day) Value: 21
  misc_feature: MA Experiment 20000265 PARAMETER Experiment Name: At_Open_Flower_P Parameter: Plant Line Value: WS
  misc_feature: MA Experiment 20000265 PARAMETER Experiment Name: At_Open_Flower_P Parameter: Tissue Value: Closed Flower vs. Whole Plant
  misc_feature: MA Experiment ID: 20000286 Result: Up-regulated in Transcription
  misc_feature: MA Experiment 20000286 PARAMETER Experiment Name: At_Open_Flower_P Parameter: Age (day) Value: 21
  misc_feature: MA Experiment 20000286 PARAMETER Experiment Name: At_Open_Flower_P Parameter: Plant Line Value: WS
  misc_feature: MA Experiment 20000286 PARAMETER Experiment Name: At_Open_Flower_P Parameter: Tissue Value: Half Open vs. Whole Plant
  misc_feature: MA Experiment ID: 20000438 Result: Up-regulated in Transcription
  misc_feature: MA Experiment 20000438 PARAMETER Experiment Name: At_Shoots__P Parameter: Age (day) Value: 14
  misc_feature: MA Experiment 20000438 PARAMETER Experiment Name: At_Shoots__P Parameter: Tissue Value: Shoots vs. Whole Plant
  misc_feature: MA Experiment ID: 20000439 Result: Up-regulated in Transcription
  misc_feature: MA Experiment 20000439 PARAMETER Experiment Name: At_Roots__P Parameter: Age (day) Value: 14 vs. 21
  misc_feature: MA Experiment 20000439 PARAMETER Experiment Name: At_Roots__P Parameter: Organism Value: A. thaliana
  misc_feature: MA Experiment 20000439 PARAMETER Experiment Name: At_Roots__P Parameter: Tissue Value: Roots vs. Whole Plant
ctctcgatttttcttgggaagaagaaactcatgggaattttcaggaattttgtcagccattttctctcatttgagaaaccactaaattagagcttcaaaaaacttctaaaggaatgaatgtttctttgatttccaagagagttttggttcgttgactgagtttagttttggagatctagcaactgaaagctggttaaatacttaaatggacgtagcaggctactgtttgtgaatcctctcctatggcgatgttgtttgtgtggaaaaagtatggcctgtttcagatgtttctctgttgattcaagttttaaacgagagccaagagtcagaaatcaagtcacaggctcgtgaaagctgctttgagtcaaacccatgtcaggtgctcctagagttcagtccatgaatgtggctgaagcagagaccaggtcaactctggggtctactgctaaaaaggctagtcctttcatcacacacaaagctgtatcaaagtcactgcgaaagcttgaaagatcctcatctgggcgtactggatcagatgagaaaacatcttatgctacaccaacagaaactgtgtcttcttcttctcagaagcatactcttaatgcggcttctatactacgacggcatgagcagaacctgaattctaatctgtcacttaatgcatcgttttcatctgatgcctccgtggactcgttccacagccgagcatcaactggtcgcttgattaggtcgtacagtgttggaagtagaagtaagtcttacccttccaagccaagaagtgttgtctctgaaggtgctttggattcaccacctaatggttcagagactaagaagaggtgtacttgggtgacaccaaactccgatccatgttatatagttttccatgatgaagaatggggtgtgccagttcacgatgacaagaggttgtttgaactccttgtgctttcgggtgctttggccgaacacacatggcctacgatactgagcaagagacaggctttcagggaagtttttgctgattttgaccccaatgccattgtgaaaatcaatgagaagaagataattggtccaggaagcccggcaagcactttattgtctgatcttaagctaagggcagtcattgagaatgcacgccagatacttaaggtgatagaagaatacggatcatttgacaagtatatatggagttttgtgaagaataaggcgattgtgagcaagttcaggtaccagcgacaagtacctgcaaaaactccaaaagcagaagtgataagtaaagatctagtgagaagagggttccgcagcgtcggaccaacggtggtttactccttcatgcaggcagcagggataacaaacgatcatcttaccagttgtttcaggttccaccattgtatattcgaacatgaaaggtatgtctgaaaagaaggacttcctaaaacttgttaaagtccttttatgttttgtaaagcctccaatttgagtctattattagtattcaaaac

SEQ ID NO: 41631 - protein, 347 aa, Arabidopsis thaliana
  peptide (1)..(347): Ceres Seq. ID no. 12329745
  misc_feature (158)..(338): Pfam Name: Methyladenine glycosylase Pfam Description: Methyladenine glycosylase
  misc_feature (147)..(339): Homolog of NCBI NO: 18399721 NR Description: expressed protein
  misc_feature (151)..(339): Homolog of NCBI NO: 21592537 NR Description: unknown [Arabidopsis thaliana]
  misc_feature (91)..(345): Homolog of NCBI NO: 25518014 NR Description: F21F23.7 protein - Arabidopsis thaliana
  misc_feature (151)..(339): Homolog of NCBI NO: 15241554 NR Description: putative protein
  misc_feature (159)..(345): Homolog of NCBI NO: 25406407 NR Description: hypothetical protein F9E10.6 [imported] -
  misc_feature (66)..(345): Homolog of NCBI NO: 18410766 NR Description: putative DNA-3-methyladenine glycosylase I
  misc_feature (56)..(344): Homolog of NCBI NO: 15220860 NR Description: DNA-3-methyladenine glycosidase, putative
  misc_feature (1)..(344): Homolog of NCBI NO: 15218379 NR Description: hypothetical protein; protein id: At1g15970.1
  misc_feature (46)..(339): Homolog of NCBI NO: 38345034 NR Description: OSJNBa0029H02.18 [Oryza sativa (japonica
  misc_feature (1)..(347): Homolog of NCBI NO: 15242914 NR Description: putative protein; protein id: At5g57970.1
MSGAPRVQSMNVAEAETRSTLGSTAKKASPFITHKAVSKSLRKLERSSSGRTGSDEKTSYATPTETVSSSSQKHTLNAASILRRHEQNLNSNLSLNASFSSDASVDSFHSRASTGRLIRSYSVGSRSKSYPSKPRSVVSEGALDSPPNGSETKKRCTWVTPNSDPCYIVFHDEEWGVPVHDDKRLFELLVLSGALAEHTWPTILSKRQAFREVFADFDPNAIVKINEKKIIGPGSPASTLLSDLKLRAVIENARQILKVIEEYGSFDKYIWSFVKNKAIVSKFRYQRQVPAKTPKAEVISKDLVRRGFRSVGPTVVYSFMQAAGITNDHLTSCFRFHHCIFEHERYV

SEQ ID NO: 41632 - protein, 338 aa, Arabidopsis thaliana
  peptide (1)..(338): Ceres Seq. ID no. 12329746
  misc_feature (149)..(329): Pfam Name: Methyladenine glycosylase Pfam Description: Methyladenine glycosylase
  misc_feature (138)..(330): Homolog of NCBI NO: 18399721 NR Description: expressed protein
  misc_feature (142)..(330): Homolog of NCBI NO: 21592537 NR Description: unknown [Arabidopsis thaliana]
  misc_feature (82)..(336): Homolog of NCBI NO: 25518014 NR Description: F21F23.7 protein - Arabidopsis thaliana
  misc_feature (142)..(330): Homolog of NCBI NO: 15241554 NR Description: putative protein
  misc_feature (150)..(336): Homolog of NCBI NO: 25406407 NR Description: hypothetical protein F9E10.6 [imported] -
  misc_feature (57)..(336): Homolog of NCBI NO: 18410766 NR Description: putative DNA-3-methyladenine glycosylase I
  misc_feature (47)..(335): Homolog of NCBI NO: 15220860 NR Description: DNA-3-methyladenine glycosidase, putative
  misc_feature (1)..(335): Homolog of NCBI NO: 15218379 NR Description: hypothetical protein; protein id: At1g15970.1
  misc_feature (37)..(330): Homolog of NCBI NO: 38345034 NR Description: OSJNBa0029H02.18 [Oryza sativa (japonica
  misc_feature (1)..(338): Homolog of NCBI NO: 15242914 NR Description: putative protein; protein id: At5g57970.1
MNVAEAETRSTLGSTAKKASPFITHKAVSKSLRKLERSSSGRTGSDEKTSYATPTETVSSSSQKHTLNAASILRRHEQNLNSNLSLNASFSSDASVDSFHSRASTGRLIRSYSVGSRSKSYPSKPRSVVSEGALDSPPNGSETKKRCTWVTPNSDPCYIVFHDEEWGVPVHDDKRLFELLVLSGALAEHTWPTILSKRQAFREVFADFDPNAIVKINEKKIIGPGSPASTLLSDLKLRAVIENARQILKVIEEYGSFDKYIWSFVKNKAIVSKFRYQRQVPAKTPKAEVISKDLVRRGFRSVGPTVVYSFMQAAGITNDHLTSCFRFHHCIFEHERYV

SEQ ID NO: 41633 - DNA, 1403 bp, Arabidopsis thaliana
  misc_feature (1)..(1403): Ceres Seq. ID no. 12395432
  misc_feature: MA Experiment ID: 108435 Result: Down-regulated in Transcription
  misc_feature: MA Experiment 108435 PARAMETER Experiment Name: At_stm_Mutants_cDNA_P Parameter: Plant Line Value: wt Landsburg vs stm
  misc_feature: MA Experiment 108435 PARAMETER Experiment Name: At_stm_Mutants_cDNA_P Parameter: Tissue Value: Shoot Apical Meristem Region
  misc_feature: MA Experiment ID: 108462 Result: Up-regulated in Transcription
  misc_feature: MA Experiment 108462 PARAMETER Experiment Name: At_Germinating_Seeds_cDNA_P Parameter: Age (day) Value: 2 vs. 0
  misc_feature: MA Experiment 108462 PARAMETER Experiment Name: At_Germinating_Seeds_cDNA_P Parameter: Tissue Value: Germinating Seeds
  misc_feature: MA Experiment ID: 108464 Result: Up-regulated in Transcription
  misc_feature: MA Experiment 108464 PARAMETER Experiment Name: At_Germinating_Seeds_cDNA_P Parameter: Age (day) Value: 4 vs. 0
  misc_feature: MA Experiment 108464 PARAMETER Experiment Name: At_Germinating_Seeds_cDNA_P Parameter: Tissue Value: Germinating Seeds
  misc_feature: MA Experiment ID: 108585 Result: Down-regulated in Transcription
  misc_feature: MA Experiment 108585 PARAMETER Experiment Name: At_5mM_NaNP_cDNA_P Parameter: Timepoint (hr) Value: 6
  misc_feature: MA Experiment 108585 PARAMETER Experiment Name: At_5mM_NaNP_cDNA_P Parameter: Tissue Value: Aerial
  misc_feature: MA Experiment 108585 PARAMETER Experiment Name: At_5mM_NaNP_cDNA_P Parameter: Treatment Value: null
  misc_feature: MA Experiment ID: 108595 Result: Down-regulated in Transcription
  misc_feature: MA Experiment 108595 PARAMETER Experiment Name: At_Ler-pi_Ovule_cDNA_P Parameter: Plant Line Value: null
  misc_feature: MA Experiment ID: 20000111 Result: Down-regulated in Transcription
  misc_feature: MA Experiment 20000111 PARAMETER Experiment Name: At_42deg_Heat_cDNA_P Parameter: Temperature (deg C) Value: 42 vs. 22
  misc_feature: MA Experiment 20000111 PARAMETER Experiment Name: At_42deg_Heat_cDNA_P Parameter: Timepoint (hr) Value: 6
  misc_feature: MA Experiment 20000111 PARAMETER Experiment Name: At_42deg_Heat_cDNA_P Parameter: Tissue Value: Aerial
  misc_feature: MA Experiment ID: 20000113 Result: Down-regulated in Transcription
  misc_feature: MA Experiment 20000113 PARAMETER Experiment Name: At_42deg_Heat_cDNA_P Parameter: Temperature (deg C) Value: 42 vs. 22
  misc_feature: MA Experiment 20000113 PARAMETER Experiment Name: At_42deg_Heat_cDNA_P Parameter: Timepoint (hr) Value: 8
  misc_feature: MA Experiment 20000113 PARAMETER Experiment Name: At_42deg_Heat_cDNA_P Parameter: Tissue Value: Aerial
  misc_feature: MA Experiment ID: 20000173 Result: Down-regulated in Transcription
  misc_feature: MA Experiment 20000173 PARAMETER Experiment Name: At_42deg_Heat_P Parameter: Age (day) Value: 14
  misc_feature: MA Experiment 20000173 PARAMETER Experiment Name: At_42deg_Heat_P Parameter: Organism Value: A. thaliana
  misc_feature: MA Experiment 20000173 PARAMETER Experiment Name: At_42deg_Heat_P Parameter: Plant Line Value: WS
  misc_feature: MA Experiment 20000173 PARAMETER Experiment Name: At_42deg_Heat_P Parameter: Temperature (deg C) Value: 42 vs. 22
  misc_feature: MA Experiment 20000173 PARAMETER Experiment Name: At_42deg_Heat_P Parameter: Timepoint (hr) Value: 6
  misc_feature: MA Experiment 20000173 PARAMETER Experiment Name: At_42deg_Heat_P Parameter: Tissue Value: Aerial
  misc_feature: MA Experiment ID: 20000185 Result: Down-regulated in Transcription
  misc_feature: MA Experiment 20000185 PARAMETER Experiment Name: At_Roots__P Parameter: Age (day) Value: 7 vs. 21
  misc_feature: MA Experiment 20000185 PARAMETER Experiment Name: At_Roots__P Parameter: Organism Value: A. thaliana
  misc_feature: MA Experiment 20000185 PARAMETER Experiment Name: At_Roots__P Parameter: Tissue Value: Roots vs. Whole Plant
  misc_feature: MA Experiment ID: 20000227 Result: Down-regulated in Transcription
  misc_feature: MA Experiment 20000227 PARAMETER Experiment Name: At_Root-Tips-vs-Tops_P Parameter: Tissue Value: Root Tips vs. Root Tops
  misc_feature: MA Experiment ID: 20000439 Result: Down-regulated in Transcription
  misc_feature: MA Experiment 20000439 PARAMETER Experiment Name: At_Roots__P Parameter: Age (day) Value: 14 vs. 21
  misc_feature: MA Experiment 20000439 PARAMETER Experiment Name: At_Roots__P Parameter: Organism Value: A. thaliana
  misc_feature: MA Experiment 20000439 PARAMETER Experiment Name: At_Roots__P Parameter: Tissue Value: Roots vs. Whole Plant
  misc_feature: MA Experiment ID: 20001248 Result: Down-regulated in Transcription
  misc_feature: MA Experiment 20001248 PARAMETER Experiment Name: At_Far-red-induction_P Parameter: Age (day) Value: 7
  misc_feature: MA Experiment 20001248 PARAMETER Experiment Name: At_Far-red-induction_P Parameter: Light Value: Far-red vs. White
  misc_feature: MA Experiment 20001248 PARAMETER Experiment Name: At_Far-red-induction_P Parameter: Organism Value: A. thaliana
  misc_feature: MA Experiment 20001248 PARAMETER Experiment Name: At_Far-red-induction_P Parameter: Plant Line Value: Columbia
  misc_feature: MA Experiment 20001248 PARAMETER Experiment Name: At_Far-red-induction_P Parameter: Timepoint (hr) Value: 4
  misc_feature: MA Experiment 20001248 PARAMETER Experiment Name: At_Far-red-induction_P Parameter: Tissue Value: Whole Plant
  misc_feature: MA Experiment ID: 20001557 Result: Down-regulated in Transcription
  misc_feature: MA Experiment 20001557 PARAMETER Experiment Name: At_Drought_Soil_Dry_P Parameter: Age (day) Value: 27
  misc_feature: MA Experiment 20001557 PARAMETER Experiment Name: At_Drought_Soil_Dry_P Parameter: Organism Value: A. thaliana
  misc_feature: MA Experiment 20001557 PARAMETER Experiment Name: At_Drought_Soil_Dry_P Parameter: Plant Line Value: WS
  misc_feature: MA Experiment 20001557 PARAMETER Experiment Name: At_Drought_Soil_Dry_P Parameter: Post Timepoint (hr) Value: 3
  misc_feature: MA Experiment 20001557 PARAMETER Experiment Name: At_Drought_Soil_Dry_P Parameter: Post-Treatment Value: Re-Water vs. No Drought
  misc_feature: MA Experiment 20001557 PARAMETER Experiment Name: At_Drought_Soil_Dry_P Parameter: Timepoint (day) Value: 13
  misc_feature: MA Experiment 20001557 PARAMETER Experiment Name: At_Drought_Soil_Dry_P Parameter: Treatment Value: Drought vs. No Drought
  misc_feature: MA Experiment ID: 20001560 Result: Down-regulated in Transcription
  misc_feature: MA Experiment 20001560 PARAMETER Experiment Name: At_Drought_Soil_Dry_P Parameter: Age (day) Value: 28
  misc_feature: MA Experiment 20001560 PARAMETER Experiment Name: At_Drought_Soil_Dry_P Parameter: Organism Value: A. thaliana
  misc_feature: MA Experiment 20001560 PARAMETER Experiment Name: At_Drought_Soil_Dry_P Parameter: Plant Line Value: WS
  misc_feature: MA Experiment 20001560 PARAMETER Experiment Name: At_Drought_Soil_Dry_P Parameter: Post Timepoint (hr) Value: None
  misc_feature: MA Experiment 20001560 PARAMETER Experiment Name: At_Drought_Soil_Dry_P Parameter: Post-Treatment Value: None
  misc_feature: MA Experiment 20001560 PARAMETER Experiment Name: At_Drought_Soil_Dry_P Parameter: Timepoint (day) Value: 14
  misc_feature: MA Experiment 20001560 PARAMETER Experiment Name: At_Drought_Soil_Dry_P Parameter: Treatment Value: Drought vs. No Drought
gaatactttttcgaaatatcaaaagaaggaacaaaaatgcaagccatcggtagcagccatggcaggaggctctgcttcaaccactatctctccgattccttctccaaattcctctctccttcttcttctccttcccttctccctcagagatgccattcgttctgtatccccaagcttggaagtagtagtaccaatgagaatggcagaggaagaagtgtaacagtgagagcttcaggagatgaagattctaatgagaactttgctcctcttgctcctgttgagcttgaatctcctgtaggacagcttttggagcagattcttagaactcatcctcatcttttacccgttactgtcgatgagcagctcgagaaattcgccgcggaaagcgagtctcgtaaagctgattcgtcttccacacaagacattctccaaaagaggatatctgaagttagagataaggaaagacgtaaaactttagcagagatcatttactgtttagtggtacacagatttgtggaaaaaggaatctctatgattcctcggattaaaccaacttcagacccagcaggacggatagacttatggccgaatcaagaagagaagctcgaagtcattcactctgcggatgcgttcgagatgatacagagtcacttgtcttcagttcttggagacggaccagcagttggtccgttaagctctatagttcagataggcaaaatcaagctaggaaaactctatgctgcttctgctatgtatggatattttctcagaagagtagaccaaagataccaacttgagagaaccatgaacacacttccgaaacgccctgagaaaaccagagaacggttcgaagaaccttcgcctccttacccgttatgggacccggattccttgatcaggattcaaccagaggaatatgatcccgatgaatacgcgatacaaagaaatgaagatgagtcatcgtcttatggattgagatcatatgttacgtatttggactcggatacgcttcagagatatgccacgatacgttctaaagaagccatgactctgattgagaagcagactcaggcgctctttggacgaccggatataaggatactcgaggatggaaagctcgatacttctaacgacgaggttctgtctctgagtgtctctggacttgcgatgttggttttggaagctgtggcttttgggtctttcttatgggattcagagagttacgttgaatccaaataccatttcctcaaggcttgagtttagtcctccttgacatttgtacctttttgagagtagtgaatgtaaatgttaaatctctcatgtgaaattggtagcaactcctattcgtaaaatgtaataaacttcacttcaaaactttagacttaaatcaagcatattagctc

SEQ ID NO: 41634 - protein, 418 aa, Arabidopsis thaliana
  peptide (1)..(418): Ceres Seq. ID no. 12395433
  misc_feature (13)..(418): Pfam Name: Protein of unknown function (DUF760) Pfam Description: Protein of unknown function (DUF760)
  misc_feature (320)..(413): Homolog of NCBI NO: 18397912 NR Description: expressed protein
  misc_feature (73)..(272): Homolog of NCBI NO: 18397912 NR Description: expressed protein
  misc_feature (294)..(410): Homolog of NCBI NO: 32470642 NR Description: hypothetical protein [Solanum bulbocastanum]
  misc_feature (158)..(416): Homolog of NCBI NO: 13561930 NR Description: unknown [Brassica napus]
  misc_feature (69)..(416): Homolog of NCBI NO: 28301943 NR Description: unknown protein [Oryza sativa (japonica
  misc_feature (37)..(416): Homolog of NCBI NO: 15221185 NR Description: unknown protein
  misc_feature (59)..(416): Homolog of NCBI NO: 18401645 NR Description: expressed protein
  misc_feature (39)..(416): Homolog of NCBI NO: 17064820 NR Description: Unknown protein [Arabidopsis thaliana]
  misc_feature (69)..(418): Homolog of NCBI NO: 32489097 NR Description: OSJNBa0093F12.3 [Oryza sativa (japonica
  misc_feature (13)..(418): Homolog of NCBI NO: 18398302 NR Description: expressed protein
EYFFEISKEGTKMQAIGSSHGRRLCFNHYLSDSFSKFLSPSSSPSLLPQRCHSFCIPKLGSSSTNENGRGRSVTVRASGDEDSNENFAPLAPVELESPVGQLLEQILRTHPHLLPVTVDEQLEKFAAESESRKADSSSTQDILQKRISEVRDKERRKTLAEIIYCLVVHRFVEKGISMIPRIKPTSDPAGRIDLWPNQEEKLEVIHSADAFEMIQSHLSSVLGDGPAVGPLSSIVQIGKIKLGKLYAASAMYGYFLRRVDQRYQLERTMNTLPKRPEKTRERFEEPSPPYPLWDPDSLIRIQPEEYDPDEYAIQRNEDESSSYGLRSYVTYLDSDTLQRYATIRSKEAMTLIEKQTQALFGRPDIRILEDGKLDTSNDEVLSLSVSGLAMLVLEAVAFGSFLWDSESYVESKYHFLKA

SEQ ID NO: 41635 - protein, 406 aa, Arabidopsis thaliana; identical to SEQ ID NO: 24938
  peptide (1)..(406): Ceres Seq. ID no. 12395434
  misc_feature (1)..(406): Pfam Name: Protein of unknown function (DUF760) Pfam Description: Protein of unknown function (DUF760)
  misc_feature (308)..(401): Homolog of NCBI NO: 18397912 NR Description: expressed protein
  misc_feature (61)..(260): Homolog of NCBI NO: 18397912 NR Description: expressed protein
  misc_feature (282)..(398): Homolog of NCBI NO: 32470642 NR Description: hypothetical protein [Solanum bulbocastanum]
  misc_feature (146)..(404): Homolog of NCBI NO: 13561930 NR Description: unknown [Brassica napus]
  misc_feature (57)..(404): Homolog of NCBI NO: 28301943 NR Description: unknown protein [Oryza sativa (japonica
  misc_feature (25)..(404): Homolog of NCBI NO: 15221185 NR Description: unknown protein
  misc_feature (47)..(404): Homolog of NCBI NO: 18401645 NR Description: expressed protein
  misc_feature (27)..(404): Homolog of NCBI NO: 17064820 NR Description: Unknown protein [Arabidopsis thaliana]
  misc_feature (57)..(406): Homolog of NCBI NO: 32489097 NR Description: OSJNBa0093F12.3 [Oryza sativa (japonica
  misc_feature (1)..(406): Homolog of NCBI NO: 18398302 NR Description: expressed protein

SEQ ID NO: 41636 - protein, 241 aa, Arabidopsis thaliana; identical to SEQ ID NO: 24939
  peptide (1)..(241): Ceres Seq. ID no. 12395435
  misc_feature (1)..(241): Pfam Name: Protein of unknown function (DUF760) Pfam Description: Protein of unknown function (DUF760)
  misc_feature (143)..(236): Homolog of NCBI NO: 18397912 NR Description: expressed protein
  misc_feature (1)..(95): Homolog of NCBI NO: 18397912 NR Description: expressed protein
  misc_feature (117)..(233): Homolog of NCBI NO: 32470642 NR Description: hypothetical protein [Solanum bulbocastanum]
  misc_feature (1)..(239): Homolog of NCBI NO: 13561930 NR Description: unknown [Brassica napus]
  misc_feature (1)..(239): Homolog of NCBI NO: 28301943 NR Description: unknown protein [Oryza sativa (japonica
  misc_feature (1)..(239): Homolog of NCBI NO: 15221185 NR Description: unknown protein
  misc_feature (1)..(239): Homolog of NCBI NO: 18401645 NR Description: expressed protein
  misc_feature (1)..(239): Homolog of NCBI NO: 17064820 NR Description: Unknown protein [Arabidopsis thaliana]
  misc_feature (1)..(241): Homolog of NCBI NO: 32489097 NR Description: OSJNBa0093F12.3 [Oryza sativa (japonica
  misc_feature (1)..(241): Homolog of NCBI NO: 18398302 NR Description: expressed protein

SEQ ID NO: 41637 - DNA, 1110 bp, Arabidopsis thaliana
  misc_feature (1)..(1110): Ceres Seq. ID no. 12328689
  misc_feature: MA Experiment ID: 108576 Result: Up-regulated in Transcription
  misc_feature: MA Experiment 108576 PARAMETER Experiment Name: At_42deg_Heat_cDNA_P Parameter: Temperature (deg C) Value: 42 vs. 22
  misc_feature: MA Experiment 108576 PARAMETER Experiment Name: At_42deg_Heat_cDNA_P Parameter: Timepoint (hr) Value: 1
  misc_feature: MA Experiment 108576 PARAMETER Experiment Name: At_42deg_Heat_cDNA_P Parameter: Tissue Value: Aerial
attcaaacgtacctttgattgctcttgttctaatttggtaagtatcatttgtggaccaaaatgagtgtatatcctggatatggtggctggatcaatcagaacattcaacagtctcctaaggccgagtccaagagatctgagaatgttaaatccaattcaatgtctgagaaagatactaatctaaaaccatggtatgatgaacctggtaagaccgagtccatggaacctgggcatcctagatctaaggccctatatgtggtagatcctaaatattatgactttgaagaagtaaagaggcaagtagaactttggatagttggaaaaaataagcttccatggtatgatgctcccgctaaagtgaaggtgaaaacgaaaaagggtctttgccatatgaacatagaatttacattgggatggcctcctcaagcagtctatgaaatgcttactaacccaagaaatttaccattcttcagagaggatgagaccgggcagcttctggtttttcttttcttcatatccttgtatgattcgagttgagtattaattatagcaatacttgagagtgtagtatttttcctattgaaggaaaataaatcaacaaaggttttgaagaaggatggaccgaggcagatcacggatgtagagaaagctctcagatggaagctcctttggtggtctggagttatcctaatacatctcattatcgatgaaaaccatcaaaatctttcggcaaaatataagaaagagaaaatgaagttcatgaaagtgtttgagggtagctggaaagtcgagccactatacgtagatcaggaacgcttttgcaagtctaggtcggtgaatagtcaagaagagaacaaaaaatgtagcggcggacgaggaagaattgcatcgatggtgacaatggagcttatctttcagccttctacccttcttaatctgccaccggtttcttggatcatccgtgggatcaccatcaaaatcaccaaaatgttgctagaagatcttagaaaatatgttatcatgatccacaaaagtgatgctaccacttgattagatttttttgtaagaaaaaataaaatgaatctcattattttgcatatgaatccagat

SEQ ID NO: 41638 - protein, 158 aa, Arabidopsis thaliana
  peptide (1)..(158): Ceres Seq. ID no. 12328690
  misc_feature (55)..(158): Homolog of NCBI NO: 25373398 NR Description: hypothetical protein F5O8.21 - Arabidopsis
  misc_feature (73)..(146): Homolog of NCBI NO: 8778583 NR Description: F28C11.19 [Arabidopsis thaliana]
  misc_feature (1)..(79): Homolog of NCBI NO: 8778583 NR Description: F28C11.19 [Arabidopsis thaliana]
  misc_feature (1)..(57): Homolog of NCBI NO: 15220845 NR Description: putative OBP32pep protein; protein id:
  misc_feature (71)..(147): Homolog of NCBI NO: 15220845 NR Description: putative OBP32pep protein; protein id:
  misc_feature (55)..(158): Homolog of NCBI NO: 8778583 NR Description: F28C11.19 [Arabidopsis thaliana]
  misc_feature (1)..(37): Homolog of NCBI NO: 8778583 NR Description: F28C11.19 [Arabidopsis thaliana]
  misc_feature (1)..(36): Homolog of NCBI NO: 8778583 NR Description: F28C11.19 [Arabidopsis thaliana]
  misc_feature (1)..(47): Homolog of NCBI NO: 8778583 NR Description: F28C11.19 [Arabidopsis thaliana]
  misc_feature (37)..(144): Homolog of NCBI NO: 8778583 NR Description: F28C11.19 [Arabidopsis thaliana]
MSVYPGYGGWINQNIQQSPKAESKRSENVKSNSMSEKDTNLKPWYDEPGKTESMEPGHPRSKALYVVDPKYYDFEEVKRQVELWIVGKNKLPWYDAPAKVKVKTKKGLCHMNIEFTLGWPPQAVYEMLTNPRNLPFFREDETGQLLVFLFFISLYDSS

SEQ ID NO: 41639 - protein, 125 aa, Arabidopsis thaliana
  peptide (1)..(125): Ceres Seq. ID no. 12328691
  misc_feature (13)..(111): Homolog of NCBI NO: 15220821 NR Description: hypothetical protein; protein id: At1g23660.1
  misc_feature (7)..(111): Homolog of NCBI NO: 15220815 NR Description: OBP32pep protein, putative; protein id:
  misc_feature (22)..(125): Homolog of NCBI NO: 25373398 NR Description: hypothetical protein F5O8.21 - Arabidopsis
  misc_feature (40)..(113): Homolog of NCBI NO: 8778583 NR Description: F28C11.19 [Arabidopsis thaliana]
  misc_feature (1)..(46): Homolog of NCBI NO: 8778583 NR Description: F28C11.19 [Arabidopsis thaliana]
  misc_feature (1)..(24): Homolog of NCBI NO: 15220845 NR Description: putative OBP32pep protein; protein id:
  misc_feature (38)..(114): Homolog of NCBI NO: 15220845 NR Description: putative OBP32pep protein; protein id:
  misc_feature (22)..(125): Homolog of NCBI NO: 8778583 NR Description: F28C11.19 [Arabidopsis thaliana]
  misc_feature (1)..(14): Homolog of NCBI NO: 8778583 NR Description: F28C11.19 [Arabidopsis thaliana]
  misc_feature (4)..(111): Homolog of NCBI NO: 8778583 NR Description: F28C11.19 [Arabidopsis thaliana]
MSEKDTNLKPWYDEPGKTESMEPGHPRSKALYVVDPKYYDFEEVKRQVELWIVGKNKLPWYDAPAKVKVKTKKGLCHMNIEFTLGWPPQAVYEMLTNPRNLPFFREDETGQLLVFLFFISLYDSS

SEQ ID NO: 41640 - protein, 105 aa, Arabidopsis thaliana
  peptide (1)..(105): Ceres Seq. ID no. 12328692
  misc_feature (1)..(94): Homolog of NCBI NO: 8778583 NR Description: F28C11.19 [Arabidopsis thaliana]
  misc_feature (19)..(96): Homolog of NCBI NO: 8778583 NR Description: F28C11.19 [Arabidopsis thaliana]
  misc_feature (1)..(91): Homolog of NCBI NO: 15220821 NR Description: hypothetical protein; protein id: At1g23660.1
  misc_feature (1)..(91): Homolog of NCBI NO: 15220815 NR Description: OBP32pep protein, putative; protein id:
  misc_feature (2)..(105): Homolog of NCBI NO: 25373398 NR Description: hypothetical protein F5O8.21 - Arabidopsis
  misc_feature (20)..(93): Homolog of NCBI NO: 8778583 NR Description: F28C11.19 [Arabidopsis thaliana]
  misc_feature (1)..(26): Homolog of NCBI NO: 8778583 NR Description: F28C11.19 [Arabidopsis thaliana]
  misc_feature (18)..(94): Homolog of NCBI NO: 15220845 NR Description: putative OBP32pep protein; protein id:
  misc_feature (2)..(105): Homolog of NCBI NO: 8778583 NR Description: F28C11.19 [Arabidopsis thaliana]
  misc_feature (1)..(91): Homolog of NCBI NO: 8778583 NR Description: F28C11.19 [Arabidopsis thaliana]
MEPGHPRSKALYVVDPKYYDFEEVKRQVELWIVGKNKLPWYDAPAKVKVKTKKGLCHMNIEFTLGWPPQAVYEMLTNPRNLPFFREDETGQLLVFLFFISLYDSS

SEQ ID NO: 41641 - DNA, 2369 bp, Arabidopsis thaliana; identical to SEQ ID NO: 30438
  misc_feature (1)..(2369): Ceres Seq. ID no. 12327544
  misc_feature: MA Experiment ID: 20001451 Result: Down-regulated in Transcription
  misc_feature: MA Experiment 20001451 PARAMETER Experiment Name: At_Far-red-induction_P Parameter: Age (day) Value: 7
  misc_feature: MA Experiment 20001451 PARAMETER Experiment Name: At_Far-red-induction_P Parameter: Light Value: Far-red vs. White
  misc_feature: MA Experiment 20001451 PARAMETER Experiment Name: At_Far-red-induction_P Parameter: Organism Value: A. thaliana
  misc_feature: MA Experiment 20001451 PARAMETER Experiment Name: At_Far-red-induction_P Parameter: Plant Line Value: Columbia
  misc_feature: MA Experiment 20001451 PARAMETER Experiment Name: At_Far-red-induction_P Parameter: Timepoint (hr) Value: 24
  misc_feature: MA Experiment 20001451 PARAMETER Experiment Name: At_Far-red-induction_P Parameter: Tissue Value: Whole Plant

SEQ ID NO: 41642 - protein, 623 aa, Arabidopsis thaliana; identical to SEQ ID NO: 30439
  peptide (1)..(623): Ceres Seq. ID no. 12327545
  misc_feature (271)..(464): Pfam Name: ATP synthase alpha/beta family, Pfam Description: ATP synthase alpha/beta family,
  misc_feature (271)..(464): Pfam Name: ATP synthase alpha/beta family, Pfam Description: ATP synthase alpha/beta family,
  misc_feature (13)..(620): Homolog of NCBI NO: 20129479 NR Description: CG5075-PA [Drosophila melanogaster]
  misc_feature (8)..(620): Homolog of NCBI NO: 30584887 NR Description: Homo sapiens ATPase, H+ transporting, lysosomal
  misc_feature (1)..(623): Homolog of NCBI NO: 2506211 NR Description: Vacuolar ATP synthase catalytic subunit A A subunit) (Vacuolar proton pump alpha subunit) (V-ATPase 69 kDa
  misc_feature (1)..(623): Homolog of NCBI NO: 27883932 NR Description: vacuolar H+-ATPase A1 subunit isoform
  misc_feature (1)..(623): Homolog of NCBI NO: 3169287 NR Description: vacuolar H+-ATPase catalytic subunit [Gossypium
  misc_feature (13)..(620): Homolog of NCBI NO: 20129479 NR Description: CG5075-PA [Drosophila melanogaster]
  misc_feature (1)..(623): Homolog of NCBI NO: 2506211 NR Description: Vacuolar ATP synthase catalytic subunit A A subunit) (Vacuolar proton pump alpha subunit) (V-ATPase 69 kDa
  misc_feature (1)..(623): Homolog of NCBI NO: 3169287 NR Description: vacuolar H+-ATPase catalytic subunit [Gossypium
  misc_feature (1)..(623): Homolog of NCBI NO: 12585490 NR Description: Vacuolar ATP synthase catalytic subunit A A subunit) (Vacuolar proton pump alpha subunit) (V-ATPase 69 kDa
  misc_feature (1)..(623): Homolog of NCBI NO: 137460 NR Description: Vacuolar ATP synthase catalytic subunit A A subunit) (Vacuolar proton pump alpha subunit) (V-ATPase 69 kDa
  misc_feature (1)..(623): Homolog of NCBI NO: 15982954 NR Description: V-ATPase catalytic subunit A [Prunus persica]
  misc_feature (1)..(623): Homolog of NCBI NO: 27884018 NR Description: vacuolar H+-ATPase A2 subunit isoform
  misc_feature (1)..(623): Homolog of NCBI NO: 401322 NR Description: Vacuolar ATP synthase catalytic subunit A A subunit) (Vacuolar proton pump alpha subunit) (V-ATPase 69 kDa
  misc_feature (1)..(623): Homolog of NCBI NO: 27883932 NR Description: vacuolar H+-ATPase A1 subunit isoform
  misc_feature (8)..(620): Homolog of NCBI NO: 30584887 NR Description: Homo sapiens ATPase, H+ transporting, lysosomal
  misc_feature (1)..(623): Homolog of NCBI NO: 401322 NR Description: Vacuolar ATP synthase catalytic subunit A A subunit) (Vacuolar proton pump alpha subunit) (V-ATPase 69 kDa
  misc_feature (1)..(623): Homolog of NCBI NO: 27884018 NR Description: vacuolar H+-ATPase A2 subunit isoform
  misc_feature (1)..(623): Homolog of NCBI NO: 15982954 NR Description: V-ATPase catalytic subunit A [Prunus persica]
  misc_feature (1)..(623): Homolog of NCBI NO: 137460 NR Description: Vacuolar ATP synthase catalytic subunit A A subunit) (Vacuolar proton pump alpha subunit) (V-ATPase 69 kDa
  misc_feature (1)..(623): Homolog of NCBI NO: 12585490 NR Description: Vacuolar ATP synthase catalytic subunit A A subunit) (Vacuolar proton pump alpha subunit) (V-ATPase 69 kDa

SEQ ID NO: 41643 - protein, 587 aa, Arabidopsis thaliana; identical to SEQ ID NO: 30440
  peptide (1)..(587): Ceres Seq. ID no. 12327546
  misc_feature (235)..(428): Pfam Name: ATP synthase alpha/beta family, Pfam Description: ATP synthase alpha/beta family,
  misc_feature (235)..(428): Pfam Name: ATP synthase alpha/beta family, Pfam Description: ATP synthase alpha/beta family,
  misc_feature (1)..(584): Homolog of NCBI NO: 20129479 NR Description: CG5075-PA [Drosophila melanogaster]
  misc_feature (1)..(584): Homolog of NCBI NO: 30584887 NR Description: Homo sapiens ATPase, H+ transporting, lysosomal
  misc_feature (1)..(587): Homolog of NCBI NO: 2506211 NR Description: Vacuolar ATP synthase catalytic subunit A A subunit) (Vacuolar proton pump alpha subunit) (V-ATPase 69 kDa
  misc_feature (1)..(587): Homolog of NCBI NO: 27883932 NR Description: vacuolar H+-ATPase A1 subunit isoform
  misc_feature (1)..(587): Homolog of NCBI NO: 3169287 NR Description: vacuolar H+-ATPase catalytic subunit [Gossypium
  misc_feature (1)..(584): Homolog of NCBI NO: 20129479 NR Description: CG5075-PA [Drosophila melanogaster]
  misc_feature (1)..(587): Homolog of NCBI NO: 2506211 NR Description: Vacuolar ATP synthase catalytic subunit A A subunit) (Vacuolar proton pump alpha subunit) (V-ATPase 69 kDa
  misc_feature (1)..(587): Homolog of NCBI NO: 3169287 NR Description: vacuolar H+-ATPase catalytic subunit [Gossypium
  misc_feature (1)..(587): Homolog of NCBI NO: 12585490 NR Description: Vacuolar ATP synthase catalytic subunit A A subunit) (Vacuolar proton pump alpha subunit) (V-ATPase 69 kDa
  misc_feature (1)..(587): Homolog of NCBI NO: 137460 NR Description: Vacuolar ATP synthase catalytic subunit A A subunit) (Vacuolar proton pump alpha subunit) (V-ATPase 69 kDa
  misc_feature (1)..(587): Homolog of NCBI NO: 15982954 NR Description: V-ATPase catalytic subunit A [Prunus persica]
  misc_feature (1)..(587): Homolog of NCBI NO: 27884018 NR Description: vacuolar H+-ATPase A2 subunit isoform
  misc_feature (1)..(587): Homolog of NCBI NO: 401322 NR Description: Vacuolar ATP synthase catalytic subunit A A subunit) (Vacuolar proton pump alpha subunit) (V-ATPase 69 kDa
  misc_feature (1)..(587): Homolog of NCBI NO: 27883932 NR Description: vacuolar H+-ATPase A1 subunit isoform
  misc_feature (1)..(584): Homolog of NCBI NO: 30584887 NR Description: Homo sapiens ATPase, H+ transporting, lysosomal
  misc_feature (1)..(587): Homolog of NCBI NO: 401322 NR Description: Vacuolar ATP synthase catalytic subunit A A subunit) (Vacuolar proton pump alpha subunit) (V-ATPase 69 kDa
  misc_feature (1)..(587): Homolog of NCBI NO: 27884018 NR Description: vacuolar H+-ATPase A2 subunit isoform
  misc_feature (1)..(587): Homolog of NCBI NO: 15982954 NR Description: V-ATPase catalytic subunit A [Prunus persica]
  misc_feature (1)..(587): Homolog of NCBI NO: 137460 NR Description: Vacuolar ATP synthase catalytic subunit A A subunit) (Vacuolar proton pump alpha subunit) (V-ATPase 69 kDa
  misc_feature (1)..(587): Homolog of NCBI NO: 12585490 NR Description: Vacuolar ATP synthase catalytic subunit A A subunit) (Vacuolar proton pump alpha subunit) (V-ATPase 69 kDa

SEQ ID NO: 41644 - protein, 582 aa, Arabidopsis thaliana; identical to SEQ ID NO: 30441
  peptide (1)..(582): Ceres Seq. ID no. 12327547
  misc_feature (230)..(423): Pfam Name: ATP synthase alpha/beta family, Pfam Description: ATP synthase alpha/beta family,
  misc_feature (230)..(423): Pfam Name: ATP synthase alpha/beta family, Pfam Description: ATP synthase alpha/beta family,
  misc_feature (1)..(579): Homolog of NCBI NO: 20129479 NR Description: CG5075-PA [Drosophila melanogaster]
  misc_feature (1)..(579): Homolog of NCBI NO: 30584887 NR Description: Homo sapiens ATPase, H+ transporting, lysosomal
  misc_feature (1)..(582): Homolog of NCBI NO: 2506211 NR Description: Vacuolar ATP synthase catalytic subunit A A subunit) (Vacuolar proton pump alpha subunit) (V-ATPase 69 kDa
  misc_feature (1)..(582): Homolog of NCBI NO: 27883932 NR Description: vacuolar H+-ATPase A1 subunit isoform
  misc_feature (1)..(582): Homolog of NCBI NO: 3169287 NR Description: vacuolar H+-ATPase catalytic subunit [Gossypium
  misc_feature (1)..(579): Homolog of NCBI NO: 20129479 NR Description: CG5075-PA [Drosophila melanogaster]
  misc_feature (1)..(582): Homolog of NCBI NO: 2506211 NR Description: Vacuolar ATP synthase catalytic subunit A A subunit) (Vacuolar proton pump alpha subunit) (V-ATPase 69 kDa
  misc_feature (1)..(582): Homolog of NCBI NO: 3169287 NR Description: vacuolar H+-ATPase catalytic subunit [Gossypium
  misc_feature (1)..(582): Homolog of NCBI NO: 12585490 NR Description: Vacuolar ATP synthase catalytic subunit A A subunit) (Vacuolar proton pump alpha subunit) (V-ATPase 69 kDa
  misc_feature (1)..(582): Homolog of NCBI NO: 137460 NR Description: Vacuolar ATP synthase catalytic subunit A A subunit) (Vacuolar proton pump alpha subunit) (V-ATPase 69 kDa
  misc_feature (1)..(582): Homolog of NCBI NO: 15982954 NR Description: V-ATPase catalytic subunit A [Prunus persica]
  misc_feature (1)..(582): Homolog of NCBI NO: 27884018 NR Description: vacuolar H+-ATPase A2 subunit isoform
  misc_feature (1)..(582): Homolog of NCBI NO: 401322 NR Description: Vacuolar ATP synthase catalytic subunit A A subunit) (Vacuolar proton pump alpha subunit) (V-ATPase 69 kDa
  misc_feature (1)..(582): Homolog of NCBI NO: 27883932 NR Description: vacuolar H+-ATPase A1 subunit isoform
  misc_feature (1)..(579): Homolog of NCBI NO: 30584887 NR Description: Homo sapiens ATPase, H+ transporting, lysosomal
  misc_feature (1)..(582): Homolog of NCBI NO: 401322 NR Description: Vacuolar ATP synthase catalytic subunit A A subunit) (Vacuolar proton pump alpha subunit) (V-ATPase 69 kDa
  misc_feature (1)..(582): Homolog of NCBI NO: 27884018 NR Description: vacuolar H+-ATPase A2 subunit isoform
  misc_feature (1)..(582): Homolog of NCBI NO: 15982954 NR Description: V-ATPase catalytic subunit A [Prunus persica]
  misc_feature (1)..(582): Homolog of NCBI NO: 137460 NR Description: Vacuolar ATP synthase catalytic subunit A A subunit) (Vacuolar proton pump alpha subunit) (V-ATPase 69 kDa
  misc_feature (1)..(582): Homolog of NCBI NO: 12585490 NR Description: Vacuolar ATP synthase catalytic subunit A A subunit) (Vacuolar proton pump alpha subunit) (V-ATPase 69 kDa

SEQ ID NO: 41645 - DNA, 1124 bp, Arabidopsis thaliana
  misc_feature (1)..(1124): Ceres Seq. ID no. 12329268
  misc_feature: MA Experiment ID: 108434 Result: Down-regulated in Transcription
  misc_feature: MA Experiment 108434 PARAMETER Experiment Name: At_Root_Tips_cDNA_P Parameter: Tissue Value: Root Tips
  misc_feature: MA Experiment ID: 108608 Result: Up-regulated in Transcription
  misc_feature: MA Experiment 108608 PARAMETER Experiment Name: At_100uM_ABA_cDNA_P Parameter: Timepoint (hr) Value: 1
  misc_feature: MA Experiment 108608 PARAMETER Experiment Name: At_100uM_ABA_cDNA_P Parameter: Tissue Value: Aerial
  misc_feature: MA Experiment 108608 PARAMETER Experiment Name: At_100uM_ABA_cDNA_P Parameter: Treatment Value: 100uM ABA vs. No Treatment
  misc_feature: MA Experiment ID: 108668 Result: Up-regulated in Transcription
  misc_feature: MA Experiment 108668 PARAMETER Experiment Name: At_2mM_SA_cDNA_P Parameter: Plant Line Value: WS
  misc_feature: MA Experiment 108668 PARAMETER Experiment Name: At_2mM_SA_cDNA_P Parameter: Timepoint (hr) Value: 6
  misc_feature: MA Experiment 108668 PARAMETER Experiment Name: At_2mM_SA_cDNA_P Parameter: Treatment Value: 2mM SA vs. No Treatment
  misc_feature: MA Experiment ID: 20000113 Result: Up-regulated in Transcription
  misc_feature: MA Experiment 20000113 PARAMETER Experiment Name: At_42deg_Heat_cDNA_P Parameter: Temperature (deg C) Value: 42 vs. 22
  misc_feature: MA Experiment 20000113 PARAMETER Experiment Name: At_42deg_Heat_cDNA_P Parameter: Timepoint (hr) Value: 8
  misc_feature: MA Experiment 20000113 PARAMETER Experiment Name: At_42deg_Heat_cDNA_P Parameter: Tissue Value: Aerial
  misc_feature: MA Experiment ID: 20000173 Result: Up-regulated in Transcription
  misc_feature: MA Experiment 20000173 PARAMETER Experiment Name: At_42deg_Heat_P Parameter: Age (day) Value: 14
  misc_feature: MA Experiment 20000173 PARAMETER Experiment Name: At_42deg_Heat_P Parameter: Organism Value: A. thaliana
  misc_feature: MA Experiment 20000173 PARAMETER Experiment Name: At_42deg_Heat_P Parameter: Plant Line Value: WS
  misc_feature: MA Experiment 20000173 PARAMETER Experiment Name: At_42deg_Heat_P Parameter: Temperature (deg C) Value: 42 vs. 22
  misc_feature: MA Experiment 20000173 PARAMETER Experiment Name: At_42deg_Heat_P Parameter: Timepoint (hr) Value: 6
  misc_feature: MA Experiment 20000173 PARAMETER Experiment Name: At_42deg_Heat_P Parameter: Tissue Value: Aerial
  misc_feature: MA Experiment ID: 20000460 Result: Up-regulated in Transcription
  misc_feature: MA Experiment 20000460 PARAMETER Experiment Name: At_10percent_PEG_P Parameter: Age (day) Value: 12
  misc_feature: MA Experiment 20000460 PARAMETER Experiment Name: At_10percent_PEG_P Parameter: Organism Value: A. thaliana
  misc_feature: MA Experiment 20000460 PARAMETER Experiment Name: At_10percent_PEG_P Parameter: Plant Line Value: WS
  misc_feature: MA Experiment 20000460 PARAMETER Experiment Name: At_10percent_PEG_P Parameter: Timepoint (day) Value: 12
  misc_feature: MA Experiment 20000460 PARAMETER Experiment Name: At_10percent_PEG_P Parameter: Tissue Value: Whole Plant
  misc_feature: MA Experiment 20000460 PARAMETER Experiment Name: At_10percent_PEG_P Parameter: Treatment Value: 10percent PEG vs. No Treatment
aatcacacaaatcccttttttggtttctccaaatcttcaaatcttcttcaatcatcaccatggtacgttttagtaacagtcttgtaggaatactcaacttcttcgtcttccttctctcggttcccatactctcaaccggaatctggctcagccttaaagccacgacgcaatgcgcgagattcctcgacaaacccatgatcgctctcggtgttttcctcatgataatcgcaatcgctggagtcgttggatcttgttccagagtgacgtggcttctctggtcctatctctttgtgatgttcttcttaatcctcatcgtcctctgtttcaccatctttgccttcgttgtcactagtaaaggctccggcgaaactatccaaggaaaagcttataaggagtataggctcgaggcttactctgattggttgcagaggcgtgtgaacaacgctaagcattggaacagcattagaagctgtctttatgagagcaagttctgttacaacttggagttagtcactgctaatcacactgtttctgatttctacaaagaagatctcactgcttttgagtctggttgctgcaagccctctaatgactgtgacttcacctacataacttcaacaacttggaataaaacatcaagaacacataaaaactcagattgccaactttgggacaacgaaaagcataagctttgctacaattgcaaagcctgcaaggccggttttctcgacaacctcaaggccgcatggaaaagagttgctattgtcaacatcattttccttgtactcctcgttgtcgtctacgctatgagatgttgcgctttccgaaacaacaaagaagatagatatggccgttccaatggtttcaacaattcttgatttgcgccggttcaagctagactttgatttttcattaatacatcatattacatttatgattagaacaaaacagctttcaaaatttaagaaacagtagaatggaagaatattgaattagtatagttgttgatgtgtttggatttcttctgttgatttgtgtttggacaacagaggattcttcagatctttattacagattgttgtgtttgaagaatcttctatatgaatcttcacttctgacttctg

SEQ ID NO: 41646 - protein, 291 aa, Arabidopsis thaliana
  peptide (1)..(291): Ceres Seq. ID no. 12329269
  misc_feature (23)..(263): Pfam Name: Tetraspanin family Pfam Description: Tetraspanin family
  misc_feature (20)..(278): Homolog of NCBI NO: 9294106 NR Description: senescence-associated protein-like [Arabidopsis
  misc_feature (21)..(278): Homolog of NCBI NO: 15231187 NR Description: putative protein
  misc_feature (21)..(278): Homolog of NCBI NO: 15238641 NR Description: senescence-associated protein - like; protein id:
  misc_feature (98)..(288): Homolog of NCBI NO: 30682205 NR Description: senescence-associated protein family [Arabidopsis
  misc_feature (22)..(287): Homolog of NCBI NO: 29367553 NR Description: senescence-associated protein-like protein
  misc_feature (18)..(287): Homolog of NCBI NO: 3551954 NR Description: senescence-associated protein 5 [Hemerocallis
  misc_feature (20)..(279): Homolog of NCBI NO: 15234374 NR Description: senescence-associated protein -like
  misc_feature (20)..(288): Homolog of NCBI NO: 20197174 NR Description: hypothetical protein [Arabidopsis thaliana]
  misc_feature (20)..(291): Homolog of NCBI NO: 15234743 NR Description: senescence-associated protein homolog
  misc_feature (20)..(291): Homolog of NCBI NO: 21537169 NR Description: senescence-associated protein-like protein
SHKSLFWFLQIFKSSSIITMVRFSNSLVGILNFFVFLLSVPILSTGIWLSLKATTQCARFLDKPMIALGVFLMIIAIAGVVGSCSRVTWLLWSYLFVMFFLILIVLCFTIFAFVVTSKGSGETIQGKAYKEYRLEAYSDWLQRRVNNAKHWNSIRSCLYESKFCYNLELVTANHTVSDFYKEDLTAFESGCCKPSNDCDFTYITSTTWNKTSRTHKNSDCQLWDNEKHKLCYNCKACKAGFLDNLKAAWKRVAIVNIIFLVLLVVVYAMRCCAFRNNKEDRYGRSNGFNNS

SEQ ID NO: 41647 - protein, 272 aa, Arabidopsis thaliana
  peptide (1)..(272): Ceres Seq. ID no. 12329270
  misc_feature (4)..(244): Pfam Name: Tetraspanin family Pfam Description: Tetraspanin family
  misc_feature (1)..(259): Homolog of NCBI NO: 9294106 NR Description: senescence-associated protein-like [Arabidopsis
  misc_feature (2)..(259): Homolog of NCBI NO: 15231187 NR Description: putative protein
  misc_feature (2)..(259): Homolog of NCBI NO: 15238641 NR Description: senescence-associated protein - like; protein id:
  misc_feature (79)..(269): Homolog of NCBI NO: 30682205 NR Description: senescence-associated protein family [Arabidopsis
  misc_feature (3)..(268): Homolog of NCBI NO: 29367553 NR Description: senescence-associated protein-like protein
  misc_feature (1)..(268): Homolog of NCBI NO: 3551954 NR Description: senescence-associated protein 5 [Hemerocallis
  misc_feature (1)..(260): Homolog of NCBI NO: 15234374 NR Description: senescence-associated protein -like
  misc_feature (1)..(269): Homolog of NCBI NO: 20197174 NR Description: hypothetical protein [Arabidopsis thaliana]
  misc_feature (1)..(272): Homolog of NCBI NO: 15234743 NR Description: senescence-associated protein homolog
  misc_feature (1)..(272): Homolog of NCBI NO: 21537169 NR Description: senescence-associated protein-like protein
MVRFSNSLVGILNFFVFLLSVPILSTGIWLSLKATTQCARFLDKPMIALGVFLMIIAIAGVVGSCSRVTWLLWSYLFVMFFLILIVLCFTIFAFVVTSKGSGETIQGKAYKEYRLEAYSDWLQRRVNNAKHWNSIRSCLYESKFCYNLELVTANHTVSDFYKEDLTAFESGCCKPSNDCDFTYITSTTWNKTSRTHKNSDCQLWDNEKHKLCYNCKACKAGFLDNLKAAWKRVAIVNIIFLVLLVVVYAMRCCAFRNNKEDRYGRSNGFNNS

SEQ ID NO: 41648 - protein, 227 aa, Arabidopsis thaliana
  peptide (1)..(227): Ceres Seq. ID no. 12329271
  misc_feature (1)..(199): Pfam Name: Tetraspanin family Pfam Description: Tetraspanin family
  misc_feature (1)..(214): Homolog of NCBI NO: 9294106 NR Description: senescence-associated protein-like [Arabidopsis
  misc_feature (1)..(214): Homolog of NCBI NO: 15231187 NR Description: putative protein
  misc_feature (1)..(214): Homolog of NCBI NO: 15238641 NR Description: senescence-associated protein - like; protein id:
  misc_feature (34)..(224): Homolog of NCBI NO: 30682205 NR Description: senescence-associated protein family [Arabidopsis
  misc_feature (1)..(223): Homolog of NCBI NO: 29367553 NR Description: senescence-associated protein-like protein
  misc_feature (1)..(223): Homolog of NCBI NO: 3551954 NR Description: senescence-associated protein 5 [Hemerocallis
  misc_feature (1)..(215): Homolog of NCBI NO: 15234374 NR Description: senescence-associated protein -like
  misc_feature (1)..(224): Homolog of NCBI NO: 20197174 NR Description: hypothetical protein [Arabidopsis thaliana]
  misc_feature (1)..(227): Homolog of NCBI NO: 15234743 NR Description: senescence-associated protein homolog
  misc_feature (1)..(227): Homolog of NCBI NO: 21537169 NR Description: senescence-associated protein-like protein
MIALGVFLMIIAIAGVVGSCSRVTWLLWSYLFVMFFLILIVLCFTIFAFVVTSKGSGETIQGKAYKEYRLEAYSDWLQRRVNNAKHWNSIRSCLYESKFCYNLELVTANHTVSDFYKEDLTAFESGCCKPSNDCDFTYITSTTWNKTSRTHKNSDCQLWDNEKHKLCYNCKACKAGFLDNLKAAWKRVAIVNIIFLVLLVVVYAMRCCAFRNNKEDRYGRSNGFNNS

SEQ ID NO: 41649 - DNA, 1413 bp, Arabidopsis thaliana
  misc_feature (1)..(1413): Ceres Seq. ID no. 13488037
  misc_feature: MA Experiment ID: 20000171 Result: Down-regulated in Transcription
  misc_feature: MA Experiment 20000171 PARAMETER Experiment Name: At_42deg_Heat_P Parameter: Age (day) Value: 14
  misc_feature: MA Experiment 20000171 PARAMETER Experiment Name: At_42deg_Heat_P Parameter: Organism Value: A. thaliana
  misc_feature: MA Experiment 20000171 PARAMETER Experiment Name: At_42deg_Heat_P Parameter: Plant Line Value: WS
  misc_feature: MA Experiment 20000171 PARAMETER Experiment Name: At_42deg_Heat_P Parameter: Temperature (deg C) Value: 42 vs. 22
  misc_feature: MA Experiment 20000171 PARAMETER Experiment Name: At_42deg_Heat_P Parameter: Timepoint (hr) Value: 1
  misc_feature: MA Experiment 20000171 PARAMETER Experiment Name: At_42deg_Heat_P Parameter: Tissue Value: Aerial
  misc_feature: MA Experiment ID: 20000179 Result: Up-regulated in Transcription
  misc_feature: MA Experiment 20000179 PARAMETER Experiment Name: At_Germinating_Seeds_P Parameter: Age (hr) Value: 6 vs. 0
  misc_feature: MA Experiment 20000179 PARAMETER Experiment Name: At_Germinating_Seeds_P Parameter: Tissue Value: Germinating Seeds
  misc_feature: MA Experiment ID: 20000180 Result: Up-regulated in Transcription
  misc_feature: MA Experiment 20000180 PARAMETER Experiment Name: At_Germinating_Seeds_P Parameter: Age (hr) Value: 24 vs. 0
  misc_feature: MA Experiment 20000180 PARAMETER Experiment Name: At_Germinating_Seeds_P Parameter: Tissue Value: Germinating Seeds
  misc_feature: MA Experiment ID: 20000185 Result: Down-regulated in Transcription
  misc_feature: MA Experiment 20000185 PARAMETER Experiment Name: At_Roots__P Parameter: Age (day) Value: 7 vs. 21
  misc_feature: MA Experiment 20000185 PARAMETER Experiment Name: At_Roots__P Parameter: Organism Value: A. thaliana
  misc_feature: MA Experiment 20000185 PARAMETER Experiment Name: At_Roots__P Parameter: Tissue Value: Roots vs. Whole Plant
  misc_feature: MA Experiment ID: 20000234 Result: Down-regulated in Transcription
  misc_feature: MA Experiment 20000234 PARAMETER Experiment Name: At_Siliques_P Parameter: Age (day) Value: 21
  misc_feature: MA Experiment 20000234 PARAMETER Experiment Name: At_Siliques_P Parameter: Organism Value: A. thaliana
  misc_feature: MA Experiment 20000234 PARAMETER Experiment Name: At_Siliques_P Parameter: Plant Line Value: WS
  misc_feature: MA Experiment 20000234 PARAMETER Experiment Name: At_Siliques_P Parameter: Tissue Value: Less Than 5mm Siliques vs. Whole Plant
  misc_feature: MA Experiment ID: 20000264 Result: Down-regulated in Transcription
  misc_feature: MA Experiment 20000264 PARAMETER Experiment Name: At_Open_Flower_P Parameter: Age (day) Value: 21
  misc_feature: MA Experiment 20000264 PARAMETER Experiment Name: At_Open_Flower_P Parameter: Plant Line Value: WS
  misc_feature: MA Experiment 20000264 PARAMETER Experiment Name: At_Open_Flower_P Parameter: Tissue Value: Open Flower vs. Whole Plant
  misc_feature: MA Experiment ID: 20000265 Result: Down-regulated in Transcription
  misc_feature: MA Experiment 20000265 PARAMETER Experiment Name: At_Open_Flower_P Parameter: Age (day) Value: 21
  misc_feature: MA Experiment 20000265 PARAMETER Experiment Name: At_Open_Flower_P Parameter: Plant Line Value: WS
  misc_feature: MA Experiment 20000265 PARAMETER Experiment Name: At_Open_Flower_P Parameter: Tissue Value: Closed Flower vs. Whole Plant
  misc_feature: MA Experiment ID: 20000268 Result: Down-regulated in Transcription
  misc_feature: MA Experiment 20000268 PARAMETER Experiment Name: At_100mM_NaCl__P Parameter: Age (day) Value: 14
  misc_feature: MA Experiment 20000268 PARAMETER Experiment Name: At_100mM_NaCl__P Parameter: Organism Value: A. thaliana
  misc_feature: MA Experiment 20000268 PARAMETER Experiment Name: At_100mM_NaCl__P Parameter: Plant Line Value: WS
  misc_feature: MA Experiment 20000268 PARAMETER Experiment Name: At_100mM_NaCl__P Parameter: Timepoint (hr) Value: 6
  misc_feature: MA Experiment 20000268 PARAMETER Experiment Name: At_100mM_NaCl__P Parameter: Tissue Value: Whole Plant
  misc_feature: MA Experiment 20000268 PARAMETER Experiment Name: At_100mM_NaCl__P Parameter: Treatment Value: 100mM NaCl vs. No Treatment
  misc_feature: MA Experiment ID: 20000286 Result: Down-regulated in Transcription
  misc_feature: MA Experiment 20000286 PARAMETER Experiment Name: At_Open_Flower_P Parameter: Age (day) Value: 21
  misc_feature: MA Experiment 20000286 PARAMETER Experiment Name: At_Open_Flower_P Parameter: Plant Line Value: WS
  misc_feature: MA Experiment 20000286 PARAMETER Experiment Name: At_Open_Flower_P Parameter: Tissue Value: Half Open vs. Whole Plant
  misc_feature: MA Experiment ID: 20000436 Result: Down-regulated in Transcription
  misc_feature: MA Experiment 20000436 PARAMETER Experiment Name: At_Drought_P Parameter: Age (day) Value: 7
  misc_feature: MA Experiment 20000436 PARAMETER Experiment Name: At_Drought_P Parameter: Organism Value: A. thaliana
  misc_feature: MA Experiment 20000436 PARAMETER Experiment Name: At_Drought_P Parameter: Plant Line Value: WS
  misc_feature: MA Experiment 20000436 PARAMETER Experiment Name: At_Drought_P Parameter: Timepoint (hr) Value: 12
  misc_feature: MA Experiment 20000436 PARAMETER Experiment Name: At_Drought_P Parameter: Tissue Value: Whole Plant
  misc_feature: MA Experiment 20000436 PARAMETER Experiment Name: At_Drought_P Parameter: Treatment Value: Drought vs. No Drought
  misc_feature: MA Experiment ID: 20000437 Result: Down-regulated in Transcription
  misc_feature: MA Experiment 20000437 PARAMETER Experiment Name: At_Drought_P Parameter: Age (day) Value: 8
  misc_feature: MA Experiment 20000437 PARAMETER Experiment Name: At_Drought_P Parameter: Organism Value: A. thaliana
  misc_feature: MA Experiment 20000437 PARAMETER Experiment Name: At_Drought_P Parameter: Plant Line Value: WS
  misc_feature: MA Experiment 20000437 PARAMETER Experiment Name: At_Drought_P Parameter: Timepoint (hr) Value: 24
  misc_feature: MA Experiment 20000437 PARAMETER Experiment Name: At_Drought_P Parameter: Tissue Value: Whole Plant
  misc_feature: MA Experiment 20000437 PARAMETER Experiment Name: At_Drought_P Parameter: Treatment Value: Drought vs. No Drought
  misc_feature: MA Experiment ID: 20000439 Result: Down-regulated in Transcription
  misc_feature: MA Experiment 20000439 PARAMETER Experiment Name: At_Roots__P Parameter: Age (day) Value: 14 vs. 21
  misc_feature: MA Experiment 20000439 PARAMETER Experiment Name: At_Roots__P Parameter: Organism Value: A. thaliana
  misc_feature: MA Experiment 20000439 PARAMETER Experiment Name: At_Roots__P Parameter: Tissue Value: Roots vs. Whole Plant
  misc_feature: MA Experiment ID: 20000441 Result: Up-regulated in Transcription
  misc_feature: MA Experiment 20000441 PARAMETER Experiment Name: At_1uM_BR-BRZ__P Parameter: Tissue Value: Shoot Apices
  misc_feature: MA Experiment 20000441 PARAMETER Experiment Name: At_1uM_BR-BRZ__P Parameter: Treatment Value: 1uM BR vs. No Treatment
  misc_feature: MA Experiment ID: 20000443 Result: Up-regulated in Transcription
  misc_feature: MA Experiment 20000443 PARAMETER Experiment Name: At_1uM_BR-BRZ__P Parameter: Tissue Value: Shoot Apices
  misc_feature: MA Experiment 20000443 PARAMETER Experiment Name: At_1uM_BR-BRZ__P Parameter: Treatment Value: 1uM BRZ vs. No Treatment
  misc_feature: MA Experiment ID: 20000456 Result: Down-regulated in Transcription
  misc_feature: MA Experiment 20000456 PARAMETER Experiment Name: At_100uM_BA_P Parameter: Age (day) Value: 14
  misc_feature: MA Experiment 20000456 PARAMETER Experiment Name: At_100uM_BA_P Parameter: Organism Value: A. thaliana
  misc_feature: MA Experiment 20000456 PARAMETER Experiment Name: At_100uM_BA_P Parameter: Plant Line Value: WS
  misc_feature: MA Experiment 20000456 PARAMETER Experiment Name: At_100uM_BA_P Parameter: Timepoint (hr) Value: 6
  misc_feature: MA Experiment 20000456 PARAMETER Experiment Name: At_100uM_BA_P Parameter: Tissue Value: Aerial
  misc_feature: MA Experiment 20000456 PARAMETER Experiment Name: At_100uM_BA_P Parameter: Treatment Value: 100uM BA vs. No Treatment
  misc_feature: MA Experiment ID: 20000460 Result: Up-regulated in Transcription
  misc_feature: MA Experiment 20000460 PARAMETER Experiment Name: At_10percent_PEG_P Parameter: Age (day) Value: 12
  misc_feature: MA Experiment 20000460 PARAMETER Experiment Name: At_10percent_PEG_P Parameter: Organism Value: A. thaliana
  misc_feature: MA Experiment 20000460 PARAMETER Experiment Name: At_10percent_PEG_P Parameter: Plant Line Value: WS
  misc_feature: MA Experiment 20000460 PARAMETER Experiment Name: At_10percent_PEG_P Parameter: Timepoint (day) Value: 12
  misc_feature: MA Experiment 20000460 PARAMETER Experiment Name: At_10percent_PEG_P Parameter: Tissue Value: Whole Plant
  misc_feature: MA Experiment 20000460 PARAMETER Experiment Name: At_10percent_PEG_P Parameter: Treatment Value: 10percent PEG vs. No Treatment
  misc_feature: MA Experiment ID: 20000496 Result: Up-regulated in Transcription
  misc_feature: MA Experiment 20000496 PARAMETER Experiment Name: At_Guard_Cells_P Parameter: Harvest Date Value: 7/19/2002
  misc_feature: MA Experiment 20000496 PARAMETER Experiment Name: At_Guard_Cells_P Parameter: Organism Value: Canola
  misc_feature: MA Experiment 20000496 PARAMETER Experiment Name: At_Guard_Cells_P Parameter: Tissue Value: Guard Cells vs. Leaves
  misc_feature: MA Experiment ID: 20000527 Result: Up-regulated in Transcription
  misc_feature: MA Experiment 20000527 PARAMETER Experiment Name: At_10percent_PEG_P Parameter: Age (day) Value: 20
  misc_feature: MA Experiment 20000527 PARAMETER Experiment Name: At_10percent_PEG_P Parameter: Organism Value: A. thaliana
  misc_feature: MA Experiment 20000527 PARAMETER Experiment Name: At_10percent_PEG_P Parameter: Plant Line Value: WS
  misc_feature: MA Experiment 20000527 PARAMETER Experiment Name: At_10percent_PEG_P Parameter: Timepoint (day) Value: 20
  misc_feature: MA Experiment 20000527 PARAMETER Experiment Name: At_10percent_PEG_P Parameter: Tissue Value: Whole Plant
  misc_feature: MA Experiment 20000527 PARAMETER Experiment Name: At_10percent_PEG_P Parameter: Treatment Value: 10percent PEG vs. No Treatment
  misc_feature: MA Experiment ID: 20000573 Result: Down-regulated in Transcription
  misc_feature: MA Experiment 20000573 PARAMETER Experiment Name: At_100uM_ABA_Mutants__P Parameter: Organism Value: A. thaliana
  misc_feature: MA Experiment 20000573 PARAMETER Experiment Name: At_100uM_ABA_Mutants__P Parameter: Plant Line Value: CS22 vs. Ler wt
  misc_feature: MA Experiment 20000573 PARAMETER Experiment Name: At_100uM_ABA_Mutants__P Parameter: Timepoint (hr) Value: N/A
  misc_feature: MA Experiment 20000573 PARAMETER Experiment Name: At_100uM_ABA_Mutants__P Parameter: Tissue Value: Whole Plant
  misc_feature: MA Experiment 20000573 PARAMETER Experiment Name: At_100uM_ABA_Mutants__P Parameter: Treatment Value: None
  misc_feature: MA Experiment ID: 20000574 Result: Down-regulated in Transcription
  misc_feature: MA Experiment 20000574 PARAMETER Experiment Name: At_100uM_ABA_Mutants__P Parameter: Organism Value: A. thaliana
  misc_feature: MA Experiment 20000574 PARAMETER Experiment Name: At_100uM_ABA_Mutants__P Parameter: Plant Line Value: CS23 vs. Ler wt
  misc_feature: MA Experiment 20000574 PARAMETER Experiment Name: At_100uM_ABA_Mutants__P Parameter: Timepoint (hr) Value: N/A
  misc_feature: MA Experiment 20000574 PARAMETER Experiment Name: At_100uM_ABA_Mutants__P Parameter: Tissue Value: Whole Plant
  misc_feature: MA Experiment 20000574 PARAMETER Experiment Name: At_100uM_ABA_Mutants__P Parameter: Treatment Value: None
  misc_feature: MA Experiment ID: 20000709 Result: Up-regulated in Transcription
  misc_feature: MA Experiment 20000709 PARAMETER Experiment Name: At_15mM_NH4NO3_L-to-H_P Parameter: Age (hr) Value: 14
  misc_feature: MA Experiment 20000709 PARAMETER Experiment Name: At_15mM_NH4NO3_L-to-H_P Parameter: Organism Value: A. thaliana
  misc_feature: MA Experiment 20000709 PARAMETER Experiment Name: At_15mM_NH4NO3_L-to-H_P Parameter: Plant Line Value: WS
  misc_feature: MA Experiment 20000709 PARAMETER Experiment Name: At_15mM_NH4NO3_L-to-H_P Parameter: Timepoint (hr) Value: 4
  misc_feature: MA Experiment 20000709 PARAMETER Experiment Name: At_15mM_NH4NO3_L-to-H_P Parameter: Tissue Value: Aerial
  misc_feature: MA Experiment 20000709 PARAMETER Experiment Name: At_15mM_NH4NO3_L-to-H_P Parameter: Treatment Value: 15mM NH4NO3 vs. 30mM Mannitol
  misc_feature: MA Experiment ID: 20001248 Result: Up-regulated in Transcription
  misc_feature: MA Experiment 20001248 PARAMETER Experiment Name: At_Far-red-induction_P Parameter: Age (day) Value: 7
  misc_feature: MA Experiment 20001248 PARAMETER Experiment Name: At_Far-red-induction_P Parameter: Light Value: Far-red vs. White
  misc_feature: MA Experiment 20001248 PARAMETER Experiment Name: At_Far-red-induction_P Parameter: Organism Value: A. thaliana
  misc_feature: MA Experiment 20001248 PARAMETER Experiment Name: At_Far-red-induction_P Parameter: Plant Line Value: Columbia
  misc_feature: MA Experiment 20001248 PARAMETER Experiment Name: At_Far-red-induction_P Parameter: Timepoint (hr) Value: 4
  misc_feature: MA Experiment 20001248 PARAMETER Experiment Name: At_Far-red-induction_P Parameter: Tissue Value: Whole Plant
  misc_feature: MA Experiment ID: 20001450 Result: Up-regulated in Transcription
  misc_feature: MA Experiment 20001450 PARAMETER Experiment Name: At_Far-red-induction_P Parameter: Age (day) Value: 7
  misc_feature: MA Experiment 20001450 PARAMETER Experiment Name: At_Far-red-induction_P Parameter: Light Value: Far-red vs. White
  misc_feature: MA Experiment 20001450 PARAMETER Experiment Name: At_Far-red-induction_P Parameter: Organism Value: A. thaliana
  misc_feature: MA Experiment 20001450 PARAMETER Experiment Name: At_Far-red-induction_P Parameter: Plant Line Value: Columbia
  misc_feature: MA Experiment 20001450 PARAMETER Experiment Name: At_Far-red-induction_P Parameter: Timepoint (hr) Value: 8
  misc_feature: MA Experiment 20001450 PARAMETER Experiment Name: At_Far-red-induction_P Parameter: Tissue Value: Whole Plant
  misc_feature: MA Experiment ID: 20001451 Result: Up-regulated in Transcription
  misc_feature: MA Experiment 20001451 PARAMETER Experiment Name: At_Far-red-induction_P Parameter: Age (day) Value: 7
  misc_feature: MA Experiment 20001451 PARAMETER Experiment Name: At_Far-red-induction_P Parameter: Light Value: Far-red vs. White
  misc_feature: MA Experiment 20001451 PARAMETER Experiment Name: At_Far-red-induction_P Parameter: Organism Value: A. thaliana
  misc_feature: MA Experiment 20001451 PARAMETER Experiment Name: At_Far-red-induction_P Parameter: Plant Line Value: Columbia
  misc_feature: MA Experiment 20001451 PARAMETER Experiment Name: At_Far-red-induction_P Parameter: Timepoint (hr) Value: 24
  misc_feature: MA Experiment 20001451 PARAMETER Experiment Name: At_Far-red-induction_P Parameter: Tissue Value: Whole Plant
  misc_feature: MA Experiment ID: 20001458 Result: Up-regulated in Transcription
  misc_feature: MA Experiment 20001458 PARAMETER Experiment Name: At_50mM_NH4NO3_L-to-H_P Parameter: Age (day) Value: Undefined
  misc_feature: MA Experiment 20001458 PARAMETER Experiment Name: At_50mM_NH4NO3_L-to-H_P Parameter: Organism Value: Undefined
  misc_feature: MA Experiment 20001458 PARAMETER Experiment Name: At_50mM_NH4NO3_L-to-H_P Parameter: Plant Line Value: Undefined
  misc_feature: MA Experiment 20001458 PARAMETER Experiment Name: At_50mM_NH4NO3_L-to-H_P Parameter: Timepoint (hr) Value: 2
  misc_feature: MA Experiment 20001458 PARAMETER Experiment Name: At_50mM_NH4NO3_L-to-H_P Parameter: Tissue Value: Siliques
  misc_feature: MA Experiment 20001458 PARAMETER Experiment Name: At_50mM_NH4NO3_L-to-H_P Parameter: Treatment Value: 50mM NH4NO3 vs. 100mM Manitol
  misc_feature: MA Experiment ID: 20001553 Result: Down-regulated in Transcription
  misc_feature: MA Experiment 20001553 PARAMETER Experiment Name: At_Drought_Soil_Dry_P Parameter: Age (day) Value: 19
  misc_feature: MA Experiment 20001553 PARAMETER Experiment Name: At_Drought_Soil_Dry_P Parameter: Organism Value: A. thaliana
  misc_feature: MA Experiment 20001553 PARAMETER Experiment Name: At_Drought_Soil_Dry_P Parameter: Plant Line Value: WS
  misc_feature: MA Experiment 20001553 PARAMETER Experiment Name: At_Drought_Soil_Dry_P Parameter: Post Timepoint (hr) Value: None
  misc_feature: MA Experiment 20001553 PARAMETER Experiment Name: At_Drought_Soil_Dry_P Parameter: Post-Treatment Value: None
  misc_feature: MA Experiment 20001553 PARAMETER Experiment Name: At_Drought_Soil_Dry_P Parameter: Timepoint (day) Value: 5
  misc_feature: MA Experiment 20001553 PARAMETER Experiment Name: At_Drought_Soil_Dry_P Parameter: Treatment Value: Drought vs. No Drought
  misc_feature: MA Experiment ID: 20001554 Result: Down-regulated in Transcription
  misc_feature: MA Experiment 20001554 PARAMETER Experiment Name: At_Drought_Soil_Dry_P Parameter: Age (day) Value: 21
  misc_feature: MA Experiment 20001554 PARAMETER Experiment Name: At_Drought_Soil_Dry_P Parameter: Organism Value: A. thaliana
  misc_feature: MA Experiment 20001554 PARAMETER Experiment Name: At_Drought_Soil_Dry_P Parameter: Plant Line Value: WS
  misc_feature: MA Experiment 20001554 PARAMETER Experiment Name: At_Drought_Soil_Dry_P Parameter: Post Timepoint (hr) Value: None
  misc_feature: MA Experiment 20001554 PARAMETER Experiment Name: At_Drought_Soil_Dry_P Parameter: Post-Treatment Value: None
  misc_feature: MA Experiment 20001554 PARAMETER Experiment Name: At_Drought_Soil_Dry_P Parameter: Timepoint (day) Value: 7
  misc_feature: MA Experiment 20001554 PARAMETER Experiment Name: At_Drought_Soil_Dry_P Parameter: Treatment Value: Drought vs. No Drought
  misc_feature: MA Experiment ID: 20001555 Result: Down-regulated in Transcription
  misc_feature: MA Experiment 20001555 PARAMETER Experiment Name: At_Drought_Soil_Dry_P Parameter: Age (day) Value: 24
  misc_feature: MA Experiment 20001555 PARAMETER Experiment Name: At_Drought_Soil_Dry_P Parameter: Organism Value: A. thaliana
  misc_feature: MA Experiment 20001555 PARAMETER Experiment Name: At_Drought_Soil_Dry_P Parameter: Plant Line Value: WS
  misc_feature: MA Experiment 20001555 PARAMETER Experiment Name: At_Drought_Soil_Dry_P Parameter: Post Timepoint (hr) Value: None
  misc_feature: MA Experiment 20001555 PARAMETER Experiment Name: At_Drought_Soil_Dry_P Parameter: Post-Treatment Value: None
  misc_feature: MA Experiment 20001555 PARAMETER Experiment Name: At_Drought_Soil_Dry_P Parameter: Timepoint (day) Value: 10
  misc_feature: MA Experiment 20001555 PARAMETER Experiment Name: At_Drought_Soil_Dry_P Parameter: Treatment Value: Drought vs. No Drought
  misc_feature: MA Experiment ID: 20001556 Result: Down-regulated in Transcription
  misc_feature: MA Experiment 20001556 PARAMETER Experiment Name: At_Drought_Soil_Dry_P Parameter: Age (day) Value: 26
  misc_feature: MA Experiment 20001556 PARAMETER Experiment Name: At_Drought_Soil_Dry_P Parameter: Organism Value: A. thaliana
  misc_feature: MA Experiment 20001556 PARAMETER Experiment Name: At_Drought_Soil_Dry_P Parameter: Plant Line Value: WS
  misc_feature: MA Experiment 20001556 PARAMETER Experiment Name: At_Drought_Soil_Dry_P Parameter: Post Timepoint (hr) Value: None
  misc_feature: MA Experiment 20001556 PARAMETER Experiment Name: At_Drought_Soil_Dry_P Parameter: Post-Treatment Value: None
  misc_feature: MA Experiment 20001556 PARAMETER Experiment Name: At_Drought_Soil_Dry_P Parameter: Timepoint (day) Value: 12
  misc_feature: MA Experiment 20001556 PARAMETER Experiment Name: At_Drought_Soil_Dry_P Parameter: Treatment Value: Drought vs. No Drought
  misc_feature: MA Experiment ID: 20001557 Result: Down-regulated in Transcription
  misc_feature: MA Experiment 20001557 PARAMETER Experiment Name: At_Drought_Soil_Dry_P Parameter: Age (day) Value: 27
  misc_feature: MA Experiment 20001557 PARAMETER Experiment Name: At_Drought_Soil_Dry_P Parameter: Organism Value: A. thaliana
  misc_feature: MA Experiment 20001557 PARAMETER Experiment Name: At_Drought_Soil_Dry_P Parameter: Plant Line Value: WS
  misc_feature: MA Experiment 20001557 PARAMETER Experiment Name: At_Drought_Soil_Dry_P Parameter: Post Timepoint (hr) Value: 3
  misc_feature: MA Experiment 20001557 PARAMETER Experiment Name: At_Drought_Soil_Dry_P Parameter: Post-Treatment Value: Re-Water vs. No Drought
  misc_feature: MA Experiment 20001557 PARAMETER Experiment Name: At_Drought_Soil_Dry_P Parameter: Timepoint (day) Value: 13
  misc_feature: MA Experiment 20001557 PARAMETER Experiment Name: At_Drought_Soil_Dry_P Parameter: Treatment Value: Drought vs. No Drought
  misc_feature: MA Experiment ID: 20001757 Result: Up-regulated in Transcription
  misc_feature: MA Experiment 20001757 PARAMETER Experiment Name: At_50mM_NH4NO3_L-to-H_P Parameter: Timepoint (hr) Value: 6
  misc_feature: MA Experiment 20001757 PARAMETER Experiment Name: At_50mM_NH4NO3_L-to-H_P Parameter: Tissue Value: Leaf
  misc_feature: MA Experiment 20001757 PARAMETER Experiment Name: At_50mM_NH4NO3_L-to-H_P Parameter: Treatment Value: 50mM NH4NO3 vs 100mM Mannitol
  misc_feature: MA Experiment ID: 20001759 Result: Up-regulated in Transcription
  misc_feature: MA Experiment 20001759 PARAMETER Experiment Name: At_50mM_NH4NO3_L-to-H_P Parameter: Timepoint (hr) Value: 1
  misc_feature: MA Experiment 20001759 PARAMETER Experiment Name: At_50mM_NH4NO3_L-to-H_P Parameter: Tissue Value: Siliques
  misc_feature: MA Experiment 20001759 PARAMETER Experiment Name: At_50mM_NH4NO3_L-to-H_P Parameter: Treatment Value: 50mM NH4NO3 vs 100mM Mannitol
  misc_feature: MA Experiment ID: 20001761 Result: Up-regulated in Transcription
  misc_feature: MA Experiment 20001761 PARAMETER Experiment Name: At_50mM_NH4NO3_L-to-H_P Parameter: Timepoint (hr) Value: 4
  misc_feature: MA Experiment 20001761 PARAMETER Experiment Name: At_50mM_NH4NO3_L-to-H_P Parameter: Tissue Value: Siliques
  misc_feature: MA Experiment 20001761 PARAMETER Experiment Name: At_50mM_NH4NO3_L-to-H_P Parameter: Treatment Value: 50mM NH4NO3 vs 100mM Mannitol
  misc_feature: MA Experiment ID: 20001774 Result: Down-regulated in Transcription
  misc_feature: MA Experiment 20001774 PARAMETER Experiment Name: At_Far-red-enriched-adult_P Parameter: Age (day) Value: 31
  misc_feature: MA Experiment 20001774 PARAMETER Experiment Name: At_Far-red-enriched-adult_P Parameter: Light Value: Far-red enriched vs. White
  misc_feature: MA Experiment 20001774 PARAMETER Experiment Name: At_Far-red-enriched-adult_P Parameter: Organism Value: A. thaliana
  misc_feature: MA Experiment 20001774 PARAMETER Experiment Name: At_Far-red-enriched-adult_P Parameter: Plant Line Value: Columbia
  misc_feature: MA Experiment 20001774 PARAMETER Experiment Name: At_Far-red-enriched-adult_P Parameter: Timepoint (hr) Value: 72
  misc_feature: MA Experiment 20001774 PARAMETER Experiment Name: At_Far-red-enriched-adult_P Parameter: Tissue Value: Aerial
  misc_feature: MA Experiment ID: 20001904 Result: Down-regulated in Transcription
  misc_feature: MA Experiment 20001904 PARAMETER Experiment Name: At_Drought_Reproduction_P Parameter: Age (day) Value: 37
  misc_feature: MA Experiment 20001904 PARAMETER Experiment Name: At_Drought_Reproduction_P Parameter: Organism Value: A. thaliana
  misc_feature: MA Experiment 20001904 PARAMETER Experiment Name: At_Drought_Reproduction_P Parameter: Plant Line Value: WS
  misc_feature: MA Experiment 20001904 PARAMETER Experiment Name: At_Drought_Reproduction_P Parameter: Timepoint (day) Value: 7
  misc_feature: MA Experiment 20001904 PARAMETER Experiment Name: At_Drought_Reproduction_P Parameter: Tissue Value: Rosettes
  misc_feature: MA Experiment 20001904 PARAMETER Experiment Name: At_Drought_Reproduction_P Parameter: Treatment Value: Drought vs. No Drought
  misc_feature: MA Experiment ID: 20001905 Result: Up-regulated in Transcription
  misc_feature: MA Experiment 20001905 PARAMETER Experiment Name: At_Drought_Reproduction_P Parameter: Age (day) Value: 40
  misc_feature: MA Experiment 20001905 PARAMETER Experiment Name: At_Drought_Reproduction_P Parameter: Organism Value: A. thaliana
  misc_feature: MA Experiment 20001905 PARAMETER Experiment Name: At_Drought_Reproduction_P Parameter: Plant Line Value: WS
  misc_feature: MA Experiment 20001905 PARAMETER Experiment Name: At_Drought_Reproduction_P Parameter: Timepoint (day) Value: 10
  misc_feature: MA Experiment 20001905 PARAMETER Experiment Name: At_Drought_Reproduction_P Parameter: Tissue Value: Rosettes
  misc_feature: MA Experiment 20001905 PARAMETER Experiment Name: At_Drought_Reproduction_P Parameter: Treatment Value: Drought vs. No Drought
  misc_feature: MA Experiment ID: 20001906 Result: Down-regulated in Transcription
  misc_feature: MA Experiment 20001906 PARAMETER Experiment Name: At_Drought_Reproduction_P Parameter: Age (day) Value: 35
  misc_feature: MA Experiment 20001906 PARAMETER Experiment Name: At_Drought_Reproduction_P Parameter: Organism Value: A. thaliana
  misc_feature: MA Experiment 20001906 PARAMETER Experiment Name: At_Drought_Reproduction_P Parameter: Plant Line Value: WS
  misc_feature: MA Experiment 20001906 PARAMETER Experiment Name: At_Drought_Reproduction_P Parameter: Timepoint (day) Value: 5
  misc_feature: MA Experiment 20001906 PARAMETER Experiment Name: At_Drought_Reproduction_P Parameter: Tissue Value: Siliques
  misc_feature: MA Experiment 20001906 PARAMETER Experiment Name: At_Drought_Reproduction_P Parameter: Treatment Value: Drought vs. No Drought
  misc_feature: MA Experiment ID: 20001907 Result: Down-regulated in Transcription
  misc_feature: MA Experiment 20001907 PARAMETER Experiment Name: At_Drought_Reproduction_P Parameter: Age (day) Value: 37
  misc_feature: MA Experiment 20001907 PARAMETER Experiment Name: At_Drought_Reproduction_P Parameter: Organism Value: A. thaliana
  misc_feature: MA Experiment 20001907 PARAMETER Experiment Name: At_Drought_Reproduction_P Parameter: Plant Line Value: WS
  misc_feature: MA Experiment 20001907 PARAMETER Experiment Name: At_Drought_Reproduction_P Parameter: Timepoint (day) Value: 7
  misc_feature: MA Experiment 20001907 PARAMETER Experiment Name: At_Drought_Reproduction_P Parameter: Tissue Value: Siliques
  misc_feature: MA Experiment 20001907 PARAMETER Experiment Name: At_Drought_Reproduction_P Parameter: Treatment Value: Drought vs. No Drought
  misc_feature: MA Experiment ID: 20001910 Result: Down-regulated in Transcription
  misc_feature: MA Experiment 20001910 PARAMETER Experiment Name: At_Drought_Reproduction_P Parameter: Age (day) Value: 37
  misc_feature: MA Experiment 20001910 PARAMETER Experiment Name: At_Drought_Reproduction_P Parameter: Organism Value: A. thaliana
  misc_feature: MA Experiment 20001910 PARAMETER Experiment Name: At_Drought_Reproduction_P Parameter: Plant Line Value: WS
  misc_feature: MA Experiment 20001910 PARAMETER Experiment Name: At_Drought_Reproduction_P Parameter: Timepoint (day) Value: 7
  misc_feature: MA Experiment 20001910 PARAMETER Experiment Name: At_Drought_Reproduction_P Parameter: Tissue Value: Flowers
  misc_feature: MA Experiment 20001910 PARAMETER Experiment Name: At_Drought_Reproduction_P Parameter: Treatment Value: Drought vs. No Drought
attttcctattcttgaaaacacacaacacatctcatttctccgctgtttcgtcggcaaattttcccatttttgattccgaagataatagatattatcaacagaggataaggataaaacccagaacaatcattataatttagtggtgaagttgaccaaatttataaactgatccaattttaaaatctaagagatatggagaacatggacgatttctcaccggagaatgttttagcaccaccaccaccacctcctccaatgaagaagtcaacggatctgtttatgcaaagaagcaatagctttgtttctaaagctacgagagattcatgggatcgtatgttcgacgaagctcatggagctgatgttttgattcatactgatgataatggtttgatttacgcacattctaatgtcatcggaatggcttcagatgtaatcagaggaatgatgaagcaacataagagaaaatctcatcgtaaatcgatttcaatcctcggtgttcctcaccacgctcttcgagttttcattcgattcttatactcttcttgctatgagaaacaagatatggaggattttgcaatacatctacttgtgttatcacatgtctacgttgtaccgcatttgaagcgagtctgcgaatcagaattcgaaagtagtttgctcaacaaagagaatgtgattgatgtgtttcagctagctcttctatgtgatgctcctcgtctcggtcttctctgtcatagaatgattctaaacaactttgaagaagtttctacttctgaaggatggcaaacaatgaaagagagccatcctagacttcaaaaagagcttttacgctctgtcgcttacgagcttaatagcttgaagcaaagaaacaggaaacagaaggagatacagacttatacacagctctatgaagcaatggaggcttttgttcatatatgtagagatggatgcagagaaataggtccaacaaagaccgaaaccccgcatatgtcatgcggatttcaagcgtgtaatggtttagagcagctattgaaacatttggcgggatgcaaactaagatcaatccctggtggttgtagccgttgcaagagaatgtggcagcttcttgagcttcattcgcgcatttgcgtagactcggaacaatgcaaagtccctctttgcagtagtttgaaagagaggatgaagacacagagcaggaaagatgagaaaagatggaaacttttggtgaggaatgttttgagcaccaagagaattggaggatctccattctttttgcaagcaattgatgttactttatgagttatgacattattatttgattgcttttagatgtagaaattacatatttatacatgtacataggttgcagattctttgtaaagatagattcaaaattttcaaacctaagatcc

SEQ ID NO: 41650 - protein, 368 aa, Arabidopsis thaliana
  peptide (1)..(368): Ceres Seq. ID no. 13488038
  misc_feature (226)..(323): Pfam Name: TAZ zinc finger Pfam Description: TAZ zinc finger
  misc_feature (56)..(352): Homolog of NCBI NO: 15242656 NR Description: expressed protein [Arabidopsis thaliana]
  misc_feature (55)..(352): Homolog of NCBI NO: 7487530 NR Description: hypothetical protein T29H11.120 - Arabidopsis
  misc_feature (55)..(352): Homolog of NCBI NO: 18408618 NR Description: expressed protein [Arabidopsis thaliana]
  misc_feature (14)..(293): Homolog of NCBI NO: 34907566 NR Description: B1078G07.24 [Oryza sativa (japonica
  misc_feature (8)..(323): Homolog of NCBI NO: 15221235 NR Description: hypothetical protein [Arabidopsis thaliana]
  misc_feature (8)..(361): Homolog of NCBI NO: 15240763 NR Description: expressed protein [Arabidopsis thaliana]
  misc_feature (1)..(368): Homolog of NCBI NO: 21537174 NR Description: unknown [Arabidopsis thaliana]
  misc_feature (4)..(368): Homolog of NCBI NO: 7485765 NR Description: hypothetical protein F19F18.100 - Arabidopsis
  misc_feature (1)..(368): Homolog of NCBI NO: 18420081 NR Description: expressed protein [Arabidopsis thaliana]
  misc_feature (1)..(368): Homolog of NCBI NO: 26453150 NR Description: unknown protein [Arabidopsis thaliana]
MENMDDFSPENVLAPPPPPPPMKKSTDLFMQRSNSFVSKATRDSWDRMFDEAHGADVLIHTDDNGLIYAHSNVIGMASDVIRGMMKQHKRKSHRKSISILGVPHHALRVFIRFLYSSCYEKQDMEDFAIHLLVLSHVYVVPHLKRVCESEFESSLLNKENVIDVFQLALLCDAPRLGLLCHRMILNNFEEVSTSEGWQTMKESHPRLQKELLRSVAYELNSLKQRNRKQKEIQTYTQLYEAMEAFVHICRDGCREIGPTKTETPHMSCGFQACNGLEQLLKHLAGCKLRSIPGGCSRCKRMWQLLELHSRICVDSEQCKVPLCSSLKERMKTQSRKDEKRWKLLVRNVLSTKRIGGSPFFLQAIDVTL

SEQ ID NO: 41651 - protein, 365 aa, Arabidopsis thaliana
  peptide (1)..(365): Ceres Seq. ID no. 13488039
  misc_feature (223)..(320): Pfam Name: TAZ zinc finger Pfam Description: TAZ zinc finger
  misc_feature (53)..(349): Homolog of NCBI NO: 15242656 NR Description: expressed protein [Arabidopsis thaliana]
  misc_feature (52)..(349): Homolog of NCBI NO: 7487530 NR Description: hypothetical protein T29H11.120 - Arabidopsis
  misc_feature (52)..(349): Homolog of NCBI NO: 18408618 NR Description: expressed protein [Arabidopsis thaliana]
  misc_feature (11)..(290): Homolog of NCBI NO: 34907566 NR Description: B1078G07.24 [Oryza sativa (japonica
  misc_feature (5)..(320): Homolog of NCBI NO: 15221235 NR Description: hypothetical protein [Arabidopsis thaliana]
  misc_feature (5)..(358): Homolog of NCBI NO: 15240763 NR Description: expressed protein [Arabidopsis thaliana]
  misc_feature (1)..(365): Homolog of NCBI NO: 21537174 NR Description: unknown [Arabidopsis thaliana]
  misc_feature (1)..(365): Homolog of NCBI NO: 7485765 NR Description: hypothetical protein F19F18.100 - Arabidopsis
  misc_feature (1)..(365): Homolog of NCBI NO: 18420081 NR Description: expressed protein [Arabidopsis thaliana]
  misc_feature (1)..(365): Homolog of NCBI NO: 26453150 NR Description: unknown protein [Arabidopsis thaliana]
MDDFSPENVLAPPPPPPPMKKSTDLFMQRSNSFVSKATRDSWDRMFDEAHGADVLIHTDDNGLIYAHSNVIGMASDVIRGMMKQHKRKSHRKSISILGVPHHALRVFIRFLYSSCYEKQDMEDFAIHLLVLSHVYVVPHLKRVCESEFESSLLNKENVIDVFQLALLCDAPRLGLLCHRMILNNFEEVSTSEGWQTMKESHPRLQKELLRSVAYELNSLKQRNRKQKEIQTYTQLYEAMEAFVHICRDGCREIGPTKTETPHMSCGFQACNGLEQLLKHLAGCKLRSIPGGCSRCKRMWQLLELHSRICVDSEQCKVPLCSSLKERMKTQSRKDEKRWKLLVRNVLSTKRIGGSPFFLQAIDVTL

SEQ ID NO: 41652 - protein, 347 aa, Arabidopsis thaliana
  peptide (1)..(347): Ceres Seq. ID no. 13488040
  misc_feature (205)..(302): Pfam Name: TAZ zinc finger Pfam Description: TAZ zinc finger
  misc_feature (35)..(331): Homolog of NCBI NO: 15242656 NR Description: expressed protein [Arabidopsis thaliana]
  misc_feature (34)..(331): Homolog of NCBI NO: 7487530 NR Description: hypothetical protein T29H11.120 - Arabidopsis
  misc_feature (34)..(331): Homolog of NCBI NO: 18408618 NR Description: expressed protein [Arabidopsis thaliana]
  misc_feature (1)..(272): Homolog of NCBI NO: 34907566 NR Description: B1078G07.24 [Oryza sativa (japonica
  misc_feature (1)..(302): Homolog of NCBI NO: 15221235 NR Description: hypothetical protein [Arabidopsis thaliana]
  misc_feature (1)..(340): Homolog of NCBI NO: 15240763 NR Description: expressed protein [Arabidopsis thaliana]
  misc_feature (1)..(347): Homolog of NCBI NO: 21537174 NR Description: unknown [Arabidopsis thaliana]
  misc_feature (1)..(347): Homolog of NCBI NO: 7485765 NR Description: hypothetical protein F19F18.100 - Arabidopsis
  misc_feature (1)..(347): Homolog of NCBI NO: 18420081 NR Description: expressed protein [Arabidopsis thaliana]
  misc_feature (1)..(347): Homolog of NCBI NO: 26453150 NR Description: unknown protein [Arabidopsis thaliana]
MKKSTDLFMQRSNSFVSKATRDSWDRMFDEAHGADVLIHTDDNGLIYAHSNVIGMASDVIRGMMKQHKRKSHRKSISILGVPHHALRVFIRFLYSSCYEKQDMEDFAIHLLVLSHVYVVPHLKRVCESEFESSLLNKENVIDVFQLALLCDAPRLGLLCHRMILNNFEEVSTSEGWQTMKESHPRLQKELLRSVAYELNSLKQRNRKQKEIQTYTQLYEAMEAFVHICRDGCREIGPTKTETPHMSCGFQACNGLEQLLKHLAGCKLRSIPGGCSRCKRMWQLLELHSRICVDSEQCKVPLCSSLKERMKTQSRKDEKRWKLLVRNVLSTKRIGGSPFFLQAIDVTL

SEQ ID NO: 41653 - DNA, 1669 bp, Arabidopsis thaliana
  misc_feature (1)..(1669): Ceres Seq. ID no. 13575575
  misc_feature: MA Experiment ID: 20000179 Result: Up-regulated in Transcription
  misc_feature: MA Experiment 20000179 PARAMETER Experiment Name: At_Germinating_Seeds_P Parameter: Age (hr) Value: 6 vs. 0
  misc_feature: MA Experiment 20000179 PARAMETER Experiment Name: At_Germinating_Seeds_P Parameter: Tissue Value: Germinating Seeds
  misc_feature: MA Experiment ID: 20001451 Result: Down-regulated in Transcription
  misc_feature: MA Experiment 20001451 PARAMETER Experiment Name: At_Far-red-induction_P Parameter: Age (day) Value: 7
  misc_feature: MA Experiment 20001451 PARAMETER Experiment Name: At_Far-red-induction_P Parameter: Light Value: Far-red vs. White
  misc_feature: MA Experiment 20001451 PARAMETER Experiment Name: At_Far-red-induction_P Parameter: Organism Value: A. thaliana
  misc_feature: MA Experiment 20001451 PARAMETER Experiment Name: At_Far-red-induction_P Parameter: Plant Line Value: Columbia
  misc_feature: MA Experiment 20001451 PARAMETER Experiment Name: At_Far-red-induction_P Parameter: Timepoint (hr) Value: 24
  misc_feature: MA Experiment 20001451 PARAMETER Experiment Name: At_Far-red-induction_P Parameter: Tissue Value: Whole Plant
gagctatatattcgcacatgtactcgtttcgctttccttagtgttagctgctgccgctgttgtttctcctccatttctctatctttctctctcgctgcttctcgaatcttctgtatcatcttcttcttcttcaagtgaaaaatggccgatggtgaggatattcagccacttgtctgtgacaatggaactggaatggtgaaggctggttttgctggtgatgatgccccgagagcagtgttcccaagtattgttggtcgtcctaggcacactggtgtcatggttggtatgggtcagaaagatgcttacgttggtgatgaagctcagtccaagagaggtatcctcactctgaagtatccaatcgaacatggtattgtaagtaactgggatgacatggaaaagatatggcatcacactttctacaacgagcttcgtgttgcccctgaggagcacccagttctactcacagaggcacctcttaaccctaaagctaacagggagaagatgactcagatcatgtttgagacattcaatgtccctgccatgtatgttgccattcaggccgttctttctctctatgccagtggtcgtacaaccggtattgtgctcgattctggtgatggtgtgtctcacactgtgccaatctacgaggggtatgctcttcctcatgctatccttcgtcttgatcttgcgggtcgggatctcacagactcactcatgaagattctcactgagagaggttacatgttcaccactaccgcagaacgggaaattgtccgtgacataaaggagaaacttgcttatgtcgctcttgactacgagcaagagctagagacagccaagagcagttcttcagtggagaagaactacgagctacctgatggacaagtcataaccatcggagctgagagattccgttgtcctgaggttctgttccagccatcgctcatcggaatggaagctcctggaatccatgaaacaacttacaactccatcatgaaatgtgatgtcgatatcaggaaggatctctatggaaacatcgttctcagtggtggttccaccatgttcccaggaattgctgaccgtatgagcaaagagatcaccgctcttgcacctagcagcatgaagatcaaggtggttgcaccgccagagagaaaatacagtgtctggatcggaggatcaatccttgcatccctcagcaccttccaacagatgtggatttcaaagagtgagtacgatgagtcaggtccatcgattgttcacaggaaatgcttctaagtgtgtcttgtcttatctggttcgtggtggtgagtttgttacaaaaaaatctattttccctagttgagatgggaattgaactatctgttgttatgtggattttattttcttttttctctttagaaccttatggttgtgtcaagaagtcttgtgtactttagttttatatctctgttttatctcttctattttctttaggatgcttgtgatgatgctgtttttttttgtccctaagcaaaaaaatatcatattatatttggtccttggttcatttttttggtttttttttgtcttcacatataaatattgtttgaatgtcttcaatcttttatttgtatgagacaattatttaagtatcgggtgacaatgcagctattatgtattgtcgattgtt

SEQ ID NO: 41654 - protein, 377 aa, Arabidopsis thaliana
  peptide (1)..(377): Ceres Seq. ID no. 13575576
  misc_feature (1)..(377): Pfam Name: Actin Pfam Description: Actin
  misc_feature (1)..(362): Homolog of NCBI NO: 11276980 NR Description: actin (ACT3) - Arabidopsis thaliana
  misc_feature (1)..(377): Homolog of NCBI NO: 24496452 NR Description: actin [Hordeum vulgare]
  misc_feature (1)..(377): Homolog of NCBI NO: 11276968 NR Description: actin [imported] - Picea rubens
  misc_feature (1)..(377): Homolog of NCBI NO: 15076949 NR Description: actin [Musa x paradisiaca]
  misc_feature (1)..(377): Homolog of NCBI NO: 11276971 NR Description: actin isoform B [imported] - Mimosa pudica
  misc_feature (1)..(377): Homolog of NCBI NO: 9965319 NR Description: actin [Setaria italica]
  misc_feature (1)..(377): Homolog of NCBI NO: 23955912 NR Description: actin [Stevia rebaudiana]
  misc_feature (1)..(377): Homolog of NCBI NO: 11276970 NR Description: actin [imported] - Malva pusilla
  misc_feature (1)..(377): Homolog of NCBI NO: 11276972 NR Description: actin [imported] - rape
  misc_feature (1)..(377): Homolog of NCBI NO: 15242516 NR Description: ACTIN 2/7 (sp|P53492) [Arabidopsis thaliana]
MADGEDIQPLVCDNGTGMVKAGFAGDDAPRAVFPSIVGRPRHTGVMVGMGQKDAYVGDEAQSKRGILTLKYPIEHGIVSNWDDMEKIWHHTFYNELRVAPEEHPVLLTEAPLNPKANREKMTQIMFETFNVPAMYVAIQAVLSLYASGRTTGIVLDSGDGVSHTVPIYEGYALPHAILRLDLAGRDLTDSLMKILTERGYMFTTTAEREIVRDIKEKLAYVALDYEQELETAKSSSSVEKNYELPDGQVITIGAERFRCPEVLFQPSLIGMEAPGIHETTYNSIMKCDVDIRKDLYGNIVLSGGSTMFPGIADRMSKEITALAPSSMKIKVVAPPERKYSVWIGGSILASLSTFQQMWISKSEYDESGPSIVHRKCF

SEQ ID NO: 41655 - protein, 360 aa, Arabidopsis thaliana
  peptide (1)..(360): Ceres Seq. ID no. 13575577
  misc_feature (1)..(360): Pfam Name: Actin Pfam Description: Actin
  misc_feature (1)..(345): Homolog of NCBI NO: 11276980 NR Description: actin (ACT3) - Arabidopsis thaliana
  misc_feature (1)..(360): Homolog of NCBI NO: 24496452 NR Description: actin [Hordeum vulgare]
  misc_feature (1)..(360): Homolog of NCBI NO: 11276968 NR Description: actin [imported] - Picea rubens
  misc_feature (1)..(360): Homolog of NCBI NO: 15076949 NR Description: actin [Musa x paradisiaca]
  misc_feature (1)..(360): Homolog of NCBI NO: 11276971 NR Description: actin isoform B [imported] - Mimosa pudica
  misc_feature (1)..(360): Homolog of NCBI NO: 9965319 NR Description: actin [Setaria italica]
  misc_feature (1)..(360): Homolog of NCBI NO: 23955912 NR Description: actin [Stevia rebaudiana]
  misc_feature (1)..(360): Homolog of NCBI NO: 11276970 NR Description: actin [imported] - Malva pusilla
  misc_feature (1)..(360): Homolog of NCBI NO: 11276972 NR Description: actin [imported] - rape
  misc_feature (1)..(360): Homolog of NCBI NO: 15242516 NR Description: ACTIN 2/7 (sp|P53492) [Arabidopsis thaliana]
MVKAGFAGDDAPRAVFPSIVGRPRHTGVMVGMGQKDAYVGDEAQSKRGILTLKYPIEHGIVSNWDDMEKIWHHTFYNELRVAPEEHPVLLTEAPLNPKANREKMTQIMFETFNVPAMYVAIQAVLSLYASGRTTGIVLDSGDGVSHTVPIYEGYALPHAILRLDLAGRDLTDSLMKILTERGYMFTTTAEREIVRDIKEKLAYVALDYEQELETAKSSSSVEKNYELPDGQVITIGAERFRCPEVLFQPSLIGMEAPGIHETTYNSIMKCDVDIRKDLYGNIVLSGGSTMFPGIADRMSKEITALAPSSMKIKVVAPPERKYSVWIGGSILASLSTFQQMWISKSEYDESGPSIVHRKCF

SEQ ID NO: 41656 - protein, 332 aa, Arabidopsis thaliana
  peptide (1)..(332): Ceres Seq. ID no. 13575578
  misc_feature (1)..(332): Pfam Name: Actin Pfam Description: Actin
  misc_feature (1)..(317): Homolog of NCBI NO: 11276980 NR Description: actin (ACT3) - Arabidopsis thaliana
  misc_feature (1)..(332): Homolog of NCBI NO: 24496452 NR Description: actin [Hordeum vulgare]
  misc_feature (1)..(332): Homolog of NCBI NO: 11276968 NR Description: actin [imported] - Picea rubens
  misc_feature (1)..(332): Homolog of NCBI NO: 15076949 NR Description: actin [Musa x paradisiaca]
  misc_feature (1)..(332): Homolog of NCBI NO: 11276971 NR Description: actin isoform B [imported] - Mimosa pudica
  misc_feature (1)..(332): Homolog of NCBI NO: 9965319 NR Description: actin [Setaria italica]
  misc_feature (1)..(332): Homolog of NCBI NO: 23955912 NR Description: actin [Stevia rebaudiana]
  misc_feature (1)..(332): Homolog of NCBI NO: 11276970 NR Description: actin [imported] - Malva pusilla
  misc_feature (1)..(332): Homolog of NCBI NO: 11276972 NR Description: actin [imported] - rape
  misc_feature (1)..(332): Homolog of NCBI NO: 15242516 NR Description: ACTIN 2/7 (sp|P53492) [Arabidopsis thaliana]
MVGMGQKDAYVGDEAQSKRGILTLKYPIEHGIVSNWDDMEKIWHHTFYNELRVAPEEHPVLLTEAPLNPKANREKMTQIMFETFNVPAMYVAIQAVLSLYASGRTTGIVLDSGDGVSHTVPIYEGYALPHAILRLDLAGRDLTDSLMKILTERGYMFTTTAEREIVRDIKEKLAYVALDYEQELETAKSSSSVEKNYELPDGQVITIGAERFRCPEVLFQPSLIGMEAPGIHETTYNSIMKCDVDIRKDLYGNIVLSGGSTMFPGIADRMSKEITALAPSSMKIKVVAPPERKYSVWIGGSILASLSTFQQMWISKSEYDESGPSIVHRKCF

SEQ ID NO: 41657 - DNA, 1953 bp, Arabidopsis thaliana
  misc_feature (1)..(1953): Ceres Seq. ID no. 12482224
  misc_feature: MA Experiment ID: 20000166 Result: Up-regulated in Transcription
  misc_feature: MA Experiment 20000166 PARAMETER Experiment Name: At_100uM_ABA_P Parameter: Age (day) Value: 14
  misc_feature: MA Experiment 20000166 PARAMETER Experiment Name: At_100uM_ABA_P Parameter: Organism Value: A. thaliana
  misc_feature: MA Experiment 20000166 PARAMETER Experiment Name: At_100uM_ABA_P Parameter: Plant Line Value: WS
  misc_feature: MA Experiment 20000166 PARAMETER Experiment Name: At_100uM_ABA_P Parameter: Timepoint (hr) Value: 1
  misc_feature: MA Experiment 20000166 PARAMETER Experiment Name: At_100uM_ABA_P Parameter: Tissue Value: Aerial
  misc_feature: MA Experiment 20000166 PARAMETER Experiment Name: At_100uM_ABA_P Parameter: Treatment Value: 100uM ABA vs. No Treatment
  misc_feature: MA Experiment ID: 20000169 Result: Up-regulated in Transcription
  misc_feature: MA Experiment 20000169 PARAMETER Experiment Name: At_100uM_ABA_P Parameter: Age (day) Value: 14
  misc_feature: MA Experiment 20000169 PARAMETER Experiment Name: At_100uM_ABA_P Parameter: Organism Value: A. thaliana
  misc_feature: MA Experiment 20000169 PARAMETER Experiment Name: At_100uM_ABA_P Parameter: Plant Line Value: WS
  misc_feature: MA Experiment 20000169 PARAMETER Experiment Name: At_100uM_ABA_P Parameter: Timepoint (hr) Value: 6
  misc_feature: MA Experiment 20000169 PARAMETER Experiment Name: At_100uM_ABA_P Parameter: Tissue Value: Aerial
  misc_feature: MA Experiment 20000169 PARAMETER Experiment Name: At_100uM_ABA_P Parameter: Treatment Value: 100uM ABA vs. No Treatment
  misc_feature: MA Experiment ID: 20000171 Result: Down-regulated in Transcription
  misc_feature: MA Experiment 20000171 PARAMETER Experiment Name: At_42deg_Heat_P Parameter: Age (day) Value: 14
  misc_feature: MA Experiment 20000171 PARAMETER Experiment Name: At_42deg_Heat_P Parameter: Organism Value: A. thaliana
  misc_feature: MA Experiment 20000171 PARAMETER Experiment Name: At_42deg_Heat_P Parameter: Plant Line Value: WS
  misc_feature: MA Experiment 20000171 PARAMETER Experiment Name: At_42deg_Heat_P Parameter: Temperature (deg C) Value: 42 vs. 22
  misc_feature: MA Experiment 20000171 PARAMETER Experiment Name: At_42deg_Heat_P Parameter: Timepoint (hr) Value: 1
  misc_feature: MA Experiment 20000171 PARAMETER Experiment Name: At_42deg_Heat_P Parameter: Tissue Value: Aerial
  misc_feature: MA Experiment ID: 20000173 Result: Down-regulated in Transcription
  misc_feature: MA Experiment 20000173 PARAMETER Experiment Name: At_42deg_Heat_P Parameter: Age (day) Value: 14
  misc_feature: MA Experiment 20000173 PARAMETER Experiment Name: At_42deg_Heat_P Parameter: Organism Value: A. thaliana
  misc_feature: MA Experiment 20000173 PARAMETER Experiment Name: At_42deg_Heat_P Parameter: Plant Line Value: WS
  misc_feature: MA Experiment 20000173 PARAMETER Experiment Name: At_42deg_Heat_P Parameter: Temperature (deg C) Value: 42 vs. 22
  misc_feature: MA Experiment 20000173 PARAMETER Experiment Name: At_42deg_Heat_P Parameter: Timepoint (hr) Value: 6
  misc_feature: MA Experiment 20000173 PARAMETER Experiment Name: At_42deg_Heat_P Parameter: Tissue Value: Aerial
  misc_feature: MA Experiment ID: 20000182 Result: Up-regulated in Transcription
  misc_feature: MA Experiment 20000182 PARAMETER Experiment Name: At_2mM_SA_P Parameter: Age (day) Value: 14
  misc_feature: MA Experiment 20000182 PARAMETER Experiment Name: At_2mM_SA_P Parameter: Organism Value: A. thaliana
  misc_feature: MA Experiment 20000182 PARAMETER Experiment Name: At_2mM_SA_P Parameter: Plant Line Value: WS
  misc_feature: MA Experiment 20000182 PARAMETER Experiment Name: At_2mM_SA_P Parameter: Timepoint (hr) Value: 6
  misc_feature: MA Experiment 20000182 PARAMETER Experiment Name: At_2mM_SA_P Parameter: Tissue Value: Aerial
  misc_feature: MA Experiment 20000182 PARAMETER Experiment Name: At_2mM_SA_P Parameter: Treatment Value: 2mM SA vs. No Treatment
  misc_feature: MA Experiment ID: 20000184 Result: Down-regulated in Transcription
  misc_feature: MA Experiment 20000184 PARAMETER Experiment Name: At_Shoots__P Parameter: Age (day) Value: 7
  misc_feature: MA Experiment 20000184 PARAMETER Experiment Name: At_Shoots__P Parameter: Tissue Value: Shoots vs. Whole Plant
  misc_feature: MA Experiment ID: 20000185 Result: Down-regulated in Transcription
  misc_feature: MA Experiment 20000185 PARAMETER Experiment Name: At_Roots__P Parameter: Age (day) Value: 7 vs. 21
  misc_feature: MA Experiment 20000185 PARAMETER Experiment Name: At_Roots__P Parameter: Organism Value: A. thaliana
  misc_feature: MA Experiment 20000185 PARAMETER Experiment Name: At_Roots__P Parameter: Tissue Value: Roots vs. Whole Plant
  misc_feature: MA Experiment ID: 20000211 Result: Up-regulated in Transcription
  misc_feature: MA Experiment 20000211 PARAMETER Experiment Name: At_0.001percent_MeJA__P Parameter: Age (day) Value: 14
  misc_feature: MA Experiment 20000211 PARAMETER Experiment Name: At_0.001percent_MeJA__P Parameter: Organism Value: A. thaliana
  misc_feature: MA Experiment 20000211 PARAMETER Experiment Name: At_0.001percent_MeJA__P Parameter: Plant Line Value: WS
  misc_feature: MA Experiment 20000211 PARAMETER Experiment Name: At_0.001percent_MeJA__P Parameter: Timepoint (hr) Value: 1
  misc_feature: MA Experiment 20000211 PARAMETER Experiment Name: At_0.001percent_MeJA__P Parameter: Tissue Value: Aerial
  misc_feature: MA Experiment 20000211 PARAMETER Experiment Name: At_0.001percent_MeJA__P Parameter: Treatment Value: 0.001percent MeJA vs. No Treatment
  misc_feature: MA Experiment ID: 20000234 Result: Down-regulated in Transcription
  misc_feature: MA Experiment 20000234 PARAMETER Experiment Name: At_Siliques_P Parameter: Age (day) Value: 21
  misc_feature: MA Experiment 20000234 PARAMETER Experiment Name: At_Siliques_P Parameter: Organism Value: A. thaliana
  misc_feature: MA Experiment 20000234 PARAMETER Experiment Name: At_Siliques_P Parameter: Plant Line Value: WS
  misc_feature: MA Experiment 20000234 PARAMETER Experiment Name: At_Siliques_P Parameter: Tissue Value: Less Than 5mm Siliques vs. Whole Plant
  misc_feature: MA Experiment ID: 20000235 Result: Down-regulated in Transcription
  misc_feature: MA Experiment 20000235 PARAMETER Experiment Name: At_Siliques_P Parameter: Age (day) Value: 21
  misc_feature: MA Experiment 20000235 PARAMETER Experiment Name: At_Siliques_P Parameter: Organism Value: A. thaliana
  misc_feature: MA Experiment 20000235 PARAMETER Experiment Name: At_Siliques_P Parameter: Plant Line Value: WS
  misc_feature: MA Experiment 20000235 PARAMETER Experiment Name: At_Siliques_P Parameter: Tissue Value: 5-10mm Siliques vs. Whole Plant
  misc_feature: MA Experiment ID: 20000264 Result: Down-regulated in Transcription
  misc_feature: MA Experiment 20000264 PARAMETER Experiment Name: At_Open_Flower_P Parameter: Age (day) Value: 21
  misc_feature: MA Experiment 20000264 PARAMETER Experiment Name: At_Open_Flower_P Parameter: Plant Line Value: WS
  misc_feature: MA Experiment 20000264 PARAMETER Experiment Name: At_Open_Flower_P Parameter: Tissue Value: Open Flower vs. Whole Plant
  misc_feature: MA Experiment ID: 20000265 Result: Down-regulated in Transcription
  misc_feature: MA Experiment 20000265 PARAMETER Experiment Name: At_Open_Flower_P Parameter: Age (day) Value: 21
  misc_feature: MA Experiment 20000265 PARAMETER Experiment Name: At_Open_Flower_P Parameter: Plant Line Value: WS
  misc_feature: MA Experiment 20000265 PARAMETER Experiment Name: At_Open_Flower_P Parameter: Tissue Value: Closed Flower vs. Whole Plant
  misc_feature: MA Experiment ID: 20000267 Result: Up-regulated in Transcription
  misc_feature: MA Experiment 20000267 PARAMETER Experiment Name: At_Drought_P Parameter: Age (day) Value: 7
  misc_feature: MA Experiment 20000267 PARAMETER Experiment Name: At_Drought_P Parameter: Organism Value: A. thaliana
  misc_feature: MA Experiment 20000267 PARAMETER Experiment Name: At_Drought_P Parameter: Plant Line Value: WS
  misc_feature: MA Experiment 20000267 PARAMETER Experiment Name: At_Drought_P Parameter: Timepoint (hr) Value: 6
  misc_feature: MA Experiment 20000267 PARAMETER Experiment Name: At_Drought_P Parameter: Tissue Value: Whole Plant
  misc_feature: MA Experiment 20000267 PARAMETER Experiment Name: At_Drought_P Parameter: Treatment Value: Drought vs. No Drought
  misc_feature: MA Experiment ID: 20000286 Result: Down-regulated in Transcription
  misc_feature: MA Experiment 20000286 PARAMETER Experiment Name: At_Open_Flower_P Parameter: Age (day) Value: 21
  misc_feature: MA Experiment 20000286 PARAMETER Experiment Name: At_Open_Flower_P Parameter: Plant Line Value: WS
  misc_feature: MA Experiment 20000286 PARAMETER Experiment Name: At_Open_Flower_P Parameter: Tissue Value: Half Open vs. Whole Plant
  misc_feature: MA Experiment ID: 20000436 Result: Up-regulated in Transcription
  misc_feature: MA Experiment 20000436 PARAMETER Experiment Name: At_Drought_P Parameter: Age (day) Value: 7
  misc_feature: MA Experiment 20000436 PARAMETER Experiment Name: At_Drought_P Parameter: Organism Value: A. thaliana
  misc_feature: MA Experiment 20000436 PARAMETER Experiment Name: At_Drought_P Parameter: Plant Line Value: WS
  misc_feature: MA Experiment 20000436 PARAMETER Experiment Name: At_Drought_P Parameter: Timepoint (hr) Value: 12
  misc_feature: MA Experiment 20000436 PARAMETER Experiment Name: At_Drought_P Parameter: Tissue Value: Whole Plant
  misc_feature: MA Experiment 20000436 PARAMETER Experiment Name: At_Drought_P Parameter: Treatment Value: Drought vs. No Drought
  misc_feature: MA Experiment ID: 20000438 Result: Down-regulated in Transcription
  misc_feature: MA Experiment 20000438 PARAMETER Experiment Name: At_Shoots__P Parameter: Age (day) Value: 14
  misc_feature: MA Experiment 20000438 PARAMETER Experiment Name: At_Shoots__P Parameter: Tissue Value: Shoots vs. Whole Plant
  misc_feature: MA Experiment ID: 20000439 Result: Down-regulated in Transcription
  misc_feature: MA Experiment 20000439 PARAMETER Experiment Name: At_Roots__P Parameter: Age (day) Value: 14 vs. 21
  misc_feature: MA Experiment 20000439 PARAMETER Experiment Name: At_Roots__P Parameter: Organism Value: A. thaliana
  misc_feature: MA Experiment 20000439 PARAMETER Experiment Name: At_Roots__P Parameter: Tissue Value: Roots vs. Whole Plant
  misc_feature: MA Experiment ID: 20000453 Result: Up-regulated in Transcription
  misc_feature: MA Experiment 20000453 PARAMETER Experiment Name: At_100uM_ABA_P Parameter: Age (day) Value: 15
  misc_feature: MA Experiment 20000453 PARAMETER Experiment Name: At_100uM_ABA_P Parameter: Organism Value: A. thaliana
  misc_feature: MA Experiment 20000453 PARAMETER Experiment Name: At_100uM_ABA_P Parameter: Plant Line Value: WS
  misc_feature: MA Experiment 20000453 PARAMETER Experiment Name: At_100uM_ABA_P Parameter: Timepoint (hr) Value: 24
  misc_feature: MA Experiment 20000453 PARAMETER Experiment Name: At_100uM_ABA_P Parameter: Tissue Value: Aerial
  misc_feature: MA Experiment 20000453 PARAMETER Experiment Name: At_100uM_ABA_P Parameter: Treatment Value: 100uM ABA vs. No Treatment
  misc_feature: MA Experiment ID: 20000455 Result: Up-regulated in Transcription
  misc_feature: MA Experiment 20000455 PARAMETER Experiment Name: At_100uM_ABA_P Parameter: Age (day) Value: 16
  misc_feature: MA Experiment 20000455 PARAMETER Experiment Name: At_100uM_ABA_P Parameter: Organism Value: A. thaliana
  misc_feature: MA Experiment 20000455 PARAMETER Experiment Name: At_100uM_ABA_P Parameter: Plant Line Value: WS
  misc_feature: MA Experiment 20000455 PARAMETER Experiment Name: At_100uM_ABA_P Parameter: Timepoint (hr) Value: 48
  misc_feature: MA Experiment 20000455 PARAMETER Experiment Name: At_100uM_ABA_P Parameter: Tissue Value: Aerial
  misc_feature: MA Experiment 20000455 PARAMETER Experiment Name: At_100uM_ABA_P Parameter: Treatment Value: 100uM ABA vs. No Treatment
  misc_feature: MA Experiment ID: 20000460 Result: Up-regulated in Transcription
  misc_feature: MA Experiment 20000460 PARAMETER Experiment Name: At_10percent_PEG_P Parameter: Age (day) Value: 12
  misc_feature: MA Experiment 20000460 PARAMETER Experiment Name: At_10percent_PEG_P Parameter: Organism Value: A. thaliana
  misc_feature: MA Experiment 20000460 PARAMETER Experiment Name: At_10percent_PEG_P Parameter: Plant Line Value: WS
  misc_feature: MA Experiment 20000460 PARAMETER Experiment Name: At_10percent_PEG_P Parameter: Timepoint (day) Value: 12
  misc_feature: MA Experiment 20000460 PARAMETER Experiment Name: At_10percent_PEG_P Parameter: Tissue Value: Whole Plant
  misc_feature: MA Experiment 20000460 PARAMETER Experiment Name: At_10percent_PEG_P Parameter: Treatment Value: 10percent PEG vs. No Treatment
  misc_feature: MA Experiment ID: 20000495 Result: Down-regulated in Transcription
  misc_feature: MA Experiment 20000495 PARAMETER Experiment Name: At_Guard_Cells_P Parameter: Harvest Date Value: 8/2/2002
  misc_feature: MA Experiment 20000495 PARAMETER Experiment Name: At_Guard_Cells_P Parameter: Organism Value: A. thaliana
  misc_feature: MA Experiment 20000495 PARAMETER Experiment Name: At_Guard_Cells_P Parameter: Tissue Value: Guard Cells vs. Leaves
  misc_feature: MA Experiment ID: 20000496 Result: Down-regulated in Transcription
  misc_feature: MA Experiment 20000496 PARAMETER Experiment Name: At_Guard_Cells_P Parameter: Harvest Date Value: 7/19/2002
  misc_feature: MA Experiment 20000496 PARAMETER Experiment Name: At_Guard_Cells_P Parameter: Organism Value: Canola
  misc_feature: MA Experiment 20000496 PARAMETER Experiment Name: At_Guard_Cells_P Parameter: Tissue Value: Guard Cells vs. Leaves
  misc_feature: MA Experiment ID: 20000527 Result: Up-regulated in Transcription
  misc_feature: MA Experiment 20000527 PARAMETER Experiment Name: At_10percent_PEG_P Parameter: Age (day) Value: 20
  misc_feature: MA Experiment 20000527 PARAMETER Experiment Name: At_10percent_PEG_P Parameter: Organism Value: A. thaliana
  misc_feature: MA Experiment 20000527 PARAMETER Experiment Name: At_10percent_PEG_P Parameter: Plant Line Value: WS
  misc_feature: MA Experiment 20000527 PARAMETER Experiment Name: At_10percent_PEG_P Parameter: Timepoint (day) Value: 20
  misc_feature: MA Experiment 20000527 PARAMETER Experiment Name: At_10percent_PEG_P Parameter: Tissue Value: Whole Plant
  misc_feature: MA Experiment 20000527 PARAMETER Experiment Name: At_10percent_PEG_P Parameter: Treatment Value: 10percent PEG vs. No Treatment
  misc_feature: MA Experiment ID: 20001248 Result: Down-regulated in Transcription
  misc_feature: MA Experiment 20001248 PARAMETER Experiment Name: At_Far-red-induction_P Parameter: Age (day) Value: 7
  misc_feature: MA Experiment 20001248 PARAMETER Experiment Name: At_Far-red-induction_P Parameter: Light Value: Far-red vs. White
  misc_feature: MA Experiment 20001248 PARAMETER Experiment Name: At_Far-red-induction_P Parameter: Organism Value: A. thaliana
  misc_feature: MA Experiment 20001248 PARAMETER Experiment Name: At_Far-red-induction_P Parameter: Plant Line Value: Columbia
  misc_feature: MA Experiment 20001248 PARAMETER Experiment Name: At_Far-red-induction_P Parameter: Timepoint (hr) Value: 4
  misc_feature: MA Experiment 20001248 PARAMETER Experiment Name: At_Far-red-induction_P Parameter: Tissue Value: Whole Plant
  misc_feature: MA Experiment ID: 20001554 Result: Up-regulated in Transcription
  misc_feature: MA Experiment 20001554 PARAMETER Experiment Name: At_Drought_Soil_Dry_P Parameter: Age (day) Value: 21
  misc_feature: MA Experiment 20001554 PARAMETER Experiment Name: At_Drought_Soil_Dry_P Parameter: Organism Value: A. thaliana
  misc_feature: MA Experiment 20001554 PARAMETER Experiment Name: At_Drought_Soil_Dry_P Parameter: Plant Line Value: WS
  misc_feature: MA Experiment 20001554 PARAMETER Experiment Name: At_Drought_Soil_Dry_P Parameter: Post Timepoint (hr) Value: None
  misc_feature: MA Experiment 20001554 PARAMETER Experiment Name: At_Drought_Soil_Dry_P Parameter: Post-Treatment Value: None
  misc_feature: MA Experiment 20001554 PARAMETER Experiment Name: At_Drought_Soil_Dry_P Parameter: Timepoint (day) Value: 7
  misc_feature: MA Experiment 20001554 PARAMETER Experiment Name: At_Drought_Soil_Dry_P Parameter: Treatment Value: Drought vs. No Drought
aacaacacagaactagaaaagagaaacactattagatcatcacttctcagatttcgatattcccaataaataataaatactctcagttcttctcttctccaagaacaaaaaaaaaaaatgaattcagaatcgctagaaaatcttcaccgtccattaatcgaatcatcgaagtcgttcgtcgattatcgtctcgagactgtgttaacagatcgagagttaccgtattttcgccggatttatctagcgatgatgattgagatgaagtttctctttcatctggcggctccggcgatctttgtttacgtcatcaacaacggcatgtcaattcttacacgtatcttcgctggacacgtaggaagcttcgaactcgccgccgcttcacttggaaacagtggtttcaacatgttcacctatggacttctgcttggaatgggaagtgcagtggaaacattatgtggtcaagcacatggagctcatagatacgaaatgcttggagtttacctccaaagatcaacagttgttctaatcctaacatgtctaccaatgtcatttctcttcctcttctcaaatccgatcctcacagcacttggagagccagagcaagtggcaacattggcttcagtattcgtctacggtatgatcccggtgatcttcgcttacgcagtcaatttccctatccagaagtttctccaatcacaaagcatcgtcactccaagtgcctacatatcagctgcaacgcttgtgatccatctcatactttcgtggatcgctgtgtatcgtcttggttacggtcttttggctttgtctttgatacatagcttctcgtggtggatcattgttgtggctcagattgtttatattaaaatgagtccgagatgtcgtcggacttgggaaggttttagttggaaagcttttgaaggtctttgggattttttccgattatcagctgcttctgccgtcatgctttgtcttgaatcttggtactctcagattcttgttttactcgccggacttctcaagaaccctgagcttgctttggattctcttgctatctgcatgtcaatttctgcaatctcattcatggtctccgttggattcaacgcagctgcaagtgtgagagtaagcaacgagctaggagccggaaacccgagagcagccgcgttctccacagtcgtgacaacgggagtatcattcttactatcggttttcgaagccatcgtggtcttatcgtggcgtcacgtcatcagctatgcgtttactgatagtccagcagtggctgaggccgttgcggatttatctccctttttagccatcacaattgtcctcaatggaattcagcctgttttgtccggtgtggctgttggatgtggatggcaagcatttgttgcgtacgtaaacattggatgttactacgttgtggggattccagtgggattcgttcttggcttcacttatgatatgggagctaagggaatatggactgggatgattggtggtactttaatgcaaacaataatcttagtgattgtcactttacgaactgattgggacaaagaggttgagaaagcttcgagcagattggaccagtgggaagagagccgtgagccgcttttgaagcaataaataaattaatgaaatgatttgtttatttttattttttttgggagttttgaggtcagattgaaatcaaaatttttgtttccccgaaatatggcgatagatgatcacttgtaagatgcatattcaattgttaaactctcgtttttcaatcgaaaaatgtatatcgctttgttatttaatgacttggaaatttgagttttttttttggtttcttggtgttgtgggagttttttttttgatggacatttgagattagaatatataggagcaaagttgaaagtttatttcagtgtatgattgtatatgaaaataaagagtgagttgtttcttctt

SEQ ID NO: 41658 - protein, 501 aa, Arabidopsis thaliana
  peptide (1)..(501): Ceres Seq. ID no. 12482225
  misc_feature (68)..(490): Homolog of NCBI NO: 15234633 NR Description: putative protein; protein id: At4g21900.1
  misc_feature (5)..(460): Homolog of NCBI NO: 7487826 NR Description: hypothetical protein T8O5.120 - Arabidopsis
  misc_feature (1)..(498): Homolog of NCBI NO: 21553843 NR Description: unknown [Arabidopsis thaliana]
  misc_feature (1)..(501): Homolog of NCBI NO: 20466556 NR Description: integral membrane protein, putative [Arabidopsis
  misc_feature (1)..(498): Homolog of NCBI NO: 18415793 NR Description: putative protein; protein id: At4g21910.1
  misc_feature (1)..(501): Homolog of NCBI NO: 15233127 NR Description: integral membrane protein, putative
  misc_feature (1)..(501): Homolog of NCBI NO: 22655139 NR Description: unknown protein [Arabidopsis thaliana]
  misc_feature (1)..(501): Homolog of NCBI NO: 15221073 NR Description: unknown protein; protein id: At1g11670.1
  misc_feature (1)..(501): Homolog of NCBI NO: 15081773 NR Description: At1g61890/F8K4_9 [Arabidopsis thaliana]
  misc_feature (1)..(501): Homolog of NCBI NO: 18407368 NR Description: expressed protein
MNSESLENLHRPLIESSKSFVDYRLETVLTDRELPYFRRIYLAMMIEMKFLFHLAAPAIFVYVINNGMSILTRIFAGHVGSFELAAASLGNSGFNMFTYGLLLGMGSAVETLCGQAHGAHRYEMLGVYLQRSTVVLILTCLPMSFLFLFSNPILTALGEPEQVATLASVFVYGMIPVIFAYAVNFPIQKFLQSQSIVTPSAYISAATLVIHLILSWIAVYRLGYGLLALSLIHSFSWWIIVVAQIVYIKMSPRCRRTWEGFSWKAFEGLWDFFRLSAASAVMLCLESWYSQILVLLAGLLKNPELALDSLAICMSISAISFMVSVGFNAAASVRVSNELGAGNPRAAAFSTVVTTGVSFLLSVFEAIVVLSWRHVISYAFTDSPAVAEAVADLSPFLAITIVLNGIQPVLSGVAVGCGWQAFVAYVNIGCYYVVGIPVGFVLGFTYDMGAKGIWTGMIGGTLMQTIILVIVTLRTDWDKEVEKASSRLDQWEESREPLLKQ

SEQ ID NO: 41659 - protein, 458 aa, Arabidopsis thaliana
  peptide (1)..(458): Ceres Seq. ID no. 12482226
  misc_feature (25)..(447): Homolog of NCBI NO: 15234633 NR Description: putative protein; protein id: At4g21900.1
  misc_feature (1)..(417): Homolog of NCBI NO: 7487826 NR Description: hypothetical protein T8O5.120 - Arabidopsis
  misc_feature (1)..(455): Homolog of NCBI NO: 21553843 NR Description: unknown [Arabidopsis thaliana]
  misc_feature (1)..(458): Homolog of NCBI NO: 20466556 NR Description: integral membrane protein, putative [Arabidopsis
  misc_feature (1)..(455): Homolog of NCBI NO: 18415793 NR Description: putative protein; protein id: At4g21910.1
  misc_feature (1)..(458): Homolog of NCBI NO: 15233127 NR Description: integral membrane protein, putative
  misc_feature (1)..(458): Homolog of NCBI NO: 22655139 NR Description: unknown protein [Arabidopsis thaliana]
  misc_feature (1)..(458): Homolog of NCBI NO: 15221073 NR Description: unknown protein; protein id: At1g11670.1
  misc_feature (1)..(458): Homolog of NCBI NO: 15081773 NR Description: At1g61890/F8K4_9 [Arabidopsis thaliana]
  misc_feature (1)..(458): Homolog of NCBI NO: 18407368 NR Description: expressed protein
MMIEMKFLFHLAAPAIFVYVINNGMSILTRIFAGHVGSFELAAASLGNSGFNMFTYGLLLGMGSAVETLCGQAHGAHRYEMLGVYLQRSTVVLILTCLPMSFLFLFSNPILTALGEPEQVATLASVFVYGMIPVIFAYAVNFPIQKFLQSQSIVTPSAYISAATLVIHLILSWIAVYRLGYGLLALSLIHSFSWWIIVVAQIVYIKMSPRCRRTWEGFSWKAFEGLWDFFRLSAASAVMLCLESWYSQILVLLAGLLKNPELALDSLAICMSISAISFMVSVGFNAAASVRVSNELGAGNPRAAAFSTVVTTGVSFLLSVFEAIVVLSWRHVISYAFTDSPAVAEAVADLSPFLAITIVLNGIQPVLSGVAVGCGWQAFVAYVNIGCYYVVGIPVGFVLGFTYDMGAKGIWTGMIGGTLMQTIILVIVTLRTDWDKEVEKASSRLDQWEESREPLLKQ

SEQ ID NO: 41660 - protein, 457 aa, Arabidopsis thaliana
  peptide (1)..(457): Ceres Seq. ID no. 12482227
  misc_feature (24)..(446): Homolog of NCBI NO: 15234633 NR Description: putative protein; protein id: At4g21900.1
  misc_feature (1)..(416): Homolog of NCBI NO: 7487826 NR Description: hypothetical protein T8O5.120 - Arabidopsis
  misc_feature (1)..(454): Homolog of NCBI NO: 21553843 NR Description: unknown [Arabidopsis thaliana]
  misc_feature (1)..(457): Homolog of NCBI NO: 20466556 NR Description: integral membrane protein, putative [Arabidopsis
  misc_feature (1)..(454): Homolog of NCBI NO: 18415793 NR Description: putative protein; protein id: At4g21910.1
  misc_feature (1)..(457): Homolog of NCBI NO: 15233127 NR Description: integral membrane protein, putative
  misc_feature (1)..(457): Homolog of NCBI NO: 22655139 NR Description: unknown protein [Arabidopsis thaliana]
  misc_feature (1)..(457): Homolog of NCBI NO: 15221073 NR Description: unknown protein; protein id: At1g11670.1
  misc_feature (1)..(457): Homolog of NCBI NO: 15081773 NR Description: At1g61890/F8K4_9 [Arabidopsis thaliana]
  misc_feature (1)..(457): Homolog of NCBI NO: 18407368 NR Description: expressed protein
MIEMKFLFHLAAPAIFVYVINNGMSILTRIFAGHVGSFELAAASLGNSGFNMFTYGLLLGMGSAVETLCGQAHGAHRYEMLGVYLQRSTVVLILTCLPMSFLFLFSNPILTALGEPEQVATLASVFVYGMIPVIFAYAVNFPIQKFLQSQSIVTPSAYISAATLVIHLILSWIAVYRLGYGLLALSLIHSFSWWIIVVAQIVYIKMSPRCRRTWEGFSWKAFEGLWDFFRLSAASAVMLCLESWYSQILVLLAGLLKNPELALDSLAICMSISAISFMVSVGFNAAASVRVSNELGAGNPRAAAFSTVVTTGVSFLLSVFEAIVVLSWRHVISYAFTDSPAVAEAVADLSPFLAITIVLNGIQPVLSGVAVGCGWQAFVAYVNIGCYYVVGIPVGFVLGFTYDMGAKGIWTGMIGGTLMQTIILVIVTLRTDWDKEVEKASSRLDQWEESREPLLKQ

SEQ ID NO: 41661 - DNA, 1900 bp, Arabidopsis thaliana
  misc_feature (1)..(1900): Ceres Seq. ID no. 13491591
  misc_feature: MA Experiment ID: 108435 Result: Down-regulated in Transcription
  misc_feature: MA Experiment 108435 PARAMETER Experiment Name: At_stm_Mutants_cDNA_P Parameter: Plant Line Value: wt Landsburg vs stm
  misc_feature: MA Experiment 108435 PARAMETER Experiment Name: At_stm_Mutants_cDNA_P Parameter: Tissue Value: Shoot Apical Meristem Region
  misc_feature: MA Experiment ID: 108462 Result: Down-regulated in Transcription
  misc_feature: MA Experiment 108462 PARAMETER Experiment Name: At_Germinating_Seeds_cDNA_P Parameter: Age (day) Value: 2 vs. 0
  misc_feature: MA Experiment 108462 PARAMETER Experiment Name: At_Germinating_Seeds_cDNA_P Parameter: Tissue Value: Germinating Seeds
  misc_feature: MA Experiment ID: 108463 Result: Down-regulated in Transcription
  misc_feature: MA Experiment 108463 PARAMETER Experiment Name: At_Germinating_Seeds_cDNA_P Parameter: Age (day) Value: 3 vs. 0
  misc_feature: MA Experiment 108463 PARAMETER Experiment Name: At_Germinating_Seeds_cDNA_P Parameter: Tissue Value: Germinating Seeds
  misc_feature: MA Experiment ID: 108464 Result: Down-regulated in Transcription
  misc_feature: MA Experiment 108464 PARAMETER Experiment Name: At_Germinating_Seeds_cDNA_P Parameter: Age (day) Value: 4 vs. 0
  misc_feature: MA Experiment 108464 PARAMETER Experiment Name: At_Germinating_Seeds_cDNA_P Parameter: Tissue Value: Germinating Seeds
  misc_feature: MA Experiment ID: 108561 Result: Up-regulated in Transcription
  misc_feature: MA Experiment 108561 PARAMETER Experiment Name: At_100uM_ABA_cDNA_P Parameter: Timepoint (hr) Value: 6
  misc_feature: MA Experiment 108561 PARAMETER Experiment Name: At_100uM_ABA_cDNA_P Parameter: Tissue Value: Aerial
  misc_feature: MA Experiment 108561 PARAMETER Experiment Name: At_100uM_ABA_cDNA_P Parameter: Treatment Value: 100uM ABA vs. No Treatment
  misc_feature: MA Experiment ID: 108573 Result: Up-regulated in Transcription
  misc_feature: MA Experiment 108573 PARAMETER Experiment Name: At_Drought_cDNA_P Parameter: Timepoint (hr) Value: 6
  misc_feature: MA Experiment 108573 PARAMETER Experiment Name: At_Drought_cDNA_P Parameter: Tissue Value: Aerial
  misc_feature: MA Experiment 108573 PARAMETER Experiment Name: At_Drought_cDNA_P Parameter: Treatment Value: Drought vs. No Drought
  misc_feature: MA Experiment ID: 108574 Result: Down-regulated in Transcription
  misc_feature: MA Experiment 108574 PARAMETER Experiment Name: At_Wounding__cDNA_P Parameter: Timepoint (hr) Value: 1
  misc_feature: MA Experiment 108574 PARAMETER Experiment Name: At_Wounding__cDNA_P Parameter: Tissue Value: Aerial
  misc_feature: MA Experiment 108574 PARAMETER Experiment Name: At_Wounding__cDNA_P Parameter: Treatment Value: Wounding vs. No Wounding
  misc_feature: MA Experiment ID: 108579 Result: Down-regulated in Transcription
  misc_feature: MA Experiment 108579 PARAMETER Experiment Name: At_4deg_Cold_cDNA_P Parameter: Temperature (deg C) Value: 4 vs. 22
  misc_feature: MA Experiment 108579 PARAMETER Experiment Name: At_4deg_Cold_cDNA_P Parameter: Timepoint (hr) Value: 6
  misc_feature: MA Experiment 108579 PARAMETER Experiment Name: At_4deg_Cold_cDNA_P Parameter: Tissue Value: Aerial
  misc_feature: MA Experiment ID: 20000071 Result: Up-regulated in Transcription
  misc_feature: MA Experiment 20000071 PARAMETER Experiment Name: At_100uM_ABA_Mutants_cDNA_P Parameter: Plant Line Value: CS8104
  misc_feature: MA Experiment 20000071 PARAMETER Experiment Name: At_100uM_ABA_Mutants_cDNA_P Parameter: Timepoint (hr) Value: 6
  misc_feature: MA Experiment 20000071 PARAMETER Experiment Name: At_100uM_ABA_Mutants_cDNA_P Parameter: Tissue Value: Aerial
  misc_feature: MA Experiment 20000071 PARAMETER Experiment Name: At_100uM_ABA_Mutants_cDNA_P Parameter: Treatment Value: 100uM ABA vs. No Treatment
  misc_feature: MA Experiment ID: 20000072 Result: Up-regulated in Transcription
  misc_feature: MA Experiment 20000072 PARAMETER Experiment Name: At_100uM_ABA_Mutants_cDNA_P Parameter: Plant Line Value: CS8105
  misc_feature: MA Experiment 20000072 PARAMETER Experiment Name: At_100uM_ABA_Mutants_cDNA_P Parameter: Timepoint (hr) Value: 6
  misc_feature: MA Experiment 20000072 PARAMETER Experiment Name: At_100uM_ABA_Mutants_cDNA_P Parameter: Tissue Value: Aerial
  misc_feature: MA Experiment 20000072 PARAMETER Experiment Name: At_100uM_ABA_Mutants_cDNA_P Parameter: Treatment Value: 100uM ABA vs. No Treatment
  misc_feature: MA Experiment ID: 20000087 Result: Up-regulated in Transcription
  misc_feature: MA Experiment 20000087 PARAMETER Experiment Name: At_100uM_ABA_Mutants_cDNA_P Parameter: Plant Line Value: WS
  misc_feature: MA Experiment 20000087 PARAMETER Experiment Name: At_100uM_ABA_Mutants_cDNA_P Parameter: Timepoint (hr) Value: 6
  misc_feature: MA Experiment 20000087 PARAMETER Experiment Name: At_100uM_ABA_Mutants_cDNA_P Parameter: Tissue Value: Aerial
  misc_feature: MA Experiment 20000087 PARAMETER Experiment Name: At_100uM_ABA_Mutants_cDNA_P Parameter: Treatment Value: 100uM ABA vs. No Treatment
  misc_feature: MA Experiment ID: 20000111 Result: Up-regulated in Transcription
  misc_feature: MA Experiment 20000111 PARAMETER Experiment Name: At_42deg_Heat_cDNA_P Parameter: Temperature (deg C) Value: 42 vs. 22
  misc_feature: MA Experiment 20000111 PARAMETER Experiment Name: At_42deg_Heat_cDNA_P Parameter: Timepoint (hr) Value: 6
  misc_feature: MA Experiment 20000111 PARAMETER Experiment Name: At_42deg_Heat_cDNA_P Parameter: Tissue Value: Aerial
  misc_feature: MA Experiment ID: 20000112 Result: Up-regulated in Transcription
  misc_feature: MA Experiment 20000112 PARAMETER Experiment Name: At_42deg_Heat_cDNA_P Parameter: Temperature (deg C) Value: 42 vs. 22
  misc_feature: MA Experiment 20000112 PARAMETER Experiment Name: At_42deg_Heat_cDNA_P Parameter: Timepoint (hr) Value: 2
  misc_feature: MA Experiment 20000112 PARAMETER Experiment Name: At_42deg_Heat_cDNA_P Parameter: Tissue Value: Aerial
  misc_feature: MA Experiment ID: 20000113 Result: Up-regulated in Transcription
  misc_feature: MA Experiment 20000113 PARAMETER Experiment Name: At_42deg_Heat_cDNA_P Parameter: Temperature (deg C) Value: 42 vs. 22
  misc_feature: MA Experiment 20000113 PARAMETER Experiment Name: At_42deg_Heat_cDNA_P Parameter: Timepoint (hr) Value: 8
  misc_feature: MA Experiment 20000113 PARAMETER Experiment Name: At_42deg_Heat_cDNA_P Parameter: Tissue Value: Aerial
  misc_feature: MA Experiment ID: 20000117 Result: Up-regulated in Transcription
  misc_feature: MA Experiment 20000117 PARAMETER Experiment Name: At_100uM_ABA_Mutants_cDNA_P Parameter: Plant Line Value: Columbia
  misc_feature: MA Experiment 20000117 PARAMETER Experiment Name: At_100uM_ABA_Mutants_cDNA_P Parameter: Timepoint (hr) Value: 6
  misc_feature: MA Experiment 20000117 PARAMETER Experiment Name: At_100uM_ABA_Mutants_cDNA_P Parameter: Tissue Value: Aerial
  misc_feature: MA Experiment 20000117 PARAMETER Experiment Name: At_100uM_ABA_Mutants_cDNA_P Parameter: Treatment Value: 100uM ABA vs. No Treatment
  misc_feature: MA Experiment ID: 20000180 Result: Down-regulated in Transcription
  misc_feature: MA Experiment 20000180 PARAMETER Experiment Name: At_Germinating_Seeds_P Parameter: Age (hr) Value: 24 vs. 0
  misc_feature: MA Experiment 20000180 PARAMETER Experiment Name: At_Germinating_Seeds_P Parameter: Tissue Value: Germinating Seeds
  misc_feature: MA Experiment ID: 20000184 Result: Down-regulated in Transcription
  misc_feature: MA Experiment 20000184 PARAMETER Experiment Name: At_Shoots__P Parameter: Age (day) Value: 7
  misc_feature: MA Experiment 20000184 PARAMETER Experiment Name: At_Shoots__P Parameter: Tissue Value: Shoots vs. Whole Plant
  misc_feature: MA Experiment ID: 20000213 Result: Down-regulated in Transcription
  misc_feature: MA Experiment 20000213 PARAMETER Experiment Name: At_4deg_Cold_P Parameter: Timepoint (hr) Value: 2
  misc_feature: MA Experiment ID: 20000234 Result: Down-regulated in Transcription
  misc_feature: MA Experiment 20000234 PARAMETER Experiment Name: At_Siliques_P Parameter: Age (day) Value: 21
  misc_feature: MA Experiment 20000234 PARAMETER Experiment Name: At_Siliques_P Parameter: Organism Value: A. thaliana
  misc_feature: MA Experiment 20000234 PARAMETER Experiment Name: At_Siliques_P Parameter: Plant Line Value: WS
  misc_feature: MA Experiment 20000234 PARAMETER Experiment Name: At_Siliques_P Parameter: Tissue Value: Less Than 5mm Siliques vs. Whole Plant
  misc_feature: MA Experiment ID: 20000264 Result: Down-regulated in Transcription
  misc_feature: MA Experiment 20000264 PARAMETER Experiment Name: At_Open_Flower_P Parameter: Age (day) Value: 21
  misc_feature: MA Experiment 20000264 PARAMETER Experiment Name: At_Open_Flower_P Parameter: Plant Line Value: WS
  misc_feature: MA Experiment 20000264 PARAMETER Experiment Name: At_Open_Flower_P Parameter: Tissue Value: Open Flower vs. Whole Plant
  misc_feature: MA Experiment ID: 20000265 Result: Down-regulated in Transcription
  misc_feature: MA Experiment 20000265 PARAMETER Experiment Name: At_Open_Flower_P Parameter: Age (day) Value: 21
  misc_feature: MA Experiment 20000265 PARAMETER Experiment Name: At_Open_Flower_P Parameter: Plant Line Value: WS
  misc_feature: MA Experiment 20000265 PARAMETER Experiment Name: At_Open_Flower_P Parameter: Tissue Value: Closed Flower vs. Whole Plant
  misc_feature: MA Experiment ID: 20000286 Result: Down-regulated in Transcription
  misc_feature: MA Experiment 20000286 PARAMETER Experiment Name: At_Open_Flower_P Parameter: Age (day) Value: 21
  misc_feature: MA Experiment 20000286 PARAMETER Experiment Name: At_Open_Flower_P Parameter: Plant Line Value: WS
  misc_feature: MA Experiment 20000286 PARAMETER Experiment Name: At_Open_Flower_P Parameter: Tissue Value: Half Open vs. Whole Plant
  misc_feature: MA Experiment ID: 20000438 Result: Down-regulated in Transcription
  misc_feature: MA Experiment 20000438 PARAMETER Experiment Name: At_Shoots__P Parameter: Age (day) Value: 14
  misc_feature: MA Experiment 20000438 PARAMETER Experiment Name: At_Shoots__P Parameter: Tissue Value: Shoots vs. Whole Plant
  misc_feature: MA Experiment ID: 20000439 Result: Down-regulated in Transcription
  misc_feature: MA Experiment 20000439 PARAMETER Experiment Name: At_Roots__P Parameter: Age (day) Value: 14 vs. 21
  misc_feature: MA Experiment 20000439 PARAMETER Experiment Name: At_Roots__P Parameter: Organism Value: A. thaliana
  misc_feature: MA Experiment 20000439 PARAMETER Experiment Name: At_Roots__P Parameter: Tissue Value: Roots vs. Whole Plant
  misc_feature: MA Experiment ID: 20000441 Result: Up-regulated in Transcription
  misc_feature: MA Experiment 20000441 PARAMETER Experiment Name: At_1uM_BR-BRZ__P Parameter: Tissue Value: Shoot Apices
  misc_feature: MA Experiment 20000441 PARAMETER Experiment Name: At_1uM_BR-BRZ__P Parameter: Treatment Value: 1uM BR vs. No Treatment
  misc_feature: MA Experiment ID: 20000573 Result: Up-regulated in Transcription
  misc_feature: MA Experiment 20000573 PARAMETER Experiment Name: At_100uM_ABA_Mutants__P Parameter: Organism Value: A. thaliana
  misc_feature: MA Experiment 20000573 PARAMETER Experiment Name: At_100uM_ABA_Mutants__P Parameter: Plant Line Value: CS22 vs. Ler wt
  misc_feature: MA Experiment 20000573 PARAMETER Experiment Name: At_100uM_ABA_Mutants__P Parameter: Timepoint (hr) Value: N/A
  misc_feature: MA Experiment 20000573 PARAMETER Experiment Name: At_100uM_ABA_Mutants__P Parameter: Tissue Value: Whole Plant
  misc_feature: MA Experiment 20000573 PARAMETER Experiment Name: At_100uM_ABA_Mutants__P Parameter: Treatment Value: None
  misc_feature: MA Experiment ID: 20001450 Result: Up-regulated in Transcription
  misc_feature: MA Experiment 20001450 PARAMETER Experiment Name: At_Far-red-induction_P Parameter: Age (day) Value: 7
  misc_feature: MA Experiment 20001450 PARAMETER Experiment Name: At_Far-red-induction_P Parameter: Light Value: Far-red vs. White
  misc_feature: MA Experiment 20001450 PARAMETER Experiment Name: At_Far-red-induction_P Parameter: Organism Value: A. thaliana
  misc_feature: MA Experiment 20001450 PARAMETER Experiment Name: At_Far-red-induction_P Parameter: Plant Line Value: Columbia
  misc_feature: MA Experiment 20001450 PARAMETER Experiment Name: At_Far-red-induction_P Parameter: Timepoint (hr) Value: 8
  misc_feature: MA Experiment 20001450 PARAMETER Experiment Name: At_Far-red-induction_P Parameter: Tissue Value: Whole Plant
  misc_feature: MA Experiment ID: 20001451 Result: Up-regulated in Transcription
  misc_feature: MA Experiment 20001451 PARAMETER Experiment Name: At_Far-red-induction_P Parameter: Age (day) Value: 7
  misc_feature: MA Experiment 20001451 PARAMETER Experiment Name: At_Far-red-induction_P Parameter: Light Value: Far-red vs. White
  misc_feature: MA Experiment 20001451 PARAMETER Experiment Name: At_Far-red-induction_P Parameter: Organism Value: A. thaliana
  misc_feature: MA Experiment 20001451 PARAMETER Experiment Name: At_Far-red-induction_P Parameter: Plant Line Value: Columbia
  misc_feature: MA Experiment 20001451 PARAMETER Experiment Name: At_Far-red-induction_P Parameter: Timepoint (hr) Value: 24
  misc_feature: MA Experiment 20001451 PARAMETER Experiment Name: At_Far-red-induction_P Parameter: Tissue Value: Whole Plant
  misc_feature: MA Experiment ID: 20001557 Result: Down-regulated in Transcription
  misc_feature: MA Experiment 20001557 PARAMETER Experiment Name: At_Drought_Soil_Dry_P Parameter: Age (day) Value: 27
  misc_feature: MA Experiment 20001557 PARAMETER Experiment Name: At_Drought_Soil_Dry_P Parameter: Organism Value: A. thaliana
  misc_feature: MA Experiment 20001557 PARAMETER Experiment Name: At_Drought_Soil_Dry_P Parameter: Plant Line Value: WS
  misc_feature: MA Experiment 20001557 PARAMETER Experiment Name: At_Drought_Soil_Dry_P Parameter: Post Timepoint (hr) Value: 3
  misc_feature: MA Experiment 20001557 PARAMETER Experiment Name: At_Drought_Soil_Dry_P Parameter: Post-Treatment Value: Re-Water vs. No Drought
  misc_feature: MA Experiment 20001557 PARAMETER Experiment Name: At_Drought_Soil_Dry_P Parameter: Timepoint (day) Value: 13
  misc_feature: MA Experiment 20001557 PARAMETER Experiment Name: At_Drought_Soil_Dry_P Parameter: Treatment Value: Drought vs. No Drought
aaggggcaaaactgaaaatcacacaaaaacaaacaaaactttgcttacgtcacatcattatctgtgactaattcttaatcatcatcatcatcatcacttacttaaatctaaaaaaatctctgtttgtatatatattatctttgcgatttttatccaaatcttccaaagcttagtttttttttttttcaatttctctcttgcgttttcgattttattacaagaactttgttttgggcttcatccatcgttcaaggttcgttgaaaactatgaagaaagttgagttttttatgctccttctctgcttcatcgcagcgtcatctctagtgtctgctgatccaccaacatgtcctgctgatttgggaggcaagtgtagtgattctgatgactggcaaggtgatttcttccctgaaatccccaagattaagtatgagggaccttcgagtaagaacccacttgcttacaggtggtataacgctgaagaagagattcttgggaagaaaatgaaggattggtttagattcagtgttgcgttttggcatactttccgtgggactggaggtgatccatttggtgctgctactaagtattggccttgggaagatggtactaactctgtgtctatggctaagagaagaatgagagctaactttgagttcttgaagaaacttggagttgattggtggtgttttcatgacagagacatagcacctgatggcactacacttgaggaatctaacaaaaacttggatgaagttatcgaactcgccaaagaactccaaaaggggagcaaaatcaaaccattgtggggaacagctcagcttttcttgcatcctcgttatatgcacggaggagcgaccagctctgaagttggagtgtatgcttacgctgctgctcaggtgaagaaagccatggaggtaacacattacttaggtggtgaaaactacgttttttggggtggtcgtgaaggttatcagacactcttgaacactgatatgggaagagagcttgatcatctagccaggttctttgaagctgctgttgcttacaagaagaagattggattcaaaggcacgcttttaatcgagcccaagcctcaagaacccaccaagcaccagtatgactgggatgctgcaacagctgccaatttcttgaggaaatatggtcttattgatgagtttaagctcaacattgagtgtaaccatgccacgctctctggtcacacttgtcatcacgagcttgaaactgcaagaattaatggtttacttggcaacattgatgcaaacactggcgatgctcaaactggatgggatacagatcagtttcttacagatgttggagaagcaaccatggttatgatgagtgtcatcaaaaatggtgggattgctccaggcggcttcaactttgacgctaaactgcgaagagagagtacagacgtggaagacttattcattgctcatattagtggaatggatacaatggctcgtggactgagaaatgcagtcaaaatcttggaggagggaagtctaagtgaattggtacgcaagcgatatgcaacttgggactctgagcttgggaagcaaatagaagaaggaaaagctgattttgagtatcttgagaagaaagctaaagagtttggagaaccaaaggtttcttctgctaaacaggaactcgctgagatgattttccaatctgcaatgtaagaagaagaacaagaaggctttttatgtttattaaaagtatcgtcttttttagtttccctcgcatctttgagaagtttgaaaaccaaaacattggaaaataagatgattagagaggttggtttcattatttcagttgatgtactatggtttcacactctaattactttaaattgaataacaaaagactgtttaggccttc

SEQ ID NO: 41662 - protein, 477 aa, Arabidopsis thaliana
  peptide (1)..(477): Ceres Seq. ID no. 13491592
  misc_feature (70)..(466): Pfam Name: Xylose isomerase Pfam Description: Xylose isomerase
  misc_feature (44)..(475): Homolog of NCBI NO: 3319057 NR Description: Chain A, Xylose Isomerase From Thermotoga
  misc_feature (44)..(475): Homolog of NCBI NO: 1175034 NR Description: Xylose isomerase
  misc_feature (44)..(475): Homolog of NCBI NO: 15644415 NR Description: xylose isomerase [Thermotoga maritima]
  misc_feature (1)..(268): Homolog of NCBI NO: 30696901 NR Description: expressed protein [Arabidopsis thaliana]
  misc_feature (1)..(477): Homolog of NCBI NO: 2130051 NR Description: xylose isomerase (EC 5.3.1.5) - barley
  misc_feature (1)..(477): Homolog of NCBI NO: 6175480 NR Description: Xylose isomerase
  misc_feature (9)..(477): Homolog of NCBI NO: 34395196 NR Description: putative xylose isomerase [Oryza sativa (japonica
  misc_feature (1)..(466): Homolog of NCBI NO: 17433690 NR Description: Xylose isomerase
  misc_feature (1)..(477): Homolog of NCBI NO: 21537178 NR Description: xylose isomerase [Arabidopsis thaliana]
  misc_feature (1)..(477): Homolog of NCBI NO: 30696904 NR Description: expressed protein [Arabidopsis thaliana]
MKKVEFFMLLLCFIAASSLVSADPPTCPADLGGKCSDSDDWQGDFFPEIPKIKYEGPSSKNPLAYRWYNAEEEILGKKMKDWFRFSVAFWHTFRGTGGDPFGAATKYWPWEDGTNSVSMAKRRMRANFEFLKKLGVDWWCFHDRDIAPDGTTLEESNKNLDEVIELAKELQKGSKIKPLWGTAQLFLHPRYMHGGATSSEVGVYAYAAAQVKKAMEVTHYLGGENYVFWGGREGYQTLLNTDMGRELDHLARFFEAAVAYKKKIGFKGTLLIEPKPQEPTKHQYDWDAATAANFLRKYGLIDEFKLNIECNHATLSGHTCHHELETARINGLLGNIDANTGDAQTGWDTDQFLTDVGEATMVMMSVIKNGGIAPGGFNFDAKLRRESTDVEDLFIAHISGMDTMARGLRNAVKILEEGSLSELVRKRYATWDSELGKQIEEGKADFEYLEKKAKEFGEPKVSSAKQELAEMIFQSAM

SEQ ID NO: 41663 - protein, 470 aa, Arabidopsis thaliana
  peptide (1)..(470): Ceres Seq. ID no. 13491593
  misc_feature (63)..(459): Pfam Name: Xylose isomerase Pfam Description: Xylose isomerase
  misc_feature (37)..(468): Homolog of NCBI NO: 3319057 NR Description: Chain A, Xylose Isomerase From Thermotoga
  misc_feature (37)..(468): Homolog of NCBI NO: 1175034 NR Description: Xylose isomerase
  misc_feature (37)..(468): Homolog of NCBI NO: 15644415 NR Description: xylose isomerase [Thermotoga maritima]
  misc_feature (1)..(261): Homolog of NCBI NO: 30696901 NR Description: expressed protein [Arabidopsis thaliana]
  misc_feature (1)..(470): Homolog of NCBI NO: 2130051 NR Description: xylose isomerase (EC 5.3.1.5) - barley
  misc_feature (1)..(470): Homolog of NCBI NO: 6175480 NR Description: Xylose isomerase
  misc_feature (2)..(470): Homolog of NCBI NO: 34395196 NR Description: putative xylose isomerase [Oryza sativa (japonica
  misc_feature (1)..(459): Homolog of NCBI NO: 17433690 NR Description: Xylose isomerase
  misc_feature (1)..(470): Homolog of NCBI NO: 21537178 NR Description: xylose isomerase [Arabidopsis thaliana]
  misc_feature (1)..(470): Homolog of NCBI NO: 30696904 NR Description: expressed protein [Arabidopsis thaliana]
MLLLCFIAASSLVSADPPTCPADLGGKCSDSDDWQGDFFPEIPKIKYEGPSSKNPLAYRWYNAEEEILGKKMKDWFRFSVAFWHTFRGTGGDPFGAATKYWPWEDGTNSVSMAKRRMRANFEFLKKLGVDWWCFHDRDIAPDGTTLEESNKNLDEVIELAKELQKGSKIKPLWGTAQLFLHPRYMHGGATSSEVGVYAYAAAQVKKAMEVTHYLGGENYVFWGGREGYQTLLNTDMGRELDHLARFFEAAVAYKKKIGFKGTLLIEPKPQEPTKHQYDWDAATAANFLRKYGLIDEFKLNIECNHATLSGHTCHHELETARINGLLGNIDANTGDAQTGWDTDQFLTDVGEATMVMMSVIKNGGIAPGGFNFDAKLRRESTDVEDLFIAHISGMDTMARGLRNAVKILEEGSLSELVRKRYATWDSELGKQIEEGKADFEYLEKKAKEFGEPKVSSAKQELAEMIFQSAM

SEQ ID NO: 41664 - protein, 399 aa, Arabidopsis thaliana
  peptide (1)..(399): Ceres Seq. ID no. 13491594
  misc_feature (1)..(388): Pfam Name: Xylose isomerase Pfam Description: Xylose isomerase
  misc_feature (1)..(397): Homolog of NCBI NO: 3319057 NR Description: Chain A, Xylose Isomerase From Thermotoga
  misc_feature (1)..(397): Homolog of NCBI NO: 1175034 NR Description: Xylose isomerase
  misc_feature (1)..(397): Homolog of NCBI NO: 15644415 NR Description: xylose isomerase [Thermotoga maritima]
  misc_feature (1)..(190): Homolog of NCBI NO: 30696901 NR Description: expressed protein [Arabidopsis thaliana]
  misc_feature (1)..(399): Homolog of NCBI NO: 2130051 NR Description: xylose isomerase (EC 5.3.1.5) - barley
  misc_feature (1)..(399): Homolog of NCBI NO: 6175480 NR Description: Xylose isomerase
  misc_feature (1)..(399): Homolog of NCBI NO: 34395196 NR Description: putative xylose isomerase [Oryza sativa (japonica
  misc_feature (1)..(388): Homolog of NCBI NO: 17433690 NR Description: Xylose isomerase
  misc_feature (1)..(399): Homolog of NCBI NO: 21537178 NR Description: xylose isomerase [Arabidopsis thaliana]
  misc_feature (1)..(399): Homolog of NCBI NO: 30696904 NR Description: expressed protein [Arabidopsis thaliana]
MKDWFRFSVAFWHTFRGTGGDPFGAATKYWPWEDGTNSVSMAKRRMRANFEFLKKLGVDWWCFHDRDIAPDGTTLEESNKNLDEVIELAKELQKGSKIKPLWGTAQLFLHPRYMHGGATSSEVGVYAYAAAQVKKAMEVTHYLGGENYVFWGGREGYQTLLNTDMGRELDHLARFFEAAVAYKKKIGFKGTLLIEPKPQEPTKHQYDWDAATAANFLRKYGLIDEFKLNIECNHATLSGHTCHHELETARINGLLGNIDANTGDAQTGWDTDQFLTDVGEATMVMMSVIKNGGIAPGGFNFDAKLRRESTDVEDLFIAHISGMDTMARGLRNAVKILEEGSLSELVRKRYATWDSELGKQIEEGKADFEYLEKKAKEFGEPKVSSAKQELAEMIFQSAM

SEQ ID NO: 41665 - DNA, 944 bp, Arabidopsis thaliana
  misc_feature (1)..(944): Ceres Seq. ID no. 13488157
  misc_feature: MA Experiment ID: 108474 Result: Down-regulated in Transcription
  misc_feature: MA Experiment 108474 PARAMETER Experiment Name: At_Drought_Flowers_cDNA_P Parameter: Timepoint (hr) Value: null
  misc_feature: MA Experiment 108474 PARAMETER Experiment Name: At_Drought_Flowers_cDNA_P Parameter: Treatment Value: Drought vs. No Drought
  misc_feature: MA Experiment ID: 20000069 Result: Up-regulated in Transcription
  misc_feature: MA Experiment 20000069 PARAMETER Experiment Name: At_100uM_ABA_Mutants_cDNA_P Parameter: Plant Line Value: CS23
  misc_feature: MA Experiment 20000069 PARAMETER Experiment Name: At_100uM_ABA_Mutants_cDNA_P Parameter: Timepoint (hr) Value: 6
  misc_feature: MA Experiment 20000069 PARAMETER Experiment Name: At_100uM_ABA_Mutants_cDNA_P Parameter: Tissue Value: Aerial
  misc_feature: MA Experiment 20000069 PARAMETER Experiment Name: At_100uM_ABA_Mutants_cDNA_P Parameter: Treatment Value: 100uM ABA vs. No Treatment
  misc_feature: MA Experiment ID: 20000072 Result: Up-regulated in Transcription
  misc_feature: MA Experiment 20000072 PARAMETER Experiment Name: At_100uM_ABA_Mutants_cDNA_P Parameter: Plant Line Value: CS8105
  misc_feature: MA Experiment 20000072 PARAMETER Experiment Name: At_100uM_ABA_Mutants_cDNA_P Parameter: Timepoint (hr) Value: 6
  misc_feature: MA Experiment 20000072 PARAMETER Experiment Name: At_100uM_ABA_Mutants_cDNA_P Parameter: Tissue Value: Aerial
  misc_feature: MA Experiment 20000072 PARAMETER Experiment Name: At_100uM_ABA_Mutants_cDNA_P Parameter: Treatment Value: 100uM ABA vs. No Treatment
  misc_feature: MA Experiment ID: 20000286 Result: Up-regulated in Transcription
  misc_feature: MA Experiment 20000286 PARAMETER Experiment Name: At_Open_Flower_P Parameter: Age (day) Value: 21
  misc_feature: MA Experiment 20000286 PARAMETER Experiment Name: At_Open_Flower_P Parameter: Plant Line Value: WS
  misc_feature: MA Experiment 20000286 PARAMETER Experiment Name: At_Open_Flower_P Parameter: Tissue Value: Half Open vs. Whole Plant
  misc_feature: MA Experiment ID: 20000794 Result: Up-regulated in Transcription
  misc_feature: MA Experiment 20000794 PARAMETER Experiment Name: At_Petals_P Parameter: Age (day) Value: 23-25 days
  misc_feature: MA Experiment 20000794 PARAMETER Experiment Name: At_Petals_P Parameter: Plant Line Value: WS
  misc_feature: MA Experiment 20000794 PARAMETER Experiment Name: At_Petals_P Parameter: Tissue Value: Petals vs. Whole plant
  misc_feature: MA Experiment ID: 20001905 Result: Up-regulated in Transcription
  misc_feature: MA Experiment 20001905 PARAMETER Experiment Name: At_Drought_Reproduction_P Parameter: Age (day) Value: 40
  misc_feature: MA Experiment 20001905 PARAMETER Experiment Name: At_Drought_Reproduction_P Parameter: Organism Value: A. thaliana
  misc_feature: MA Experiment 20001905 PARAMETER Experiment Name: At_Drought_Reproduction_P Parameter: Plant Line Value: WS
  misc_feature: MA Experiment 20001905 PARAMETER Experiment Name: At_Drought_Reproduction_P Parameter: Timepoint (day) Value: 10
  misc_feature: MA Experiment 20001905 PARAMETER Experiment Name: At_Drought_Reproduction_P Parameter: Tissue Value: Rosettes
  misc_feature: MA Experiment 20001905 PARAMETER Experiment Name: At_Drought_Reproduction_P Parameter: Treatment Value: Drought vs. No Drought
  misc_feature: MA Experiment ID: 20001906 Result: Up-regulated in Transcription
  misc_feature: MA Experiment 20001906 PARAMETER Experiment Name: At_Drought_Reproduction_P Parameter: Age (day) Value: 35
  misc_feature: MA Experiment 20001906 PARAMETER Experiment Name: At_Drought_Reproduction_P Parameter: Organism Value: A. thaliana
  misc_feature: MA Experiment 20001906 PARAMETER Experiment Name: At_Drought_Reproduction_P Parameter: Plant Line Value: WS
  misc_feature: MA Experiment 20001906 PARAMETER Experiment Name: At_Drought_Reproduction_P Parameter: Timepoint (day) Value: 5
  misc_feature: MA Experiment 20001906 PARAMETER Experiment Name: At_Drought_Reproduction_P Parameter: Tissue Value: Siliques
  misc_feature: MA Experiment 20001906 PARAMETER Experiment Name: At_Drought_Reproduction_P Parameter: Treatment Value: Drought vs. No Drought
aagatcatcaagaccaatctcgtagacttcttgtctctgtccaaaaaccataaagaaactttattggcataaaaagagaacaatctcgtagattcttgagcttctgacaatggattctttgaagaatagaacattgcttaaggtcattgttcttggagatagcggggtaggcaaaacttcattgatgaatcaatatgtgtacaagaaatttaacaagcaatataaggctacgatcggagcagatttcgtgaccaaagagcttcatatagatgaaaaatctgtcactttacagatatgggataccgctggacaagagagatttcaaagtctaggggccgcgttctatagaggtgctgattgttgcgttcttgtctacgacgtgaacaatctcaaatcttttgaaactctcaataactggcacacagagttcctcaaacaggcaaatcctatggaaccggagacatttccctttgttttgatcgggaacaagaccgatgtagatggcggaaacagccgagttgtttcaaataagagagccatcgagtggtgtggctcaaagggaaacataccgtaccatgaaacctctgcgaaggaagataccaatatcgatgaagcttttttgagtgttgcacacattgctctctctaatgaacgtaaacaaagcaatgacatatatcctagaggccagtatcatgactctgttacggatattattgatccagatcagtcaagaggttgtgcttgctgattccatgtttgacatatctgatcaaataatatcgagtcccagctctttcatttgcagtccttgtttttggtaactttttttctatttattggtttaataatatcatttatagaggtttattaacgacaaaaaacagttgatacatactactttctgagtgttttgattcatgtaaagcattaattaatttctattt

SEQ ID NO: 41666 - protein, 212 aa, Arabidopsis thaliana
  peptide (1)..(212): Ceres Seq. ID no. 13488158
  misc_feature (11)..(179): Pfam Name: Ras family Pfam Description: Ras family
  misc_feature (5)..(212): Homolog of NCBI NO: 7438424 NR Description: rab7 protein homolog F17A8.70 - Arabidopsis
  misc_feature (3)..(212): Homolog of NCBI NO: 15219943 NR Description: Ras-related GTP-binding protein (Rab7)
  misc_feature (3)..(212): Homolog of NCBI NO: 7438410 NR Description: GTP-binding protein Rab7c - common tobacco
  misc_feature (5)..(212): Homolog of NCBI NO: 15234026 NR Description: GTP-binding protein, putative [Arabidopsis
  misc_feature (3)..(212): Homolog of NCBI NO: 541949 NR Description: rab7 protein - Soybean
  misc_feature (3)..(212): Homolog of NCBI NO: 1370182 NR Description: RAB7A [Lotus japonicus]
  misc_feature (3)..(212): Homolog of NCBI NO: 3914558 NR Description: RAS-RELATED PROTEIN RAB7
  misc_feature (3)..(212): Homolog of NCBI NO: 3914559 NR Description: RAS-RELATED PROTEIN RAB7
  misc_feature (1)..(212): Homolog of NCBI NO: 18399819 NR Description: GTP-binding protein, putative [Arabidopsis
  misc_feature (1)..(181): Homolog of NCBI NO: 25294161 NR Description: probable RAS type GTP-binding protein
MDSLKNRTLLKVIVLGDSGVGKTSLMNQYVYKKFNKQYKATIGADFVTKELHIDEKSVTLQIWDTAGQERFQSLGAAFYRGADCCVLVYDVNNLKSFETLNNWHTEFLKQANPMEPETFPFVLIGNKTDVDGGNSRVVSNKRAIEWCGSKGNIPYHETSAKEDTNIDEAFLSVAHIALSNERKQSNDIYPRGQYHDSVTDIIDPDQSRGCAC

SEQ ID NO: 41667 - protein, 187 aa, Arabidopsis thaliana
  peptide (1)..(187): Ceres Seq. ID no. 13488159
  misc_feature (1)..(154): Pfam Name: Ras family Pfam Description: Ras family
  misc_feature (1)..(187): Homolog of NCBI NO: 7438424 NR Description: rab7 protein homolog F17A8.70 - Arabidopsis
  misc_feature (1)..(187): Homolog of NCBI NO: 15219943 NR Description: Ras-related GTP-binding protein (Rab7)
  misc_feature (1)..(187): Homolog of NCBI NO: 7438410 NR Description: GTP-binding protein Rab7c - common tobacco
  misc_feature (1)..(187): Homolog of NCBI NO: 15234026 NR Description: GTP-binding protein, putative [Arabidopsis
  misc_feature (1)..(187): Homolog of NCBI NO: 541949 NR Description: rab7 protein - Soybean
  misc_feature (1)..(187): Homolog of NCBI NO: 1370182 NR Description: RAB7A [Lotus japonicus]
  misc_feature (1)..(187): Homolog of NCBI NO: 3914558 NR Description: RAS-RELATED PROTEIN RAB7
  misc_feature (1)..(187): Homolog of NCBI NO: 3914559 NR Description: RAS-RELATED PROTEIN RAB7
  misc_feature (1)..(187): Homolog of NCBI NO: 18399819 NR Description: GTP-binding protein, putative [Arabidopsis
  misc_feature (1)..(156): Homolog of NCBI NO: 25294161 NR Description: probable RAS type GTP-binding protein
MNQYVYKKFNKQYKATIGADFVTKELHIDEKSVTLQIWDTAGQERFQSLGAAFYRGADCCVLVYDVNNLKSFETLNNWHTEFLKQANPMEPETFPFVLIGNKTDVDGGNSRVVSNKRAIEWCGSKGNIPYHETSAKEDTNIDEAFLSVAHIALSNERKQSNDIYPRGQYHDSVTDIIDPDQSRGCAC

SEQ ID NO: 41668 - DNA, 1833 bp, Arabidopsis thaliana; identical to SEQ ID NO: 30707
  misc_feature (1)..(1833): Ceres Seq. ID no. 13509854
  misc_feature: MA Experiment ID: 108434 Result: Down-regulated in Transcription
  misc_feature: MA Experiment 108434 PARAMETER Experiment Name: At_Root_Tips_cDNA_P Parameter: Tissue Value: Root Tips
  misc_feature: MA Experiment ID: 108462 Result: Down-regulated in Transcription
  misc_feature: MA Experiment 108462 PARAMETER Experiment Name: At_Germinating_Seeds_cDNA_P Parameter: Age (day) Value: 2 vs. 0
  misc_feature: MA Experiment 108462 PARAMETER Experiment Name: At_Germinating_Seeds_cDNA_P Parameter: Tissue Value: Germinating Seeds
  misc_feature: MA Experiment ID: 108463 Result: Down-regulated in Transcription
  misc_feature: MA Experiment 108463 PARAMETER Experiment Name: At_Germinating_Seeds_cDNA_P Parameter: Age (day) Value: 3 vs. 0
  misc_feature: MA Experiment 108463 PARAMETER Experiment Name: At_Germinating_Seeds_cDNA_P Parameter: Tissue Value: Germinating Seeds
  misc_feature: MA Experiment ID: 108464 Result: Down-regulated in Transcription
  misc_feature: MA Experiment 108464 PARAMETER Experiment Name: At_Germinating_Seeds_cDNA_P Parameter: Age (day) Value: 4 vs. 0
  misc_feature: MA Experiment 108464 PARAMETER Experiment Name: At_Germinating_Seeds_cDNA_P Parameter: Tissue Value: Germinating Seeds
  misc_feature: MA Experiment ID: 108488 Result: Down-regulated in Transcription
  misc_feature: MA Experiment ID: 108501 Result: Down-regulated in Transcription
  misc_feature: MA Experiment 108501 PARAMETER Experiment Name: At_ap2_floral_buds_cDNA_P Parameter: Plant Line Value: ap2 (Ler.)
  misc_feature: MA Experiment 108501 PARAMETER Experiment Name: At_ap2_floral_buds_cDNA_P Parameter: Tissue Value: Closed Flower
  misc_feature: MA Experiment ID: 108573 Result: Up-regulated in Transcription
  misc_feature: MA Experiment 108573 PARAMETER Experiment Name: At_Drought_cDNA_P Parameter: Timepoint (hr) Value: 6
  misc_feature: MA Experiment 108573 PARAMETER Experiment Name: At_Drought_cDNA_P Parameter: Tissue Value: Aerial
  misc_feature: MA Experiment 108573 PARAMETER Experiment Name: At_Drought_cDNA_P Parameter: Treatment Value: Drought vs. No Drought
  misc_feature: MA Experiment ID: 108605 Result: Up-regulated in Transcription
  misc_feature: MA Experiment 108605 PARAMETER Experiment Name: At_100uM_ABA_cDNA_P Parameter: Timepoint (hr) Value: 6
  misc_feature: MA Experiment 108605 PARAMETER Experiment Name: At_100uM_ABA_cDNA_P Parameter: Tissue Value: Aerial
  misc_feature: MA Experiment 108605 PARAMETER Experiment Name: At_100uM_ABA_cDNA_P Parameter: Treatment Value: 100uM ABA vs. No Treatment
  misc_feature: MA Experiment ID: 20000088 Result: Up-regulated in Transcription
  misc_feature: MA Experiment 20000088 PARAMETER Experiment Name: At_100uM_ABA_Mutants_cDNA_P Parameter: Plant Line Value: Landsberg
  misc_feature: MA Experiment 20000088 PARAMETER Experiment Name: At_100uM_ABA_Mutants_cDNA_P Parameter: Timepoint (hr) Value: 6
  misc_feature: MA Experiment 20000088 PARAMETER Experiment Name: At_100uM_ABA_Mutants_cDNA_P Parameter: Tissue Value: Aerial
  misc_feature: MA Experiment 20000088 PARAMETER Experiment Name: At_100uM_ABA_Mutants_cDNA_P Parameter: Treatment Value: 100uM ABA vs. No Treatment
  misc_feature: MA Experiment ID: 20000184 Result: Down-regulated in Transcription
  misc_feature: MA Experiment 20000184 PARAMETER Experiment Name: At_Shoots__P Parameter: Age (day) Value: 7
  misc_feature: MA Experiment 20000184 PARAMETER Experiment Name: At_Shoots__P Parameter: Tissue Value: Shoots vs. Whole Plant
  misc_feature: MA Experiment ID: 20000264 Result: Up-regulated in Transcription
  misc_feature: MA Experiment 20000264 PARAMETER Experiment Name: At_Open_Flower_P Parameter: Age (day) Value: 21
  misc_feature: MA Experiment 20000264 PARAMETER Experiment Name: At_Open_Flower_P Parameter: Plant Line Value: WS
  misc_feature: MA Experiment 20000264 PARAMETER Experiment Name: At_Open_Flower_P Parameter: Tissue Value: Open Flower vs. Whole Plant
  misc_feature: MA Experiment ID: 20000265 Result: Up-regulated in Transcription
  misc_feature: MA Experiment 20000265 PARAMETER Experiment Name: At_Open_Flower_P Parameter: Age (day) Value: 21
  misc_feature: MA Experiment 20000265 PARAMETER Experiment Name: At_Open_Flower_P Parameter: Plant Line Value: WS
  misc_feature: MA Experiment 20000265 PARAMETER Experiment Name: At_Open_Flower_P Parameter: Tissue Value: Closed Flower vs. Whole Plant
  misc_feature: MA Experiment ID: 20000286 Result: Up-regulated in Transcription
  misc_feature: MA Experiment 20000286 PARAMETER Experiment Name: At_Open_Flower_P Parameter: Age (day) Value: 21
  misc_feature: MA Experiment 20000286 PARAMETER Experiment Name: At_Open_Flower_P Parameter: Plant Line Value: WS
  misc_feature: MA Experiment 20000286 PARAMETER Experiment Name: At_Open_Flower_P Parameter: Tissue Value: Half Open vs. Whole Plant
  misc_feature: MA Experiment ID: 20000438 Result: Down-regulated in Transcription
  misc_feature: MA Experiment 20000438 PARAMETER Experiment Name: At_Shoots__P Parameter: Age (day) Value: 14
  misc_feature: MA Experiment 20000438 PARAMETER Experiment Name: At_Shoots__P Parameter: Tissue Value: Shoots vs. Whole Plant
  misc_feature: MA Experiment ID: 20000794 Result: Up-regulated in Transcription
  misc_feature: MA Experiment 20000794 PARAMETER Experiment Name: At_Petals_P Parameter: Age (day) Value: 23-25 days
  misc_feature: MA Experiment 20000794 PARAMETER Experiment Name: At_Petals_P Parameter: Plant Line Value: WS
  misc_feature: MA Experiment 20000794 PARAMETER Experiment Name: At_Petals_P Parameter: Tissue Value: Petals vs. Whole plant
  misc_feature: MA Experiment ID: 20001248 Result: Down-regulated in Transcription
  misc_feature: MA Experiment 20001248 PARAMETER Experiment Name: At_Far-red-induction_P Parameter: Age (day) Value: 7
  misc_feature: MA Experiment 20001248 PARAMETER Experiment Name: At_Far-red-induction_P Parameter: Light Value: Far-red vs. White
  misc_feature: MA Experiment 20001248 PARAMETER Experiment Name: At_Far-red-induction_P Parameter: Organism Value: A. thaliana
  misc_feature: MA Experiment 20001248 PARAMETER Experiment Name: At_Far-red-induction_P Parameter: Plant Line Value: Columbia
  misc_feature: MA Experiment 20001248 PARAMETER Experiment Name: At_Far-red-induction_P Parameter: Timepoint (hr) Value: 4
  misc_feature: MA Experiment 20001248 PARAMETER Experiment Name: At_Far-red-induction_P Parameter: Tissue Value: Whole Plant
  misc_feature: MA Experiment ID: 20001559 Result: Up-regulated in Transcription
  misc_feature: MA Experiment 20001559 PARAMETER Experiment Name: At_Drought_Soil_Dry_P Parameter: Age (day) Value: 28
  misc_feature: MA Experiment 20001559 PARAMETER Experiment Name: At_Drought_Soil_Dry_P Parameter: Organism Value: A. thaliana
  misc_feature: MA Experiment 20001559 PARAMETER Experiment Name: At_Drought_Soil_Dry_P Parameter: Plant Line Value: WS
  misc_feature: MA Experiment 20001559 PARAMETER Experiment Name: At_Drought_Soil_Dry_P Parameter: Post Timepoint (hr) Value: 29
  misc_feature: MA Experiment 20001559 PARAMETER Experiment Name: At_Drought_Soil_Dry_P Parameter: Post-Treatment Value: Re-Water vs. No Drought
  misc_feature: MA Experiment 20001559 PARAMETER Experiment Name: At_Drought_Soil_Dry_P Parameter: Timepoint (day) Value: 14
  misc_feature: MA Experiment 20001559 PARAMETER Experiment Name: At_Drought_Soil_Dry_P Parameter: Treatment Value: Drought vs. No Drought
  misc_feature: MA Experiment ID: 20001904 Result: Up-regulated in Transcription
  misc_feature: MA Experiment 20001904 PARAMETER Experiment Name: At_Drought_Reproduction_P Parameter: Age (day) Value: 37
  misc_feature: MA Experiment 20001904 PARAMETER Experiment Name: At_Drought_Reproduction_P Parameter: Organism Value: A. thaliana
  misc_feature: MA Experiment 20001904 PARAMETER Experiment Name: At_Drought_Reproduction_P Parameter: Plant Line Value: WS
  misc_feature: MA Experiment 20001904 PARAMETER Experiment Name: At_Drought_Reproduction_P Parameter: Timepoint (day) Value: 7
  misc_feature: MA Experiment 20001904 PARAMETER Experiment Name: At_Drought_Reproduction_P Parameter: Tissue Value: Rosettes
  misc_feature: MA Experiment 20001904 PARAMETER Experiment Name: At_Drought_Reproduction_P Parameter: Treatment Value: Drought vs. No Drought
  misc_feature: MA Experiment ID: 20001905 Result: Up-regulated in Transcription
  misc_feature: MA Experiment 20001905 PARAMETER Experiment Name: At_Drought_Reproduction_P Parameter: Age (day) Value: 40
  misc_feature: MA Experiment 20001905 PARAMETER Experiment Name: At_Drought_Reproduction_P Parameter: Organism Value: A. thaliana
  misc_feature: MA Experiment 20001905 PARAMETER Experiment Name: At_Drought_Reproduction_P Parameter: Plant Line Value: WS
  misc_feature: MA Experiment 20001905 PARAMETER Experiment Name: At_Drought_Reproduction_P Parameter: Timepoint (day) Value: 10
  misc_feature: MA Experiment 20001905 PARAMETER Experiment Name: At_Drought_Reproduction_P Parameter: Tissue Value: Rosettes
  misc_feature: MA Experiment 20001905 PARAMETER Experiment Name: At_Drought_Reproduction_P Parameter: Treatment Value: Drought vs. No Drought
  misc_feature: MA Experiment ID: 20001906 Result: Up-regulated in Transcription
  misc_feature: MA Experiment 20001906 PARAMETER Experiment Name: At_Drought_Reproduction_P Parameter: Age (day) Value: 35
  misc_feature: MA Experiment 20001906 PARAMETER Experiment Name: At_Drought_Reproduction_P Parameter: Organism Value: A. thaliana
  misc_feature: MA Experiment 20001906 PARAMETER Experiment Name: At_Drought_Reproduction_P Parameter: Plant Line Value: WS
  misc_feature: MA Experiment 20001906 PARAMETER Experiment Name: At_Drought_Reproduction_P Parameter: Timepoint (day) Value: 5
  misc_feature: MA Experiment 20001906 PARAMETER Experiment Name: At_Drought_Reproduction_P Parameter: Tissue Value: Siliques
  misc_feature: MA Experiment 20001906 PARAMETER Experiment Name: At_Drought_Reproduction_P Parameter: Treatment Value: Drought vs. No Drought
  misc_feature: MA Experiment ID: 20001908 Result: Up-regulated in Transcription
  misc_feature: MA Experiment 20001908 PARAMETER Experiment Name: At_Drought_Reproduction_P Parameter: Age (day) Value: 40
  misc_feature: MA Experiment 20001908 PARAMETER Experiment Name: At_Drought_Reproduction_P Parameter: Organism Value: A. thaliana
  misc_feature: MA Experiment 20001908 PARAMETER Experiment Name: At_Drought_Reproduction_P Parameter: Plant Line Value: WS
  misc_feature: MA Experiment 20001908 PARAMETER Experiment Name: At_Drought_Reproduction_P Parameter: Timepoint (day) Value: 10
  misc_feature: MA Experiment 20001908 PARAMETER Experiment Name: At_Drought_Reproduction_P Parameter: Tissue Value: Siliques
  misc_feature: MA Experiment 20001908 PARAMETER Experiment Name: At_Drought_Reproduction_P Parameter: Treatment Value: Drought vs. No Drought

SEQ ID NO: 41669 - protein, 510 aa, Arabidopsis thaliana; identical to SEQ ID NO: 30708
  peptide (1)..(510): Ceres Seq. ID no. 13509855
  misc_feature (33)..(500): Homolog of NCBI NO: 115874 NR Description: Serine carboxypeptidase III precursor (CP-WIII)
  misc_feature (33)..(500): Homolog of NCBI NO: 82620 NR Description: carboxypeptidase C (EC 3.4.16.5) precursor - wheat
  misc_feature (25)..(505): Homolog of NCBI NO: 6960455 NR Description: serine carboxypeptidase precursor [Matricaria
  misc_feature (14)..(501): Homolog of NCBI NO: 21901929 NR Description: carboxypeptidase type III [Theobroma cacao]
  misc_feature (4)..(500): Homolog of NCBI NO: 15228281 NR Description: serine carboxypeptidase III, putative
  misc_feature (4)..(500): Homolog of NCBI NO: 166674 NR Description: carboxypeptidase Y-like protein
  misc_feature (11)..(501): Homolog of NCBI NO: 18447763 NR Description: putative serine carboxypeptidase precursor
  misc_feature (1)..(502): Homolog of NCBI NO: 15237178 NR Description: serine carboxypeptidase III, putative
  misc_feature (1)..(510): Homolog of NCBI NO: 16323071 NR Description: AT3g45010/F14D17_80 [Arabidopsis thaliana]
  misc_feature (1)..(510): Homolog of NCBI NO: 15230577 NR Description: serine carboxypeptidase III, putative
  misc_feature (33)..(500): Homolog of NCBI NO: 115874 NR Description: Serine carboxypeptidase III precursor (CP-WIII)
  misc_feature (33)..(500): Homolog of NCBI NO: 82620 NR Description: carboxypeptidase C (EC 3.4.16.5) precursor - wheat
  misc_feature (25)..(505): Homolog of NCBI NO: 6960455 NR Description: serine carboxypeptidase precursor [Matricaria
  misc_feature (14)..(501): Homolog of NCBI NO: 21901929 NR Description: carboxypeptidase type III [Theobroma cacao]
  misc_feature (4)..(500): Homolog of NCBI NO: 15228281 NR Description: serine carboxypeptidase III, putative
  misc_feature (4)..(500): Homolog of NCBI NO: 166674 NR Description: carboxypeptidase Y-like protein
  misc_feature (11)..(501): Homolog of NCBI NO: 18447763 NR Description: putative serine carboxypeptidase precursor
  misc_feature (1)..(502): Homolog of NCBI NO: 15237178 NR Description: serine carboxypeptidase III, putative
  misc_feature (1)..(510): Homolog of NCBI NO: 16323071 NR Description: AT3g45010/F14D17_80 [Arabidopsis thaliana]
  misc_feature (1)..(510): Homolog of NCBI NO: 15230577 NR Description: serine carboxypeptidase III, putative
  misc_feature (33)..(500): Homolog of NCBI NO: 115874 NR Description: Serine carboxypeptidase III precursor (CP-WIII)
  misc_feature (33)..(500): Homolog of NCBI NO: 82620 NR Description: carboxypeptidase C (EC 3.4.16.5) precursor - wheat
  misc_feature (25)..(505): Homolog of NCBI NO: 6960455 NR Description: serine carboxypeptidase precursor [Matricaria
  misc_feature (14)..(501): Homolog of NCBI NO: 21901929 NR Description: carboxypeptidase type III [Theobroma cacao]
  misc_feature (4)..(500): Homolog of NCBI NO: 15228281 NR Description: serine carboxypeptidase III, putative
  misc_feature (4)..(500): Homolog of NCBI NO: 166674 NR Description: carboxypeptidase Y-like protein
  misc_feature (11)..(501): Homolog of NCBI NO: 18447763 NR Description: putative serine carboxypeptidase precursor
  misc_feature (1)..(502): Homolog of NCBI NO: 15237178 NR Description: serine carboxypeptidase III, putative
  misc_feature (1)..(510): Homolog of NCBI NO: 16323071 NR Description: AT3g45010/F14D17_80 [Arabidopsis thaliana]
  misc_feature (1)..(510): Homolog of NCBI NO: 15230577 NR Description: serine carboxypeptidase III, putative

SEQ ID NO: 41670 - protein, 455 aa, Arabidopsis thaliana; identical to SEQ ID NO: 30709
  peptide (1)..(455): Ceres Seq. ID no. 13509856
  misc_feature (1)..(445): Homolog of NCBI NO: 115874 NR Description: Serine carboxypeptidase III precursor (CP-WIII)
  misc_feature (1)..(445): Homolog of NCBI NO: 82620 NR Description: carboxypeptidase C (EC 3.4.16.5) precursor - wheat
  misc_feature (1)..(450): Homolog of NCBI NO: 6960455 NR Description: serine carboxypeptidase precursor [Matricaria
  misc_feature (1)..(446): Homolog of NCBI NO: 21901929 NR Description: carboxypeptidase type III [Theobroma cacao]
  misc_feature (1)..(445): Homolog of NCBI NO: 15228281 NR Description: serine carboxypeptidase III, putative
  misc_feature (1)..(445): Homolog of NCBI NO: 166674 NR Description: carboxypeptidase Y-like protein
  misc_feature (1)..(446): Homolog of NCBI NO: 18447763 NR Description: putative serine carboxypeptidase precursor
  misc_feature (1)..(447): Homolog of NCBI NO: 15237178 NR Description: serine carboxypeptidase III, putative
  misc_feature (1)..(455): Homolog of NCBI NO: 16323071 NR Description: AT3g45010/F14D17_80 [Arabidopsis thaliana]
  misc_feature (1)..(455): Homolog of NCBI NO: 15230577 NR Description: serine carboxypeptidase III, putative
  misc_feature (1)..(445): Homolog of NCBI NO: 115874 NR Description: Serine carboxypeptidase III precursor (CP-WIII)
  misc_feature (1)..(445): Homolog of NCBI NO: 82620 NR Description: carboxypeptidase C (EC 3.4.16.5) precursor - wheat
  misc_feature (1)..(450): Homolog of NCBI NO: 6960455 NR Description: serine carboxypeptidase precursor [Matricaria
  misc_feature (1)..(446): Homolog of NCBI NO: 21901929 NR Description: carboxypeptidase type III [Theobroma cacao]
  misc_feature (1)..(445): Homolog of NCBI NO: 15228281 NR Description: serine carboxypeptidase III, putative
  misc_feature (1)..(445): Homolog of NCBI NO: 166674 NR Description: carboxypeptidase Y-like protein
  misc_feature (1)..(446): Homolog of NCBI NO: 18447763 NR Description: putative serine carboxypeptidase precursor
  misc_feature (1)..(447): Homolog of NCBI NO: 15237178 NR Description: serine carboxypeptidase III, putative
  misc_feature (1)..(455): Homolog of NCBI NO: 16323071 NR Description: AT3g45010/F14D17_80 [Arabidopsis thaliana]
  misc_feature (1)..(455): Homolog of NCBI NO: 15230577 NR Description: serine carboxypeptidase III, putative
  misc_feature (1)..(445): Homolog of NCBI NO: 115874 NR Description: Serine carboxypeptidase III precursor (CP-WIII)
  misc_feature (1)..(445): Homolog of NCBI NO: 82620 NR Description: carboxypeptidase C (EC 3.4.16.5) precursor - wheat
  misc_feature (1)..(450): Homolog of NCBI NO: 6960455 NR Description: serine carboxypeptidase precursor [Matricaria
  misc_feature (1)..(446): Homolog of NCBI NO: 21901929 NR Description: carboxypeptidase type III [Theobroma cacao]
  misc_feature (1)..(445): Homolog of NCBI NO: 15228281 NR Description: serine carboxypeptidase III, putative
  misc_feature (1)..(445): Homolog of NCBI NO: 166674 NR Description: carboxypeptidase Y-like protein
  misc_feature (1)..(446): Homolog of NCBI NO: 18447763 NR Description: putative serine carboxypeptidase precursor
  misc_feature (1)..(447): Homolog of NCBI NO: 15237178 NR Description: serine carboxypeptidase III, putative
  misc_feature (1)..(455): Homolog of NCBI NO: 16323071 NR Description: AT3g45010/F14D17_80 [Arabidopsis thaliana]
  misc_feature (1)..(455): Homolog of NCBI NO: 15230577 NR Description: serine carboxypeptidase III, putative

SEQ ID NO: 41671 - protein, 395 aa, Arabidopsis thaliana; identical to SEQ ID NO: 30710
  peptide (1)..(395): Ceres Seq. ID no. 13509857
  misc_feature (1)..(385): Homolog of NCBI NO: 115874 NR Description: Serine carboxypeptidase III precursor (CP-WIII)
  misc_feature (1)..(385): Homolog of NCBI NO: 82620 NR Description: carboxypeptidase C (EC 3.4.16.5) precursor - wheat
  misc_feature (1)..(390): Homolog of NCBI NO: 6960455 NR Description: serine carboxypeptidase precursor [Matricaria
  misc_feature (1)..(386): Homolog of NCBI NO: 21901929 NR Description: carboxypeptidase type III [Theobroma cacao]
  misc_feature (1)..(385): Homolog of NCBI NO: 15228281 NR Description: serine carboxypeptidase III, putative
  misc_feature (1)..(385): Homolog of NCBI NO: 166674 NR Description: carboxypeptidase Y-like protein
  misc_feature (1)..(386): Homolog of NCBI NO: 18447763 NR Description: putative serine carboxypeptidase precursor
  misc_feature (1)..(387): Homolog of NCBI NO: 15237178 NR Description: serine carboxypeptidase III, putative
  misc_feature (1)..(395): Homolog of NCBI NO: 16323071 NR Description: AT3g45010/F14D17_80 [Arabidopsis thaliana]
  misc_feature (1)..(395): Homolog of NCBI NO: 15230577 NR Description: serine carboxypeptidase III, putative
  misc_feature (1)..(385): Homolog of NCBI NO: 115874 NR Description: Serine carboxypeptidase III precursor (CP-WIII)
  misc_feature (1)..(385): Homolog of NCBI NO: 82620 NR Description: carboxypeptidase C (EC 3.4.16.5) precursor - wheat
  misc_feature (1)..(390): Homolog of NCBI NO: 6960455 NR Description: serine carboxypeptidase precursor [Matricaria
  misc_feature (1)..(386): Homolog of NCBI NO: 21901929 NR Description: carboxypeptidase type III [Theobroma cacao]
  misc_feature (1)..(385): Homolog of NCBI NO: 15228281 NR Description: serine carboxypeptidase III, putative
  misc_feature (1)..(385): Homolog of NCBI NO: 166674 NR Description: carboxypeptidase Y-like protein
  misc_feature (1)..(386): Homolog of NCBI NO: 18447763 NR Description: putative serine carboxypeptidase precursor
  misc_feature (1)..(387): Homolog of NCBI NO: 15237178 NR Description: serine carboxypeptidase III, putative
  misc_feature (1)..(395): Homolog of NCBI NO: 16323071 NR Description: AT3g45010/F14D17_80 [Arabidopsis thaliana]
  misc_feature (1)..(395): Homolog of NCBI NO: 15230577 NR Description: serine carboxypeptidase III, putative
  misc_feature (1)..(385): Homolog of NCBI NO: 115874 NR Description: Serine carboxypeptidase III precursor (CP-WIII)
  misc_feature (1)..(385): Homolog of NCBI NO: 82620 NR Description: carboxypeptidase C (EC 3.4.16.5) precursor - wheat
  misc_feature (1)..(390): Homolog of NCBI NO: 6960455 NR Description: serine carboxypeptidase precursor [Matricaria
  misc_feature (1)..(386): Homolog of NCBI NO: 21901929 NR Description: carboxypeptidase type III [Theobroma cacao]
  misc_feature (1)..(385): Homolog of NCBI NO: 15228281 NR Description: serine carboxypeptidase III, putative
  misc_feature (1)..(385): Homolog of NCBI NO: 166674 NR Description: carboxypeptidase Y-like protein
  misc_feature (1)..(386): Homolog of NCBI NO: 18447763 NR Description: putative serine carboxypeptidase precursor
  misc_feature (1)..(387): Homolog of NCBI NO: 15237178 NR Description: serine carboxypeptidase III, putative
  misc_feature (1)..(395): Homolog of NCBI NO: 16323071 NR Description: AT3g45010/F14D17_80 [Arabidopsis thaliana]
  misc_feature (1)..(395): Homolog of NCBI NO: 15230577 NR Description: serine carboxypeptidase III, putative

SEQ ID NO: 41672 - DNA, 1455 bp, Arabidopsis thaliana
  misc_feature (1)..(1455): Ceres Seq. ID no. 12371110
  misc_feature: MA Experiment ID: 108463 Result: Up-regulated in Transcription
  misc_feature: MA Experiment 108463 PARAMETER Experiment Name: At_Germinating_Seeds_cDNA_P Parameter: Age (day) Value: 3 vs. 0
  misc_feature: MA Experiment 108463 PARAMETER Experiment Name: At_Germinating_Seeds_cDNA_P Parameter: Tissue Value: Germinating Seeds
  misc_feature: MA Experiment ID: 108464 Result: Up-regulated in Transcription
  misc_feature: MA Experiment 108464 PARAMETER Experiment Name: At_Germinating_Seeds_cDNA_P Parameter: Age (day) Value: 4 vs. 0
  misc_feature: MA Experiment 108464 PARAMETER Experiment Name: At_Germinating_Seeds_cDNA_P Parameter: Tissue Value: Germinating Seeds
  misc_feature: MA Experiment ID: 108573 Result: Up-regulated in Transcription
  misc_feature: MA Experiment 108573 PARAMETER Experiment Name: At_Drought_cDNA_P Parameter: Timepoint (hr) Value: 6
  misc_feature: MA Experiment 108573 PARAMETER Experiment Name: At_Drought_cDNA_P Parameter: Tissue Value: Aerial
  misc_feature: MA Experiment 108573 PARAMETER Experiment Name: At_Drought_cDNA_P Parameter: Treatment Value: Drought vs. No Drought
  misc_feature: MA Experiment ID: 108574 Result: Down-regulated in Transcription
  misc_feature: MA Experiment 108574 PARAMETER Experiment Name: At_Wounding__cDNA_P Parameter: Timepoint (hr) Value: 1
  misc_feature: MA Experiment 108574 PARAMETER Experiment Name: At_Wounding__cDNA_P Parameter: Tissue Value: Aerial
  misc_feature: MA Experiment 108574 PARAMETER Experiment Name: At_Wounding__cDNA_P Parameter: Treatment Value: Wounding vs. No Wounding
  misc_feature: MA Experiment ID: 108579 Result: Down-regulated in Transcription
  misc_feature: MA Experiment 108579 PARAMETER Experiment Name: At_4deg_Cold_cDNA_P Parameter: Temperature (deg C) Value: 4 vs. 22
  misc_feature: MA Experiment 108579 PARAMETER Experiment Name: At_4deg_Cold_cDNA_P Parameter: Timepoint (hr) Value: 6
  misc_feature: MA Experiment 108579 PARAMETER Experiment Name: At_4deg_Cold_cDNA_P Parameter: Tissue Value: Aerial
  misc_feature: MA Experiment ID: 20000087 Result: Down-regulated in Transcription
  misc_feature: MA Experiment 20000087 PARAMETER Experiment Name: At_100uM_ABA_Mutants_cDNA_P Parameter: Plant Line Value: WS
  misc_feature: MA Experiment 20000087 PARAMETER Experiment Name: At_100uM_ABA_Mutants_cDNA_P Parameter: Timepoint (hr) Value: 6
  misc_feature: MA Experiment 20000087 PARAMETER Experiment Name: At_100uM_ABA_Mutants_cDNA_P Parameter: Tissue Value: Aerial
  misc_feature: MA Experiment 20000087 PARAMETER Experiment Name: At_100uM_ABA_Mutants_cDNA_P Parameter: Treatment Value: 100uM ABA vs. No Treatment
  misc_feature: MA Experiment ID: 20000111 Result: Down-regulated in Transcription
  misc_feature: MA Experiment 20000111 PARAMETER Experiment Name: At_42deg_Heat_cDNA_P Parameter: Temperature (deg C) Value: 42 vs. 22
  misc_feature: MA Experiment 20000111 PARAMETER Experiment Name: At_42deg_Heat_cDNA_P Parameter: Timepoint (hr) Value: 6
  misc_feature: MA Experiment 20000111 PARAMETER Experiment Name: At_42deg_Heat_cDNA_P Parameter: Tissue Value: Aerial
  misc_feature: MA Experiment ID: 20000173 Result: Down-regulated in Transcription
  misc_feature: MA Experiment 20000173 PARAMETER Experiment Name: At_42deg_Heat_P Parameter: Age (day) Value: 14
  misc_feature: MA Experiment 20000173 PARAMETER Experiment Name: At_42deg_Heat_P Parameter: Organism Value: A. thaliana
  misc_feature: MA Experiment 20000173 PARAMETER Experiment Name: At_42deg_Heat_P Parameter: Plant Line Value: WS
  misc_feature: MA Experiment 20000173 PARAMETER Experiment Name: At_42deg_Heat_P Parameter: Temperature (deg C) Value: 42 vs. 22
  misc_feature: MA Experiment 20000173 PARAMETER Experiment Name: At_42deg_Heat_P Parameter: Timepoint (hr) Value: 6
  misc_feature: MA Experiment 20000173 PARAMETER Experiment Name: At_42deg_Heat_P Parameter: Tissue Value: Aerial
  misc_feature: MA Experiment ID: 20000179 Result: Up-regulated in Transcription
  misc_feature: MA Experiment 20000179 PARAMETER Experiment Name: At_Germinating_Seeds_P Parameter: Age (hr) Value: 6 vs. 0
  misc_feature: MA Experiment 20000179 PARAMETER Experiment Name: At_Germinating_Seeds_P Parameter: Tissue Value: Germinating Seeds
  misc_feature: MA Experiment ID: 20000180 Result: Up-regulated in Transcription
  misc_feature: MA Experiment 20000180 PARAMETER Experiment Name: At_Germinating_Seeds_P Parameter: Age (hr) Value: 24 vs. 0
  misc_feature: MA Experiment 20000180 PARAMETER Experiment Name: At_Germinating_Seeds_P Parameter: Tissue Value: Germinating Seeds
  misc_feature: MA Experiment ID: 20000184 Result: Down-regulated in Transcription
  misc_feature: MA Experiment 20000184 PARAMETER Experiment Name: At_Shoots__P Parameter: Age (day) Value: 7
  misc_feature: MA Experiment 20000184 PARAMETER Experiment Name: At_Shoots__P Parameter: Tissue Value: Shoots vs. Whole Plant
  misc_feature: MA Experiment ID: 20000234 Result: Down-regulated in Transcription
  misc_feature: MA Experiment 20000234 PARAMETER Experiment Name: At_Siliques_P Parameter: Age (day) Value: 21
  misc_feature: MA Experiment 20000234 PARAMETER Experiment Name: At_Siliques_P Parameter: Organism Value: A. thaliana
  misc_feature: MA Experiment 20000234 PARAMETER Experiment Name: At_Siliques_P Parameter: Plant Line Value: WS
  misc_feature: MA Experiment 20000234 PARAMETER Experiment Name: At_Siliques_P Parameter: Tissue Value: Less Than 5mm Siliques vs. Whole Plant
  misc_feature: MA Experiment ID: 20000235 Result: Down-regulated in Transcription
  misc_feature: MA Experiment 20000235 PARAMETER Experiment Name: At_Siliques_P Parameter: Age (day) Value: 21
  misc_feature: MA Experiment 20000235 PARAMETER Experiment Name: At_Siliques_P Parameter: Organism Value: A. thaliana
  misc_feature: MA Experiment 20000235 PARAMETER Experiment Name: At_Siliques_P Parameter: Plant Line Value: WS
  misc_feature: MA Experiment 20000235 PARAMETER Experiment Name: At_Siliques_P Parameter: Tissue Value: 5-10mm Siliques vs. Whole Plant
  misc_feature: MA Experiment ID: 20000264 Result: Down-regulated in Transcription
  misc_feature: MA Experiment 20000264 PARAMETER Experiment Name: At_Open_Flower_P Parameter: Age (day) Value: 21
  misc_feature: MA Experiment 20000264 PARAMETER Experiment Name: At_Open_Flower_P Parameter: Plant Line Value: WS
  misc_feature: MA Experiment 20000264 PARAMETER Experiment Name: At_Open_Flower_P Parameter: Tissue Value: Open Flower vs. Whole Plant
  misc_feature: MA Experiment ID: 20000265 Result: Down-regulated in Transcription
  misc_feature: MA Experiment 20000265 PARAMETER Experiment Name: At_Open_Flower_P Parameter: Age (day) Value: 21
  misc_feature: MA Experiment 20000265 PARAMETER Experiment Name: At_Open_Flower_P Parameter: Plant Line Value: WS
  misc_feature: MA Experiment 20000265 PARAMETER Experiment Name: At_Open_Flower_P Parameter: Tissue Value: Closed Flower vs. Whole Plant
  misc_feature: MA Experiment ID: 20000286 Result: Down-regulated in Transcription
  misc_feature: MA Experiment 20000286 PARAMETER Experiment Name: At_Open_Flower_P Parameter: Age (day) Value: 21
  misc_feature: MA Experiment 20000286 PARAMETER Experiment Name: At_Open_Flower_P Parameter: Plant Line Value: WS
  misc_feature: MA Experiment 20000286 PARAMETER Experiment Name: At_Open_Flower_P Parameter: Tissue Value: Half Open vs. Whole Plant
  misc_feature: MA Experiment ID: 20001248 Result: Up-regulated in Transcription
  misc_feature: MA Experiment 20001248 PARAMETER Experiment Name: At_Far-red-induction_P Parameter: Age (day) Value: 7
  misc_feature: MA Experiment 20001248 PARAMETER Experiment Name: At_Far-red-induction_P Parameter: Light Value: Far-red vs. White
  misc_feature: MA Experiment 20001248 PARAMETER Experiment Name: At_Far-red-induction_P Parameter: Organism Value: A. thaliana
  misc_feature: MA Experiment 20001248 PARAMETER Experiment Name: At_Far-red-induction_P Parameter: Plant Line Value: Columbia
  misc_feature: MA Experiment 20001248 PARAMETER Experiment Name: At_Far-red-induction_P Parameter: Timepoint (hr) Value: 4
  misc_feature: MA Experiment 20001248 PARAMETER Experiment Name: At_Far-red-induction_P Parameter: Tissue Value: Whole Plant
  misc_feature: MA Experiment ID: 20001450 Result: Up-regulated in Transcription
  misc_feature: MA Experiment 20001450 PARAMETER Experiment Name: At_Far-red-induction_P Parameter: Age (day) Value: 7
  misc_feature: MA Experiment 20001450 PARAMETER Experiment Name: At_Far-red-induction_P Parameter: Light Value: Far-red vs. White
  misc_feature: MA Experiment 20001450 PARAMETER Experiment Name: At_Far-red-induction_P Parameter: Organism Value: A. thaliana
  misc_feature: MA Experiment 20001450 PARAMETER Experiment Name: At_Far-red-induction_P Parameter: Plant Line Value: Columbia
  misc_feature: MA Experiment 20001450 PARAMETER Experiment Name: At_Far-red-induction_P Parameter: Timepoint (hr) Value: 8
  misc_feature: MA Experiment 20001450 PARAMETER Experiment Name: At_Far-red-induction_P Parameter: Tissue Value: Whole Plant
  misc_feature: MA Experiment ID: 20001451 Result: Up-regulated in Transcription
  misc_feature: MA Experiment 20001451 PARAMETER Experiment Name: At_Far-red-induction_P Parameter: Age (day) Value: 7
  misc_feature: MA Experiment 20001451 PARAMETER Experiment Name: At_Far-red-induction_P Parameter: Light Value: Far-red vs. White
  misc_feature: MA Experiment 20001451 PARAMETER Experiment Name: At_Far-red-induction_P Parameter: Organism Value: A. thaliana
  misc_feature: MA Experiment 20001451 PARAMETER Experiment Name: At_Far-red-induction_P Parameter: Plant Line Value: Columbia
  misc_feature: MA Experiment 20001451 PARAMETER Experiment Name: At_Far-red-induction_P Parameter: Timepoint (hr) Value: 24
  misc_feature: MA Experiment 20001451 PARAMETER Experiment Name: At_Far-red-induction_P Parameter: Tissue Value: Whole Plant
accatttcaaagtgccactttttcttcctaaatcctctctctctctctctccgttcccgagacaagcaaaagcttcaatctcaaatctttcagcagctacaaaaatgttcttcatctaaaagagactgtgaagcagagagagagagagagatgggaggtgtgacgtcatcagttgcggcgaagttcgctttcttcccgccgagtccgtcgtcttacaagctggtttacgatgaactgaccggacttcttctgatgaacccatttcctcaccgtgaaaacgttgaaatccttaagcttccgacacgtagaggaacagagatcgtggctatgtacgtcagacatccgatggctacctctactctgctttattcccatggaaacgccgccgatctgggccagatgtatgagctcttcatcgaattgagcatccatcttaaggttaatctcatggggtacgattactccgggtatggacaatctactggaaagccaagtgagcaccatacatatgctgatatcgaagctgcttataaatgtcttgaggaaacctatggagcaaaacaggaagacataatcctttatggccaatccgttggaagtggacctacattagatcttgctgctcggttgcctcaattaagagctgctgttctccatagcccgattctttctggtctaagagtaatgtatccagtgaagaagacatactggttcgacatcttcaagaatatcgacaaaatacctcttgtgaattgcccggttctcgtcattcacggaacttgtgatgaagttgttgactgttctcatggaaaacaactatgggaactctctaaagagaaatatgaaccgctttggctcgaaggcggtaaccactgtgatctagaacactatcctgaatacattaaacaccttaagaagttcatcacaaccgtagagagagatctctcctcgagggcgagcacggcccaattagagaaacagagcagcgatttggaaatgccgaggcagagcgtagatagaagagagaagccgaggcaaagcgttgataaaagggagaaagagaaacctccaaagggtccttcaaagaagagtaagctgagaatcacgttcgagcagcacttagatcggactaggagaagcgttgacttccacgaaaaggcaaggaagagcgttgaccatcatcagcatcatcagaatcatcatcagattgagagaggaaggaagagtgttgatagattggatagagtacggtctgagtaaaccggagaaaatctaccacacgtacataagttgttacagaacaagaacatttgatcttgatcttgattggccattctaatgtttatggttttttgttttgatttgtgagttattctctagttttatttgggtgtgtcatttcttgaatggtgaagcttaaatcttaagcaaacaaatgagagaaattaggtcttt

SEQ ID NO: 41673 - protein, 419 aa, Arabidopsis thaliana
  peptide (1)..(419): Ceres Seq. ID no. 12371111
  misc_feature (150)..(218): Pfam Name: alpha/beta hydrolase fold Pfam Description: alpha/beta hydrolase fold
  misc_feature (51)..(368): Homolog of NCBI NO: 15240861 NR Description: putative protein; protein id: At5g38220.1
  misc_feature (51)..(321): Homolog of NCBI NO: 22330474 NR Description: hypothetical protein
  misc_feature (44)..(83): Homolog of NCBI NO: 34911338 NR Description: P0519D04.38 [Oryza sativa (japonica
  misc_feature (87)..(392): Homolog of NCBI NO: 34911338 NR Description: P0519D04.38 [Oryza sativa (japonica
  misc_feature (51)..(280): Homolog of NCBI NO: 18175921 NR Description: unknown protein [Arabidopsis thaliana]
  misc_feature (51)..(368): Homolog of NCBI NO: 10177798 NR Description: emb|CAB87778.1~gene_id:MXA21.9~strong similarity
  misc_feature (51)..(412): Homolog of NCBI NO: 15230760 NR Description: unknown protein; protein id: At3g30380.1
  misc_feature (51)..(418): Homolog of NCBI NO: 15233975 NR Description: putative protein
  misc_feature (51)..(419): Homolog of NCBI NO: 15232168 NR Description: unknown protein; protein id: At3g01690.1
  misc_feature (51)..(419): Homolog of NCBI NO: 15241394 NR Description: putative protein
TISKCHFFFLNPLSLSLRSRDKQKLQSQIFQQLQKCSSSKRDCEAEREREMGGVTSSVAAKFAFFPPSPSSYKLVYDELTGLLLMNPFPHRENVEILKLPTRRGTEIVAMYVRHPMATSTLLYSHGNAADLGQMYELFIELSIHLKVNLMGYDYSGYGQSTGKPSEHHTYADIEAAYKCLEETYGAKQEDIILYGQSVGSGPTLDLAARLPQLRAAVLHSPILSGLRVMYPVKKTYWFDIFKNIDKIPLVNCPVLVIHGTCDEVVDCSHGKQLWELSKEKYEPLWLEGGNHCDLEHYPEYIKHLKKFITTVERDLSSRASTAQLEKQSSDLEMPRQSVDRREKPRQSVDKREKEKPPKGPSKKSKLRITFEQHLDRTRRSVDFHEKARKSVDHHQHHQNHHQIERGRKSVDRLDRVRSE

SEQ ID NO: 41674 - protein, 369 aa, Arabidopsis thaliana
  peptide (1)..(369): Ceres Seq. ID no. 12371112
  misc_feature (100)..(168): Pfam Name: alpha/beta hydrolase fold Pfam Description: alpha/beta hydrolase fold
  misc_feature (1)..(318): Homolog of NCBI NO: 15240861 NR Description: putative protein; protein id: At5g38220.1
  misc_feature (1)..(271): Homolog of NCBI NO: 22330474 NR Description: hypothetical protein
  misc_feature (1)..(33): Homolog of NCBI NO: 34911338 NR Description: P0519D04.38 [Oryza sativa (japonica
  misc_feature (37)..(342): Homolog of NCBI NO: 34911338 NR Description: P0519D04.38 [Oryza sativa (japonica
  misc_feature (1)..(230): Homolog of NCBI NO: 18175921 NR Description: unknown protein [Arabidopsis thaliana]
  misc_feature (1)..(318): Homolog of NCBI NO: 10177798 NR Description: emb|CAB87778.1~gene_id:MXA21.9~strong similarity
  misc_feature (1)..(362): Homolog of NCBI NO: 15230760 NR Description: unknown protein; protein id: At3g30380.1
  misc_feature (1)..(368): Homolog of NCBI NO: 15233975 NR Description: putative protein
  misc_feature (1)..(369): Homolog of NCBI NO: 15232168 NR Description: unknown protein; protein id: At3g01690.1
  misc_feature (1)..(369): Homolog of NCBI NO: 15241394 NR Description: putative protein
MGGVTSSVAAKFAFFPPSPSSYKLVYDELTGLLLMNPFPHRENVEILKLPTRRGTEIVAMYVRHPMATSTLLYSHGNAADLGQMYELFIELSIHLKVNLMGYDYSGYGQSTGKPSEHHTYADIEAAYKCLEETYGAKQEDIILYGQSVGSGPTLDLAARLPQLRAAVLHSPILSGLRVMYPVKKTYWFDIFKNIDKIPLVNCPVLVIHGTCDEVVDCSHGKQLWELSKEKYEPLWLEGGNHCDLEHYPEYIKHLKKFITTVERDLSSRASTAQLEKQSSDLEMPRQSVDRREKPRQSVDKREKEKPPKGPSKKSKLRITFEQHLDRTRRSVDFHEKARKSVDHHQHHQNHHQIERGRKSVDRLDRVRSE

SEQ ID NO: 41675 - protein, 335 aa, Arabidopsis thaliana
  peptide (1)..(335): Ceres Seq. ID no. 12371113
  misc_feature (66)..(134): Pfam Name: alpha/beta hydrolase fold Pfam Description: alpha/beta hydrolase fold
  misc_feature (1)..(248): Homolog of NCBI NO: 28393521 NR Description: unknown protein [Arabidopsis thaliana]
  misc_feature (1)..(284): Homolog of NCBI NO: 15240861 NR Description: putative protein; protein id: At5g38220.1
  misc_feature (1)..(237): Homolog of NCBI NO: 22330474 NR Description: hypothetical protein
  misc_feature (3)..(308): Homolog of NCBI NO: 34911338 NR Description: P0519D04.38 [Oryza sativa (japonica
  misc_feature (1)..(196): Homolog of NCBI NO: 18175921 NR Description: unknown protein [Arabidopsis thaliana]
  misc_feature (1)..(284): Homolog of NCBI NO: 10177798 NR Description: emb|CAB87778.1~gene_id:MXA21.9~strong similarity
  misc_feature (1)..(328): Homolog of NCBI NO: 15230760 NR Description: unknown protein; protein id: At3g30380.1
  misc_feature (1)..(334): Homolog of NCBI NO: 15233975 NR Description: putative protein
  misc_feature (1)..(335): Homolog of NCBI NO: 15232168 NR Description: unknown protein; protein id: At3g01690.1
  misc_feature (1)..(335): Homolog of NCBI NO: 15241394 NR Description: putative protein
MNPFPHRENVEILKLPTRRGTEIVAMYVRHPMATSTLLYSHGNAADLGQMYELFIELSIHLKVNLMGYDYSGYGQSTGKPSEHHTYADIEAAYKCLEETYGAKQEDIILYGQSVGSGPTLDLAARLPQLRAAVLHSPILSGLRVMYPVKKTYWFDIFKNIDKIPLVNCPVLVIHGTCDEVVDCSHGKQLWELSKEKYEPLWLEGGNHCDLEHYPEYIKHLKKFITTVERDLSSRASTAQLEKQSSDLEMPRQSVDRREKPRQSVDKREKEKPPKGPSKKSKLRITFEQHLDRTRRSVDFHEKARKSVDHHQHHQNHHQIERGRKSVDRLDRVRSE

SEQ ID NO: 41676 - DNA, 1155 bp, Arabidopsis thaliana
  misc_feature (1)..(1155): Ceres Seq. ID no. 12329808
  misc_feature: MA Experiment ID: 20001905 Result: Up-regulated in Transcription
  misc_feature: MA Experiment 20001905 PARAMETER Experiment Name: At_Drought_Reproduction_P Parameter: Age (day) Value: 40
  misc_feature: MA Experiment 20001905 PARAMETER Experiment Name: At_Drought_Reproduction_P Parameter: Organism Value: A. thaliana
  misc_feature: MA Experiment 20001905 PARAMETER Experiment Name: At_Drought_Reproduction_P Parameter: Plant Line Value: WS
  misc_feature: MA Experiment 20001905 PARAMETER Experiment Name: At_Drought_Reproduction_P Parameter: Timepoint (day) Value: 10
  misc_feature: MA Experiment 20001905 PARAMETER Experiment Name: At_Drought_Reproduction_P Parameter: Tissue Value: Rosettes
  misc_feature: MA Experiment 20001905 PARAMETER Experiment Name: At_Drought_Reproduction_P Parameter: Treatment Value: Drought vs. No Drought
ctaatcttgtgcctttagatttcttttcggggagatctagtagttgttggattcgttaaacggagaagtggatttggtacgagtctttaggtttccttcttcaccaaaagctctatatagatagaatctgcgagctctttttggtaggaaattagggttcgtgttgcttggtaaatatagaatcaatgacggaggttgttctgcatatatacgatgtgacgaacagtggatcggagaagactaacaacaccattgttcagatcaataggttcttcaaagacgggatcggtcttggcggtatattccacagcgctattcaggtatatggaaacgatgaatggtcttacgggtattgtgaactaggaactggtgtattcagctgcccgagtggaaagaatccaatgtacacataccgtgagaaaatcgtccttggcaaaacagattgcacaatcttcatggtgaatcagatgttgcgtgaactcagcagggaatggcctggacacacttatgatttgttgtcaaaaaattgcaatcacttctgcgatgtactctgtgaccggcttggtgtgccaaagatcccaggttgggttaatcgctttgctaatgctggggacacagccttggaagtggcaggaaacacagcaatgcggatgaagcaagccaaaactgaacttgtgtcagctagtaaagtggcttatcgcttcctctcgaatgttacttcgaacgtaaccaatggctccaatggctctccacaacgaccgggaactctcaacaattcagacagcgggaacttgagattgcaaggtagttggctcaaaggcttacttaacacagccaaaccctccactagtacagagatagggaacaaagatgaagatgcaaatcatgcagtcaccaatcagaagaaacaaagccgtgactctgatgttctactgtttcagtagcaaccgtaccgatccaccacaatgcattcggttagctgtatatccaccggtctaagagtcacacgcactattctcctcgtctgtacccattactctgtatcaacgttggaacctgtcattttttcttgagtttttagctcacgtgtgcttttgttaagatcattctcgcttgttactgtcaaatcttaacatcaaaaggtttattagtctc

SEQ ID NO: 41677 - protein, 252 aa, Arabidopsis thaliana
  peptide (1)..(252): Ceres Seq. ID no. 12329809
  misc_feature (2)..(139): Pfam Name: Eukaryotic protein of unknown function (DUF862) Pfam Description: Eukaryotic protein of unknown function (DUF862)
  misc_feature (1)..(142): Homolog of NCBI NO: 15238059 NR Description: putative protein; protein id: At5g47310.1
  misc_feature (13)..(142): Homolog of NCBI NO: 17529024 NR Description: unknown protein [Arabidopsis thaliana]
  misc_feature (34)..(142): Homolog of NCBI NO: 25354458 NR Description: hypothetical protein F23A5.4 [imported] -
  misc_feature (34)..(142): Homolog of NCBI NO: 18412886 NR Description: expressed protein
  misc_feature (34)..(206): Homolog of NCBI NO: 18420889 NR Description: putative protein
  misc_feature (14)..(243): Homolog of NCBI NO: 18400749 NR Description: expressed protein
  misc_feature (3)..(100): Homolog of NCBI NO: 34897764 NR Description: hypothetical protein [Oryza sativa (japonica
  misc_feature (1)..(246): Homolog of NCBI NO: 37536408 NR Description: unknown protein [Oryza sativa (japonica
  misc_feature (1)..(252): Homolog of NCBI NO: 15235952 NR Description: putative protein
  misc_feature (1)..(252): Homolog of NCBI NO: 15235955 NR Description: putative protein
MTEVVLHIYDVTNSGSEKTNNTIVQINRFFKDGIGLGGIFHSAIQVYGNDEWSYGYCELGTGVFSCPSGKNPMYTYREKIVLGKTDCTIFMVNQMLRELSREWPGHTYDLLSKNCNHFCDVLCDRLGVPKIPGWVNRFANAGDTALEVAGNTAMRMKQAKTELVSASKVAYRFLSNVTSNVTNGSNGSPQRPGTLNNSDSGNLRLQGSWLKGLLNTAKPSTSTEIGNKDEDANHAVTNQKKQSRDSDVLLFQ

SEQ ID NO: 41678 - protein, 180 aa, Arabidopsis thaliana
  peptide (1)..(180): Ceres Seq. ID no. 12329810
  misc_feature (1)..(67): Pfam Name: Eukaryotic protein of unknown function (DUF862) Pfam Description: Eukaryotic protein of unknown function (DUF862)
  misc_feature (1)..(70): Homolog of NCBI NO: 15238059 NR Description: putative protein; protein id: At5g47310.1
  misc_feature (1)..(70): Homolog of NCBI NO: 17529024 NR Description: unknown protein [Arabidopsis thaliana]
  misc_feature (1)..(70): Homolog of NCBI NO: 25354458 NR Description: hypothetical protein F23A5.4 [imported] -
  misc_feature (1)..(70): Homolog of NCBI NO: 18412886 NR Description: expressed protein
  misc_feature (1)..(134): Homolog of NCBI NO: 18420889 NR Description: putative protein
  misc_feature (1)..(171): Homolog of NCBI NO: 18400749 NR Description: expressed protein
  misc_feature (1)..(28): Homolog of NCBI NO: 34897764 NR Description: hypothetical protein [Oryza sativa (japonica
  misc_feature (1)..(174): Homolog of NCBI NO: 37536408 NR Description: unknown protein [Oryza sativa (japonica
  misc_feature (1)..(180): Homolog of NCBI NO: 15235952 NR Description: putative protein
  misc_feature (1)..(180): Homolog of NCBI NO: 15235955 NR Description: putative protein
MYTYREKIVLGKTDCTIFMVNQMLRELSREWPGHTYDLLSKNCNHFCDVLCDRLGVPKIPGWVNRFANAGDTALEVAGNTAMRMKQAKTELVSASKVAYRFLSNVTSNVTNGSNGSPQRPGTLNNSDSGNLRLQGSWLKGLLNTAKPSTSTEIGNKDEDANHAVTNQKKQSRDSDVLLFQ

SEQ ID NO: 41679 - protein, 162 aa, Arabidopsis thaliana
  peptide (1)..(162): Ceres Seq. ID no. 12329811
  misc_feature (1)..(52): Homolog of NCBI NO: 30684058 NR Description: expressed protein [Arabidopsis thaliana]
  misc_feature (1)..(52): Homolog of NCBI NO: 15238059 NR Description: putative protein; protein id: At5g47310.1
  misc_feature (1)..(52): Homolog of NCBI NO: 17529024 NR Description: unknown protein [Arabidopsis thaliana]
  misc_feature (1)..(52): Homolog of NCBI NO: 25354458 NR Description: hypothetical protein F23A5.4 [imported] -
  misc_feature (1)..(52): Homolog of NCBI NO: 18412886 NR Description: expressed protein
  misc_feature (1)..(116): Homolog of NCBI NO: 18420889 NR Description: putative protein
  misc_feature (1)..(153): Homolog of NCBI NO: 18400749 NR Description: expressed protein
  misc_feature (1)..(156): Homolog of NCBI NO: 37536408 NR Description: unknown protein [Oryza sativa (japonica
  misc_feature (1)..(162): Homolog of NCBI NO: 15235952 NR Description: putative protein
  misc_feature (1)..(162): Homolog of NCBI NO: 15235955 NR Description: putative protein
MVNQMLRELSREWPGHTYDLLSKNCNHFCDVLCDRLGVPKIPGWVNRFANAGDTALEVAGNTAMRMKQAKTELVSASKVAYRFLSNVTSNVTNGSNGSPQRPGTLNNSDSGNLRLQGSWLKGLLNTAKPSTSTEIGNKDEDANHAVTNQKKQSRDSDVLLFQ

SEQ ID NO: 41680 - DNA, 1187 bp, Arabidopsis thaliana
  misc_feature (1)..(1187): Ceres Seq. ID no. 12370911
  misc_feature: MA Experiment ID: 108433 Result: Down-regulated in Transcription
  misc_feature: MA Experiment 108433 PARAMETER Experiment Name: At_rhl_Mutant2_cDNA_P Parameter: Age (day) Value: 7
  misc_feature: MA Experiment 108433 PARAMETER Experiment Name: At_rhl_Mutant2_cDNA_P Parameter: Organism Value: A. thaliana
  misc_feature: MA Experiment 108433 PARAMETER Experiment Name: At_rhl_Mutant2_cDNA_P Parameter: Plant Line Value: rhl Mutant vs. wt landsburg
  misc_feature: MA Experiment 108433 PARAMETER Experiment Name: At_rhl_Mutant2_cDNA_P Parameter: Tissue Value: Roots
  misc_feature: MA Experiment ID: 108461 Result: Down-regulated in Transcription
  misc_feature: MA Experiment 108461 PARAMETER Experiment Name: At_Germinating_Seeds_cDNA_P Parameter: Age (day) Value: 1 vs. 0
  misc_feature: MA Experiment 108461 PARAMETER Experiment Name: At_Germinating_Seeds_cDNA_P Parameter: Tissue Value: Germinating Seeds
  misc_feature: MA Experiment ID: 108462 Result: Down-regulated in Transcription
  misc_feature: MA Experiment 108462 PARAMETER Experiment Name: At_Germinating_Seeds_cDNA_P Parameter: Age (day) Value: 2 vs. 0
  misc_feature: MA Experiment 108462 PARAMETER Experiment Name: At_Germinating_Seeds_cDNA_P Parameter: Tissue Value: Germinating Seeds
  misc_feature: MA Experiment ID: 108463 Result: Down-regulated in Transcription
  misc_feature: MA Experiment 108463 PARAMETER Experiment Name: At_Germinating_Seeds_cDNA_P Parameter: Age (day) Value: 3 vs. 0
  misc_feature: MA Experiment 108463 PARAMETER Experiment Name: At_Germinating_Seeds_cDNA_P Parameter: Tissue Value: Germinating Seeds
  misc_feature: MA Experiment ID: 108464 Result: Down-regulated in Transcription
  misc_feature: MA Experiment 108464 PARAMETER Experiment Name: At_Germinating_Seeds_cDNA_P Parameter: Age (day) Value: 4 vs. 0
  misc_feature: MA Experiment 108464 PARAMETER Experiment Name: At_Germinating_Seeds_cDNA_P Parameter: Tissue Value: Germinating Seeds
  misc_feature: MA Experiment ID: 108579 Result: Up-regulated in Transcription
  misc_feature: MA Experiment 108579 PARAMETER Experiment Name: At_4deg_Cold_cDNA_P Parameter: Temperature (deg C) Value: 4 vs. 22
  misc_feature: MA Experiment 108579 PARAMETER Experiment Name: At_4deg_Cold_cDNA_P Parameter: Timepoint (hr) Value: 6
  misc_feature: MA Experiment 108579 PARAMETER Experiment Name: At_4deg_Cold_cDNA_P Parameter: Tissue Value: Aerial
  misc_feature: MA Experiment ID: 108585 Result: Up-regulated in Transcription
  misc_feature: MA Experiment 108585 PARAMETER Experiment Name: At_5mM_NaNP_cDNA_P Parameter: Timepoint (hr) Value: 6
  misc_feature: MA Experiment 108585 PARAMETER Experiment Name: At_5mM_NaNP_cDNA_P Parameter: Tissue Value: Aerial
  misc_feature: MA Experiment 108585 PARAMETER Experiment Name: At_5mM_NaNP_cDNA_P Parameter: Treatment Value: null
  misc_feature: MA Experiment ID: 20000113 Result: Up-regulated in Transcription
  misc_feature: MA Experiment 20000113 PARAMETER Experiment Name: At_42deg_Heat_cDNA_P Parameter: Temperature (deg C) Value: 42 vs. 22
  misc_feature: MA Experiment 20000113 PARAMETER Experiment Name: At_42deg_Heat_cDNA_P Parameter: Timepoint (hr) Value: 8
  misc_feature: MA Experiment 20000113 PARAMETER Experiment Name: At_42deg_Heat_cDNA_P Parameter: Tissue Value: Aerial
  misc_feature: MA Experiment ID: 20000173 Result: Up-regulated in Transcription
  misc_feature: MA Experiment 20000173 PARAMETER Experiment Name: At_42deg_Heat_P Parameter: Age (day) Value: 14
  misc_feature: MA Experiment 20000173 PARAMETER Experiment Name: At_42deg_Heat_P Parameter: Organism Value: A. thaliana
  misc_feature: MA Experiment 20000173 PARAMETER Experiment Name: At_42deg_Heat_P Parameter: Plant Line Value: WS
  misc_feature: MA Experiment 20000173 PARAMETER Experiment Name: At_42deg_Heat_P Parameter: Temperature (deg C) Value: 42 vs. 22
  misc_feature: MA Experiment 20000173 PARAMETER Experiment Name: At_42deg_Heat_P Parameter: Timepoint (hr) Value: 6
  misc_feature: MA Experiment 20000173 PARAMETER Experiment Name: At_42deg_Heat_P Parameter: Tissue Value: Aerial
  misc_feature: MA Experiment ID: 20000180 Result: Down-regulated in Transcription
  misc_feature: MA Experiment 20000180 PARAMETER Experiment Name: At_Germinating_Seeds_P Parameter: Age (hr) Value: 24 vs. 0
  misc_feature: MA Experiment 20000180 PARAMETER Experiment Name: At_Germinating_Seeds_P Parameter: Tissue Value: Germinating Seeds
  misc_feature: MA Experiment ID: 20000184 Result: Up-regulated in Transcription
  misc_feature: MA Experiment 20000184 PARAMETER Experiment Name: At_Shoots__P Parameter: Age (day) Value: 7
  misc_feature: MA Experiment 20000184 PARAMETER Experiment Name: At_Shoots__P Parameter: Tissue Value: Shoots vs. Whole Plant
  misc_feature: MA Experiment ID: 20000224 Result: Down-regulated in Transcription
  misc_feature: MA Experiment ID: 20000495 Result: Down-regulated in Transcription
  misc_feature: MA Experiment 20000495 PARAMETER Experiment Name: At_Guard_Cells_P Parameter: Harvest Date Value: 8/2/2002
  misc_feature: MA Experiment 20000495 PARAMETER Experiment Name: At_Guard_Cells_P Parameter: Organism Value: A. thaliana
  misc_feature: MA Experiment 20000495 PARAMETER Experiment Name: At_Guard_Cells_P Parameter: Tissue Value: Guard Cells vs. Leaves
  misc_feature: MA Experiment ID: 20001557 Result: Up-regulated in Transcription
  misc_feature: MA Experiment 20001557 PARAMETER Experiment Name: At_Drought_Soil_Dry_P Parameter: Age (day) Value: 27
  misc_feature: MA Experiment 20001557 PARAMETER Experiment Name: At_Drought_Soil_Dry_P Parameter: Organism Value: A. thaliana
  misc_feature: MA Experiment 20001557 PARAMETER Experiment Name: At_Drought_Soil_Dry_P Parameter: Plant Line Value: WS
  misc_feature: MA Experiment 20001557 PARAMETER Experiment Name: At_Drought_Soil_Dry_P Parameter: Post Timepoint (hr) Value: 3
  misc_feature: MA Experiment 20001557 PARAMETER Experiment Name: At_Drought_Soil_Dry_P Parameter: Post-Treatment Value: Re-Water vs. No Drought
  misc_feature: MA Experiment 20001557 PARAMETER Experiment Name: At_Drought_Soil_Dry_P Parameter: Timepoint (day) Value: 13
  misc_feature: MA Experiment 20001557 PARAMETER Experiment Name: At_Drought_Soil_Dry_P Parameter: Treatment Value: Drought vs. No Drought
  misc_feature: MA Experiment ID: 20001558 Result: Up-regulated in Transcription
  misc_feature: MA Experiment 20001558 PARAMETER Experiment Name: At_Drought_Soil_Dry_P Parameter: Age (day) Value: 27
  misc_feature: MA Experiment 20001558 PARAMETER Experiment Name: At_Drought_Soil_Dry_P Parameter: Organism Value: A. thaliana
  misc_feature: MA Experiment 20001558 PARAMETER Experiment Name: At_Drought_Soil_Dry_P Parameter: Plant Line Value: WS
  misc_feature: MA Experiment 20001558 PARAMETER Experiment Name: At_Drought_Soil_Dry_P Parameter: Post Timepoint (hr) Value: 6
  misc_feature: MA Experiment 20001558 PARAMETER Experiment Name: At_Drought_Soil_Dry_P Parameter: Post-Treatment Value: Re-Water vs. No Drought
  misc_feature: MA Experiment 20001558 PARAMETER Experiment Name: At_Drought_Soil_Dry_P Parameter: Timepoint (day) Value: 13
  misc_feature: MA Experiment 20001558 PARAMETER Experiment Name: At_Drought_Soil_Dry_P Parameter: Treatment Value: Drought vs. No Drought
  misc_feature: MA Experiment ID: 20001757 Result: Up-regulated in Transcription
  misc_feature: MA Experiment 20001757 PARAMETER Experiment Name: At_50mM_NH4NO3_L-to-H_P Parameter: Timepoint (hr) Value: 6
  misc_feature: MA Experiment 20001757 PARAMETER Experiment Name: At_50mM_NH4NO3_L-to-H_P Parameter: Tissue Value: Leaf
  misc_feature: MA Experiment 20001757 PARAMETER Experiment Name: At_50mM_NH4NO3_L-to-H_P Parameter: Treatment Value: 50mM NH4NO3 vs 100mM Mannitol
ccaacttaaaaaaccctaatttctcaatctcttcttctacttttttttataacgatggcttcagaggtcaatctgcggcgagatctaccgggaaggtgaactggttcaacgcttctaaaggctatggtttcattactcctgacgatggcagcgtagagcttttcgttcatcaatcttcaattgtctccgaaggttaccggagtttaaccgtcggcgatgcggttgagttcgctattactcagggaagcgacggtaagactaaagccgtcaatgttactgctcctggtggtggttctctcaagaaggagaataactctcgtggtaacggtgctaggcgcggcggcggtggaagcggttgctacaattgcggtgagttaggtcatatctctaaagattgtggtattggtggcggcggcggaggtggtgaacgtagatctagaggaggagaaggttgttacaattgtggtgatactggtcacttcgctagggattgtacttcagctggaaacggtgaccaacgtggagccaccaaaggtggaaacgatggttgctacacttgcggtgatgttggtcacgtggctagggattgtactcagaaatcagttggaaacggagaccaacgtggagcggtcaaaggtggaaacgatggttgctacacttgtggtgatgttggtcactttgctagggattgtactcagaaggttgctgccggaaacgtcagaagcggtggtggtggtagtggaacttgttattcatgcggtggagttggtcacattgcaagagattgtgcgactaagagacagccttctcgtgggtgttaccagtgtggtggttctggtcacttggctcgtgattgtgaccagagaggaagcggtggaggaggtaatgataatgcgtgctacaagtgtggtaaggaaggtcactttgcaagggaatgttcttctgtagcttaatcgatttcctaatcaacaaaacaaaaaaacaagaatgaaattgaatcgagttatatagtttggtatatattactcttcgttttcatttatctttttttttgttgttgatgggaatgaaattgcctggtccttttggtgtgtttttgagcttttattattatacagagtgatccctttttgttataactattacaagtttttagctttatttgatatggatgctctctccttttc

SEQ ID NO: 41681 - protein, 316 aa, Arabidopsis thaliana
  peptide (1)..(316): Ceres Seq. ID no. 12370912
  misc_feature (27)..(94): Pfam Name: 'Cold-shock' DNA-binding domain Pfam Description: 'Cold-shock' DNA-binding domain
  misc_feature (112)..(312): Homolog of NCBI NO: 1841864 NR Description: nucleic acid binding protein [Trypanosoma
  misc_feature (27)..(231): Homolog of NCBI NO: 15234010 NR Description: glycine-rich protein 2 (GRP2)
  misc_feature (108)..(314): Homolog of NCBI NO: 729704 NR Description: DNA-binding protein HEXBP (Hexamer-binding
  misc_feature (24)..(233): Homolog of NCBI NO: 29467522 NR Description: P0582D05.12 [Oryza sativa (japonica
  misc_feature (27)..(233): Homolog of NCBI NO: 40363759 NR Description: putative glycine-rich protein [Triticum aestivum]
  misc_feature (23)..(231): Homolog of NCBI NO: 121631 NR Description: Glycine-rich protein 2
  misc_feature (27)..(265): Homolog of NCBI NO: 21322752 NR Description: cold shock protein-1 [Triticum aestivum]
  misc_feature (23)..(316): Homolog of NCBI NO: 18398546 NR Description: putative glycine-rich, zinc-finger DNA-binding
  misc_feature (23)..(316): Homolog of NCBI NO: 7442089 NR Description: glycine-rich protein T13L16.11 - Arabidopsis
  misc_feature (23)..(316): Homolog of NCBI NO: 15233440 NR Description: glycine-rich protein
NLKNPNFSISSSTFFYNDGFRGQSAARSTGKVNWFNASKGYGFITPDDGSVELFVHQSSIVSEGYRSLTVGDAVEFAITQGSDGKTKAVNVTAPGGGSLKKENNSRGNGARRGGGGSGCYNCGELGHISKDCGIGGGGGGGERRSRGGEGCYNCGDTGHFARDCTSAGNGDQRGATKGGNDGCYTCGDVGHVARDCTQKSVGNGDQRGAVKGGNDGCYTCGDVGHFARDCTQKVAAGNVRSGGGGSGTCYSCGGVGHIARDCATKRQPSRGCYQCGGSGHLARDCDQRGSGGGGNDNACYKCGKEGHFARECSSVA

SEQ ID NO: 41682 - DNA, 1250 bp, Arabidopsis thaliana
  misc_feature (1)..(1250): Ceres Seq. ID no. 13488754
  misc_feature: MA Experiment ID: 108462 Result: Up-regulated in Transcription
  misc_feature: MA Experiment 108462 PARAMETER Experiment Name: At_Germinating_Seeds_cDNA_P Parameter: Age (day) Value: 2 vs. 0
  misc_feature: MA Experiment 108462 PARAMETER Experiment Name: At_Germinating_Seeds_cDNA_P Parameter: Tissue Value: Germinating Seeds
  misc_feature: MA Experiment ID: 108464 Result: Up-regulated in Transcription
  misc_feature: MA Experiment 108464 PARAMETER Experiment Name: At_Germinating_Seeds_cDNA_P Parameter: Age (day) Value: 4 vs. 0
  misc_feature: MA Experiment 108464 PARAMETER Experiment Name: At_Germinating_Seeds_cDNA_P Parameter: Tissue Value: Germinating Seeds
  misc_feature: MA Experiment ID: 20000185 Result: Up-regulated in Transcription
  misc_feature: MA Experiment 20000185 PARAMETER Experiment Name: At_Roots__P Parameter: Age (day) Value: 7 vs. 21
  misc_feature: MA Experiment 20000185 PARAMETER Experiment Name: At_Roots__P Parameter: Organism Value: A. thaliana
  misc_feature: MA Experiment 20000185 PARAMETER Experiment Name: At_Roots__P Parameter: Tissue Value: Roots vs. Whole Plant
  misc_feature: MA Experiment ID: 20000264 Result: Up-regulated in Transcription
  misc_feature: MA Experiment 20000264 PARAMETER Experiment Name: At_Open_Flower_P Parameter: Age (day) Value: 21
  misc_feature: MA Experiment 20000264 PARAMETER Experiment Name: At_Open_Flower_P Parameter: Plant Line Value: WS
  misc_feature: MA Experiment 20000264 PARAMETER Experiment Name: At_Open_Flower_P Parameter: Tissue Value: Open Flower vs. Whole Plant
  misc_feature: MA Experiment ID: 20000439 Result: Up-regulated in Transcription
  misc_feature: MA Experiment 20000439 PARAMETER Experiment Name: At_Roots__P Parameter: Age (day) Value: 14 vs. 21
  misc_feature: MA Experiment 20000439 PARAMETER Experiment Name: At_Roots__P Parameter: Organism Value: A. thaliana
  misc_feature: MA Experiment 20000439 PARAMETER Experiment Name: At_Roots__P Parameter: Tissue Value: Roots vs. Whole Plant
  misc_feature: MA Experiment ID: 20000794 Result: Up-regulated in Transcription
  misc_feature: MA Experiment 20000794 PARAMETER Experiment Name: At_Petals_P Parameter: Age (day) Value: 23-25 days
  misc_feature: MA Experiment 20000794 PARAMETER Experiment Name: At_Petals_P Parameter: Plant Line Value: WS
  misc_feature: MA Experiment 20000794 PARAMETER Experiment Name: At_Petals_P Parameter: Tissue Value: Petals vs. Whole plant
  misc_feature: MA Experiment ID: 20001451 Result: Up-regulated in Transcription
  misc_feature: MA Experiment 20001451 PARAMETER Experiment Name: At_Far-red-induction_P Parameter: Age (day) Value: 7
  misc_feature: MA Experiment 20001451 PARAMETER Experiment Name: At_Far-red-induction_P Parameter: Light Value: Far-red vs. White
  misc_feature: MA Experiment 20001451 PARAMETER Experiment Name: At_Far-red-induction_P Parameter: Organism Value: A. thaliana
  misc_feature: MA Experiment 20001451 PARAMETER Experiment Name: At_Far-red-induction_P Parameter: Plant Line Value: Columbia
  misc_feature: MA Experiment 20001451 PARAMETER Experiment Name: At_Far-red-induction_P Parameter: Timepoint (hr) Value: 24
  misc_feature: MA Experiment 20001451 PARAMETER Experiment Name: At_Far-red-induction_P Parameter: Tissue Value: Whole Plant
  misc_feature: MA Experiment ID: 20001556 Result: Down-regulated in Transcription
  misc_feature: MA Experiment 20001556 PARAMETER Experiment Name: At_Drought_Soil_Dry_P Parameter: Age (day) Value: 26
  misc_feature: MA Experiment 20001556 PARAMETER Experiment Name: At_Drought_Soil_Dry_P Parameter: Organism Value: A. thaliana
  misc_feature: MA Experiment 20001556 PARAMETER Experiment Name: At_Drought_Soil_Dry_P Parameter: Plant Line Value: WS
  misc_feature: MA Experiment 20001556 PARAMETER Experiment Name: At_Drought_Soil_Dry_P Parameter: Post Timepoint (hr) Value: None
  misc_feature: MA Experiment 20001556 PARAMETER Experiment Name: At_Drought_Soil_Dry_P Parameter: Post-Treatment Value: None
  misc_feature: MA Experiment 20001556 PARAMETER Experiment Name: At_Drought_Soil_Dry_P Parameter: Timepoint (day) Value: 12
  misc_feature: MA Experiment 20001556 PARAMETER Experiment Name: At_Drought_Soil_Dry_P Parameter: Treatment Value: Drought vs. No Drought
  misc_feature: MA Experiment ID: 20001558 Result: Down-regulated in Transcription
  misc_feature: MA Experiment 20001558 PARAMETER Experiment Name: At_Drought_Soil_Dry_P Parameter: Age (day) Value: 27
  misc_feature: MA Experiment 20001558 PARAMETER Experiment Name: At_Drought_Soil_Dry_P Parameter: Organism Value: A. thaliana
  misc_feature: MA Experiment 20001558 PARAMETER Experiment Name: At_Drought_Soil_Dry_P Parameter: Plant Line Value: WS
  misc_feature: MA Experiment 20001558 PARAMETER Experiment Name: At_Drought_Soil_Dry_P Parameter: Post Timepoint (hr) Value: 6
  misc_feature: MA Experiment 20001558 PARAMETER Experiment Name: At_Drought_Soil_Dry_P Parameter: Post-Treatment Value: Re-Water vs. No Drought
  misc_feature: MA Experiment 20001558 PARAMETER Experiment Name: At_Drought_Soil_Dry_P Parameter: Timepoint (day) Value: 13
  misc_feature: MA Experiment 20001558 PARAMETER Experiment Name: At_Drought_Soil_Dry_P Parameter: Treatment Value: Drought vs. No Drought
aaaagcaaatttaaacaacatagcgagagttcatgaatataactaagatgaaactcttctatgtgatcctattttttatcagttctttacagatttcaaactccatcgatttcaattatccgtctgcttttaatttcggagattccaattctgataccggtgatcttgttgctggccttggcattcgtctagaccttcctaacggacaaaattccttcaaaacttcatcccaaagattctgcgatggacgtcttgttatagattttctaatggatgaaatggacctgccatttttaaatccatatttggattcattaggtttaccaaatttcaaaaaagggtgtaactttgcagcagcaggatccacaattcttcccgcaaacccgacctcggtctctcctttctcctttgatcttcaaatctctcaattcatccggttcaaatctagggccattgaattactttctaaaacaggaaggaaatatgaaaagtacttaccaccaattgattattattcaaaaggattatacatgattgacataggccaaaatgatatagctggtgccttctactccaagactcttgaccaagttcttgcctctattccttccattcttgaaacttttgaagctggcctcaagaggctttatgaggaaggaggcagaaacatttggatacacaacacagggcctttaggatgtttagctcaaaatattgccaagtttgggacagattcaacaaaacttgatgagtttggttgcgttagttcccataaccaagcagctaagcttttcaatcttcaactccatgctatgtccaacaaatttcaagctcaataccctgatgcaaatgttacttacgttgacatcttctctattaaatctaatctcatcgctaattattcccgatttggcttcgaaaaaccgttaatggcgtgttgtggagtcggaggggcgccattaaattacgatagtcgcattacatgtggccaaactaaagtcttagatgggatatcagtaacagccaaagcttgcaacgatagttccgagtacataaactgggatggaattcattataccgaagccgcaaacgagttcgtctcatctcaaatcttaaccggaaaatattccgatccaccgttttcagatcaaatgccattttttctaaccttgaaattttaaacaatgccgttacaatcggatggtttcattcattctttagttttctgttattatttacttatattgttc

SEQ ID NO: 41683 - protein, 382 aa, Arabidopsis thaliana
  peptide (1)..(382): Ceres Seq. ID no. 13488755
  misc_feature (34)..(360): Pfam Name: GDSL-like Lipase/Acylhydrolase Pfam Description: GDSL-like Lipase/Acylhydrolase
  misc_feature (28)..(369): Homolog of NCBI NO: 33147015 NR Description: putative early nodulin 8 precursor
  misc_feature (28)..(369): Homolog of NCBI NO: 15231558 NR Description: GDSL-motif lipase/hydrolase protein [Arabidopsis
  misc_feature (30)..(369): Homolog of NCBI NO: 15217506 NR Description: GDSL-motif lipase/hydrolase protein [Arabidopsis
  misc_feature (30)..(369): Homolog of NCBI NO: 15223585 NR Description: GDSL-motif lipase/hydrolase protein [Arabidopsis
  misc_feature (18)..(367): Homolog of NCBI NO: 23397291 NR Description: putative nodulin [Arabidopsis thaliana]
  misc_feature (1)..(367): Homolog of NCBI NO: 15229919 NR Description: GDSL-motif lipase/hydrolase protein [Arabidopsis
  misc_feature (1)..(367): Homolog of NCBI NO: 21553789 NR Description: putative nodulin [Arabidopsis thaliana]
  misc_feature (11)..(382): Homolog of NCBI NO: 25405771 NR Description: hypothetical protein T22H22.20 [imported] -
  misc_feature (6)..(382): Homolog of NCBI NO: 21537184 NR Description: early nodule-specific protein, putative
  misc_feature (1)..(382): Homolog of NCBI NO: 18405064 NR Description: GDSL-motif lipase/hydrolase protein [Arabidopsis
MNITKMKLFYVILFFISSLQISNSIDFNYPSAFNFGDSNSDTGDLVAGLGIRLDLPNGQNSFKTSSQRFCDGRLVIDFLMDEMDLPFLNPYLDSLGLPNFKKGCNFAAAGSTILPANPTSVSPFSFDLQISQFIRFKSRAIELLSKTGRKYEKYLPPIDYYSKGLYMIDIGQNDIAGAFYSKTLDQVLASIPSILETFEAGLKRLYEEGGRNIWIHNTGPLGCLAQNIAKFGTDSTKLDEFGCVSSHNQAAKLFNLQLHAMSNKFQAQYPDANVTYVDIFSIKSNLIANYSRFGFEKPLMACCGVGGAPLNYDSRITCGQTKVLDGISVTAKACNDSSEYINWDGIHYTEAANEFVSSQILTGKYSDPPFSDQMPFFLTLKF

SEQ ID NO: 41684 - protein, 377 aa, Arabidopsis thaliana
  peptide (1)..(377): Ceres Seq. ID no. 13488756
  misc_feature (29)..(355): Pfam Name: GDSL-like Lipase/Acylhydrolase Pfam Description: GDSL-like Lipase/Acylhydrolase
  misc_feature (23)..(364): Homolog of NCBI NO: 33147015 NR Description: putative early nodulin 8 precursor
  misc_feature (23)..(364): Homolog of NCBI NO: 15231558 NR Description: GDSL-motif lipase/hydrolase protein [Arabidopsis
  misc_feature (25)..(364): Homolog of NCBI NO: 15217506 NR Description: GDSL-motif lipase/hydrolase protein [Arabidopsis
  misc_feature (25)..(364): Homolog of NCBI NO: 15223585 NR Description: GDSL-motif lipase/hydrolase protein [Arabidopsis
  misc_feature (13)..(362): Homolog of NCBI NO: 23397291 NR Description: putative nodulin [Arabidopsis thaliana]
  misc_feature (1)..(362): Homolog of NCBI NO: 15229919 NR Description: GDSL-motif lipase/hydrolase protein [Arabidopsis
  misc_feature (1)..(362): Homolog of NCBI NO: 21553789 NR Description: putative nodulin [Arabidopsis thaliana]
  misc_feature (6)..(377): Homolog of NCBI NO: 25405771 NR Description: hypothetical protein T22H22.20 [imported] -
  misc_feature (1)..(377): Homolog of NCBI NO: 21537184 NR Description: early nodule-specific protein, putative
  misc_feature (1)..(377): Homolog of NCBI NO: 18405064 NR Description: GDSL-motif lipase/hydrolase protein [Arabidopsis
MKLFYVILFFISSLQISNSIDFNYPSAFNFGDSNSDTGDLVAGLGIRLDLPNGQNSFKTSSQRFCDGRLVIDFLMDEMDLPFLNPYLDSLGLPNFKKGCNFAAAGSTILPANPTSVSPFSFDLQISQFIRFKSRAIELLSKTGRKYEKYLPPIDYYSKGLYMIDIGQNDIAGAFYSKTLDQVLASIPSILETFEAGLKRLYEEGGRNIWIHNTGPLGCLAQNIAKFGTDSTKLDEFGCVSSHNQAAKLFNLQLHAMSNKFQAQYPDANVTYVDIFSIKSNLIANYSRFGFEKPLMACCGVGGAPLNYDSRITCGQTKVLDGISVTAKACNDSSEYINWDGIHYTEAANEFVSSQILTGKYSDPPFSDQMPFFLTLKF

SEQ ID NO: 41685 - protein, 303 aa, Arabidopsis thaliana
  peptide (1)..(303): Ceres Seq. ID no. 13488757
  misc_feature (1)..(281): Pfam Name: GDSL-like Lipase/Acylhydrolase Pfam Description: GDSL-like Lipase/Acylhydrolase
  misc_feature (1)..(290): Homolog of NCBI NO: 33147015 NR Description: putative early nodulin 8 precursor
  misc_feature (1)..(290): Homolog of NCBI NO: 15231558 NR Description: GDSL-motif lipase/hydrolase protein [Arabidopsis
  misc_feature (1)..(290): Homolog of NCBI NO: 15217506 NR Description: GDSL-motif lipase/hydrolase protein [Arabidopsis
  misc_feature (1)..(290): Homolog of NCBI NO: 15223585 NR Description: GDSL-motif lipase/hydrolase protein [Arabidopsis
  misc_feature (1)..(288): Homolog of NCBI NO: 23397291 NR Description: putative nodulin [Arabidopsis thaliana]
  misc_feature (1)..(288): Homolog of NCBI NO: 15229919 NR Description: GDSL-motif lipase/hydrolase protein [Arabidopsis
  misc_feature (1)..(288): Homolog of NCBI NO: 21553789 NR Description: putative nodulin [Arabidopsis thaliana]
  misc_feature (1)..(303): Homolog of NCBI NO: 25405771 NR Description: hypothetical protein T22H22.20 [imported] -
  misc_feature (1)..(303): Homolog of NCBI NO: 21537184 NR Description: early nodule-specific protein, putative
  misc_feature (1)..(303): Homolog of NCBI NO: 18405064 NR Description: GDSL-motif lipase/hydrolase protein [Arabidopsis
MDEMDLPFLNPYLDSLGLPNFKKGCNFAAAGSTILPANPTSVSPFSFDLQISQFIRFKSRAIELLSKTGRKYEKYLPPIDYYSKGLYMIDIGQNDIAGAFYSKTLDQVLASIPSILETFEAGLKRLYEEGGRNIWIHNTGPLGCLAQNIAKFGTDSTKLDEFGCVSSHNQAAKLFNLQLHAMSNKFQAQYPDANVTYVDIFSIKSNLIANYSRFGFEKPLMACCGVGGAPLNYDSRITCGQTKVLDGISVTAKACNDSSEYINWDGIHYTEAANEFVSSQILTGKYSDPPFSDQMPFFLTLKF

SEQ ID NO: 41686 - DNA, 1091 bp, Arabidopsis thaliana
  misc_feature (1)..(1091): Ceres Seq. ID no. 12395480
  misc_feature: MA Experiment ID: 108434 Result: Up-regulated in Transcription
  misc_feature: MA Experiment 108434 PARAMETER Experiment Name: At_Root_Tips_cDNA_P Parameter: Tissue Value: Root Tips
  misc_feature: MA Experiment ID: 108462 Result: Down-regulated in Transcription
  misc_feature: MA Experiment 108462 PARAMETER Experiment Name: At_Germinating_Seeds_cDNA_P Parameter: Age (day) Value: 2 vs. 0
  misc_feature: MA Experiment 108462 PARAMETER Experiment Name: At_Germinating_Seeds_cDNA_P Parameter: Tissue Value: Germinating Seeds
  misc_feature: MA Experiment ID: 108463 Result: Down-regulated in Transcription
  misc_feature: MA Experiment 108463 PARAMETER Experiment Name: At_Germinating_Seeds_cDNA_P Parameter: Age (day) Value: 3 vs. 0
  misc_feature: MA Experiment 108463 PARAMETER Experiment Name: At_Germinating_Seeds_cDNA_P Parameter: Tissue Value: Germinating Seeds
  misc_feature: MA Experiment ID: 108464 Result: Down-regulated in Transcription
  misc_feature: MA Experiment 108464 PARAMETER Experiment Name: At_Germinating_Seeds_cDNA_P Parameter: Age (day) Value: 4 vs. 0
  misc_feature: MA Experiment 108464 PARAMETER Experiment Name: At_Germinating_Seeds_cDNA_P Parameter: Tissue Value: Germinating Seeds
  misc_feature: MA Experiment ID: 20000111 Result: Up-regulated in Transcription
  misc_feature: MA Experiment 20000111 PARAMETER Experiment Name: At_42deg_Heat_cDNA_P Parameter: Temperature (deg C) Value: 42 vs. 22
  misc_feature: MA Experiment 20000111 PARAMETER Experiment Name: At_42deg_Heat_cDNA_P Parameter: Timepoint (hr) Value: 6
  misc_feature: MA Experiment 20000111 PARAMETER Experiment Name: At_42deg_Heat_cDNA_P Parameter: Tissue Value: Aerial
  misc_feature: MA Experiment ID: 20000173 Result: Up-regulated in Transcription
  misc_feature: MA Experiment 20000173 PARAMETER Experiment Name: At_42deg_Heat_P Parameter: Age (day) Value: 14
  misc_feature: MA Experiment 20000173 PARAMETER Experiment Name: At_42deg_Heat_P Parameter: Organism Value: A. thaliana
  misc_feature: MA Experiment 20000173 PARAMETER Experiment Name: At_42deg_Heat_P Parameter: Plant Line Value: WS
  misc_feature: MA Experiment 20000173 PARAMETER Experiment Name: At_42deg_Heat_P Parameter: Temperature (deg C) Value: 42 vs. 22
  misc_feature: MA Experiment 20000173 PARAMETER Experiment Name: At_42deg_Heat_P Parameter: Timepoint (hr) Value: 6
  misc_feature: MA Experiment 20000173 PARAMETER Experiment Name: At_42deg_Heat_P Parameter: Tissue Value: Aerial
  misc_feature: MA Experiment ID: 20000180 Result: Down-regulated in Transcription
  misc_feature: MA Experiment 20000180 PARAMETER Experiment Name: At_Germinating_Seeds_P Parameter: Age (hr) Value: 24 vs. 0
  misc_feature: MA Experiment 20000180 PARAMETER Experiment Name: At_Germinating_Seeds_P Parameter: Tissue Value: Germinating Seeds
ctaaacaaaaccctctcttcctctacttcatattcttcttcatttcctacgctctcttctcgttctcgattcgccatgcctctaattgaaaaggtttcctcttcccgaaccagcctgggcccgtgttacatctcgacccgacccaagacatccgggtccggatactcgccgctgaatgatccttcgccgaattggagcaaccgtccgccgaaggagacgattcttcttgatgggtgcgattatgagcactggctcatcgtcatggagttcactgatcctaaacctactgaagaagagatgatcaattcttatgtcaaaaccttaacttccgtccttggctgtgaggaagaggccaagaagaagatttactctgtttgtacttcgacctacactggctttggtgctttgatctctgaagagctctcttgcaaagtcaaaggtatcaacttctccatatttgcaattaggtttttaagccttttttgctctgacatagcttttctagttgtttacttatgatgttgagatttatcgtaaaaggctttctctgtttggtactgctctgttcaacaggtaggaggaaacttctcttgatctttgttttatcgcagttattgtctgtctctagtactataaaatgagaacatattttactgtttgagaaatctgatctagagttgtgtgattcattagcattgcctggtgttctctgggtgctgccggattcctatctcgatgtaccaaacaaagactacggaggtgacttgtacgttgaaggaaaggtcatacccagaccacagtacaggttcacggaacagcgtcatactagaccccgtcctaggccaaggtatgataggcgccgtgagacaatgcaggttgagaggagagagccatccatgggtcttcattctccagtaaatccgggagagttcaacaagcccagtgcttaatattaaacatgaacaatgcattatgtaatggatggagtttattaggattatggtatttacatgcttgtcttaaacactcatgtgagagacttttcagtttttatccacttaatcaaacaaatcaatcatcattcatgtctc

SEQ ID NO: 41687 - protein, 172 aa, Arabidopsis thaliana
  peptide (1)..(172): Ceres Seq. ID no. 12395481
  misc_feature (18)..(155): Homolog of NCBI NO: 15226108 NR Description: plastid protein
  misc_feature (18)..(155): Homolog of NCBI NO: 2440029 NR Description: DAL1 protein [Arabidopsis thaliana]
  misc_feature (6)..(155): Homolog of NCBI NO: 15226934 NR Description: unknown protein
  misc_feature (1)..(148): Homolog of NCBI NO: 21593052 NR Description: DAG protein, putative [Arabidopsis thaliana]
  misc_feature (1)..(148): Homolog of NCBI NO: 15220382 NR Description: DAG protein, putative
  misc_feature (13)..(148): Homolog of NCBI NO: 38636775 NR Description: putative DAG protein [Oryza sativa (japonica
  misc_feature (17)..(148): Homolog of NCBI NO: 6014904 NR Description: DAG PROTEIN, CHLOROPLAST PRECURSOR
  misc_feature (6)..(149): Homolog of NCBI NO: 18400602 NR Description: expressed protein
  misc_feature (1)..(148): Homolog of NCBI NO: 15230785 NR Description: DAG protein, putative; protein id: At3g06790.1
  misc_feature (1)..(148): Homolog of NCBI NO: 27754695 NR Description: putative DAG protein [Arabidopsis thaliana]
LNKTLSSSTSYSSSFPTLSSRSRFAMPLIEKVSSSRTSLGPCYISTRPKTSGSGYSPLNDPSPNWSNRPPKETILLDGCDYEHWLIVMEFTDPKPTEEEMINSYVKTLTSVLGCEEEAKKKIYSVCTSTYTGFGALISEELSCKVKGINFSIFAIRFLSLFCSDIAFLVVYL

SEQ ID NO: 41688 - protein, 147 aa, Arabidopsis thaliana
  peptide (1)..(147): Ceres Seq. ID no. 12395482
  misc_feature (1)..(130): Homolog of NCBI NO: 15226108 NR Description: plastid protein
  misc_feature (1)..(130): Homolog of NCBI NO: 2440029 NR Description: DAL1 protein [Arabidopsis thaliana]
  misc_feature (1)..(130): Homolog of NCBI NO: 15226934 NR Description: unknown protein
  misc_feature (1)..(123): Homolog of NCBI NO: 21593052 NR Description: DAG protein, putative [Arabidopsis thaliana]
  misc_feature (1)..(123): Homolog of NCBI NO: 15220382 NR Description: DAG protein, putative
  misc_feature (1)..(123): Homolog of NCBI NO: 38636775 NR Description: putative DAG protein [Oryza sativa (japonica
  misc_feature (1)..(123): Homolog of NCBI NO: 6014904 NR Description: DAG PROTEIN, CHLOROPLAST PRECURSOR
  misc_feature (1)..(124): Homolog of NCBI NO: 18400602 NR Description: expressed protein
  misc_feature (1)..(123): Homolog of NCBI NO: 15230785 NR Description: DAG protein, putative; protein id: At3g06790.1
  misc_feature (1)..(123): Homolog of NCBI NO: 27754695 NR Description: putative DAG protein [Arabidopsis thaliana]
MPLIEKVSSSRTSLGPCYISTRPKTSGSGYSPLNDPSPNWSNRPPKETILLDGCDYEHWLIVMEFTDPKPTEEEMINSYVKTLTSVLGCEEEAKKKIYSVCTSTYTGFGALISEELSCKVKGINFSIFAIRFLSLFCSDIAFLVVYL

SEQ ID NO: 41689 - DNA, 1883 bp, Arabidopsis thaliana; identical to SEQ ID NO: 36956
  misc_feature (1)..(1883): Ceres Seq. ID no. 13503035
  misc_feature: MA Experiment ID: 20000166 Result: Up-regulated in Transcription
  misc_feature: MA Experiment 20000166 PARAMETER Experiment Name: At_100uM_ABA_P Parameter: Age (day) Value: 14
  misc_feature: MA Experiment 20000166 PARAMETER Experiment Name: At_100uM_ABA_P Parameter: Organism Value: A. thaliana
  misc_feature: MA Experiment 20000166 PARAMETER Experiment Name: At_100uM_ABA_P Parameter: Plant Line Value: WS
  misc_feature: MA Experiment 20000166 PARAMETER Experiment Name: At_100uM_ABA_P Parameter: Timepoint (hr) Value: 1
  misc_feature: MA Experiment 20000166 PARAMETER Experiment Name: At_100uM_ABA_P Parameter: Tissue Value: Aerial
  misc_feature: MA Experiment 20000166 PARAMETER Experiment Name: At_100uM_ABA_P Parameter: Treatment Value: 100uM ABA vs. No Treatment
  misc_feature: MA Experiment ID: 20000182 Result: Up-regulated in Transcription
  misc_feature: MA Experiment 20000182 PARAMETER Experiment Name: At_2mM_SA_P Parameter: Age (day) Value: 14
  misc_feature: MA Experiment 20000182 PARAMETER Experiment Name: At_2mM_SA_P Parameter: Organism Value: A. thaliana
  misc_feature: MA Experiment 20000182 PARAMETER Experiment Name: At_2mM_SA_P Parameter: Plant Line Value: WS
  misc_feature: MA Experiment 20000182 PARAMETER Experiment Name: At_2mM_SA_P Parameter: Timepoint (hr) Value: 6
  misc_feature: MA Experiment 20000182 PARAMETER Experiment Name: At_2mM_SA_P Parameter: Tissue Value: Aerial
  misc_feature: MA Experiment 20000182 PARAMETER Experiment Name: At_2mM_SA_P Parameter: Treatment Value: 2mM SA vs. No Treatment
  misc_feature: MA Experiment ID: 20000227 Result: Up-regulated in Transcription
  misc_feature: MA Experiment 20000227 PARAMETER Experiment Name: At_Root-Tips-vs-Tops_P Parameter: Tissue Value: Root Tips vs. Root Tops
  misc_feature: MA Experiment ID: 20000794 Result: Up-regulated in Transcription
  misc_feature: MA Experiment 20000794 PARAMETER Experiment Name: At_Petals_P Parameter: Age (day) Value: 23-25 days
  misc_feature: MA Experiment 20000794 PARAMETER Experiment Name: At_Petals_P Parameter: Plant Line Value: WS
  misc_feature: MA Experiment 20000794 PARAMETER Experiment Name: At_Petals_P Parameter: Tissue Value: Petals vs. Whole plant
  misc_feature: MA Experiment ID: 20001247 Result: Down-regulated in Transcription
  misc_feature: MA Experiment 20001247 PARAMETER Experiment Name: At_Far-red-induction_P Parameter: Age (day) Value: 7
  misc_feature: MA Experiment 20001247 PARAMETER Experiment Name: At_Far-red-induction_P Parameter: Light Value: Far-red vs. White
  misc_feature: MA Experiment 20001247 PARAMETER Experiment Name: At_Far-red-induction_P Parameter: Organism Value: A. thaliana
  misc_feature: MA Experiment 20001247 PARAMETER Experiment Name: At_Far-red-induction_P Parameter: Plant Line Value: Columbia
  misc_feature: MA Experiment 20001247 PARAMETER Experiment Name: At_Far-red-induction_P Parameter: Timepoint (hr) Value: 1
  misc_feature: MA Experiment 20001247 PARAMETER Experiment Name: At_Far-red-induction_P Parameter: Tissue Value: Whole Plant
  misc_feature: MA Experiment ID: 20001555 Result: Up-regulated in Transcription
  misc_feature: MA Experiment 20001555 PARAMETER Experiment Name: At_Drought_Soil_Dry_P Parameter: Age (day) Value: 24
  misc_feature: MA Experiment 20001555 PARAMETER Experiment Name: At_Drought_Soil_Dry_P Parameter: Organism Value: A. thaliana
  misc_feature: MA Experiment 20001555 PARAMETER Experiment Name: At_Drought_Soil_Dry_P Parameter: Plant Line Value: WS
  misc_feature: MA Experiment 20001555 PARAMETER Experiment Name: At_Drought_Soil_Dry_P Parameter: Post Timepoint (hr) Value: None
  misc_feature: MA Experiment 20001555 PARAMETER Experiment Name: At_Drought_Soil_Dry_P Parameter: Post-Treatment Value: None
  misc_feature: MA Experiment 20001555 PARAMETER Experiment Name: At_Drought_Soil_Dry_P Parameter: Timepoint (day) Value: 10
  misc_feature: MA Experiment 20001555 PARAMETER Experiment Name: At_Drought_Soil_Dry_P Parameter: Treatment Value: Drought vs. No Drought
  misc_feature: MA Experiment ID: 20001905 Result: Up-regulated in Transcription
  misc_feature: MA Experiment 20001905 PARAMETER Experiment Name: At_Drought_Reproduction_P Parameter: Age (day) Value: 40
  misc_feature: MA Experiment 20001905 PARAMETER Experiment Name: At_Drought_Reproduction_P Parameter: Organism Value: A. thaliana
  misc_feature: MA Experiment 20001905 PARAMETER Experiment Name: At_Drought_Reproduction_P Parameter: Plant Line Value: WS
  misc_feature: MA Experiment 20001905 PARAMETER Experiment Name: At_Drought_Reproduction_P Parameter: Timepoint (day) Value: 10
  misc_feature: MA Experiment 20001905 PARAMETER Experiment Name: At_Drought_Reproduction_P Parameter: Tissue Value: Rosettes
  misc_feature: MA Experiment 20001905 PARAMETER Experiment Name: At_Drought_Reproduction_P Parameter: Treatment Value: Drought vs. No Drought

SEQ ID NO: 41690 - protein, 404 aa, Arabidopsis thaliana; identical to SEQ ID NO: 36957
  peptide (1)..(404): Ceres Seq. ID no. 13503036
  misc_feature (149)..(347): Pfam Name: Galactosyltransferase Pfam Description: Galactosyltransferase
  misc_feature (149)..(347): Pfam Name: Galactosyltransferase Pfam Description: Galactosyltransferase
  misc_feature (11)..(401): Homolog of NCBI NO: 30699558 NR Description: Avr9 elicitor response protein -related
  misc_feature (11)..(401): Homolog of NCBI NO: 12323294 NR Description: putative (Avr9) elicitor response protein;
  misc_feature (7)..(404): Homolog of NCBI NO: 15223337 NR Description: galactosyltransferase family [Arabidopsis
  misc_feature (5)..(404): Homolog of NCBI NO: 4138265 NR Description: Avr9 elicitor response protein [Nicotiana tabacum]
  misc_feature (1)..(128): Homolog of NCBI NO: 15221085 NR Description: galactosyltransferase family [Arabidopsis
  misc_feature (11)..(401): Homolog of NCBI NO: 30699558 NR Description: Avr9 elicitor response protein -related
  misc_feature (7)..(404): Homolog of NCBI NO: 15223337 NR Description: galactosyltransferase family [Arabidopsis
  misc_feature (1)..(128): Homolog of NCBI NO: 15221085 NR Description: galactosyltransferase family [Arabidopsis
  misc_feature (1)..(404): Homolog of NCBI NO: 15220440 NR Description: galactosyltransferase family [Arabidopsis
  misc_feature (1)..(404): Homolog of NCBI NO: 15225684 NR Description: galactosyltransferase family [Arabidopsis
  misc_feature (10)..(404): Homolog of NCBI NO: 18416895 NR Description: galactosyltransferase family [Arabidopsis
  misc_feature (10)..(404): Homolog of NCBI NO: 7485336 NR Description: hypothetical protein F10M23.280 - Arabidopsis
  misc_feature (93)..(402): Homolog of NCBI NO: 15221085 NR Description: galactosyltransferase family [Arabidopsis
  misc_feature (5)..(404): Homolog of NCBI NO: 4138265 NR Description: Avr9 elicitor response protein [Nicotiana tabacum]
  misc_feature (11)..(401): Homolog of NCBI NO: 12323294 NR Description: putative (Avr9) elicitor response protein;
  misc_feature (93)..(402): Homolog of NCBI NO: 15221085 NR Description: galactosyltransferase family [Arabidopsis
  misc_feature (10)..(404): Homolog of NCBI NO: 7485336 NR Description: hypothetical protein F10M23.280 - Arabidopsis
  misc_feature (10)..(404): Homolog of NCBI NO: 18416895 NR Description: galactosyltransferase family [Arabidopsis
  misc_feature (1)..(404): Homolog of NCBI NO: 15225684 NR Description: galactosyltransferase family [Arabidopsis
  misc_feature (1)..(404): Homolog of NCBI NO: 15220440 NR Description: galactosyltransferase family [Arabidopsis

SEQ ID NO: 41691 - protein, 373 aa, Arabidopsis thaliana; identical to SEQ ID NO: 36958
  peptide (1)..(373): Ceres Seq. ID no. 13503037
  misc_feature (118)..(316): Pfam Name: Galactosyltransferase Pfam Description: Galactosyltransferase
  misc_feature (118)..(316): Pfam Name: Galactosyltransferase Pfam Description: Galactosyltransferase
  misc_feature (1)..(370): Homolog of NCBI NO: 30699558 NR Description: Avr9 elicitor response protein -related
  misc_feature (1)..(370): Homolog of NCBI NO: 12323294 NR Description: putative (Avr9) elicitor response protein;
  misc_feature (1)..(373): Homolog of NCBI NO: 15223337 NR Description: galactosyltransferase family [Arabidopsis
  misc_feature (1)..(373): Homolog of NCBI NO: 4138265 NR Description: Avr9 elicitor response protein [Nicotiana tabacum]
  misc_feature (1)..(97): Homolog of NCBI NO: 15221085 NR Description: galactosyltransferase family [Arabidopsis
  misc_feature (1)..(370): Homolog of NCBI NO: 30699558 NR Description: Avr9 elicitor response protein -related
  misc_feature (1)..(373): Homolog of NCBI NO: 15223337 NR Description: galactosyltransferase family [Arabidopsis
  misc_feature (1)..(97): Homolog of NCBI NO: 15221085 NR Description: galactosyltransferase family [Arabidopsis
  misc_feature (1)..(373): Homolog of NCBI NO: 15220440 NR Description: galactosyltransferase family [Arabidopsis
  misc_feature (1)..(373): Homolog of NCBI NO: 15225684 NR Description: galactosyltransferase family [Arabidopsis
  misc_feature (1)..(373): Homolog of NCBI NO: 18416895 NR Description: galactosyltransferase family [Arabidopsis
  misc_feature (1)..(373): Homolog of NCBI NO: 7485336 NR Description: hypothetical protein F10M23.280 - Arabidopsis
  misc_feature (62)..(371): Homolog of NCBI NO: 15221085 NR Description: galactosyltransferase family [Arabidopsis
  misc_feature (1)..(373): Homolog of NCBI NO: 4138265 NR Description: Avr9 elicitor response protein [Nicotiana tabacum]
  misc_feature (1)..(370): Homolog of NCBI NO: 12323294 NR Description: putative (Avr9) elicitor response protein;
  misc_feature (62)..(371): Homolog of NCBI NO: 15221085 NR Description: galactosyltransferase family [Arabidopsis
  misc_feature (1)..(373): Homolog of NCBI NO: 7485336 NR Description: hypothetical protein F10M23.280 - Arabidopsis
  misc_feature (1)..(373): Homolog of NCBI NO: 18416895 NR Description: galactosyltransferase family [Arabidopsis
  misc_feature (1)..(373): Homolog of NCBI NO: 15225684 NR Description: galactosyltransferase family [Arabidopsis
  misc_feature (1)..(373): Homolog of NCBI NO: 15220440 NR Description: galactosyltransferase family [Arabidopsis

SEQ ID NO: 41692 - protein, 367 aa, Arabidopsis thaliana; identical to SEQ ID NO: 36959
  peptide (1)..(367): Ceres Seq. ID no. 13503038
  misc_feature (112)..(310): Pfam Name: Galactosyltransferase Pfam Description: Galactosyltransferase
  misc_feature (112)..(310): Pfam Name: Galactosyltransferase Pfam Description: Galactosyltransferase
  misc_feature (1)..(364): Homolog of NCBI NO: 30699558 NR Description: Avr9 elicitor response protein -related
  misc_feature (1)..(364): Homolog of NCBI NO: 12323294 NR Description: putative (Avr9) elicitor response protein;
  misc_feature (1)..(367): Homolog of NCBI NO: 15223337 NR Description: galactosyltransferase family [Arabidopsis
  misc_feature (1)..(367): Homolog of NCBI NO: 4138265 NR Description: Avr9 elicitor response protein [Nicotiana tabacum]
  misc_feature (1)..(91): Homolog of NCBI NO: 15221085 NR Description: galactosyltransferase family [Arabidopsis
  misc_feature (1)..(364): Homolog of NCBI NO: 30699558 NR Description: Avr9 elicitor response protein -related
  misc_feature (1)..(367): Homolog of NCBI NO: 15223337 NR Description: galactosyltransferase family [Arabidopsis
  misc_feature (1)..(91): Homolog of NCBI NO: 15221085 NR Description: galactosyltransferase family [Arabidopsis
  misc_feature (1)..(367): Homolog of NCBI NO: 15220440 NR Description: galactosyltransferase family [Arabidopsis
  misc_feature (1)..(367): Homolog of NCBI NO: 15225684 NR Description: galactosyltransferase family [Arabidopsis
  misc_feature (1)..(367): Homolog of NCBI NO: 18416895 NR Description: galactosyltransferase family [Arabidopsis
  misc_feature (1)..(367): Homolog of NCBI NO: 7485336 NR Description: hypothetical protein F10M23.280 - Arabidopsis
  misc_feature (56)..(365): Homolog of NCBI NO: 15221085 NR Description: galactosyltransferase family [Arabidopsis
  misc_feature (1)..(367): Homolog of NCBI NO: 4138265 NR Description: Avr9 elicitor response protein [Nicotiana tabacum]
  misc_feature (1)..(364): Homolog of NCBI NO: 12323294 NR Description: putative (Avr9) elicitor response protein;
  misc_feature (56)..(365): Homolog of NCBI NO: 15221085 NR Description: galactosyltransferase family [Arabidopsis
  misc_feature (1)..(367): Homolog of NCBI NO: 7485336 NR Description: hypothetical protein F10M23.280 - Arabidopsis
  misc_feature (1)..(367): Homolog of NCBI NO: 18416895 NR Description: galactosyltransferase family [Arabidopsis
  misc_feature (1)..(367): Homolog of NCBI NO: 15225684 NR Description: galactosyltransferase family [Arabidopsis
  misc_feature (1)..(367): Homolog of NCBI NO: 15220440 NR Description: galactosyltransferase family [Arabidopsis

SEQ ID NO: 41693 - DNA, 1432 bp, Arabidopsis thaliana
  misc_feature (1)..(1432): Ceres Seq. ID no. 12385788
  misc_feature: MA Experiment ID: 108433 Result: Up-regulated in Transcription
  misc_feature: MA Experiment 108433 PARAMETER Experiment Name: At_rhl_Mutant2_cDNA_P Parameter: Age (day) Value: 7
  misc_feature: MA Experiment 108433 PARAMETER Experiment Name: At_rhl_Mutant2_cDNA_P Parameter: Organism Value: A. thaliana
  misc_feature: MA Experiment 108433 PARAMETER Experiment Name: At_rhl_Mutant2_cDNA_P Parameter: Plant Line Value: rhl Mutant vs. wt landsburg
  misc_feature: MA Experiment 108433 PARAMETER Experiment Name: At_rhl_Mutant2_cDNA_P Parameter: Tissue Value: Roots
  misc_feature: MA Experiment ID: 108434 Result: Down-regulated in Transcription
  misc_feature: MA Experiment 108434 PARAMETER Experiment Name: At_Root_Tips_cDNA_P Parameter: Tissue Value: Root Tips
  misc_feature: MA Experiment ID: 108463 Result: Up-regulated in Transcription
  misc_feature: MA Experiment 108463 PARAMETER Experiment Name: At_Germinating_Seeds_cDNA_P Parameter: Age (day) Value: 3 vs. 0
  misc_feature: MA Experiment 108463 PARAMETER Experiment Name: At_Germinating_Seeds_cDNA_P Parameter: Tissue Value: Germinating Seeds
  misc_feature: MA Experiment ID: 108473 Result: Up-regulated in Transcription
  misc_feature: MA Experiment 108473 PARAMETER Experiment Name: At_Drought_Flowers_cDNA_P Parameter: Timepoint (hr) Value: 7 d
  misc_feature: MA Experiment 108473 PARAMETER Experiment Name: At_Drought_Flowers_cDNA_P Parameter: Tissue Value: Flower
  misc_feature: MA Experiment 108473 PARAMETER Experiment Name: At_Drought_Flowers_cDNA_P Parameter: Treatment Value: Drought vs. No Drought
  misc_feature: MA Experiment ID: 108489 Result: Up-regulated in Transcription
  misc_feature: MA Experiment ID: 108501 Result: Down-regulated in Transcription
  misc_feature: MA Experiment 108501 PARAMETER Experiment Name: At_ap2_floral_buds_cDNA_P Parameter: Plant Line Value: ap2 (Ler.)
  misc_feature: MA Experiment 108501 PARAMETER Experiment Name: At_ap2_floral_buds_cDNA_P Parameter: Tissue Value: Closed Flower
  misc_feature: MA Experiment ID: 108579 Result: Down-regulated in Transcription
  misc_feature: MA Experiment 108579 PARAMETER Experiment Name: At_4deg_Cold_cDNA_P Parameter: Temperature (deg C) Value: 4 vs. 22
  misc_feature: MA Experiment 108579 PARAMETER Experiment Name: At_4deg_Cold_cDNA_P Parameter: Timepoint (hr) Value: 6
  misc_feature: MA Experiment 108579 PARAMETER Experiment Name: At_4deg_Cold_cDNA_P Parameter: Tissue Value: Aerial
  misc_feature: MA Experiment ID: 20000113 Result: Up-regulated in Transcription
  misc_feature: MA Experiment 20000113 PARAMETER Experiment Name: At_42deg_Heat_cDNA_P Parameter: Temperature (deg C) Value: 42 vs. 22
  misc_feature: MA Experiment 20000113 PARAMETER Experiment Name: At_42deg_Heat_cDNA_P Parameter: Timepoint (hr) Value: 8
  misc_feature: MA Experiment 20000113 PARAMETER Experiment Name: At_42deg_Heat_cDNA_P Parameter: Tissue Value: Aerial
  misc_feature: MA Experiment ID: 20000173 Result: Up-regulated in Transcription
  misc_feature: MA Experiment 20000173 PARAMETER Experiment Name: At_42deg_Heat_P Parameter: Age (day) Value: 14
  misc_feature: MA Experiment 20000173 PARAMETER Experiment Name: At_42deg_Heat_P Parameter: Organism Value: A. thaliana
  misc_feature: MA Experiment 20000173 PARAMETER Experiment Name: At_42deg_Heat_P Parameter: Plant Line Value: WS
  misc_feature: MA Experiment 20000173 PARAMETER Experiment Name: At_42deg_Heat_P Parameter: Temperature (deg C) Value: 42 vs. 22
  misc_feature: MA Experiment 20000173 PARAMETER Experiment Name: At_42deg_Heat_P Parameter: Timepoint (hr) Value: 6
  misc_feature: MA Experiment 20000173 PARAMETER Experiment Name: At_42deg_Heat_P Parameter: Tissue Value: Aerial
  misc_feature: MA Experiment ID: 20000213 Result: Down-regulated in Transcription
  misc_feature: MA Experiment 20000213 PARAMETER Experiment Name: At_4deg_Cold_P Parameter: Timepoint (hr) Value: 2
  misc_feature: MA Experiment ID: 20000214 Result: Down-regulated in Transcription
  misc_feature: MA Experiment 20000214 PARAMETER Experiment Name: At_4deg_Cold_P Parameter: Timepoint (hr) Value: 6
  misc_feature: MA Experiment ID: 20000224 Result: Down-regulated in Transcription
  misc_feature: MA Experiment ID: 20000234 Result: Down-regulated in Transcription
  misc_feature: MA Experiment 20000234 PARAMETER Experiment Name: At_Siliques_P Parameter: Age (day) Value: 21
  misc_feature: MA Experiment 20000234 PARAMETER Experiment Name: At_Siliques_P Parameter: Organism Value: A. thaliana
  misc_feature: MA Experiment 20000234 PARAMETER Experiment Name: At_Siliques_P Parameter: Plant Line Value: WS
  misc_feature: MA Experiment 20000234 PARAMETER Experiment Name: At_Siliques_P Parameter: Tissue Value: Less Than 5mm Siliques vs. Whole Plant
  misc_feature: MA Experiment ID: 20000235 Result: Down-regulated in Transcription
  misc_feature: MA Experiment 20000235 PARAMETER Experiment Name: At_Siliques_P Parameter: Age (day) Value: 21
  misc_feature: MA Experiment 20000235 PARAMETER Experiment Name: At_Siliques_P Parameter: Organism Value: A. thaliana
  misc_feature: MA Experiment 20000235 PARAMETER Experiment Name: At_Siliques_P Parameter: Plant Line Value: WS
  misc_feature: MA Experiment 20000235 PARAMETER Experiment Name: At_Siliques_P Parameter: Tissue Value: 5-10mm Siliques vs. Whole Plant
  misc_feature: MA Experiment ID: 20000264 Result: Down-regulated in Transcription
  misc_feature: MA Experiment 20000264 PARAMETER Experiment Name: At_Open_Flower_P Parameter: Age (day) Value: 21
  misc_feature: MA Experiment 20000264 PARAMETER Experiment Name: At_Open_Flower_P Parameter: Plant Line Value: WS
  misc_feature: MA Experiment 20000264 PARAMETER Experiment Name: At_Open_Flower_P Parameter: Tissue Value: Open Flower vs. Whole Plant
  misc_feature: MA Experiment ID: 20000265 Result: Down-regulated in Transcription
  misc_feature: MA Experiment 20000265 PARAMETER Experiment Name: At_Open_Flower_P Parameter: Age (day) Value: 21
  misc_feature: MA Experiment 20000265 PARAMETER Experiment Name: At_Open_Flower_P Parameter: Plant Line Value: WS
  misc_feature: MA Experiment 20000265 PARAMETER Experiment Name: At_Open_Flower_P Parameter: Tissue Value: Closed Flower vs. Whole Plant
  misc_feature: MA Experiment ID: 20000286 Result: Down-regulated in Transcription
  misc_feature: MA Experiment 20000286 PARAMETER Experiment Name: At_Open_Flower_P Parameter: Age (day) Value: 21
  misc_feature: MA Experiment 20000286 PARAMETER Experiment Name: At_Open_Flower_P Parameter: Plant Line Value: WS
  misc_feature: MA Experiment 20000286 PARAMETER Experiment Name: At_Open_Flower_P Parameter: Tissue Value: Half Open vs. Whole Plant
  misc_feature: MA Experiment ID: 20000308 Result: Down-regulated in Transcription
  misc_feature: MA Experiment 20000308 PARAMETER Experiment Name: At_100mM_NaCl__P Parameter: Age (day) Value: 17
  misc_feature: MA Experiment 20000308 PARAMETER Experiment Name: At_100mM_NaCl__P Parameter: Organism Value: A. thaliana
  misc_feature: MA Experiment 20000308 PARAMETER Experiment Name: At_100mM_NaCl__P Parameter: Plant Line Value: WS
  misc_feature: MA Experiment 20000308 PARAMETER Experiment Name: At_100mM_NaCl__P Parameter: Timepoint (hr) Value: 72
  misc_feature: MA Experiment 20000308 PARAMETER Experiment Name: At_100mM_NaCl__P Parameter: Tissue Value: Whole Plant
  misc_feature: MA Experiment 20000308 PARAMETER Experiment Name: At_100mM_NaCl__P Parameter: Treatment Value: 100mM NaCl vs. No Treatment
  misc_feature: MA Experiment ID: 20000437 Result: Up-regulated in Transcription
  misc_feature: MA Experiment 20000437 PARAMETER Experiment Name: At_Drought_P Parameter: Age (day) Value: 8
  misc_feature: MA Experiment 20000437 PARAMETER Experiment Name: At_Drought_P Parameter: Organism Value: A. thaliana
  misc_feature: MA Experiment 20000437 PARAMETER Experiment Name: At_Drought_P Parameter: Plant Line Value: WS
  misc_feature: MA Experiment 20000437 PARAMETER Experiment Name: At_Drought_P Parameter: Timepoint (hr) Value: 24
  misc_feature: MA Experiment 20000437 PARAMETER Experiment Name: At_Drought_P Parameter: Tissue Value: Whole Plant
  misc_feature: MA Experiment 20000437 PARAMETER Experiment Name: At_Drought_P Parameter: Treatment Value: Drought vs. No Drought
  misc_feature: MA Experiment ID: 20000527 Result: Up-regulated in Transcription
  misc_feature: MA Experiment 20000527 PARAMETER Experiment Name: At_10percent_PEG_P Parameter: Age (day) Value: 20
  misc_feature: MA Experiment 20000527 PARAMETER Experiment Name: At_10percent_PEG_P Parameter: Organism Value: A. thaliana
  misc_feature: MA Experiment 20000527 PARAMETER Experiment Name: At_10percent_PEG_P Parameter: Plant Line Value: WS
  misc_feature: MA Experiment 20000527 PARAMETER Experiment Name: At_10percent_PEG_P Parameter: Timepoint (day) Value: 20
  misc_feature: MA Experiment 20000527 PARAMETER Experiment Name: At_10percent_PEG_P Parameter: Tissue Value: Whole Plant
  misc_feature: MA Experiment 20000527 PARAMETER Experiment Name: At_10percent_PEG_P Parameter: Treatment Value: 10percent PEG vs. No Treatment
  misc_feature: MA Experiment ID: 20001247 Result: Up-regulated in Transcription
  misc_feature: MA Experiment 20001247 PARAMETER Experiment Name: At_Far-red-induction_P Parameter: Age (day) Value: 7
  misc_feature: MA Experiment 20001247 PARAMETER Experiment Name: At_Far-red-induction_P Parameter: Light Value: Far-red vs. White
  misc_feature: MA Experiment 20001247 PARAMETER Experiment Name: At_Far-red-induction_P Parameter: Organism Value: A. thaliana
  misc_feature: MA Experiment 20001247 PARAMETER Experiment Name: At_Far-red-induction_P Parameter: Plant Line Value: Columbia
  misc_feature: MA Experiment 20001247 PARAMETER Experiment Name: At_Far-red-induction_P Parameter: Timepoint (hr) Value: 1
  misc_feature: MA Experiment 20001247 PARAMETER Experiment Name: At_Far-red-induction_P Parameter: Tissue Value: Whole Plant
  misc_feature: MA Experiment ID: 20001450 Result: Up-regulated in Transcription
  misc_feature: MA Experiment 20001450 PARAMETER Experiment Name: At_Far-red-induction_P Parameter: Age (day) Value: 7
  misc_feature: MA Experiment 20001450 PARAMETER Experiment Name: At_Far-red-induction_P Parameter: Light Value: Far-red vs. White
  misc_feature: MA Experiment 20001450 PARAMETER Experiment Name: At_Far-red-induction_P Parameter: Organism Value: A. thaliana
  misc_feature: MA Experiment 20001450 PARAMETER Experiment Name: At_Far-red-induction_P Parameter: Plant Line Value: Columbia
  misc_feature: MA Experiment 20001450 PARAMETER Experiment Name: At_Far-red-induction_P Parameter: Timepoint (hr) Value: 8
  misc_feature: MA Experiment 20001450 PARAMETER Experiment Name: At_Far-red-induction_P Parameter: Tissue Value: Whole Plant
  misc_feature: MA Experiment ID: 20001451 Result: Up-regulated in Transcription
  misc_feature: MA Experiment 20001451 PARAMETER Experiment Name: At_Far-red-induction_P Parameter: Age (day) Value: 7
  misc_feature: MA Experiment 20001451 PARAMETER Experiment Name: At_Far-red-induction_P Parameter: Light Value: Far-red vs. White
  misc_feature: MA Experiment 20001451 PARAMETER Experiment Name: At_Far-red-induction_P Parameter: Organism Value: A. thaliana
  misc_feature: MA Experiment 20001451 PARAMETER Experiment Name: At_Far-red-induction_P Parameter: Plant Line Value: Columbia
  misc_feature: MA Experiment 20001451 PARAMETER Experiment Name: At_Far-red-induction_P Parameter: Timepoint (hr) Value: 24
  misc_feature: MA Experiment 20001451 PARAMETER Experiment Name: At_Far-red-induction_P Parameter: Tissue Value: Whole Plant
  misc_feature: MA Experiment ID: 20001557 Result: Down-regulated in Transcription
  misc_feature: MA Experiment 20001557 PARAMETER Experiment Name: At_Drought_Soil_Dry_P Parameter: Age (day) Value: 27
  misc_feature: MA Experiment 20001557 PARAMETER Experiment Name: At_Drought_Soil_Dry_P Parameter: Organism Value: A. thaliana
  misc_feature: MA Experiment 20001557 PARAMETER Experiment Name: At_Drought_Soil_Dry_P Parameter: Plant Line Value: WS
  misc_feature: MA Experiment 20001557 PARAMETER Experiment Name: At_Drought_Soil_Dry_P Parameter: Post Timepoint (hr) Value: 3
  misc_feature: MA Experiment 20001557 PARAMETER Experiment Name: At_Drought_Soil_Dry_P Parameter: Post-Treatment Value: Re-Water vs. No Drought
  misc_feature: MA Experiment 20001557 PARAMETER Experiment Name: At_Drought_Soil_Dry_P Parameter: Timepoint (day) Value: 13
  misc_feature: MA Experiment 20001557 PARAMETER Experiment Name: At_Drought_Soil_Dry_P Parameter: Treatment Value: Drought vs. No Drought
  misc_feature: MA Experiment ID: 20001558 Result: Down-regulated in Transcription
  misc_feature: MA Experiment 20001558 PARAMETER Experiment Name: At_Drought_Soil_Dry_P Parameter: Age (day) Value: 27
  misc_feature: MA Experiment 20001558 PARAMETER Experiment Name: At_Drought_Soil_Dry_P Parameter: Organism Value: A. thaliana
  misc_feature: MA Experiment 20001558 PARAMETER Experiment Name: At_Drought_Soil_Dry_P Parameter: Plant Line Value: WS
  misc_feature: MA Experiment 20001558 PARAMETER Experiment Name: At_Drought_Soil_Dry_P Parameter: Post Timepoint (hr) Value: 6
  misc_feature: MA Experiment 20001558 PARAMETER Experiment Name: At_Drought_Soil_Dry_P Parameter: Post-Treatment Value: Re-Water vs. No Drought
  misc_feature: MA Experiment 20001558 PARAMETER Experiment Name: At_Drought_Soil_Dry_P Parameter: Timepoint (day) Value: 13
  misc_feature: MA Experiment 20001558 PARAMETER Experiment Name: At_Drought_Soil_Dry_P Parameter: Treatment Value: Drought vs. No Drought
  misc_feature: MA Experiment ID: 20001905 Result: Up-regulated in Transcription
  misc_feature: MA Experiment 20001905 PARAMETER Experiment Name: At_Drought_Reproduction_P Parameter: Age (day) Value: 40
  misc_feature: MA Experiment 20001905 PARAMETER Experiment Name: At_Drought_Reproduction_P Parameter: Organism Value: A. thaliana
  misc_feature: MA Experiment 20001905 PARAMETER Experiment Name: At_Drought_Reproduction_P Parameter: Plant Line Value: WS
  misc_feature: MA Experiment 20001905 PARAMETER Experiment Name: At_Drought_Reproduction_P Parameter: Timepoint (day) Value: 10
  misc_feature: MA Experiment 20001905 PARAMETER Experiment Name: At_Drought_Reproduction_P Parameter: Tissue Value: Rosettes
  misc_feature: MA Experiment 20001905 PARAMETER Experiment Name: At_Drought_Reproduction_P Parameter: Treatment Value: Drought vs. No Drought
actactcattgtgcgtcttctcgatttgtaatctccatacaattttttctagagagaatccatctctctctcttttttttctttggttttgcttgtcccttaaattcagcctccttcatacataacgtcaaagctcagatatctgaataactcgcttgcgtgcctctctctctctaaaagcccatctctttctcctcctcctcctccattgaagaagaaacctaccttcgtaatatttcctcaattacgatcatggtgaatgttaaagggtcaaccaaaaaatcgaatcttgatcgattccttcattgcataacacccttagtgccaccccaatctctccccaagacggagattagaaccctaaatcgattgtggcatccatgggagagacaaaaggttgagtttttcaggttgagtgatttgtgggattgttatgatgaatggagcgcttatggagctagcgttcctattcatgttaccaacggagaatctcttgttcaatactatgttccttatctctctgccatccagattttcacctctcattcctccttgatccgcttaagggaagagtctgaagatggggaatgtgagggtagagatccgtttagcgattcaggtagcgatgagagtgtctctgaggaaggacttgagaacaacacgctcttgcatccaagtgatcgtttgggttatctttatctccaatactttgagagatcagctccttataccagagttcctctgatggataagatcaatgaattggctcaaagatacccgggattgatgtcgttgagaagcgttgatctttctccagctagttggatgtcagtagcatggtacccgatttaccatataccaatgggaagaaccattaaagacttatccacgtgtttcctcacttatcacactctttcctcttcttttcaagatatggaaccggaagaaaatggtggggacaaggagagagtgcggagggaaggggaagatataactctgctcccatttgggatggctacttacaagatgcaaggcgatgtttggctttcgcaggaccacgatgatcaagagagattggcttcgctttacagtgttgcggattcttggcttaaacagctcagggtccaacatcatgacttcaactacttctgcaatatgtcaatgactcatcgtggctaaacctcggttggatgacaccatgatgtttgcttgtttcctcatatatagtctaattcttgctttgttctggaaccgcttgcgttttgtaaaacgcaatggagcgattcgctttgcagtgttttggttagaatagcgttttgagtcttctaacctttgagagagtatatgtcgtatatagagttttgttgcttgttgaaacagagtacaattgttgttgcttgttaaaaacagagtgattgtttcttataagttg

SEQ ID NO: 41694 - protein, 308 aa, Arabidopsis thaliana
  peptide (1)..(308): Ceres Seq. ID no. 12385789
  misc_feature (11)..(299): Pfam Name: Protein of unknown function (DUF789) Pfam Description: Protein of unknown function (DUF789)
  misc_feature (31)..(299): Homolog of NCBI NO: 19310572 NR Description: unknown protein [Arabidopsis thaliana]
  misc_feature (10)..(299): Homolog of NCBI NO: 30687867 NR Description: expressed protein [Arabidopsis thaliana]
  misc_feature (10)..(299): Homolog of NCBI NO: 21594686 NR Description: unknown [Arabidopsis thaliana]
  misc_feature (10)..(299): Homolog of NCBI NO: 18417136 NR Description: putative protein
  misc_feature (9)..(303): Homolog of NCBI NO: 25373431 NR Description: hypothetical protein AT4g03420 [imported] -
  misc_feature (9)..(308): Homolog of NCBI NO: 22328289 NR Description: hypothetical protein
  misc_feature (1)..(308): Homolog of NCBI NO: 7485906 NR Description: hypothetical protein F21B7.13 - Arabidopsis
  misc_feature (1)..(308): Homolog of NCBI NO: 9280648 NR Description: F21B7.22 [Arabidopsis thaliana]
  misc_feature (1)..(308): Homolog of NCBI NO: 18958013 NR Description: At1g03610/F21B7_13 [Arabidopsis thaliana]
  misc_feature (1)..(308): Homolog of NCBI NO: 18379117 NR Description: expressed protein
MVNVKGSTKKSNLDRFLHCITPLVPPQSLPKTEIRTLNRLWHPWERQKVEFFRLSDLWDCYDEWSAYGASVPIHVTNGESLVQYYVPYLSAIQIFTSHSSLIRLREESEDGECEGRDPFSDSGSDESVSEEGLENNTLLHPSDRLGYLYLQYFERSAPYTRVPLMDKINELAQRYPGLMSLRSVDLSPASWMSVAWYPIYHIPMGRTIKDLSTCFLTYHTLSSSFQDMEPEENGGDKERVRREGEDITLLPFGMATYKMQGDVWLSQDHDDQERLASLYSVADSWLKQLRVQHHDFNYFCNMSMTHRG

SEQ ID NO: 41695 - DNA, 1498 bp, Arabidopsis thaliana
  misc_feature (1)..(1498): Ceres Seq. ID no. 13646293
  misc_feature: MA Experiment ID: 20000169 Result: Up-regulated in Transcription
  misc_feature: MA Experiment 20000169 PARAMETER Experiment Name: At_100uM_ABA_P Parameter: Age (day) Value: 14
  misc_feature: MA Experiment 20000169 PARAMETER Experiment Name: At_100uM_ABA_P Parameter: Organism Value: A. thaliana
  misc_feature: MA Experiment 20000169 PARAMETER Experiment Name: At_100uM_ABA_P Parameter: Plant Line Value: WS
  misc_feature: MA Experiment 20000169 PARAMETER Experiment Name: At_100uM_ABA_P Parameter: Timepoint (hr) Value: 6
  misc_feature: MA Experiment 20000169 PARAMETER Experiment Name: At_100uM_ABA_P Parameter: Tissue Value: Aerial
  misc_feature: MA Experiment 20000169 PARAMETER Experiment Name: At_100uM_ABA_P Parameter: Treatment Value: 100uM ABA vs. No Treatment
  misc_feature: MA Experiment ID: 20000171 Result: Up-regulated in Transcription
  misc_feature: MA Experiment 20000171 PARAMETER Experiment Name: At_42deg_Heat_P Parameter: Age (day) Value: 14
  misc_feature: MA Experiment 20000171 PARAMETER Experiment Name: At_42deg_Heat_P Parameter: Organism Value: A. thaliana
  misc_feature: MA Experiment 20000171 PARAMETER Experiment Name: At_42deg_Heat_P Parameter: Plant Line Value: WS
  misc_feature: MA Experiment 20000171 PARAMETER Experiment Name: At_42deg_Heat_P Parameter: Temperature (deg C) Value: 42 vs. 22
  misc_feature: MA Experiment 20000171 PARAMETER Experiment Name: At_42deg_Heat_P Parameter: Timepoint (hr) Value: 1
  misc_feature: MA Experiment 20000171 PARAMETER Experiment Name: At_42deg_Heat_P Parameter: Tissue Value: Aerial
  misc_feature: MA Experiment ID: 20000173 Result: Up-regulated in Transcription
  misc_feature: MA Experiment 20000173 PARAMETER Experiment Name: At_42deg_Heat_P Parameter: Age (day) Value: 14
  misc_feature: MA Experiment 20000173 PARAMETER Experiment Name: At_42deg_Heat_P Parameter: Organism Value: A. thaliana
  misc_feature: MA Experiment 20000173 PARAMETER Experiment Name: At_42deg_Heat_P Parameter: Plant Line Value: WS
  misc_feature: MA Experiment 20000173 PARAMETER Experiment Name: At_42deg_Heat_P Parameter: Temperature (deg C) Value: 42 vs. 22
  misc_feature: MA Experiment 20000173 PARAMETER Experiment Name: At_42deg_Heat_P Parameter: Timepoint (hr) Value: 6
  misc_feature: MA Experiment 20000173 PARAMETER Experiment Name: At_42deg_Heat_P Parameter: Tissue Value: Aerial
  misc_feature: MA Experiment ID: 20000184 Result: Up-regulated in Transcription
  misc_feature: MA Experiment 20000184 PARAMETER Experiment Name: At_Shoots__P Parameter: Age (day) Value: 7
  misc_feature: MA Experiment 20000184 PARAMETER Experiment Name: At_Shoots__P Parameter: Tissue Value: Shoots vs. Whole Plant
  misc_feature: MA Experiment ID: 20000436 Result: Up-regulated in Transcription
  misc_feature: MA Experiment 20000436 PARAMETER Experiment Name: At_Drought_P Parameter: Age (day) Value: 7
  misc_feature: MA Experiment 20000436 PARAMETER Experiment Name: At_Drought_P Parameter: Organism Value: A. thaliana
  misc_feature: MA Experiment 20000436 PARAMETER Experiment Name: At_Drought_P Parameter: Plant Line Value: WS
  misc_feature: MA Experiment 20000436 PARAMETER Experiment Name: At_Drought_P Parameter: Timepoint (hr) Value: 12
  misc_feature: MA Experiment 20000436 PARAMETER Experiment Name: At_Drought_P Parameter: Tissue Value: Whole Plant
  misc_feature: MA Experiment 20000436 PARAMETER Experiment Name: At_Drought_P Parameter: Treatment Value: Drought vs. No Drought
  misc_feature: MA Experiment ID: 20000794 Result: Up-regulated in Transcription
  misc_feature: MA Experiment 20000794 PARAMETER Experiment Name: At_Petals_P Parameter: Age (day) Value: 23-25 days
  misc_feature: MA Experiment 20000794 PARAMETER Experiment Name: At_Petals_P Parameter: Plant Line Value: WS
  misc_feature: MA Experiment 20000794 PARAMETER Experiment Name: At_Petals_P Parameter: Tissue Value: Petals vs. Whole plant
  misc_feature: MA Experiment ID: 20001248 Result: Down-regulated in Transcription
  misc_feature: MA Experiment 20001248 PARAMETER Experiment Name: At_Far-red-induction_P Parameter: Age (day) Value: 7
  misc_feature: MA Experiment 20001248 PARAMETER Experiment Name: At_Far-red-induction_P Parameter: Light Value: Far-red vs. White
  misc_feature: MA Experiment 20001248 PARAMETER Experiment Name: At_Far-red-induction_P Parameter: Organism Value: A. thaliana
  misc_feature: MA Experiment 20001248 PARAMETER Experiment Name: At_Far-red-induction_P Parameter: Plant Line Value: Columbia
  misc_feature: MA Experiment 20001248 PARAMETER Experiment Name: At_Far-red-induction_P Parameter: Timepoint (hr) Value: 4
  misc_feature: MA Experiment 20001248 PARAMETER Experiment Name: At_Far-red-induction_P Parameter: Tissue Value: Whole Plant
  misc_feature: MA Experiment ID: 20001557 Result: Up-regulated in Transcription
  misc_feature: MA Experiment 20001557 PARAMETER Experiment Name: At_Drought_Soil_Dry_P Parameter: Age (day) Value: 27
  misc_feature: MA Experiment 20001557 PARAMETER Experiment Name: At_Drought_Soil_Dry_P Parameter: Organism Value: A. thaliana
  misc_feature: MA Experiment 20001557 PARAMETER Experiment Name: At_Drought_Soil_Dry_P Parameter: Plant Line Value: WS
  misc_feature: MA Experiment 20001557 PARAMETER Experiment Name: At_Drought_Soil_Dry_P Parameter: Post Timepoint (hr) Value: 3
  misc_feature: MA Experiment 20001557 PARAMETER Experiment Name: At_Drought_Soil_Dry_P Parameter: Post-Treatment Value: Re-Water vs. No Drought
  misc_feature: MA Experiment 20001557 PARAMETER Experiment Name: At_Drought_Soil_Dry_P Parameter: Timepoint (day) Value: 13
  misc_feature: MA Experiment 20001557 PARAMETER Experiment Name: At_Drought_Soil_Dry_P Parameter: Treatment Value: Drought vs. No Drought
  misc_feature: MA Experiment ID: 20001558 Result: Up-regulated in Transcription
  misc_feature: MA Experiment 20001558 PARAMETER Experiment Name: At_Drought_Soil_Dry_P Parameter: Age (day) Value: 27
  misc_feature: MA Experiment 20001558 PARAMETER Experiment Name: At_Drought_Soil_Dry_P Parameter: Organism Value: A. thaliana
  misc_feature: MA Experiment 20001558 PARAMETER Experiment Name: At_Drought_Soil_Dry_P Parameter: Plant Line Value: WS
  misc_feature: MA Experiment 20001558 PARAMETER Experiment Name: At_Drought_Soil_Dry_P Parameter: Post Timepoint (hr) Value: 6
  misc_feature: MA Experiment 20001558 PARAMETER Experiment Name: At_Drought_Soil_Dry_P Parameter: Post-Treatment Value: Re-Water vs. No Drought
  misc_feature: MA Experiment 20001558 PARAMETER Experiment Name: At_Drought_Soil_Dry_P Parameter: Timepoint (day) Value: 13
  misc_feature: MA Experiment 20001558 PARAMETER Experiment Name: At_Drought_Soil_Dry_P Parameter: Treatment Value: Drought vs. No Drought
  misc_feature: MA Experiment ID: 20001905 Result: Up-regulated in Transcription
  misc_feature: MA Experiment 20001905 PARAMETER Experiment Name: At_Drought_Reproduction_P Parameter: Age (day) Value: 40
  misc_feature: MA Experiment 20001905 PARAMETER Experiment Name: At_Drought_Reproduction_P Parameter: Organism Value: A. thaliana
  misc_feature: MA Experiment 20001905 PARAMETER Experiment Name: At_Drought_Reproduction_P Parameter: Plant Line Value: WS
  misc_feature: MA Experiment 20001905 PARAMETER Experiment Name: At_Drought_Reproduction_P Parameter: Timepoint (day) Value: 10
  misc_feature: MA Experiment 20001905 PARAMETER Experiment Name: At_Drought_Reproduction_P Parameter: Tissue Value: Rosettes
  misc_feature: MA Experiment 20001905 PARAMETER Experiment Name: At_Drought_Reproduction_P Parameter: Treatment Value: Drought vs. No Drought
aactaaaaataaatgtttggaaacgttaggcaattttattatattctatcgttgttctctataaatgaagtctcgaccacacacttggtagctacacacgagaaagaaaaagctcacaactttaacctttctggagagagaagaacaaaagagggagagggagagaaatggaaggcaaagaagaagatgtacgagtgggagctaacaagttcccggagaggcaacccatcggtacatcggctcagtccaccgacaaggactacaaagagccacctcctgcgccactgttcgagcccggcgagctcagctcatggtctttctacagagccggaatagctgagtttatcgctactttcttgtttctctacatcactgttttgactgtaatgggagttaagagagcaccaaacatgtgtgcttctgttggaatccaaggtatcgcttgggcttttggtggcatgatctttgctcttgtctactgtactgctggaatttcaggtggacacatcaaccctgctgtaacattcggtctgttcttggctcggaagttatctctgaccagagcagtgttctacatgattatgcaatgtcttggagccatctgtggtgccggagtcgtcaaaggtttccagccaacgccgtaccagactctcggtggtggtgctaacaccgttgctcatggctacaccaaaggttctggccttggtgctgaaatcatcggaacattcgttctcgtctacactgtcttctccgccaccgacgccaagagaagcgcccgtgactcacacgtcccgattttggcgccgctcccaatcggatttgcagtgttcttggtacacttggcaacaataccgatcaccgggaccggaatcaacccagctagaagtcttggagccgcaattatctacaacaaggaccactcttgggatgaccattggattttctgggttggaccattcattggagcagctctagcagcactatatcaccagattgtcatcagagcgattcctttcaagagcaagagttagagacacacagaaagattccacggtccagaatttgttctttagtagtttctttgcttatctatctaatgtagcttgtgttttgcaatgtaatgagcctttcaagaatatgtatttgggatttctaatcagcttttgtctatgtaaaaactatgtgtttcttttttcttcctatactcgtctcagatgctttatggcaaagggtctctgaagtctaaggtgattagtgctccggttattgatgttttgaatagtttgttcgacgaatataaaataaacatagtcaaccctcattctgtatcaacatcaagttctcgggttggttttgagagacatgattatgaagatgatcatgacttcgtgaatgtgggggttgaaggattggcctctgtttatgacaagatggtgaatgaagagcttgactattgtgtacttgcaagaaagtgttgaaaacacaagggccaatacat

SEQ ID NO: 41696 - protein, 287 aa, Arabidopsis thaliana; identical to SEQ ID NO: 29005
  peptide (1)..(287): Ceres Seq. ID no. 13646294
  misc_feature (45)..(274): Pfam Name: Major intrinsic protein Pfam Description: Major intrinsic protein
  misc_feature (45)..(274): Pfam Name: Major intrinsic protein Pfam Description: Major intrinsic protein
  misc_feature (1)..(287): Homolog of NCBI NO: 10799095 NR Description: aquaporin PIP1b2 [Brassica oleracea]
  misc_feature (1)..(287): Homolog of NCBI NO: 15236485 NR Description: major intrinsic protein (MIP) family [Arabidopsis
  misc_feature (1)..(287): Homolog of NCBI NO: 3551131 NR Description: plasma membrane aquaporin (PAQ1) [Raphanus
  misc_feature (1)..(287): Homolog of NCBI NO: 15233109 NR Description: plasma membrane intrinsic protein 1A [Arabidopsis
  misc_feature (1)..(287): Homolog of NCBI NO: 472875 NR Description: plasma membrane intrinsic protein 1c [Arabidopsis
  misc_feature (1)..(287): Homolog of NCBI NO: 10799095 NR Description: aquaporin PIP1b2 [Brassica oleracea]
  misc_feature (1)..(287): Homolog of NCBI NO: 3551131 NR Description: plasma membrane aquaporin (PAQ1) [Raphanus
  misc_feature (1)..(287): Homolog of NCBI NO: 472875 NR Description: plasma membrane intrinsic protein 1c [Arabidopsis
  misc_feature (1)..(287): Homolog of NCBI NO: 18411332 NR Description: transmembrane protein (MIP family) [Arabidopsis
  misc_feature (1)..(287): Homolog of NCBI NO: 7441247 NR Description: probable plasma membrane intrinsic protein 1c -
  misc_feature (1)..(287): Homolog of NCBI NO: 2373401 NR Description: transmembrane protein [Arabidopsis thaliana]
  misc_feature (1)..(287): Homolog of NCBI NO: 15223438 NR Description: plasma membrane intrinsic protein 1c [Arabidopsis
  misc_feature (1)..(287): Homolog of NCBI NO: 17065068 NR Description: plasma membrane intrinsic protein 1C
  misc_feature (1)..(287): Homolog of NCBI NO: 15233109 NR Description: plasma membrane intrinsic protein 1A [Arabidopsis
  misc_feature (1)..(287): Homolog of NCBI NO: 15236485 NR Description: major intrinsic protein (MIP) family [Arabidopsis
  misc_feature (1)..(287): Homolog of NCBI NO: 17065068 NR Description: plasma membrane intrinsic protein 1C
  misc_feature (1)..(287): Homolog of NCBI NO: 15223438 NR Description: plasma membrane intrinsic protein 1c [Arabidopsis
  misc_feature (1)..(287): Homolog of NCBI NO: 2373401 NR Description: transmembrane protein [Arabidopsis thaliana]
  misc_feature (1)..(287): Homolog of NCBI NO: 7441247 NR Description: probable plasma membrane intrinsic protein 1c -
  misc_feature (1)..(287): Homolog of NCBI NO: 18411332 NR Description: transmembrane protein (MIP family) [Arabidopsis

SEQ ID NO: 41697 - protein, 214 aa, Arabidopsis thaliana; identical to SEQ ID NO: 29006
  peptide (1)..(214): Ceres Seq. ID no. 13646295
  misc_feature (1)..(201): Pfam Name: Major intrinsic protein Pfam Description: Major intrinsic protein
  misc_feature (1)..(201): Pfam Name: Major intrinsic protein Pfam Description: Major intrinsic protein
  misc_feature (1)..(214): Homolog of NCBI NO: 10799095 NR Description: aquaporin PIP1b2 [Brassica oleracea]
  misc_feature (1)..(214): Homolog of NCBI NO: 15236485 NR Description: major intrinsic protein (MIP) family [Arabidopsis
  misc_feature (1)..(214): Homolog of NCBI NO: 3551131 NR Description: plasma membrane aquaporin (PAQ1) [Raphanus
  misc_feature (1)..(214): Homolog of NCBI NO: 15233109 NR Description: plasma membrane intrinsic protein 1A [Arabidopsis
  misc_feature (1)..(214): Homolog of NCBI NO: 472875 NR Description: plasma membrane intrinsic protein 1c [Arabidopsis
  misc_feature (1)..(214): Homolog of NCBI NO: 10799095 NR Description: aquaporin PIP1b2 [Brassica oleracea]
  misc_feature (1)..(214): Homolog of NCBI NO: 3551131 NR Description: plasma membrane aquaporin (PAQ1) [Raphanus
  misc_feature (1)..(214): Homolog of NCBI NO: 472875 NR Description: plasma membrane intrinsic protein 1c [Arabidopsis
  misc_feature (1)..(214): Homolog of NCBI NO: 18411332 NR Description: transmembrane protein (MIP family) [Arabidopsis
  misc_feature (1)..(214): Homolog of NCBI NO: 7441247 NR Description: probable plasma membrane intrinsic protein 1c -
  misc_feature (1)..(214): Homolog of NCBI NO: 2373401 NR Description: transmembrane protein [Arabidopsis thaliana]
  misc_feature (1)..(214): Homolog of NCBI NO: 15223438 NR Description: plasma membrane intrinsic protein 1c [Arabidopsis
  misc_feature (1)..(214): Homolog of NCBI NO: 17065068 NR Description: plasma membrane intrinsic protein 1C
  misc_feature (1)..(214): Homolog of NCBI NO: 15233109 NR Description: plasma membrane intrinsic protein 1A [Arabidopsis
  misc_feature (1)..(214): Homolog of NCBI NO: 15236485 NR Description: major intrinsic protein (MIP) family [Arabidopsis
  misc_feature (1)..(214): Homolog of NCBI NO: 17065068 NR Description: plasma membrane intrinsic protein 1C
  misc_feature (1)..(214): Homolog of NCBI NO: 15223438 NR Description: plasma membrane intrinsic protein 1c [Arabidopsis
  misc_feature (1)..(214): Homolog of NCBI NO: 2373401 NR Description: transmembrane protein [Arabidopsis thaliana]
  misc_feature (1)..(214): Homolog of NCBI NO: 7441247 NR Description: probable plasma membrane intrinsic protein 1c -
  misc_feature (1)..(214): Homolog of NCBI NO: 18411332 NR Description: transmembrane protein (MIP family) [Arabidopsis

SEQ ID NO: 41698 - protein, 206 aa, Arabidopsis thaliana; identical to SEQ ID NO: 29007
  peptide (1)..(206): Ceres Seq. ID no. 13646296
  misc_feature (1)..(193): Pfam Name: Major intrinsic protein Pfam Description: Major intrinsic protein
  misc_feature (1)..(193): Pfam Name: Major intrinsic protein Pfam Description: Major intrinsic protein
  misc_feature (1)..(206): Homolog of NCBI NO: 10799095 NR Description: aquaporin PIP1b2 [Brassica oleracea]
  misc_feature (1)..(206): Homolog of NCBI NO: 15236485 NR Description: major intrinsic protein (MIP) family [Arabidopsis
  misc_feature (1)..(206): Homolog of NCBI NO: 3551131 NR Description: plasma membrane aquaporin (PAQ1) [Raphanus
  misc_feature (1)..(206): Homolog of NCBI NO: 15233109 NR Description: plasma membrane intrinsic protein 1A [Arabidopsis
  misc_feature (1)..(206): Homolog of NCBI NO: 472875 NR Description: plasma membrane intrinsic protein 1c [Arabidopsis
  misc_feature (1)..(206): Homolog of NCBI NO: 10799095 NR Description: aquaporin PIP1b2 [Brassica oleracea]
  misc_feature (1)..(206): Homolog of NCBI NO: 3551131 NR Description: plasma membrane aquaporin (PAQ1) [Raphanus
  misc_feature (1)..(206): Homolog of NCBI NO: 472875 NR Description: plasma membrane intrinsic protein 1c [Arabidopsis
  misc_feature (1)..(206): Homolog of NCBI NO: 18411332 NR Description: transmembrane protein (MIP family) [Arabidopsis
  misc_feature (1)..(206): Homolog of NCBI NO: 7441247 NR Description: probable plasma membrane intrinsic protein 1c -
  misc_feature (1)..(206): Homolog of NCBI NO: 2373401 NR Description: transmembrane protein [Arabidopsis thaliana]
  misc_feature (1)..(206): Homolog of NCBI NO: 15223438 NR Description: plasma membrane intrinsic protein 1c [Arabidopsis
  misc_feature (1)..(206): Homolog of NCBI NO: 17065068 NR Description: plasma membrane intrinsic protein 1C
  misc_feature (1)..(206): Homolog of NCBI NO: 15233109 NR Description: plasma membrane intrinsic protein 1A [Arabidopsis
  misc_feature (1)..(206): Homolog of NCBI NO: 15236485 NR Description: major intrinsic protein (MIP) family [Arabidopsis
  misc_feature (1)..(206): Homolog of NCBI NO: 17065068 NR Description: plasma membrane intrinsic protein 1C
  misc_feature (1)..(206): Homolog of NCBI NO: 15223438 NR Description: plasma membrane intrinsic protein 1c [Arabidopsis
  misc_feature (1)..(206): Homolog of NCBI NO: 2373401 NR Description: transmembrane protein [Arabidopsis thaliana]
  misc_feature (1)..(206): Homolog of NCBI NO: 7441247 NR Description: probable plasma membrane intrinsic protein 1c -
  misc_feature (1)..(206): Homolog of NCBI NO: 18411332 NR Description: transmembrane protein (MIP family) [Arabidopsis

SEQ ID NO: 41699 - DNA, 1295 bp, Arabidopsis thaliana
  misc_feature (1)..(1295): Ceres Seq. ID no. 12330892
  misc_feature: MA Experiment ID: 20000182 Result: Down-regulated in Transcription
  misc_feature: MA Experiment 20000182 PARAMETER Experiment Name: At_2mM_SA_P Parameter: Age (day) Value: 14
  misc_feature: MA Experiment 20000182 PARAMETER Experiment Name: At_2mM_SA_P Parameter: Organism Value: A. thaliana
  misc_feature: MA Experiment 20000182 PARAMETER Experiment Name: At_2mM_SA_P Parameter: Plant Line Value: WS
  misc_feature: MA Experiment 20000182 PARAMETER Experiment Name: At_2mM_SA_P Parameter: Timepoint (hr) Value: 6
  misc_feature: MA Experiment 20000182 PARAMETER Experiment Name: At_2mM_SA_P Parameter: Tissue Value: Aerial
  misc_feature: MA Experiment 20000182 PARAMETER Experiment Name: At_2mM_SA_P Parameter: Treatment Value: 2mM SA vs. No Treatment
  misc_feature: MA Experiment ID: 20000184 Result: Down-regulated in Transcription
  misc_feature: MA Experiment 20000184 PARAMETER Experiment Name: At_Shoots__P Parameter: Age (day) Value: 7
  misc_feature: MA Experiment 20000184 PARAMETER Experiment Name: At_Shoots__P Parameter: Tissue Value: Shoots vs. Whole Plant
  misc_feature: MA Experiment ID: 20000234 Result: Up-regulated in Transcription
  misc_feature: MA Experiment 20000234 PARAMETER Experiment Name: At_Siliques_P Parameter: Age (day) Value: 21
  misc_feature: MA Experiment 20000234 PARAMETER Experiment Name: At_Siliques_P Parameter: Organism Value: A. thaliana
  misc_feature: MA Experiment 20000234 PARAMETER Experiment Name: At_Siliques_P Parameter: Plant Line Value: WS
  misc_feature: MA Experiment 20000234 PARAMETER Experiment Name: At_Siliques_P Parameter: Tissue Value: Less Than 5mm Siliques vs. Whole Plant
  misc_feature: MA Experiment ID: 20000235 Result: Up-regulated in Transcription
  misc_feature: MA Experiment 20000235 PARAMETER Experiment Name: At_Siliques_P Parameter: Age (day) Value: 21
  misc_feature: MA Experiment 20000235 PARAMETER Experiment Name: At_Siliques_P Parameter: Organism Value: A. thaliana
  misc_feature: MA Experiment 20000235 PARAMETER Experiment Name: At_Siliques_P Parameter: Plant Line Value: WS
  misc_feature: MA Experiment 20000235 PARAMETER Experiment Name: At_Siliques_P Parameter: Tissue Value: 5-10mm Siliques vs. Whole Plant
  misc_feature: MA Experiment ID: 20000264 Result: Up-regulated in Transcription
  misc_feature: MA Experiment 20000264 PARAMETER Experiment Name: At_Open_Flower_P Parameter: Age (day) Value: 21
  misc_feature: MA Experiment 20000264 PARAMETER Experiment Name: At_Open_Flower_P Parameter: Plant Line Value: WS
  misc_feature: MA Experiment 20000264 PARAMETER Experiment Name: At_Open_Flower_P Parameter: Tissue Value: Open Flower vs. Whole Plant
  misc_feature: MA Experiment ID: 20000267 Result: Up-regulated in Transcription
  misc_feature: MA Experiment 20000267 PARAMETER Experiment Name: At_Drought_P Parameter: Age (day) Value: 7
  misc_feature: MA Experiment 20000267 PARAMETER Experiment Name: At_Drought_P Parameter: Organism Value: A. thaliana
  misc_feature: MA Experiment 20000267 PARAMETER Experiment Name: At_Drought_P Parameter: Plant Line Value: WS
  misc_feature: MA Experiment 20000267 PARAMETER Experiment Name: At_Drought_P Parameter: Timepoint (hr) Value: 6
  misc_feature: MA Experiment 20000267 PARAMETER Experiment Name: At_Drought_P Parameter: Tissue Value: Whole Plant
  misc_feature: MA Experiment 20000267 PARAMETER Experiment Name: At_Drought_P Parameter: Treatment Value: Drought vs. No Drought
  misc_feature: MA Experiment ID: 20000268 Result: Up-regulated in Transcription
  misc_feature: MA Experiment 20000268 PARAMETER Experiment Name: At_100mM_NaCl__P Parameter: Age (day) Value: 14
  misc_feature: MA Experiment 20000268 PARAMETER Experiment Name: At_100mM_NaCl__P Parameter: Organism Value: A. thaliana
  misc_feature: MA Experiment 20000268 PARAMETER Experiment Name: At_100mM_NaCl__P Parameter: Plant Line Value: WS
  misc_feature: MA Experiment 20000268 PARAMETER Experiment Name: At_100mM_NaCl__P Parameter: Timepoint (hr) Value: 6
  misc_feature: MA Experiment 20000268 PARAMETER Experiment Name: At_100mM_NaCl__P Parameter: Tissue Value: Whole Plant
  misc_feature: MA Experiment 20000268 PARAMETER Experiment Name: At_100mM_NaCl__P Parameter: Treatment Value: 100mM NaCl vs. No Treatment
  misc_feature: MA Experiment ID: 20000308 Result: Up-regulated in Transcription
  misc_feature: MA Experiment 20000308 PARAMETER Experiment Name: At_100mM_NaCl__P Parameter: Age (day) Value: 17
  misc_feature: MA Experiment 20000308 PARAMETER Experiment Name: At_100mM_NaCl__P Parameter: Organism Value: A. thaliana
  misc_feature: MA Experiment 20000308 PARAMETER Experiment Name: At_100mM_NaCl__P Parameter: Plant Line Value: WS
  misc_feature: MA Experiment 20000308 PARAMETER Experiment Name: At_100mM_NaCl__P Parameter: Timepoint (hr) Value: 72
  misc_feature: MA Experiment 20000308 PARAMETER Experiment Name: At_100mM_NaCl__P Parameter: Tissue Value: Whole Plant
  misc_feature: MA Experiment 20000308 PARAMETER Experiment Name: At_100mM_NaCl__P Parameter: Treatment Value: 100mM NaCl vs. No Treatment
  misc_feature: MA Experiment ID: 20000436 Result: Up-regulated in Transcription
  misc_feature: MA Experiment 20000436 PARAMETER Experiment Name: At_Drought_P Parameter: Age (day) Value: 7
  misc_feature: MA Experiment 20000436 PARAMETER Experiment Name: At_Drought_P Parameter: Organism Value: A. thaliana
  misc_feature: MA Experiment 20000436 PARAMETER Experiment Name: At_Drought_P Parameter: Plant Line Value: WS
  misc_feature: MA Experiment 20000436 PARAMETER Experiment Name: At_Drought_P Parameter: Timepoint (hr) Value: 12
  misc_feature: MA Experiment 20000436 PARAMETER Experiment Name: At_Drought_P Parameter: Tissue Value: Whole Plant
  misc_feature: MA Experiment 20000436 PARAMETER Experiment Name: At_Drought_P Parameter: Treatment Value: Drought vs. No Drought
  misc_feature: MA Experiment ID: 20000437 Result: Up-regulated in Transcription
  misc_feature: MA Experiment 20000437 PARAMETER Experiment Name: At_Drought_P Parameter: Age (day) Value: 8
  misc_feature: MA Experiment 20000437 PARAMETER Experiment Name: At_Drought_P Parameter: Organism Value: A. thaliana
  misc_feature: MA Experiment 20000437 PARAMETER Experiment Name: At_Drought_P Parameter: Plant Line Value: WS
  misc_feature: MA Experiment 20000437 PARAMETER Experiment Name: At_Drought_P Parameter: Timepoint (hr) Value: 24
  misc_feature: MA Experiment 20000437 PARAMETER Experiment Name: At_Drought_P Parameter: Tissue Value: Whole Plant
  misc_feature: MA Experiment 20000437 PARAMETER Experiment Name: At_Drought_P Parameter: Treatment Value: Drought vs. No Drought
  misc_feature: MA Experiment ID: 20000438 Result: Down-regulated in Transcription
  misc_feature: MA Experiment 20000438 PARAMETER Experiment Name: At_Shoots__P Parameter: Age (day) Value: 14
  misc_feature: MA Experiment 20000438 PARAMETER Experiment Name: At_Shoots__P Parameter: Tissue Value: Shoots vs. Whole Plant
  misc_feature: MA Experiment ID: 20000441 Result: Up-regulated in Transcription
  misc_feature: MA Experiment 20000441 PARAMETER Experiment Name: At_1uM_BR-BRZ__P Parameter: Tissue Value: Shoot Apices
  misc_feature: MA Experiment 20000441 PARAMETER Experiment Name: At_1uM_BR-BRZ__P Parameter: Treatment Value: 1uM BR vs. No Treatment
  misc_feature: MA Experiment ID: 20000443 Result: Up-regulated in Transcription
  misc_feature: MA Experiment 20000443 PARAMETER Experiment Name: At_1uM_BR-BRZ__P Parameter: Tissue Value: Shoot Apices
  misc_feature: MA Experiment 20000443 PARAMETER Experiment Name: At_1uM_BR-BRZ__P Parameter: Treatment Value: 1uM BRZ vs. No Treatment
  misc_feature: MA Experiment ID: 20000453 Result: Up-regulated in Transcription
  misc_feature: MA Experiment 20000453 PARAMETER Experiment Name: At_100uM_ABA_P Parameter: Age (day) Value: 15
  misc_feature: MA Experiment 20000453 PARAMETER Experiment Name: At_100uM_ABA_P Parameter: Organism Value: A. thaliana
  misc_feature: MA Experiment 20000453 PARAMETER Experiment Name: At_100uM_ABA_P Parameter: Plant Line Value: WS
  misc_feature: MA Experiment 20000453 PARAMETER Experiment Name: At_100uM_ABA_P Parameter: Timepoint (hr) Value: 24
  misc_feature: MA Experiment 20000453 PARAMETER Experiment Name: At_100uM_ABA_P Parameter: Tissue Value: Aerial
  misc_feature: MA Experiment 20000453 PARAMETER Experiment Name: At_100uM_ABA_P Parameter: Treatment Value: 100uM ABA vs. No Treatment
  misc_feature: MA Experiment ID: 20000495 Result: Up-regulated in Transcription
  misc_feature: MA Experiment 20000495 PARAMETER Experiment Name: At_Guard_Cells_P Parameter: Harvest Date Value: 8/2/2002
  misc_feature: MA Experiment 20000495 PARAMETER Experiment Name: At_Guard_Cells_P Parameter: Organism Value: A. thaliana
  misc_feature: MA Experiment 20000495 PARAMETER Experiment Name: At_Guard_Cells_P Parameter: Tissue Value: Guard Cells vs. Leaves
  misc_feature: MA Experiment ID: 20000794 Result: Up-regulated in Transcription
  misc_feature: MA Experiment 20000794 PARAMETER Experiment Name: At_Petals_P Parameter: Age (day) Value: 23-25 days
  misc_feature: MA Experiment 20000794 PARAMETER Experiment Name: At_Petals_P Parameter: Plant Line Value: WS
  misc_feature: MA Experiment 20000794 PARAMETER Experiment Name: At_Petals_P Parameter: Tissue Value: Petals vs. Whole plant
  misc_feature: MA Experiment ID: 20001504 Result: Up-regulated in Transcription
  misc_feature: MA Experiment 20001504 PARAMETER Experiment Name: At_Far-red-enriched_P Parameter: Age (day) Value: 10
  misc_feature: MA Experiment 20001504 PARAMETER Experiment Name: At_Far-red-enriched_P Parameter: Light Value: Far-red enriched vs. White
  misc_feature: MA Experiment 20001504 PARAMETER Experiment Name: At_Far-red-enriched_P Parameter: Organism Value: A. thaliana
  misc_feature: MA Experiment 20001504 PARAMETER Experiment Name: At_Far-red-enriched_P Parameter: Plant Line Value: Columbia
  misc_feature: MA Experiment 20001504 PARAMETER Experiment Name: At_Far-red-enriched_P Parameter: Timepoint (day) Value: 6
  misc_feature: MA Experiment 20001504 PARAMETER Experiment Name: At_Far-red-enriched_P Parameter: Tissue Value: Whole Plant
  misc_feature: MA Experiment ID: 20001554 Result: Up-regulated in Transcription
  misc_feature: MA Experiment 20001554 PARAMETER Experiment Name: At_Drought_Soil_Dry_P Parameter: Age (day) Value: 21
  misc_feature: MA Experiment 20001554 PARAMETER Experiment Name: At_Drought_Soil_Dry_P Parameter: Organism Value: A. thaliana
  misc_feature: MA Experiment 20001554 PARAMETER Experiment Name: At_Drought_Soil_Dry_P Parameter: Plant Line Value: WS
  misc_feature: MA Experiment 20001554 PARAMETER Experiment Name: At_Drought_Soil_Dry_P Parameter: Post Timepoint (hr) Value: None
  misc_feature: MA Experiment 20001554 PARAMETER Experiment Name: At_Drought_Soil_Dry_P Parameter: Post-Treatment Value: None
  misc_feature: MA Experiment 20001554 PARAMETER Experiment Name: At_Drought_Soil_Dry_P Parameter: Timepoint (day) Value: 7
  misc_feature: MA Experiment 20001554 PARAMETER Experiment Name: At_Drought_Soil_Dry_P Parameter: Treatment Value: Drought vs. No Drought
  misc_feature: MA Experiment ID: 20001555 Result: Up-regulated in Transcription
  misc_feature: MA Experiment 20001555 PARAMETER Experiment Name: At_Drought_Soil_Dry_P Parameter: Age (day) Value: 24
  misc_feature: MA Experiment 20001555 PARAMETER Experiment Name: At_Drought_Soil_Dry_P Parameter: Organism Value: A. thaliana
  misc_feature: MA Experiment 20001555 PARAMETER Experiment Name: At_Drought_Soil_Dry_P Parameter: Plant Line Value: WS
  misc_feature: MA Experiment 20001555 PARAMETER Experiment Name: At_Drought_Soil_Dry_P Parameter: Post Timepoint (hr) Value: None
  misc_feature: MA Experiment 20001555 PARAMETER Experiment Name: At_Drought_Soil_Dry_P Parameter: Post-Treatment Value: None
  misc_feature: MA Experiment 20001555 PARAMETER Experiment Name: At_Drought_Soil_Dry_P Parameter: Timepoint (day) Value: 10
  misc_feature: MA Experiment 20001555 PARAMETER Experiment Name: At_Drought_Soil_Dry_P Parameter: Treatment Value: Drought vs. No Drought
  misc_feature: MA Experiment ID: 20001556 Result: Up-regulated in Transcription
  misc_feature: MA Experiment 20001556 PARAMETER Experiment Name: At_Drought_Soil_Dry_P Parameter: Age (day) Value: 26
  misc_feature: MA Experiment 20001556 PARAMETER Experiment Name: At_Drought_Soil_Dry_P Parameter: Organism Value: A. thaliana
  misc_feature: MA Experiment 20001556 PARAMETER Experiment Name: At_Drought_Soil_Dry_P Parameter: Plant Line Value: WS
  misc_feature: MA Experiment 20001556 PARAMETER Experiment Name: At_Drought_Soil_Dry_P Parameter: Post Timepoint (hr) Value: None
  misc_feature: MA Experiment 20001556 PARAMETER Experiment Name: At_Drought_Soil_Dry_P Parameter: Post-Treatment Value: None
  misc_feature: MA Experiment 20001556 PARAMETER Experiment Name: At_Drought_Soil_Dry_P Parameter: Timepoint (day) Value: 12
  misc_feature: MA Experiment 20001556 PARAMETER Experiment Name: At_Drought_Soil_Dry_P Parameter: Treatment Value: Drought vs. No Drought
  misc_feature: MA Experiment ID: 20001560 Result: Up-regulated in Transcription
  misc_feature: MA Experiment 20001560 PARAMETER Experiment Name: At_Drought_Soil_Dry_P Parameter: Age (day) Value: 28
  misc_feature: MA Experiment 20001560 PARAMETER Experiment Name: At_Drought_Soil_Dry_P Parameter: Organism Value: A. thaliana
  misc_feature: MA Experiment 20001560 PARAMETER Experiment Name: At_Drought_Soil_Dry_P Parameter: Plant Line Value: WS
  misc_feature: MA Experiment 20001560 PARAMETER Experiment Name: At_Drought_Soil_Dry_P Parameter: Post Timepoint (hr) Value: None
  misc_feature: MA Experiment 20001560 PARAMETER Experiment Name: At_Drought_Soil_Dry_P Parameter: Post-Treatment Value: None
  misc_feature: MA Experiment 20001560 PARAMETER Experiment Name: At_Drought_Soil_Dry_P Parameter: Timepoint (day) Value: 14
  misc_feature: MA Experiment 20001560 PARAMETER Experiment Name: At_Drought_Soil_Dry_P Parameter: Treatment Value: Drought vs. No Drought
  misc_feature: MA Experiment ID: 20001757 Result: Down-regulated in Transcription
  misc_feature: MA Experiment 20001757 PARAMETER Experiment Name: At_50mM_NH4NO3_L-to-H_P Parameter: Timepoint (hr) Value: 6
  misc_feature: MA Experiment 20001757 PARAMETER Experiment Name: At_50mM_NH4NO3_L-to-H_P Parameter: Tissue Value: Leaf
  misc_feature: MA Experiment 20001757 PARAMETER Experiment Name: At_50mM_NH4NO3_L-to-H_P Parameter: Treatment Value: 50mM NH4NO3 vs 100mM Mannitol
  misc_feature: MA Experiment ID: 20001770 Result: Up-regulated in Transcription
  misc_feature: MA Experiment 20001770 PARAMETER Experiment Name: At_Far-red-enriched-adult_P Parameter: Age (day) Value: 28
  misc_feature: MA Experiment 20001770 PARAMETER Experiment Name: At_Far-red-enriched-adult_P Parameter: Light Value: Far-red enriched vs. White
  misc_feature: MA Experiment 20001770 PARAMETER Experiment Name: At_Far-red-enriched-adult_P Parameter: Organism Value: A. thaliana
  misc_feature: MA Experiment 20001770 PARAMETER Experiment Name: At_Far-red-enriched-adult_P Parameter: Plant Line Value: Columbia
  misc_feature: MA Experiment 20001770 PARAMETER Experiment Name: At_Far-red-enriched-adult_P Parameter: Timepoint (hr) Value: 8
  misc_feature: MA Experiment 20001770 PARAMETER Experiment Name: At_Far-red-enriched-adult_P Parameter: Tissue Value: Aerial
  misc_feature: MA Experiment ID: 20001904 Result: Up-regulated in Transcription
  misc_feature: MA Experiment 20001904 PARAMETER Experiment Name: At_Drought_Reproduction_P Parameter: Age (day) Value: 37
  misc_feature: MA Experiment 20001904 PARAMETER Experiment Name: At_Drought_Reproduction_P Parameter: Organism Value: A. thaliana
  misc_feature: MA Experiment 20001904 PARAMETER Experiment Name: At_Drought_Reproduction_P Parameter: Plant Line Value: WS
  misc_feature: MA Experiment 20001904 PARAMETER Experiment Name: At_Drought_Reproduction_P Parameter: Timepoint (day) Value: 7
  misc_feature: MA Experiment 20001904 PARAMETER Experiment Name: At_Drought_Reproduction_P Parameter: Tissue Value: Rosettes
  misc_feature: MA Experiment 20001904 PARAMETER Experiment Name: At_Drought_Reproduction_P Parameter: Treatment Value: Drought vs. No Drought
  misc_feature: MA Experiment ID: 20001906 Result: Up-regulated in Transcription
  misc_feature: MA Experiment 20001906 PARAMETER Experiment Name: At_Drought_Reproduction_P Parameter: Age (day) Value: 35
  misc_feature: MA Experiment 20001906 PARAMETER Experiment Name: At_Drought_Reproduction_P Parameter: Organism Value: A. thaliana
  misc_feature: MA Experiment 20001906 PARAMETER Experiment Name: At_Drought_Reproduction_P Parameter: Plant Line Value: WS
  misc_feature: MA Experiment 20001906 PARAMETER Experiment Name: At_Drought_Reproduction_P Parameter: Timepoint (day) Value: 5
  misc_feature: MA Experiment 20001906 PARAMETER Experiment Name: At_Drought_Reproduction_P Parameter: Tissue Value: Siliques
  misc_feature: MA Experiment 20001906 PARAMETER Experiment Name: At_Drought_Reproduction_P Parameter: Treatment Value: Drought vs. No Drought
  misc_feature: MA Experiment ID: 20001908 Result: Up-regulated in Transcription
  misc_feature: MA Experiment 20001908 PARAMETER Experiment Name: At_Drought_Reproduction_P Parameter: Age (day) Value: 40
  misc_feature: MA Experiment 20001908 PARAMETER Experiment Name: At_Drought_Reproduction_P Parameter: Organism Value: A. thaliana
  misc_feature: MA Experiment 20001908 PARAMETER Experiment Name: At_Drought_Reproduction_P Parameter: Plant Line Value: WS
  misc_feature: MA Experiment 20001908 PARAMETER Experiment Name: At_Drought_Reproduction_P Parameter: Timepoint (day) Value: 10
  misc_feature: MA Experiment 20001908 PARAMETER Experiment Name: At_Drought_Reproduction_P Parameter: Tissue Value: Siliques
  misc_feature: MA Experiment 20001908 PARAMETER Experiment Name: At_Drought_Reproduction_P Parameter: Treatment Value: Drought vs. No Drought
  misc_feature: MA Experiment ID: 20001910 Result: Up-regulated in Transcription
  misc_feature: MA Experiment 20001910 PARAMETER Experiment Name: At_Drought_Reproduction_P Parameter: Age (day) Value: 37
  misc_feature: MA Experiment 20001910 PARAMETER Experiment Name: At_Drought_Reproduction_P Parameter: Organism Value: A. thaliana
  misc_feature: MA Experiment 20001910 PARAMETER Experiment Name: At_Drought_Reproduction_P Parameter: Plant Line Value: WS
  misc_feature: MA Experiment 20001910 PARAMETER Experiment Name: At_Drought_Reproduction_P Parameter: Timepoint (day) Value: 7
  misc_feature: MA Experiment 20001910 PARAMETER Experiment Name: At_Drought_Reproduction_P Parameter: Tissue Value: Flowers
  misc_feature: MA Experiment 20001910 PARAMETER Experiment Name: At_Drought_Reproduction_P Parameter: Treatment Value: Drought vs. No Drought
  misc_feature: MA Experiment ID: 20001911 Result: Up-regulated in Transcription
  misc_feature: MA Experiment 20001911 PARAMETER Experiment Name: At_Drought_Reproduction_P Parameter: Age (day) Value: 40
  misc_feature: MA Experiment 20001911 PARAMETER Experiment Name: At_Drought_Reproduction_P Parameter: Organism Value: A. thaliana
  misc_feature: MA Experiment 20001911 PARAMETER Experiment Name: At_Drought_Reproduction_P Parameter: Plant Line Value: WS
  misc_feature: MA Experiment 20001911 PARAMETER Experiment Name: At_Drought_Reproduction_P Parameter: Timepoint (day) Value: 10
  misc_feature: MA Experiment 20001911 PARAMETER Experiment Name: At_Drought_Reproduction_P Parameter: Tissue Value: Flowers
  misc_feature: MA Experiment 20001911 PARAMETER Experiment Name: At_Drought_Reproduction_P Parameter: Treatment Value: Drought vs. No Drought
acaagcatctctccctcatattcacctaaaaatcaggtcccctctctttatttctctctcattcttatatcagatcaaaattttcggatttcttgttaagtaacaccaatcttttaaaagtgttttcaggttaataaaaaagaataatgatgttttcggtgacggttgcgatccttgtttgtcttattggctacatttaccgatcatttaagcctccaccaccgcgaatctgcggccatcctaacggtcctccggttacttctccgagaatcaagctcagtgatggaagatatcttgcttatagagaatctggggttgatagagacaatgctaactacaagatcattgtcgttcatggcttcaacagctccaaagacactgaatttcccatccctaaggatgtaattgaggagcttgggatatactttgtgttctacgatagagcaggatatggagaaagtgatccacacccatcacgcactgttaagagtgaagcatacgacattcaagaactcgccgataaactcaagatcggaccaaagttctatgttcttggtatatcactaggtgcttactcggtttatagttgcctcaaatacattccccacagactagctggagcagtcttaatggttccatttgtgaactattggtggactaaagtgcctcaagaaaaattgagtaaagcgttggagctaatgccaaagaaagaccaatggacgtttaaagtggctcattatgttccgtggttgttatattggtggttgacccaaaaactatttccgtcttcgagtatggtcacggggaacaatgcgttatgcagcgacaaagatttggtcgtcataaagaagaaaatggagaatccacgccctggcttggaaaaagttagacaacaaggagaccatgaatgtcttcaccgggacatgatagccggattcgcgacatgggaattcgacccgactgaattagaaaatccgtttgcggaaggcgaaggatcggtccacgtttggcaagggatggaagacagaatcattccatacgaaattaatcgatatatatcagagaagcttccatggattaagtaccatgaggtcttaggttatggacatcttctaaacgccgaggaggagaaatgcaaagacattatcaaggcacttcttgtcaactgatgatcatctctacacaagatgccacaaaaaatatagcatatttaatagattttattttttatttatggattataatattatagcatattataagtttgtaagtaagatgaaaaccacttgaaagtc

SEQ ID NO: 41700 - protein, 340 aa, Arabidopsis thaliana
  peptide (1)..(340): Ceres Seq. ID no. 12330893
  misc_feature (92)..(335): Pfam Name: alpha/beta hydrolase fold Pfam Description: alpha/beta hydrolase fold
  misc_feature (1)..(338): Homolog of NCBI NO: 15221193 NR Description: unknown protein; protein id: At1g74290.1
  misc_feature (1)..(339): Homolog of NCBI NO: 38346334 NR Description: OSJNBa0073L04.5 [Oryza sativa (japonica
  misc_feature (1)..(336): Homolog of NCBI NO: 30678800 NR Description: esterase/lipase/thioesterase family [Arabidopsis
  misc_feature (11)..(340): Homolog of NCBI NO: 28416665 NR Description: At2g36290 [Arabidopsis thaliana]
  misc_feature (11)..(340): Homolog of NCBI NO: 18404095 NR Description: expressed protein
  misc_feature (4)..(338): Homolog of NCBI NO: 18410582 NR Description: expressed protein
  misc_feature (4)..(338): Homolog of NCBI NO: 21592662 NR Description: unknown [Arabidopsis thaliana]
  misc_feature (1)..(340): Homolog of NCBI NO: 18410575 NR Description: expressed protein
  misc_feature (1)..(340): Homolog of NCBI NO: 21537089 NR Description: unknown [Arabidopsis thaliana]
  misc_feature (1)..(340): Homolog of NCBI NO: 15242253 NR Description: putative protein
MMFSVTVAILVCLIGYIYRSFKPPPPRICGHPNGPPVTSPRIKLSDGRYLAYRESGVDRDNANYKIIVVHGFNSSKDTEFPIPKDVIEELGIYFVFYDRAGYGESDPHPSRTVKSEAYDIQELADKLKIGPKFYVLGISLGAYSVYSCLKYIPHRLAGAVLMVPFVNYWWTKVPQEKLSKALELMPKKDQWTFKVAHYVPWLLYWWLTQKLFPSSSMVTGNNALCSDKDLVVIKKKMENPRPGLEKVRQQGDHECLHRDMIAGFATWEFDPTELENPFAEGEGSVHVWQGMEDRIIPYEINRYISEKLPWIKYHEVLGYGHLLNAEEEKCKDIIKALLVN

SEQ ID NO: 41701 - protein, 339 aa, Arabidopsis thaliana
  peptide (1)..(339): Ceres Seq. ID no. 12330894
  misc_feature (91)..(334): Pfam Name: alpha/beta hydrolase fold Pfam Description: alpha/beta hydrolase fold
  misc_feature (1)..(337): Homolog of NCBI NO: 15221193 NR Description: unknown protein; protein id: At1g74290.1
  misc_feature (1)..(338): Homolog of NCBI NO: 38346334 NR Description: OSJNBa0073L04.5 [Oryza sativa (japonica
  misc_feature (1)..(335): Homolog of NCBI NO: 30678800 NR Description: esterase/lipase/thioesterase family [Arabidopsis
  misc_feature (10)..(339): Homolog of NCBI NO: 28416665 NR Description: At2g36290 [Arabidopsis thaliana]
  misc_feature (10)..(339): Homolog of NCBI NO: 18404095 NR Description: expressed protein
  misc_feature (3)..(337): Homolog of NCBI NO: 18410582 NR Description: expressed protein
  misc_feature (3)..(337): Homolog of NCBI NO: 21592662 NR Description: unknown [Arabidopsis thaliana]
  misc_feature (1)..(339): Homolog of NCBI NO: 18410575 NR Description: expressed protein
  misc_feature (1)..(339): Homolog of NCBI NO: 21537089 NR Description: unknown [Arabidopsis thaliana]
  misc_feature (1)..(339): Homolog of NCBI NO: 15242253 NR Description: putative protein
MFSVTVAILVCLIGYIYRSFKPPPPRICGHPNGPPVTSPRIKLSDGRYLAYRESGVDRDNANYKIIVVHGFNSSKDTEFPIPKDVIEELGIYFVFYDRAGYGESDPHPSRTVKSEAYDIQELADKLKIGPKFYVLGISLGAYSVYSCLKYIPHRLAGAVLMVPFVNYWWTKVPQEKLSKALELMPKKDQWTFKVAHYVPWLLYWWLTQKLFPSSSMVTGNNALCSDKDLVVIKKKMENPRPGLEKVRQQGDHECLHRDMIAGFATWEFDPTELENPFAEGEGSVHVWQGMEDRIIPYEINRYISEKLPWIKYHEVLGYGHLLNAEEEKCKDIIKALLVN

SEQ ID NO: 41702 - protein, 179 aa, Arabidopsis thaliana
  peptide (1)..(179): Ceres Seq. ID no. 12330895
  misc_feature (1)..(174): Pfam Name: alpha/beta hydrolase fold Pfam Description: alpha/beta hydrolase fold
  misc_feature (1)..(177): Homolog of NCBI NO: 15221193 NR Description: unknown protein; protein id: At1g74290.1
  misc_feature (1)..(178): Homolog of NCBI NO: 38346334 NR Description: OSJNBa0073L04.5 [Oryza sativa (japonica
  misc_feature (1)..(175): Homolog of NCBI NO: 30678800 NR Description: esterase/lipase/thioesterase family [Arabidopsis
  misc_feature (1)..(179): Homolog of NCBI NO: 28416665 NR Description: At2g36290 [Arabidopsis thaliana]
  misc_feature (1)..(179): Homolog of NCBI NO: 18404095 NR Description: expressed protein
  misc_feature (1)..(177): Homolog of NCBI NO: 18410582 NR Description: expressed protein
  misc_feature (1)..(177): Homolog of NCBI NO: 21592662 NR Description: unknown [Arabidopsis thaliana]
  misc_feature (1)..(179): Homolog of NCBI NO: 18410575 NR Description: expressed protein
  misc_feature (1)..(179): Homolog of NCBI NO: 21537089 NR Description: unknown [Arabidopsis thaliana]
  misc_feature (1)..(179): Homolog of NCBI NO: 15242253 NR Description: putative protein
MVPFVNYWWTKVPQEKLSKALELMPKKDQWTFKVAHYVPWLLYWWLTQKLFPSSSMVTGNNALCSDKDLVVIKKKMENPRPGLEKVRQQGDHECLHRDMIAGFATWEFDPTELENPFAEGEGSVHVWQGMEDRIIPYEINRYISEKLPWIKYHEVLGYGHLLNAEEEKCKDIIKALLVN

SEQ ID NO: 41703 - DNA, 1305 bp, Arabidopsis thaliana
  misc_feature (1)..(1305): Ceres Seq. ID no. 12395060
  misc_feature: MA Experiment ID: 108434 Result: Down-regulated in Transcription
  misc_feature: MA Experiment 108434 PARAMETER Experiment Name: At_Root_Tips_cDNA_P Parameter: Tissue Value: Root Tips
  misc_feature: MA Experiment ID: 108464 Result: Up-regulated in Transcription
  misc_feature: MA Experiment 108464 PARAMETER Experiment Name: At_Germinating_Seeds_cDNA_P Parameter: Age (day) Value: 4 vs. 0
  misc_feature: MA Experiment 108464 PARAMETER Experiment Name: At_Germinating_Seeds_cDNA_P Parameter: Tissue Value: Germinating Seeds
  misc_feature: MA Experiment ID: 20000184 Result: Down-regulated in Transcription
  misc_feature: MA Experiment 20000184 PARAMETER Experiment Name: At_Shoots__P Parameter: Age (day) Value: 7
  misc_feature: MA Experiment 20000184 PARAMETER Experiment Name: At_Shoots__P Parameter: Tissue Value: Shoots vs. Whole Plant
  misc_feature: MA Experiment ID: 20000495 Result: Down-regulated in Transcription
  misc_feature: MA Experiment 20000495 PARAMETER Experiment Name: At_Guard_Cells_P Parameter: Harvest Date Value: 8/2/2002
  misc_feature: MA Experiment 20000495 PARAMETER Experiment Name: At_Guard_Cells_P Parameter: Organism Value: A. thaliana
  misc_feature: MA Experiment 20000495 PARAMETER Experiment Name: At_Guard_Cells_P Parameter: Tissue Value: Guard Cells vs. Leaves
  misc_feature: MA Experiment ID: 20001451 Result: Down-regulated in Transcription
  misc_feature: MA Experiment 20001451 PARAMETER Experiment Name: At_Far-red-induction_P Parameter: Age (day) Value: 7
  misc_feature: MA Experiment 20001451 PARAMETER Experiment Name: At_Far-red-induction_P Parameter: Light Value: Far-red vs. White
  misc_feature: MA Experiment 20001451 PARAMETER Experiment Name: At_Far-red-induction_P Parameter: Organism Value: A. thaliana
  misc_feature: MA Experiment 20001451 PARAMETER Experiment Name: At_Far-red-induction_P Parameter: Plant Line Value: Columbia
  misc_feature: MA Experiment 20001451 PARAMETER Experiment Name: At_Far-red-induction_P Parameter: Timepoint (hr) Value: 24
  misc_feature: MA Experiment 20001451 PARAMETER Experiment Name: At_Far-red-induction_P Parameter: Tissue Value: Whole Plant
  misc_feature: MA Experiment ID: 20001560 Result: Down-regulated in Transcription
  misc_feature: MA Experiment 20001560 PARAMETER Experiment Name: At_Drought_Soil_Dry_P Parameter: Age (day) Value: 28
  misc_feature: MA Experiment 20001560 PARAMETER Experiment Name: At_Drought_Soil_Dry_P Parameter: Organism Value: A. thaliana
  misc_feature: MA Experiment 20001560 PARAMETER Experiment Name: At_Drought_Soil_Dry_P Parameter: Plant Line Value: WS
  misc_feature: MA Experiment 20001560 PARAMETER Experiment Name: At_Drought_Soil_Dry_P Parameter: Post Timepoint (hr) Value: None
  misc_feature: MA Experiment 20001560 PARAMETER Experiment Name: At_Drought_Soil_Dry_P Parameter: Post-Treatment Value: None
  misc_feature: MA Experiment 20001560 PARAMETER Experiment Name: At_Drought_Soil_Dry_P Parameter: Timepoint (day) Value: 14
  misc_feature: MA Experiment 20001560 PARAMETER Experiment Name: At_Drought_Soil_Dry_P Parameter: Treatment Value: Drought vs. No Drought
acacattcgtgtaccgtttccgatttttcgttcctccaatttcattctctctctctttaagaaaaattccttgtttttgatccgagaatcgaagtcgccctcgaatcaagattaaaacctcgtttagttctcaatttcagttctgtggatccgtgcgtgacctcaagttttttttttttttctgtctcgaaattcagaatcgtagaggtgttgaaagttgaaaccttttttttggtttgcttggttaatgggtttcttcaaacttgatcgataattggatttgaatcaagggttttagtgttcttgctttgtgtattcgtttggcaatttgggataatgaatggtttgcaagaagtttgttcgtcaagtgggtcggtgatgatcggactaccagctgaagaagacgaaaacgccgcacattcgtcggaggattcatcttgccccgacgagtcagtgtcagagacagagctcgacctagctttgggtcttagcattggtcgtcggaaggttcgatcgtctttgtcttcctcgtcttcttctctgaccagggaaagtgggaccaaacgctctgctgattcttctccggctgccgcctcaaacgcaaccagacaagttgctgtaggttggccgcctctacggacttacagaatcaacagtttggtcaatcaagcaaagtctttagctacggaaggcggcttgagttctggcattcaaaaggagactacaaaaagtgtagtggttgctgctaagaacgatgatgcttgctttatcaaatcgtccaggacttctatgcttgtgaaggtgacaatggacggagttataattggaaggaaggttgatctcaatgctctggattcttatgcagccttagagaaaactttggatctaatgtttttccagattccttctcctgtaacaagatccaacacacaaggatacaagacaattaaggaaacatgtacttcgaaattactggatggctcatcggaatatatcataacatatcaagataaagacggagattggatgcttgtaggagatgttccttggcagatgttcctcgggtctgtgacaagactgagaatcatgaagacatcaattggagctggagtaggtaagtagagagtcctatatagcaaaaacagtttacatctctttggtctgtaactcatatatcacattcacatatatacatgtgcatatgtttatacatgagtgtacatatgtcttgtggtcgtttgtgaatatcaaacaacagcttaaccttgtctttaaagatctttgtatatttagggtttttcactc

SEQ ID NO: 41704 - protein, 261 aa, Arabidopsis thaliana
  peptide (1)..(261): Ceres Seq. ID no. 12395061
  misc_feature (17)..(261): Pfam Name: AUX/IAA family Pfam Description: AUX/IAA family
  misc_feature (37)..(124): Homolog of NCBI NO: 4887022 NR Description: Nt-iaa4.1 deduced protein [Nicotiana tabacum]
  misc_feature (131)..(261): Homolog of NCBI NO: 4887022 NR Description: Nt-iaa4.1 deduced protein [Nicotiana tabacum]
  misc_feature (41)..(259): Homolog of NCBI NO: 15219761 NR Description: putative auxin-induced protein, IAA12
  misc_feature (41)..(259): Homolog of NCBI NO: 21593621 NR Description: putative auxin-induced protein, IAA12
  misc_feature (42)..(259): Homolog of NCBI NO: 30685642 NR Description: auxin-responsive protein IAA13 (Indoleacetic
  misc_feature (42)..(259): Homolog of NCBI NO: 15225833 NR Description: auxin regulated protein (IAA13)
  misc_feature (60)..(261): Homolog of NCBI NO: 20269057 NR Description: aux/IAA protein [Populus tremula x Populus
  misc_feature (9)..(258): Homolog of NCBI NO: 20466408 NR Description: early auxin-inducible protein 11 [Arabidopsis
  misc_feature (9)..(258): Homolog of NCBI NO: 15235385 NR Description: early auxin-inducible protein 11 (IAA11)
  misc_feature (1)..(261): Homolog of NCBI NO: 15219646 NR Description: putative IAA1 protein
MNGLQEVCSSSGSVMIGLPAEEDENAAHSSEDSSCPDESVSETELDLALGLSIGRRKVRSSLSSSSSSLTRESGTKRSADSSPAAASNATRQVAVGWPPLRTYRINSLVNQAKSLATEGGLSSGIQKETTKSVVVAAKNDDACFIKSSRTSMLVKVTMDGVIIGRKVDLNALDSYAALEKTLDLMFFQIPSPVTRSNTQGYKTIKETCTSKLLDGSSEYIITYQDKDGDWMLVGDVPWQMFLGSVTRLRIMKTSIGAGVGK

SEQ ID NO: 41705 - protein, 247 aa, Arabidopsis thaliana
  peptide (1)..(247): Ceres Seq. ID no. 12395062
  misc_feature (3)..(247): Pfam Name: AUX/IAA family Pfam Description: AUX/IAA family
  misc_feature (23)..(110): Homolog of NCBI NO: 4887022 NR Description: Nt-iaa4.1 deduced protein [Nicotiana tabacum]
  misc_feature (117)..(247): Homolog of NCBI NO: 4887022 NR Description: Nt-iaa4.1 deduced protein [Nicotiana tabacum]
  misc_feature (27)..(245): Homolog of NCBI NO: 15219761 NR Description: putative auxin-induced protein, IAA12
  misc_feature (27)..(245): Homolog of NCBI NO: 21593621 NR Description: putative auxin-induced protein, IAA12
  misc_feature (28)..(245): Homolog of NCBI NO: 30685642 NR Description: auxin-responsive protein IAA13 (Indoleacetic
  misc_feature (28)..(245): Homolog of NCBI NO: 15225833 NR Description: auxin regulated protein (IAA13)
  misc_feature (46)..(247): Homolog of NCBI NO: 20269057 NR Description: aux/IAA protein [Populus tremula x Populus
  misc_feature (1)..(244): Homolog of NCBI NO: 20466408 NR Description: early auxin-inducible protein 11 [Arabidopsis
  misc_feature (1)..(244): Homolog of NCBI NO: 15235385 NR Description: early auxin-inducible protein 11 (IAA11)
  misc_feature (1)..(247): Homolog of NCBI NO: 15219646 NR Description: putative IAA1 protein
MIGLPAEEDENAAHSSEDSSCPDESVSETELDLALGLSIGRRKVRSSLSSSSSSLTRESGTKRSADSSPAAASNATRQVAVGWPPLRTYRINSLVNQAKSLATEGGLSSGIQKETTKSVVVAAKNDDACFIKSSRTSMLVKVTMDGVIIGRKVDLNALDSYAALEKTLDLMFFQIPSPVTRSNTQGYKTIKETCTSKLLDGSSEYIITYQDKDGDWMLVGDVPWQMFLGSVTRLRIMKTSIGAGVGK

SEQ ID NO: 41706 - DNA, 1575 bp, Arabidopsis thaliana
  misc_feature (1)..(1575): Ceres Seq. ID no. 12602778
  misc_feature: MA Experiment ID: 108464 Result: Up-regulated in Transcription
  misc_feature: MA Experiment 108464 PARAMETER Experiment Name: At_Germinating_Seeds_cDNA_P Parameter: Age (day) Value: 4 vs. 0
  misc_feature: MA Experiment 108464 PARAMETER Experiment Name: At_Germinating_Seeds_cDNA_P Parameter: Tissue Value: Germinating Seeds
  misc_feature: MA Experiment ID: 108488 Result: Down-regulated in Transcription
  misc_feature: MA Experiment ID: 108585 Result: Up-regulated in Transcription
  misc_feature: MA Experiment 108585 PARAMETER Experiment Name: At_5mM_NaNP_cDNA_P Parameter: Timepoint (hr) Value: 6
  misc_feature: MA Experiment 108585 PARAMETER Experiment Name: At_5mM_NaNP_cDNA_P Parameter: Tissue Value: Aerial
  misc_feature: MA Experiment 108585 PARAMETER Experiment Name: At_5mM_NaNP_cDNA_P Parameter: Treatment Value: null
  misc_feature: MA Experiment ID: 108595 Result: Down-regulated in Transcription
  misc_feature: MA Experiment 108595 PARAMETER Experiment Name: At_Ler-pi_Ovule_cDNA_P Parameter: Plant Line Value: null
  misc_feature: MA Experiment ID: 108605 Result: Down-regulated in Transcription
  misc_feature: MA Experiment 108605 PARAMETER Experiment Name: At_100uM_ABA_cDNA_P Parameter: Timepoint (hr) Value: 6
  misc_feature: MA Experiment 108605 PARAMETER Experiment Name: At_100uM_ABA_cDNA_P Parameter: Tissue Value: Aerial
  misc_feature: MA Experiment 108605 PARAMETER Experiment Name: At_100uM_ABA_cDNA_P Parameter: Treatment Value: 100uM ABA vs. No Treatment
  misc_feature: MA Experiment ID: 108607 Result: Down-regulated in Transcription
  misc_feature: MA Experiment 108607 PARAMETER Experiment Name: At_100uM_ABA_cDNA_P Parameter: Timepoint (hr) Value: 4
  misc_feature: MA Experiment 108607 PARAMETER Experiment Name: At_100uM_ABA_cDNA_P Parameter: Tissue Value: Aerial
  misc_feature: MA Experiment 108607 PARAMETER Experiment Name: At_100uM_ABA_cDNA_P Parameter: Treatment Value: 100uM ABA vs. No Treatment
  misc_feature: MA Experiment ID: 108609 Result: Down-regulated in Transcription
  misc_feature: MA Experiment 108609 PARAMETER Experiment Name: At_100uM_ABA_cDNA_P Parameter: Timepoint (hr) Value: 24
  misc_feature: MA Experiment 108609 PARAMETER Experiment Name: At_100uM_ABA_cDNA_P Parameter: Tissue Value: Aerial
  misc_feature: MA Experiment 108609 PARAMETER Experiment Name: At_100uM_ABA_cDNA_P Parameter: Treatment Value: 100uM ABA vs. No Treatment
  misc_feature: MA Experiment ID: 20000069 Result: Down-regulated in Transcription
  misc_feature: MA Experiment 20000069 PARAMETER Experiment Name: At_100uM_ABA_Mutants_cDNA_P Parameter: Plant Line Value: CS23
  misc_feature: MA Experiment 20000069 PARAMETER Experiment Name: At_100uM_ABA_Mutants_cDNA_P Parameter: Timepoint (hr) Value: 6
  misc_feature: MA Experiment 20000069 PARAMETER Experiment Name: At_100uM_ABA_Mutants_cDNA_P Parameter: Tissue Value: Aerial
  misc_feature: MA Experiment 20000069 PARAMETER Experiment Name: At_100uM_ABA_Mutants_cDNA_P Parameter: Treatment Value: 100uM ABA vs. No Treatment
  misc_feature: MA Experiment ID: 20000071 Result: Down-regulated in Transcription
  misc_feature: MA Experiment 20000071 PARAMETER Experiment Name: At_100uM_ABA_Mutants_cDNA_P Parameter: Plant Line Value: CS8104
  misc_feature: MA Experiment 20000071 PARAMETER Experiment Name: At_100uM_ABA_Mutants_cDNA_P Parameter: Timepoint (hr) Value: 6
  misc_feature: MA Experiment 20000071 PARAMETER Experiment Name: At_100uM_ABA_Mutants_cDNA_P Parameter: Tissue Value: Aerial
  misc_feature: MA Experiment 20000071 PARAMETER Experiment Name: At_100uM_ABA_Mutants_cDNA_P Parameter: Treatment Value: 100uM ABA vs. No Treatment
  misc_feature: MA Experiment ID: 20000089 Result: Down-regulated in Transcription
  misc_feature: MA Experiment ID: 20000169 Result: Down-regulated in Transcription
  misc_feature: MA Experiment 20000169 PARAMETER Experiment Name: At_100uM_ABA_P Parameter: Age (day) Value: 14
  misc_feature: MA Experiment 20000169 PARAMETER Experiment Name: At_100uM_ABA_P Parameter: Organism Value: A. thaliana
  misc_feature: MA Experiment 20000169 PARAMETER Experiment Name: At_100uM_ABA_P Parameter: Plant Line Value: WS
  misc_feature: MA Experiment 20000169 PARAMETER Experiment Name: At_100uM_ABA_P Parameter: Timepoint (hr) Value: 6
  misc_feature: MA Experiment 20000169 PARAMETER Experiment Name: At_100uM_ABA_P Parameter: Tissue Value: Aerial
  misc_feature: MA Experiment 20000169 PARAMETER Experiment Name: At_100uM_ABA_P Parameter: Treatment Value: 100uM ABA vs. No Treatment
  misc_feature: MA Experiment ID: 20000185 Result: Up-regulated in Transcription
  misc_feature: MA Experiment 20000185 PARAMETER Experiment Name: At_Roots__P Parameter: Age (day) Value: 7 vs. 21
  misc_feature: MA Experiment 20000185 PARAMETER Experiment Name: At_Roots__P Parameter: Organism Value: A. thaliana
  misc_feature: MA Experiment 20000185 PARAMETER Experiment Name: At_Roots__P Parameter: Tissue Value: Roots vs. Whole Plant
  misc_feature: MA Experiment ID: 20000227 Result: Down-regulated in Transcription
  misc_feature: MA Experiment 20000227 PARAMETER Experiment Name: At_Root-Tips-vs-Tops_P Parameter: Tissue Value: Root Tips vs. Root Tops
  misc_feature: MA Experiment ID: 20000439 Result: Up-regulated in Transcription
  misc_feature: MA Experiment 20000439 PARAMETER Experiment Name: At_Roots__P Parameter: Age (day) Value: 14 vs. 21
  misc_feature: MA Experiment 20000439 PARAMETER Experiment Name: At_Roots__P Parameter: Organism Value: A. thaliana
  misc_feature: MA Experiment 20000439 PARAMETER Experiment Name: At_Roots__P Parameter: Tissue Value: Roots vs. Whole Plant
  misc_feature: MA Experiment ID: 20000453 Result: Down-regulated in Transcription
  misc_feature: MA Experiment 20000453 PARAMETER Experiment Name: At_100uM_ABA_P Parameter: Age (day) Value: 15
  misc_feature: MA Experiment 20000453 PARAMETER Experiment Name: At_100uM_ABA_P Parameter: Organism Value: A. thaliana
  misc_feature: MA Experiment 20000453 PARAMETER Experiment Name: At_100uM_ABA_P Parameter: Plant Line Value: WS
  misc_feature: MA Experiment 20000453 PARAMETER Experiment Name: At_100uM_ABA_P Parameter: Timepoint (hr) Value: 24
  misc_feature: MA Experiment 20000453 PARAMETER Experiment Name: At_100uM_ABA_P Parameter: Tissue Value: Aerial
  misc_feature: MA Experiment 20000453 PARAMETER Experiment Name: At_100uM_ABA_P Parameter: Treatment Value: 100uM ABA vs. No Treatment
  misc_feature: MA Experiment ID: 20000455 Result: Down-regulated in Transcription
  misc_feature: MA Experiment 20000455 PARAMETER Experiment Name: At_100uM_ABA_P Parameter: Age (day) Value: 16
  misc_feature: MA Experiment 20000455 PARAMETER Experiment Name: At_100uM_ABA_P Parameter: Organism Value: A. thaliana
  misc_feature: MA Experiment 20000455 PARAMETER Experiment Name: At_100uM_ABA_P Parameter: Plant Line Value: WS
  misc_feature: MA Experiment 20000455 PARAMETER Experiment Name: At_100uM_ABA_P Parameter: Timepoint (hr) Value: 48
  misc_feature: MA Experiment 20000455 PARAMETER Experiment Name: At_100uM_ABA_P Parameter: Tissue Value: Aerial
  misc_feature: MA Experiment 20000455 PARAMETER Experiment Name: At_100uM_ABA_P Parameter: Treatment Value: 100uM ABA vs. No Treatment
  misc_feature: MA Experiment ID: 20000495 Result: Up-regulated in Transcription
  misc_feature: MA Experiment 20000495 PARAMETER Experiment Name: At_Guard_Cells_P Parameter: Harvest Date Value: 8/2/2002
  misc_feature: MA Experiment 20000495 PARAMETER Experiment Name: At_Guard_Cells_P Parameter: Organism Value: A. thaliana
  misc_feature: MA Experiment 20000495 PARAMETER Experiment Name: At_Guard_Cells_P Parameter: Tissue Value: Guard Cells vs. Leaves
  misc_feature: MA Experiment ID: 20000527 Result: Down-regulated in Transcription
  misc_feature: MA Experiment 20000527 PARAMETER Experiment Name: At_10percent_PEG_P Parameter: Age (day) Value: 20
  misc_feature: MA Experiment 20000527 PARAMETER Experiment Name: At_10percent_PEG_P Parameter: Organism Value: A. thaliana
  misc_feature: MA Experiment 20000527 PARAMETER Experiment Name: At_10percent_PEG_P Parameter: Plant Line Value: WS
  misc_feature: MA Experiment 20000527 PARAMETER Experiment Name: At_10percent_PEG_P Parameter: Timepoint (day) Value: 20
  misc_feature: MA Experiment 20000527 PARAMETER Experiment Name: At_10percent_PEG_P Parameter: Tissue Value: Whole Plant
  misc_feature: MA Experiment 20000527 PARAMETER Experiment Name: At_10percent_PEG_P Parameter: Treatment Value: 10percent PEG vs. No Treatment
  misc_feature: MA Experiment ID: 20000794 Result: Up-regulated in Transcription
  misc_feature: MA Experiment 20000794 PARAMETER Experiment Name: At_Petals_P Parameter: Age (day) Value: 23-25 days
  misc_feature: MA Experiment 20000794 PARAMETER Experiment Name: At_Petals_P Parameter: Plant Line Value: WS
  misc_feature: MA Experiment 20000794 PARAMETER Experiment Name: At_Petals_P Parameter: Tissue Value: Petals vs. Whole plant
acctagaacatcctaatcgaaaactcaacatttcctcatctcatctctctgatttcttgcttcgaattttgatttatctctctctgtctctctctcggtctcgtgctctatctcgtttgtaggcagtgccaatttcaccacttgtgttgtgtgtcagcggatatagaatctgagaggaatatttaaagattctccctttgcttcttcttttttataccgtttctattaatgtttcggactcttgcttccggcgaaatcgaaactgccagactgaaccgtaatttggggattacgtccaatttaggggtttcctgcggtggatttgaagactttgctatgagattcgaaggggaaaacatggtgccatacaaaggtgaagagcaggaggaggaagaagaccaagtggtggtgaacgaaacgacgccgttccagtttcaacaacctttgtttctgcagcagcagcagaagctcgttgttgggtatgctctgacttctaagaagaagaagagtttcttgcagcccaagcttgaacttcttgctaggagaaaaggcattttctttgtcgccatcgatttgaaccggcccctatctgaacaagggccatttgatgttgttttgcataagttgttgggaaaagagtgggaagaggttattgaggattaccaacaaaaacacccagaagtgactgtgcttgatcctccaggatcaatacagcgtatatataatcgacaatcgatgcttcagggtatggcagatttgaaactgtcagattgcagtggcagcctttttgttccaaagcaaatggttgtcttgaaagattcagcagctagtgctgatgcagttgtggaagctggtctcaaatttccactagttgcaaagccgctctggatcgatgggactccaaagtcacatcaattgtacttggcttatgacaggcgctcgcttgcagagcttgatccgcctttagtccttcaagagtttgttaatcatggtggagttatgttcaaggtatttgtggtgggtgatgttataaaagtcatgagacggttttctctaccaaatgtgagtaattgtgaaaaagccaaagttgatggcgtcttccaattcccaagggtttcatcagctgctgcttcagctgataacgcagacttggaccctcgtgttgctgagctacctccaaagcctttcctcgaggcgcttgtgaaagagctaagaagcttattgggacttcggcttttcaacatagacatgatcagggaacatgggagcaaaaacgtgttttatgttattgacatcaactattttcctggttacggaaaactgccagactacgagcaagtctttgtagatttcttccaaaatctggcgcaggtcaaatataagaagagacaacattgtaaatgaaagaaaatggcggcagtttttagatggtctactaagaagcgacaaataataaaatgtctaattatggatttgtacagaatttagctctcccttttggaagcagtatcagataaacaagttttgattactgattttgaattttcagttaaaaaaaaaaaaaaaaaatatcga

SEQ ID NO: 41707 - protein, 391 aa, Arabidopsis thaliana
  peptide (1)..(391): Ceres Seq. ID no. 12602779
  misc_feature (74)..(214): Pfam Name: Inositol 1, 3, 4-trisphosphate 5/6-kinase Pfam Description: Inositol 1, 3, 4-trisphosphate 5/6-kinase
  misc_feature (80)..(376): Homolog of NCBI NO: 27549256 NR Description: inositol phosphate kinase [Zea mays]
  misc_feature (134)..(387): Homolog of NCBI NO: 30680654 NR Description: inositol 1,3,4-trisphosphate 5/6-kinase-related
  misc_feature (78)..(379): Homolog of NCBI NO: 7487925 NR Description: inositol 1,3,4-trisphosphate 5/6-kinase homolog
  misc_feature (53)..(386): Homolog of NCBI NO: 27311236 NR Description: Putative inositol 1,3,4-trisphosphate 5/6-kinase
  misc_feature (79)..(387): Homolog of NCBI NO: 37530372 NR Description: putative inositol 1,3,4-trisphosphate 5/6-kinase
  misc_feature (78)..(387): Homolog of NCBI NO: 18413088 NR Description: inositol 1,3,4-trisphosphate 5/6-kinase-like
  misc_feature (211)..(361): Homolog of NCBI NO: 7487088 NR Description: hypothetical protein T16L1.260 - Arabidopsis
  misc_feature (44)..(214): Homolog of NCBI NO: 7487088 NR Description: hypothetical protein T16L1.260 - Arabidopsis
  misc_feature (211)..(391): Homolog of NCBI NO: 30689810 NR Description: expressed protein [Arabidopsis thaliana]
  misc_feature (1)..(214): Homolog of NCBI NO: 30689810 NR Description: expressed protein [Arabidopsis thaliana]
MFRTLASGEIETARLNRNLGITSNLGVSCGGFEDFAMRFEGENMVPYKGEEQEEEEDQVVVNETTPFQFQQPLFLQQQQKLVVGYALTSKKKKSFLQPKLELLARRKGIFFVAIDLNRPLSEQGPFDVVLHKLLGKEWEEVIEDYQQKHPEVTVLDPPGSIQRIYNRQSMLQGMADLKLSDCSGSLFVPKQMVVLKDSAASADAVVEAGLKFPLVAKPLWIDGTPKSHQLYLAYDRRSLAELDPPLVLQEFVNHGGVMFKVFVVGDVIKVMRRFSLPNVSNCEKAKVDGVFQFPRVSSAAASADNADLDPRVAELPPKPFLEALVKELRSLLGLRLFNIDMIREHGSKNVFYVIDINYFPGYGKLPDYEQVFVDFFQNLAQVKYKKRQHCK

SEQ ID NO: 41708 - protein, 355 aa, Arabidopsis thaliana
  peptide (1)..(355): Ceres Seq. ID no. 12602780
  misc_feature (38)..(178): Pfam Name: Inositol 1, 3, 4-trisphosphate 5/6-kinase Pfam Description: Inositol 1, 3, 4-trisphosphate 5/6-kinase
  misc_feature (44)..(340): Homolog of NCBI NO: 27549256 NR Description: inositol phosphate kinase [Zea mays]
  misc_feature (98)..(351): Homolog of NCBI NO: 30680654 NR Description: inositol 1,3,4-trisphosphate 5/6-kinase-related
  misc_feature (42)..(343): Homolog of NCBI NO: 7487925 NR Description: inositol 1,3,4-trisphosphate 5/6-kinase homolog
  misc_feature (17)..(350): Homolog of NCBI NO: 27311236 NR Description: Putative inositol 1,3,4-trisphosphate 5/6-kinase
  misc_feature (43)..(351): Homolog of NCBI NO: 37530372 NR Description: putative inositol 1,3,4-trisphosphate 5/6-kinase
  misc_feature (42)..(351): Homolog of NCBI NO: 18413088 NR Description: inositol 1,3,4-trisphosphate 5/6-kinase-like
  misc_feature (175)..(325): Homolog of NCBI NO: 7487088 NR Description: hypothetical protein T16L1.260 - Arabidopsis
  misc_feature (8)..(178): Homolog of NCBI NO: 7487088 NR Description: hypothetical protein T16L1.260 - Arabidopsis
  misc_feature (175)..(355): Homolog of NCBI NO: 30689810 NR Description: expressed protein [Arabidopsis thaliana]
  misc_feature (1)..(178): Homolog of NCBI NO: 30689810 NR Description: expressed protein [Arabidopsis thaliana]
MRFEGENMVPYKGEEQEEEEDQVVVNETTPFQFQQPLFLQQQQKLVVGYALTSKKKKSFLQPKLELLARRKGIFFVAIDLNRPLSEQGPFDVVLHKLLGKEWEEVIEDYQQKHPEVTVLDPPGSIQRIYNRQSMLQGMADLKLSDCSGSLFVPKQMVVLKDSAASADAVVEAGLKFPLVAKPLWIDGTPKSHQLYLAYDRRSLAELDPPLVLQEFVNHGGVMFKVFVVGDVIKVMRRFSLPNVSNCEKAKVDGVFQFPRVSSAAASADNADLDPRVAELPPKPFLEALVKELRSLLGLRLFNIDMIREHGSKNVFYVIDINYFPGYGKLPDYEQVFVDFFQNLAQVKYKKRQHCK

SEQ ID NO: 41709 - protein, 348 aa, Arabidopsis thaliana
  peptide (1)..(348): Ceres Seq. ID no. 12602781
  misc_feature (31)..(171): Pfam Name: Inositol 1, 3, 4-trisphosphate 5/6-kinase Pfam Description: Inositol 1, 3, 4-trisphosphate 5/6-kinase
  misc_feature (37)..(333): Homolog of NCBI NO: 27549256 NR Description: inositol phosphate kinase [Zea mays]
  misc_feature (91)..(344): Homolog of NCBI NO: 30680654 NR Description: inositol 1,3,4-trisphosphate 5/6-kinase-related
  misc_feature (35)..(336): Homolog of NCBI NO: 7487925 NR Description: inositol 1,3,4-trisphosphate 5/6-kinase homolog
  misc_feature (10)..(343): Homolog of NCBI NO: 27311236 NR Description: Putative inositol 1,3,4-trisphosphate 5/6-kinase
  misc_feature (36)..(344): Homolog of NCBI NO: 37530372 NR Description: putative inositol 1,3,4-trisphosphate 5/6-kinase
  misc_feature (35)..(344): Homolog of NCBI NO: 18413088 NR Description: inositol 1,3,4-trisphosphate 5/6-kinase-like
  misc_feature (168)..(318): Homolog of NCBI NO: 7487088 NR Description: hypothetical protein T16L1.260 - Arabidopsis
  misc_feature (1)..(171): Homolog of NCBI NO: 7487088 NR Description: hypothetical protein T16L1.260 - Arabidopsis
  misc_feature (168)..(348): Homolog of NCBI NO: 30689810 NR Description: expressed protein [Arabidopsis thaliana]
  misc_feature (1)..(171): Homolog of NCBI NO: 30689810 NR Description: expressed protein [Arabidopsis thaliana]
MVPYKGEEQEEEEDQVVVNETTPFQFQQPLFLQQQQKLVVGYALTSKKKKSFLQPKLELLARRKGIFFVAIDLNRPLSEQGPFDVVLHKLLGKEWEEVIEDYQQKHPEVTVLDPPGSIQRIYNRQSMLQGMADLKLSDCSGSLFVPKQMVVLKDSAASADAVVEAGLKFPLVAKPLWIDGTPKSHQLYLAYDRRSLAELDPPLVLQEFVNHGGVMFKVFVVGDVIKVMRRFSLPNVSNCEKAKVDGVFQFPRVSSAAASADNADLDPRVAELPPKPFLEALVKELRSLLGLRLFNIDMIREHGSKNVFYVIDINYFPGYGKLPDYEQVFVDFFQNLAQVKYKKRQHCK

SEQ ID NO: 41710 - DNA, 1273 bp, Arabidopsis thaliana
  misc_feature (1)..(1273): Ceres Seq. ID no. 12421174
  misc_feature: MA Experiment ID: 20000166 Result: Down-regulated in Transcription
  misc_feature: MA Experiment 20000166 PARAMETER Experiment Name: At_100uM_ABA_P Parameter: Age (day) Value: 14
  misc_feature: MA Experiment 20000166 PARAMETER Experiment Name: At_100uM_ABA_P Parameter: Organism Value: A. thaliana
  misc_feature: MA Experiment 20000166 PARAMETER Experiment Name: At_100uM_ABA_P Parameter: Plant Line Value: WS
  misc_feature: MA Experiment 20000166 PARAMETER Experiment Name: At_100uM_ABA_P Parameter: Timepoint (hr) Value: 1
  misc_feature: MA Experiment 20000166 PARAMETER Experiment Name: At_100uM_ABA_P Parameter: Tissue Value: Aerial
  misc_feature: MA Experiment 20000166 PARAMETER Experiment Name: At_100uM_ABA_P Parameter: Treatment Value: 100uM ABA vs. No Treatment
  misc_feature: MA Experiment ID: 20000169 Result: Down-regulated in Transcription
  misc_feature: MA Experiment 20000169 PARAMETER Experiment Name: At_100uM_ABA_P Parameter: Age (day) Value: 14
  misc_feature: MA Experiment 20000169 PARAMETER Experiment Name: At_100uM_ABA_P Parameter: Organism Value: A. thaliana
  misc_feature: MA Experiment 20000169 PARAMETER Experiment Name: At_100uM_ABA_P Parameter: Plant Line Value: WS
  misc_feature: MA Experiment 20000169 PARAMETER Experiment Name: At_100uM_ABA_P Parameter: Timepoint (hr) Value: 6
  misc_feature: MA Experiment 20000169 PARAMETER Experiment Name: At_100uM_ABA_P Parameter: Tissue Value: Aerial
  misc_feature: MA Experiment 20000169 PARAMETER Experiment Name: At_100uM_ABA_P Parameter: Treatment Value: 100uM ABA vs. No Treatment
  misc_feature: MA Experiment ID: 20000171 Result: Down-regulated in Transcription
  misc_feature: MA Experiment 20000171 PARAMETER Experiment Name: At_42deg_Heat_P Parameter: Age (day) Value: 14
  misc_feature: MA Experiment 20000171 PARAMETER Experiment Name: At_42deg_Heat_P Parameter: Organism Value: A. thaliana
  misc_feature: MA Experiment 20000171 PARAMETER Experiment Name: At_42deg_Heat_P Parameter: Plant Line Value: WS
  misc_feature: MA Experiment 20000171 PARAMETER Experiment Name: At_42deg_Heat_P Parameter: Temperature (deg C) Value: 42 vs. 22
  misc_feature: MA Experiment 20000171 PARAMETER Experiment Name: At_42deg_Heat_P Parameter: Timepoint (hr) Value: 1
  misc_feature: MA Experiment 20000171 PARAMETER Experiment Name: At_42deg_Heat_P Parameter: Tissue Value: Aerial
  misc_feature: MA Experiment ID: 20000173 Result: Down-regulated in Transcription
  misc_feature: MA Experiment 20000173 PARAMETER Experiment Name: At_42deg_Heat_P Parameter: Age (day) Value: 14
  misc_feature: MA Experiment 20000173 PARAMETER Experiment Name: At_42deg_Heat_P Parameter: Organism Value: A. thaliana
  misc_feature: MA Experiment 20000173 PARAMETER Experiment Name: At_42deg_Heat_P Parameter: Plant Line Value: WS
  misc_feature: MA Experiment 20000173 PARAMETER Experiment Name: At_42deg_Heat_P Parameter: Temperature (deg C) Value: 42 vs. 22
  misc_feature: MA Experiment 20000173 PARAMETER Experiment Name: At_42deg_Heat_P Parameter: Timepoint (hr) Value: 6
  misc_feature: MA Experiment 20000173 PARAMETER Experiment Name: At_42deg_Heat_P Parameter: Tissue Value: Aerial
  misc_feature: MA Experiment ID: 20000179 Result: Up-regulated in Transcription
  misc_feature: MA Experiment 20000179 PARAMETER Experiment Name: At_Germinating_Seeds_P Parameter: Age (hr) Value: 6 vs. 0
  misc_feature: MA Experiment 20000179 PARAMETER Experiment Name: At_Germinating_Seeds_P Parameter: Tissue Value: Germinating Seeds
  misc_feature: MA Experiment ID: 20000180 Result: Up-regulated in Transcription
  misc_feature: MA Experiment 20000180 PARAMETER Experiment Name: At_Germinating_Seeds_P Parameter: Age (hr) Value: 24 vs. 0
  misc_feature: MA Experiment 20000180 PARAMETER Experiment Name: At_Germinating_Seeds_P Parameter: Tissue Value: Germinating Seeds
  misc_feature: MA Experiment ID: 20000182 Result: Down-regulated in Transcription
  misc_feature: MA Experiment 20000182 PARAMETER Experiment Name: At_2mM_SA_P Parameter: Age (day) Value: 14
  misc_feature: MA Experiment 20000182 PARAMETER Experiment Name: At_2mM_SA_P Parameter: Organism Value: A. thaliana
  misc_feature: MA Experiment 20000182 PARAMETER Experiment Name: At_2mM_SA_P Parameter: Plant Line Value: WS
  misc_feature: MA Experiment 20000182 PARAMETER Experiment Name: At_2mM_SA_P Parameter: Timepoint (hr) Value: 6
  misc_feature: MA Experiment 20000182 PARAMETER Experiment Name: At_2mM_SA_P Parameter: Tissue Value: Aerial
  misc_feature: MA Experiment 20000182 PARAMETER Experiment Name: At_2mM_SA_P Parameter: Treatment Value: 2mM SA vs. No Treatment
  misc_feature: MA Experiment ID: 20000184 Result: Up-regulated in Transcription
  misc_feature: MA Experiment 20000184 PARAMETER Experiment Name: At_Shoots__P Parameter: Age (day) Value: 7
  misc_feature: MA Experiment 20000184 PARAMETER Experiment Name: At_Shoots__P Parameter: Tissue Value: Shoots vs. Whole Plant
  misc_feature: MA Experiment ID: 20000185 Result: Up-regulated in Transcription
  misc_feature: MA Experiment 20000185 PARAMETER Experiment Name: At_Roots__P Parameter: Age (day) Value: 7 vs. 21
  misc_feature: MA Experiment 20000185 PARAMETER Experiment Name: At_Roots__P Parameter: Organism Value: A. thaliana
  misc_feature: MA Experiment 20000185 PARAMETER Experiment Name: At_Roots__P Parameter: Tissue Value: Roots vs. Whole Plant
  misc_feature: MA Experiment ID: 20000227 Result: Down-regulated in Transcription
  misc_feature: MA Experiment 20000227 PARAMETER Experiment Name: At_Root-Tips-vs-Tops_P Parameter: Tissue Value: Root Tips vs. Root Tops
  misc_feature: MA Experiment ID: 20000267 Result: Down-regulated in Transcription
  misc_feature: MA Experiment 20000267 PARAMETER Experiment Name: At_Drought_P Parameter: Age (day) Value: 7
  misc_feature: MA Experiment 20000267 PARAMETER Experiment Name: At_Drought_P Parameter: Organism Value: A. thaliana
  misc_feature: MA Experiment 20000267 PARAMETER Experiment Name: At_Drought_P Parameter: Plant Line Value: WS
  misc_feature: MA Experiment 20000267 PARAMETER Experiment Name: At_Drought_P Parameter: Timepoint (hr) Value: 6
  misc_feature: MA Experiment 20000267 PARAMETER Experiment Name: At_Drought_P Parameter: Tissue Value: Whole Plant
  misc_feature: MA Experiment 20000267 PARAMETER Experiment Name: At_Drought_P Parameter: Treatment Value: Drought vs. No Drought
  misc_feature: MA Experiment ID: 20000269 Result: Down-regulated in Transcription
  misc_feature: MA Experiment 20000269 PARAMETER Experiment Name: At_1mM_KNO3_L-vs-H_Roots_P Parameter: Age (day) Value: 7,10,12
  misc_feature: MA Experiment 20000269 PARAMETER Experiment Name: At_1mM_KNO3_L-vs-H_Roots_P Parameter: Organism Value: A. thaliana
  misc_feature: MA Experiment 20000269 PARAMETER Experiment Name: At_1mM_KNO3_L-vs-H_Roots_P Parameter: Plant Line Value: WS
  misc_feature: MA Experiment 20000269 PARAMETER Experiment Name: At_1mM_KNO3_L-vs-H_Roots_P Parameter: Timepoint (day) Value: 7,10,12
  misc_feature: MA Experiment 20000269 PARAMETER Experiment Name: At_1mM_KNO3_L-vs-H_Roots_P Parameter: Tissue Value: Roots
  misc_feature: MA Experiment 20000269 PARAMETER Experiment Name: At_1mM_KNO3_L-vs-H_Roots_P Parameter: Treatment Value: 1mM KNO3 vs. 50mM KNO3
  misc_feature: MA Experiment ID: 20000436 Result: Down-regulated in Transcription
  misc_feature: MA Experiment 20000436 PARAMETER Experiment Name: At_Drought_P Parameter: Age (day) Value: 7
  misc_feature: MA Experiment 20000436 PARAMETER Experiment Name: At_Drought_P Parameter: Organism Value: A. thaliana
  misc_feature: MA Experiment 20000436 PARAMETER Experiment Name: At_Drought_P Parameter: Plant Line Value: WS
  misc_feature: MA Experiment 20000436 PARAMETER Experiment Name: At_Drought_P Parameter: Timepoint (hr) Value: 12
  misc_feature: MA Experiment 20000436 PARAMETER Experiment Name: At_Drought_P Parameter: Tissue Value: Whole Plant
  misc_feature: MA Experiment 20000436 PARAMETER Experiment Name: At_Drought_P Parameter: Treatment Value: Drought vs. No Drought
  misc_feature: MA Experiment ID: 20000437 Result: Down-regulated in Transcription
  misc_feature: MA Experiment 20000437 PARAMETER Experiment Name: At_Drought_P Parameter: Age (day) Value: 8
  misc_feature: MA Experiment 20000437 PARAMETER Experiment Name: At_Drought_P Parameter: Organism Value: A. thaliana
  misc_feature: MA Experiment 20000437 PARAMETER Experiment Name: At_Drought_P Parameter: Plant Line Value: WS
  misc_feature: MA Experiment 20000437 PARAMETER Experiment Name: At_Drought_P Parameter: Timepoint (hr) Value: 24
  misc_feature: MA Experiment 20000437 PARAMETER Experiment Name: At_Drought_P Parameter: Tissue Value: Whole Plant
  misc_feature: MA Experiment 20000437 PARAMETER Experiment Name: At_Drought_P Parameter: Treatment Value: Drought vs. No Drought
  misc_feature: MA Experiment ID: 20000438 Result: Up-regulated in Transcription
  misc_feature: MA Experiment 20000438 PARAMETER Experiment Name: At_Shoots__P Parameter: Age (day) Value: 14
  misc_feature: MA Experiment 20000438 PARAMETER Experiment Name: At_Shoots__P Parameter: Tissue Value: Shoots vs. Whole Plant
  misc_feature: MA Experiment ID: 20000439 Result: Up-regulated in Transcription
  misc_feature: MA Experiment 20000439 PARAMETER Experiment Name: At_Roots__P Parameter: Age (day) Value: 14 vs. 21
  misc_feature: MA Experiment 20000439 PARAMETER Experiment Name: At_Roots__P Parameter: Organism Value: A. thaliana
  misc_feature: MA Experiment 20000439 PARAMETER Experiment Name: At_Roots__P Parameter: Tissue Value: Roots vs. Whole Plant
  misc_feature: MA Experiment ID: 20000445 Result: Down-regulated in Transcription
  misc_feature: MA Experiment 20000445 PARAMETER Experiment Name: At_100uM_NAA__P Parameter: Age (day) Value: 14
  misc_feature: MA Experiment 20000445 PARAMETER Experiment Name: At_100uM_NAA__P Parameter: Organism Value: A. thaliana
  misc_feature: MA Experiment 20000445 PARAMETER Experiment Name: At_100uM_NAA__P Parameter: Plant Line Value: WS
  misc_feature: MA Experiment 20000445 PARAMETER Experiment Name: At_100uM_NAA__P Parameter: Timepoint (hr) Value: 6
  misc_feature: MA Experiment 20000445 PARAMETER Experiment Name: At_100uM_NAA__P Parameter: Tissue Value: Aerial
  misc_feature: MA Experiment 20000445 PARAMETER Experiment Name: At_100uM_NAA__P Parameter: Treatment Value: 100uM NAA vs. No Treatment
  misc_feature: MA Experiment ID: 20000452 Result: Up-regulated in Transcription
  misc_feature: MA Experiment 20000452 PARAMETER Experiment Name: At_CS6879_Shoots-Roots_P Parameter: Age (day) Value: 14
  misc_feature: MA Experiment 20000452 PARAMETER Experiment Name: At_CS6879_Shoots-Roots_P Parameter: Organism Value: A. thaliana
  misc_feature: MA Experiment 20000452 PARAMETER Experiment Name: At_CS6879_Shoots-Roots_P Parameter: Plant Line Value: CS6879 vs. WS
  misc_feature: MA Experiment 20000452 PARAMETER Experiment Name: At_CS6879_Shoots-Roots_P Parameter: Tissue Value: Shoots
  misc_feature: MA Experiment ID: 20000453 Result: Down-regulated in Transcription
  misc_feature: MA Experiment 20000453 PARAMETER Experiment Name: At_100uM_ABA_P Parameter: Age (day) Value: 15
  misc_feature: MA Experiment 20000453 PARAMETER Experiment Name: At_100uM_ABA_P Parameter: Organism Value: A. thaliana
  misc_feature: MA Experiment 20000453 PARAMETER Experiment Name: At_100uM_ABA_P Parameter: Plant Line Value: WS
  misc_feature: MA Experiment 20000453 PARAMETER Experiment Name: At_100uM_ABA_P Parameter: Timepoint (hr) Value: 24
  misc_feature: MA Experiment 20000453 PARAMETER Experiment Name: At_100uM_ABA_P Parameter: Tissue Value: Aerial
  misc_feature: MA Experiment 20000453 PARAMETER Experiment Name: At_100uM_ABA_P Parameter: Treatment Value: 100uM ABA vs. No Treatment
  misc_feature: MA Experiment ID: 20000456 Result: Up-regulated in Transcription
  misc_feature: MA Experiment 20000456 PARAMETER Experiment Name: At_100uM_BA_P Parameter: Age (day) Value: 14
  misc_feature: MA Experiment 20000456 PARAMETER Experiment Name: At_100uM_BA_P Parameter: Organism Value: A. thaliana
  misc_feature: MA Experiment 20000456 PARAMETER Experiment Name: At_100uM_BA_P Parameter: Plant Line Value: WS
  misc_feature: MA Experiment 20000456 PARAMETER Experiment Name: At_100uM_BA_P Parameter: Timepoint (hr) Value: 6
  misc_feature: MA Experiment 20000456 PARAMETER Experiment Name: At_100uM_BA_P Parameter: Tissue Value: Aerial
  misc_feature: MA Experiment 20000456 PARAMETER Experiment Name: At_100uM_BA_P Parameter: Treatment Value: 100uM BA vs. No Treatment
  misc_feature: MA Experiment ID: 20000496 Result: Up-regulated in Transcription
  misc_feature: MA Experiment 20000496 PARAMETER Experiment Name: At_Guard_Cells_P Parameter: Harvest Date Value: 7/19/2002
  misc_feature: MA Experiment 20000496 PARAMETER Experiment Name: At_Guard_Cells_P Parameter: Organism Value: Canola
  misc_feature: MA Experiment 20000496 PARAMETER Experiment Name: At_Guard_Cells_P Parameter: Tissue Value: Guard Cells vs. Leaves
  misc_feature: MA Experiment ID: 20000573 Result: Down-regulated in Transcription
  misc_feature: MA Experiment 20000573 PARAMETER Experiment Name: At_100uM_ABA_Mutants__P Parameter: Organism Value: A. thaliana
  misc_feature: MA Experiment 20000573 PARAMETER Experiment Name: At_100uM_ABA_Mutants__P Parameter: Plant Line Value: CS22 vs. Ler wt
  misc_feature: MA Experiment 20000573 PARAMETER Experiment Name: At_100uM_ABA_Mutants__P Parameter: Timepoint (hr) Value: N/A
  misc_feature: MA Experiment 20000573 PARAMETER Experiment Name: At_100uM_ABA_Mutants__P Parameter: Tissue Value: Whole Plant
  misc_feature: MA Experiment 20000573 PARAMETER Experiment Name: At_100uM_ABA_Mutants__P Parameter: Treatment Value: None
  misc_feature: MA Experiment ID: 20000574 Result: Down-regulated in Transcription
  misc_feature: MA Experiment 20000574 PARAMETER Experiment Name: At_100uM_ABA_Mutants__P Parameter: Organism Value: A. thaliana
  misc_feature: MA Experiment 20000574 PARAMETER Experiment Name: At_100uM_ABA_Mutants__P Parameter: Plant Line Value: CS23 vs. Ler wt
  misc_feature: MA Experiment 20000574 PARAMETER Experiment Name: At_100uM_ABA_Mutants__P Parameter: Timepoint (hr) Value: N/A
  misc_feature: MA Experiment 20000574 PARAMETER Experiment Name: At_100uM_ABA_Mutants__P Parameter: Tissue Value: Whole Plant
  misc_feature: MA Experiment 20000574 PARAMETER Experiment Name: At_100uM_ABA_Mutants__P Parameter: Treatment Value: None
  misc_feature: MA Experiment ID: 20000575 Result: Down-regulated in Transcription
  misc_feature: MA Experiment 20000575 PARAMETER Experiment Name: At_100uM_ABA_Mutants__P Parameter: Organism Value: A. thaliana
  misc_feature: MA Experiment 20000575 PARAMETER Experiment Name: At_100uM_ABA_Mutants__P Parameter: Plant Line Value: CS22
  misc_feature: MA Experiment 20000575 PARAMETER Experiment Name: At_100uM_ABA_Mutants__P Parameter: Timepoint (hr) Value: 6
  misc_feature: MA Experiment 20000575 PARAMETER Experiment Name: At_100uM_ABA_Mutants__P Parameter: Tissue Value: Whole Plant
  misc_feature: MA Experiment 20000575 PARAMETER Experiment Name: At_100uM_ABA_Mutants__P Parameter: Treatment Value: 1uM ABA vs. No Treatment
  misc_feature: MA Experiment ID: 20000576 Result: Down-regulated in Transcription
  misc_feature: MA Experiment 20000576 PARAMETER Experiment Name: At_100uM_ABA_Mutants__P Parameter: Organism Value: A. thaliana
  misc_feature: MA Experiment 20000576 PARAMETER Experiment Name: At_100uM_ABA_Mutants__P Parameter: Plant Line Value: CS23
  misc_feature: MA Experiment 20000576 PARAMETER Experiment Name: At_100uM_ABA_Mutants__P Parameter: Timepoint (hr) Value: 6
  misc_feature: MA Experiment 20000576 PARAMETER Experiment Name: At_100uM_ABA_Mutants__P Parameter: Tissue Value: Whole Plant
  misc_feature: MA Experiment 20000576 PARAMETER Experiment Name: At_100uM_ABA_Mutants__P Parameter: Treatment Value: 1uM ABA vs. No Treatment
  misc_feature: MA Experiment ID: 20001247 Result: Down-regulated in Transcription
  misc_feature: MA Experiment 20001247 PARAMETER Experiment Name: At_Far-red-induction_P Parameter: Age (day) Value: 7
  misc_feature: MA Experiment 20001247 PARAMETER Experiment Name: At_Far-red-induction_P Parameter: Light Value: Far-red vs. White
  misc_feature: MA Experiment 20001247 PARAMETER Experiment Name: At_Far-red-induction_P Parameter: Organism Value: A. thaliana
  misc_feature: MA Experiment 20001247 PARAMETER Experiment Name: At_Far-red-induction_P Parameter: Plant Line Value: Columbia
  misc_feature: MA Experiment 20001247 PARAMETER Experiment Name: At_Far-red-induction_P Parameter: Timepoint (hr) Value: 1
  misc_feature: MA Experiment 20001247 PARAMETER Experiment Name: At_Far-red-induction_P Parameter: Tissue Value: Whole Plant
  misc_feature: MA Experiment ID: 20001248 Result: Down-regulated in Transcription
  misc_feature: MA Experiment 20001248 PARAMETER Experiment Name: At_Far-red-induction_P Parameter: Age (day) Value: 7
  misc_feature: MA Experiment 20001248 PARAMETER Experiment Name: At_Far-red-induction_P Parameter: Light Value: Far-red vs. White
  misc_feature: MA Experiment 20001248 PARAMETER Experiment Name: At_Far-red-induction_P Parameter: Organism Value: A. thaliana
  misc_feature: MA Experiment 20001248 PARAMETER Experiment Name: At_Far-red-induction_P Parameter: Plant Line Value: Columbia
  misc_feature: MA Experiment 20001248 PARAMETER Experiment Name: At_Far-red-induction_P Parameter: Timepoint (hr) Value: 4
  misc_feature: MA Experiment 20001248 PARAMETER Experiment Name: At_Far-red-induction_P Parameter: Tissue Value: Whole Plant
  misc_feature: MA Experiment ID: 20001450 Result: Down-regulated in Transcription
  misc_feature: MA Experiment 20001450 PARAMETER Experiment Name: At_Far-red-induction_P Parameter: Age (day) Value: 7
  misc_feature: MA Experiment 20001450 PARAMETER Experiment Name: At_Far-red-induction_P Parameter: Light Value: Far-red vs. White
  misc_feature: MA Experiment 20001450 PARAMETER Experiment Name: At_Far-red-induction_P Parameter: Organism Value: A. thaliana
  misc_feature: MA Experiment 20001450 PARAMETER Experiment Name: At_Far-red-induction_P Parameter: Plant Line Value: Columbia
  misc_feature: MA Experiment 20001450 PARAMETER Experiment Name: At_Far-red-induction_P Parameter: Timepoint (hr) Value: 8
  misc_feature: MA Experiment 20001450 PARAMETER Experiment Name: At_Far-red-induction_P Parameter: Tissue Value: Whole Plant
  misc_feature: MA Experiment ID: 20001451 Result: Down-regulated in Transcription
  misc_feature: MA Experiment 20001451 PARAMETER Experiment Name: At_Far-red-induction_P Parameter: Age (day) Value: 7
  misc_feature: MA Experiment 20001451 PARAMETER Experiment Name: At_Far-red-induction_P Parameter: Light Value: Far-red vs. White
  misc_feature: MA Experiment 20001451 PARAMETER Experiment Name: At_Far-red-induction_P Parameter: Organism Value: A. thaliana
  misc_feature: MA Experiment 20001451 PARAMETER Experiment Name: At_Far-red-induction_P Parameter: Plant Line Value: Columbia
  misc_feature: MA Experiment 20001451 PARAMETER Experiment Name: At_Far-red-induction_P Parameter: Timepoint (hr) Value: 24
  misc_feature: MA Experiment 20001451 PARAMETER Experiment Name: At_Far-red-induction_P Parameter: Tissue Value: Whole Plant
  misc_feature: MA Experiment ID: 20001556 Result: Up-regulated in Transcription
  misc_feature: MA Experiment 20001556 PARAMETER Experiment Name: At_Drought_Soil_Dry_P Parameter: Age (day) Value: 26
  misc_feature: MA Experiment 20001556 PARAMETER Experiment Name: At_Drought_Soil_Dry_P Parameter: Organism Value: A. thaliana
  misc_feature: MA Experiment 20001556 PARAMETER Experiment Name: At_Drought_Soil_Dry_P Parameter: Plant Line Value: WS
  misc_feature: MA Experiment 20001556 PARAMETER Experiment Name: At_Drought_Soil_Dry_P Parameter: Post Timepoint (hr) Value: None
  misc_feature: MA Experiment 20001556 PARAMETER Experiment Name: At_Drought_Soil_Dry_P Parameter: Post-Treatment Value: None
  misc_feature: MA Experiment 20001556 PARAMETER Experiment Name: At_Drought_Soil_Dry_P Parameter: Timepoint (day) Value: 12
  misc_feature: MA Experiment 20001556 PARAMETER Experiment Name: At_Drought_Soil_Dry_P Parameter: Treatment Value: Drought vs. No Drought
  misc_feature: MA Experiment ID: 20001557 Result: Up-regulated in Transcription
  misc_feature: MA Experiment 20001557 PARAMETER Experiment Name: At_Drought_Soil_Dry_P Parameter: Age (day) Value: 27
  misc_feature: MA Experiment 20001557 PARAMETER Experiment Name: At_Drought_Soil_Dry_P Parameter: Organism Value: A. thaliana
  misc_feature: MA Experiment 20001557 PARAMETER Experiment Name: At_Drought_Soil_Dry_P Parameter: Plant Line Value: WS
  misc_feature: MA Experiment 20001557 PARAMETER Experiment Name: At_Drought_Soil_Dry_P Parameter: Post Timepoint (hr) Value: 3
  misc_feature: MA Experiment 20001557 PARAMETER Experiment Name: At_Drought_Soil_Dry_P Parameter: Post-Treatment Value: Re-Water vs. No Drought
  misc_feature: MA Experiment 20001557 PARAMETER Experiment Name: At_Drought_Soil_Dry_P Parameter: Timepoint (day) Value: 13
  misc_feature: MA Experiment 20001557 PARAMETER Experiment Name: At_Drought_Soil_Dry_P Parameter: Treatment Value: Drought vs. No Drought
  misc_feature: MA Experiment ID: 20001560 Result: Down-regulated in Transcription
  misc_feature: MA Experiment 20001560 PARAMETER Experiment Name: At_Drought_Soil_Dry_P Parameter: Age (day) Value: 28
  misc_feature: MA Experiment 20001560 PARAMETER Experiment Name: At_Drought_Soil_Dry_P Parameter: Organism Value: A. thaliana
  misc_feature: MA Experiment 20001560 PARAMETER Experiment Name: At_Drought_Soil_Dry_P Parameter: Plant Line Value: WS
  misc_feature: MA Experiment 20001560 PARAMETER Experiment Name: At_Drought_Soil_Dry_P Parameter: Post Timepoint (hr) Value: None
  misc_feature: MA Experiment 20001560 PARAMETER Experiment Name: At_Drought_Soil_Dry_P Parameter: Post-Treatment Value: None
  misc_feature: MA Experiment 20001560 PARAMETER Experiment Name: At_Drought_Soil_Dry_P Parameter: Timepoint (day) Value: 14
  misc_feature: MA Experiment 20001560 PARAMETER Experiment Name: At_Drought_Soil_Dry_P Parameter: Treatment Value: Drought vs. No Drought
  misc_feature: MA Experiment ID: 20001757 Result: Up-regulated in Transcription
  misc_feature: MA Experiment 20001757 PARAMETER Experiment Name: At_50mM_NH4NO3_L-to-H_P Parameter: Timepoint (hr) Value: 6
  misc_feature: MA Experiment 20001757 PARAMETER Experiment Name: At_50mM_NH4NO3_L-to-H_P Parameter: Tissue Value: Leaf
  misc_feature: MA Experiment 20001757 PARAMETER Experiment Name: At_50mM_NH4NO3_L-to-H_P Parameter: Treatment Value: 50mM NH4NO3 vs 100mM Mannitol
  misc_feature: MA Experiment ID: 20001770 Result: Down-regulated in Transcription
  misc_feature: MA Experiment 20001770 PARAMETER Experiment Name: At_Far-red-enriched-adult_P Parameter: Age (day) Value: 28
  misc_feature: MA Experiment 20001770 PARAMETER Experiment Name: At_Far-red-enriched-adult_P Parameter: Light Value: Far-red enriched vs. White
  misc_feature: MA Experiment 20001770 PARAMETER Experiment Name: At_Far-red-enriched-adult_P Parameter: Organism Value: A. thaliana
  misc_feature: MA Experiment 20001770 PARAMETER Experiment Name: At_Far-red-enriched-adult_P Parameter: Plant Line Value: Columbia
  misc_feature: MA Experiment 20001770 PARAMETER Experiment Name: At_Far-red-enriched-adult_P Parameter: Timepoint (hr) Value: 8
  misc_feature: MA Experiment 20001770 PARAMETER Experiment Name: At_Far-red-enriched-adult_P Parameter: Tissue Value: Aerial
  misc_feature: MA Experiment ID: 20001906 Result: Down-regulated in Transcription
  misc_feature: MA Experiment 20001906 PARAMETER Experiment Name: At_Drought_Reproduction_P Parameter: Age (day) Value: 35
  misc_feature: MA Experiment 20001906 PARAMETER Experiment Name: At_Drought_Reproduction_P Parameter: Organism Value: A. thaliana
  misc_feature: MA Experiment 20001906 PARAMETER Experiment Name: At_Drought_Reproduction_P Parameter: Plant Line Value: WS
  misc_feature: MA Experiment 20001906 PARAMETER Experiment Name: At_Drought_Reproduction_P Parameter: Timepoint (day) Value: 5
  misc_feature: MA Experiment 20001906 PARAMETER Experiment Name: At_Drought_Reproduction_P Parameter: Tissue Value: Siliques
  misc_feature: MA Experiment 20001906 PARAMETER Experiment Name: At_Drought_Reproduction_P Parameter: Treatment Value: Drought vs. No Drought
attcatttcatacatatttgtctctcttaaatgtgtttatttccccttttgtagtaaccactcaaaaggttttacttcactcaaaaatggctttgtctcttatctttctagctctcttagtgttgtgccctagtagtggtcacagccaacgttctccttcaccgggatactacccgagttcccgagtaccgacttcaccttttgatcgtgaattccgtactttatggggctctcaacaccaacgtagagagcaagacgttgtcactctttggctcgacaaatccactgggagtgggttcaagtctcttcgtccataccggtcgggctactttggtgcttccattaagctccaaccaggcttcactgctggagtggatacatccctctatctctcaaacaaccaagagcatcctggagaccacgatgaggtcgatatcgagtttctagggacaacgccagggaagccttattcccttcaaacgaatgtcttcgttaggggaagtggcgaccgaaatgtcattggaagagaaatgaaatttaccttgtggtttgaccctactcaagattttcaccattacgcaattttgtggaaccctaaccaaattgtattctttgtagacgatgtaccgatacgtacatataatagaaagaatgaagctatattccccacaagaccgatgtgggtttacggatcgatatgggatgcatcggactgggccacagaaaatggaaggatcaaagccgactatcgataccaaccatttgtggctaagtacaaaaactttaagctagcgggatgcacagcggatagctctagctcatgcagaccgccatcgcctgcacccatgcgcaaccgcgggttgagccggcagcagatggcggcattgacatgggcacagaggaacttcttggtctataactattgccatgatccgaaaagagaccatacccaaacaccagaatgttaaaacaaacaaacaaaagaaaggttataataattttattttgcattatcaaacatacatgaataattggaggtcttgtgacgggtccacactggaaactatattgaagcagttgagcgtccggtcctctatgatttgagattaaaaagaaaaggttttgtttttcaatactttgtaatgtttccatttggtatctttcttataattgtaatattgtgtgatcacatatattaatatctggtattgtattgttgtgtgaaccaaaaaagaaagaaaaagaatggaagttgttctttcgaaggtggctt

SEQ ID NO: 41711 - protein, 321 aa, Arabidopsis thaliana
  peptide (1)..(321): Ceres Seq. ID no. 12421175
  misc_feature (67)..(251): Pfam Name: Glycosyl hydrolases family 16 Pfam Description: Glycosyl hydrolases family 16
  misc_feature (57)..(321): Homolog of NCBI NO: 38605537 NR Description: Probable xyloglucan
  misc_feature (130)..(321): Homolog of NCBI NO: 1084391 NR Description: xyloglucan endo-1,4-beta-D-glucanase (EC 3.2.1.-)
  misc_feature (33)..(321): Homolog of NCBI NO: 34901732 NR Description: putative xyloglucan endo-transglycosylase
  misc_feature (31)..(321): Homolog of NCBI NO: 37536586 NR Description: putative cellulase [Oryza sativa (japonica
  misc_feature (36)..(321): Homolog of NCBI NO: 17402583 NR Description: Xyloglucan endo-transglycosylase [Vitis labrusca
  misc_feature (34)..(321): Homolog of NCBI NO: 1362078 NR Description: xyloglucan endo-1,4-beta-D-glucanase (EC 3.2.1.-)
  misc_feature (26)..(321): Homolog of NCBI NO: 15228047 NR Description: xyloglucan endotransglycosylase, putative
  misc_feature (33)..(321): Homolog of NCBI NO: 14029149 NR Description: xyloglucan endo-transglycosylase [Carica papaya]
  misc_feature (29)..(321): Homolog of NCBI NO: 1769907 NR Description: xyloglucan endo-transglycosylase [Arabidopsis
  misc_feature (29)..(321): Homolog of NCBI NO: 15230574 NR Description: xyloglucan endotransglycosylase, putative
SFHTYLSLLNVFISPFVVTTQKVLLHSKMALSLIFLALLVLCPSSGHSQRSPSPGYYPSSRVPTSPFDREFRTLWGSQHQRREQDVVTLWLDKSTGSGFKSLRPYRSGYFGASIKLQPGFTAGVDTSLYLSNNQEHPGDHDEVDIEFLGTTPGKPYSLQTNVFVRGSGDRNVIGREMKFTLWFDPTQDFHHYAILWNPNQIVFFVDDVPIRTYNRKNEAIFPTRPMWVYGSIWDASDWATENGRIKADYRYQPFVAKYKNFKLAGCTADSSSSCRPPSPAPMRNRGLSRQQMAALTWAQRNFLVYNYCHDPKRDHTQTPEC

SEQ ID NO: 41712 - protein, 293 aa, Arabidopsis thaliana
  peptide (1)..(293): Ceres Seq. ID no. 12421176
  misc_feature (39)..(223): Pfam Name: Glycosyl hydrolases family 16 Pfam Description: Glycosyl hydrolases family 16
  misc_feature (29)..(293): Homolog of NCBI NO: 38605537 NR Description: Probable xyloglucan
  misc_feature (102)..(293): Homolog of NCBI NO: 1084391 NR Description: xyloglucan endo-1,4-beta-D-glucanase (EC 3.2.1.-)
  misc_feature (5)..(293): Homolog of NCBI NO: 34901732 NR Description: putative xyloglucan endo-transglycosylase
  misc_feature (3)..(293): Homolog of NCBI NO: 37536586 NR Description: putative cellulase [Oryza sativa (japonica
  misc_feature (8)..(293): Homolog of NCBI NO: 17402583 NR Description: Xyloglucan endo-transglycosylase [Vitis labrusca
  misc_feature (6)..(293): Homolog of NCBI NO: 1362078 NR Description: xyloglucan endo-1,4-beta-D-glucanase (EC 3.2.1.-)
  misc_feature (1)..(293): Homolog of NCBI NO: 15228047 NR Description: xyloglucan endotransglycosylase, putative
  misc_feature (5)..(293): Homolog of NCBI NO: 14029149 NR Description: xyloglucan endo-transglycosylase [Carica papaya]
  misc_feature (1)..(293): Homolog of NCBI NO: 1769907 NR Description: xyloglucan endo-transglycosylase [Arabidopsis
  misc_feature (1)..(293): Homolog of NCBI NO: 15230574 NR Description: xyloglucan endotransglycosylase, putative
MALSLIFLALLVLCPSSGHSQRSPSPGYYPSSRVPTSPFDREFRTLWGSQHQRREQDVVTLWLDKSTGSGFKSLRPYRSGYFGASIKLQPGFTAGVDTSLYLSNNQEHPGDHDEVDIEFLGTTPGKPYSLQTNVFVRGSGDRNVIGREMKFTLWFDPTQDFHHYAILWNPNQIVFFVDDVPIRTYNRKNEAIFPTRPMWVYGSIWDASDWATENGRIKADYRYQPFVAKYKNFKLAGCTADSSSSCRPPSPAPMRNRGLSRQQMAALTWAQRNFLVYNYCHDPKRDHTQTPEC

SEQ ID NO: 41713 - DNA, 1027 bp, Arabidopsis thaliana
  misc_feature (1)..(1027): Ceres Seq. ID no. 13580388
  misc_feature: MA Experiment ID: 108434 Result: Down-regulated in Transcription
  misc_feature: MA Experiment 108434 PARAMETER Experiment Name: At_Root_Tips_cDNA_P Parameter: Tissue Value: Root Tips
  misc_feature: MA Experiment ID: 108461 Result: Up-regulated in Transcription
  misc_feature: MA Experiment 108461 PARAMETER Experiment Name: At_Germinating_Seeds_cDNA_P Parameter: Age (day) Value: 1 vs. 0
  misc_feature: MA Experiment 108461 PARAMETER Experiment Name: At_Germinating_Seeds_cDNA_P Parameter: Tissue Value: Germinating Seeds
  misc_feature: MA Experiment ID: 108462 Result: Up-regulated in Transcription
  misc_feature: MA Experiment 108462 PARAMETER Experiment Name: At_Germinating_Seeds_cDNA_P Parameter: Age (day) Value: 2 vs. 0
  misc_feature: MA Experiment 108462 PARAMETER Experiment Name: At_Germinating_Seeds_cDNA_P Parameter: Tissue Value: Germinating Seeds
  misc_feature: MA Experiment ID: 108464 Result: Up-regulated in Transcription
  misc_feature: MA Experiment 108464 PARAMETER Experiment Name: At_Germinating_Seeds_cDNA_P Parameter: Age (day) Value: 4 vs. 0
  misc_feature: MA Experiment 108464 PARAMETER Experiment Name: At_Germinating_Seeds_cDNA_P Parameter: Tissue Value: Germinating Seeds
  misc_feature: MA Experiment ID: 108488 Result: Up-regulated in Transcription
  misc_feature: MA Experiment ID: 108489 Result: Down-regulated in Transcription
  misc_feature: MA Experiment ID: 108595 Result: Down-regulated in Transcription
  misc_feature: MA Experiment 108595 PARAMETER Experiment Name: At_Ler-pi_Ovule_cDNA_P Parameter: Plant Line Value: null
  misc_feature: MA Experiment ID: 20000180 Result: Up-regulated in Transcription
  misc_feature: MA Experiment 20000180 PARAMETER Experiment Name: At_Germinating_Seeds_P Parameter: Age (hr) Value: 24 vs. 0
  misc_feature: MA Experiment 20000180 PARAMETER Experiment Name: At_Germinating_Seeds_P Parameter: Tissue Value: Germinating Seeds
  misc_feature: MA Experiment ID: 20000185 Result: Down-regulated in Transcription
  misc_feature: MA Experiment 20000185 PARAMETER Experiment Name: At_Roots__P Parameter: Age (day) Value: 7 vs. 21
  misc_feature: MA Experiment 20000185 PARAMETER Experiment Name: At_Roots__P Parameter: Organism Value: A. thaliana
  misc_feature: MA Experiment 20000185 PARAMETER Experiment Name: At_Roots__P Parameter: Tissue Value: Roots vs. Whole Plant
  misc_feature: MA Experiment ID: 20000227 Result: Down-regulated in Transcription
  misc_feature: MA Experiment 20000227 PARAMETER Experiment Name: At_Root-Tips-vs-Tops_P Parameter: Tissue Value: Root Tips vs. Root Tops
  misc_feature: MA Experiment ID: 20000234 Result: Down-regulated in Transcription
  misc_feature: MA Experiment 20000234 PARAMETER Experiment Name: At_Siliques_P Parameter: Age (day) Value: 21
  misc_feature: MA Experiment 20000234 PARAMETER Experiment Name: At_Siliques_P Parameter: Organism Value: A. thaliana
  misc_feature: MA Experiment 20000234 PARAMETER Experiment Name: At_Siliques_P Parameter: Plant Line Value: WS
  misc_feature: MA Experiment 20000234 PARAMETER Experiment Name: At_Siliques_P Parameter: Tissue Value: Less Than 5mm Siliques vs. Whole Plant
  misc_feature: MA Experiment ID: 20000264 Result: Down-regulated in Transcription
  misc_feature: MA Experiment 20000264 PARAMETER Experiment Name: At_Open_Flower_P Parameter: Age (day) Value: 21
  misc_feature: MA Experiment 20000264 PARAMETER Experiment Name: At_Open_Flower_P Parameter: Plant Line Value: WS
  misc_feature: MA Experiment 20000264 PARAMETER Experiment Name: At_Open_Flower_P Parameter: Tissue Value: Open Flower vs. Whole Plant
  misc_feature: MA Experiment ID: 20000265 Result: Down-regulated in Transcription
  misc_feature: MA Experiment 20000265 PARAMETER Experiment Name: At_Open_Flower_P Parameter: Age (day) Value: 21
  misc_feature: MA Experiment 20000265 PARAMETER Experiment Name: At_Open_Flower_P Parameter: Plant Line Value: WS
  misc_feature: MA Experiment 20000265 PARAMETER Experiment Name: At_Open_Flower_P Parameter: Tissue Value: Closed Flower vs. Whole Plant
  misc_feature: MA Experiment ID: 20000269 Result: Down-regulated in Transcription
  misc_feature: MA Experiment 20000269 PARAMETER Experiment Name: At_1mM_KNO3_L-vs-H_Roots_P Parameter: Age (day) Value: 7,10,12
  misc_feature: MA Experiment 20000269 PARAMETER Experiment Name: At_1mM_KNO3_L-vs-H_Roots_P Parameter: Organism Value: A. thaliana
  misc_feature: MA Experiment 20000269 PARAMETER Experiment Name: At_1mM_KNO3_L-vs-H_Roots_P Parameter: Plant Line Value: WS
  misc_feature: MA Experiment 20000269 PARAMETER Experiment Name: At_1mM_KNO3_L-vs-H_Roots_P Parameter: Timepoint (day) Value: 7,10,12
  misc_feature: MA Experiment 20000269 PARAMETER Experiment Name: At_1mM_KNO3_L-vs-H_Roots_P Parameter: Tissue Value: Roots
  misc_feature: MA Experiment 20000269 PARAMETER Experiment Name: At_1mM_KNO3_L-vs-H_Roots_P Parameter: Treatment Value: 1mM KNO3 vs. 50mM KNO3
  misc_feature: MA Experiment ID: 20000286 Result: Down-regulated in Transcription
  misc_feature: MA Experiment 20000286 PARAMETER Experiment Name: At_Open_Flower_P Parameter: Age (day) Value: 21
  misc_feature: MA Experiment 20000286 PARAMETER Experiment Name: At_Open_Flower_P Parameter: Plant Line Value: WS
  misc_feature: MA Experiment 20000286 PARAMETER Experiment Name: At_Open_Flower_P Parameter: Tissue Value: Half Open vs. Whole Plant
  misc_feature: MA Experiment ID: 20000439 Result: Down-regulated in Transcription
  misc_feature: MA Experiment 20000439 PARAMETER Experiment Name: At_Roots__P Parameter: Age (day) Value: 14 vs. 21
  misc_feature: MA Experiment 20000439 PARAMETER Experiment Name: At_Roots__P Parameter: Organism Value: A. thaliana
  misc_feature: MA Experiment 20000439 PARAMETER Experiment Name: At_Roots__P Parameter: Tissue Value: Roots vs. Whole Plant
  misc_feature: MA Experiment ID: 20000441 Result: Up-regulated in Transcription
  misc_feature: MA Experiment 20000441 PARAMETER Experiment Name: At_1uM_BR-BRZ__P Parameter: Tissue Value: Shoot Apices
  misc_feature: MA Experiment 20000441 PARAMETER Experiment Name: At_1uM_BR-BRZ__P Parameter: Treatment Value: 1uM BR vs. No Treatment
  misc_feature: MA Experiment ID: 20000443 Result: Up-regulated in Transcription
  misc_feature: MA Experiment 20000443 PARAMETER Experiment Name: At_1uM_BR-BRZ__P Parameter: Tissue Value: Shoot Apices
  misc_feature: MA Experiment 20000443 PARAMETER Experiment Name: At_1uM_BR-BRZ__P Parameter: Treatment Value: 1uM BRZ vs. No Treatment
  misc_feature: MA Experiment ID: 20000574 Result: Down-regulated in Transcription
  misc_feature: MA Experiment 20000574 PARAMETER Experiment Name: At_100uM_ABA_Mutants__P Parameter: Organism Value: A. thaliana
  misc_feature: MA Experiment 20000574 PARAMETER Experiment Name: At_100uM_ABA_Mutants__P Parameter: Plant Line Value: CS23 vs. Ler wt
  misc_feature: MA Experiment 20000574 PARAMETER Experiment Name: At_100uM_ABA_Mutants__P Parameter: Timepoint (hr) Value: N/A
  misc_feature: MA Experiment 20000574 PARAMETER Experiment Name: At_100uM_ABA_Mutants__P Parameter: Tissue Value: Whole Plant
  misc_feature: MA Experiment 20000574 PARAMETER Experiment Name: At_100uM_ABA_Mutants__P Parameter: Treatment Value: None
  misc_feature: MA Experiment ID: 20000794 Result: Down-regulated in Transcription
  misc_feature: MA Experiment 20000794 PARAMETER Experiment Name: At_Petals_P Parameter: Age (day) Value: 23-25 days
  misc_feature: MA Experiment 20000794 PARAMETER Experiment Name: At_Petals_P Parameter: Plant Line Value: WS
  misc_feature: MA Experiment 20000794 PARAMETER Experiment Name: At_Petals_P Parameter: Tissue Value: Petals vs. Whole plant
  misc_feature: MA Experiment ID: 20001557 Result: Down-regulated in Transcription
  misc_feature: MA Experiment 20001557 PARAMETER Experiment Name: At_Drought_Soil_Dry_P Parameter: Age (day) Value: 27
  misc_feature: MA Experiment 20001557 PARAMETER Experiment Name: At_Drought_Soil_Dry_P Parameter: Organism Value: A. thaliana
  misc_feature: MA Experiment 20001557 PARAMETER Experiment Name: At_Drought_Soil_Dry_P Parameter: Plant Line Value: WS
  misc_feature: MA Experiment 20001557 PARAMETER Experiment Name: At_Drought_Soil_Dry_P Parameter: Post Timepoint (hr) Value: 3
  misc_feature: MA Experiment 20001557 PARAMETER Experiment Name: At_Drought_Soil_Dry_P Parameter: Post-Treatment Value: Re-Water vs. No Drought
  misc_feature: MA Experiment 20001557 PARAMETER Experiment Name: At_Drought_Soil_Dry_P Parameter: Timepoint (day) Value: 13
  misc_feature: MA Experiment 20001557 PARAMETER Experiment Name: At_Drought_Soil_Dry_P Parameter: Treatment Value: Drought vs. No Drought
  misc_feature: MA Experiment ID: 20001558 Result: Down-regulated in Transcription
  misc_feature: MA Experiment 20001558 PARAMETER Experiment Name: At_Drought_Soil_Dry_P Parameter: Age (day) Value: 27
  misc_feature: MA Experiment 20001558 PARAMETER Experiment Name: At_Drought_Soil_Dry_P Parameter: Organism Value: A. thaliana
  misc_feature: MA Experiment 20001558 PARAMETER Experiment Name: At_Drought_Soil_Dry_P Parameter: Plant Line Value: WS
  misc_feature: MA Experiment 20001558 PARAMETER Experiment Name: At_Drought_Soil_Dry_P Parameter: Post Timepoint (hr) Value: 6
  misc_feature: MA Experiment 20001558 PARAMETER Experiment Name: At_Drought_Soil_Dry_P Parameter: Post-Treatment Value: Re-Water vs. No Drought
  misc_feature: MA Experiment 20001558 PARAMETER Experiment Name: At_Drought_Soil_Dry_P Parameter: Timepoint (day) Value: 13
  misc_feature: MA Experiment 20001558 PARAMETER Experiment Name: At_Drought_Soil_Dry_P Parameter: Treatment Value: Drought vs. No Drought
  misc_feature: MA Experiment ID: 20001757 Result: Up-regulated in Transcription
  misc_feature: MA Experiment 20001757 PARAMETER Experiment Name: At_50mM_NH4NO3_L-to-H_P Parameter: Timepoint (hr) Value: 6
  misc_feature: MA Experiment 20001757 PARAMETER Experiment Name: At_50mM_NH4NO3_L-to-H_P Parameter: Tissue Value: Leaf
  misc_feature: MA Experiment 20001757 PARAMETER Experiment Name: At_50mM_NH4NO3_L-to-H_P Parameter: Treatment Value: 50mM NH4NO3 vs 100mM Mannitol
  misc_feature: MA Experiment ID: 20001905 Result: Down-regulated in Transcription
  misc_feature: MA Experiment 20001905 PARAMETER Experiment Name: At_Drought_Reproduction_P Parameter: Age (day) Value: 40
  misc_feature: MA Experiment 20001905 PARAMETER Experiment Name: At_Drought_Reproduction_P Parameter: Organism Value: A. thaliana
  misc_feature: MA Experiment 20001905 PARAMETER Experiment Name: At_Drought_Reproduction_P Parameter: Plant Line Value: WS
  misc_feature: MA Experiment 20001905 PARAMETER Experiment Name: At_Drought_Reproduction_P Parameter: Timepoint (day) Value: 10
  misc_feature: MA Experiment 20001905 PARAMETER Experiment Name: At_Drought_Reproduction_P Parameter: Tissue Value: Rosettes
  misc_feature: MA Experiment 20001905 PARAMETER Experiment Name: At_Drought_Reproduction_P Parameter: Treatment Value: Drought vs. No Drought
gattacacaacacacgttcgtttctttcttcttctaacacactctgagtcttgaaggtcaacaacgtcgagaataatggcatcatctctttgtgcttcttctgccatcgctgccatttcttctccaagtttcttgggctaagaaactgaggctgaagaagaagttgactgttccagctgtgtccaggccagatgcgtcggtgcgcgccgtcgcagctgatccagatagaccaatctggttcccgggaagcactcctccagagtggctagacggtagcctccctggtgacttcggatttgatcctcttggtctttcatcggacccggacagtctaaaatggaacgtacaagccgagatagtccactgccgatgggctatgctaggagccgccgggatattcatcccagagttcctaacgaagatcggaatcctcaacactccgtcatggtacacggcgggagagcaagagtatttcacggacaaaaccacactctttgtcgttgagctcatcttgatcggatgggcagaaggacgtagatgggccgatatcatcaagcccggtagcgtcaacactgacccagtcttcccaaacaacaaactgacgggcacagacgttggttacccaggtgggttatggttcgacccgttgggttggggatccggtagcccggctaaactcaaggagttgaggaccaaggagatcaagaacggaaggttggctatgttggcagtgatgggtgcttggttccaacacatctacacgggcactggtcctattgataacctttttgcacatcttgctgatcctggtcacgccacaatcttcgctgctttcacacccaagtgagacaacgaaaaagggttatggggaggtgaatgcgtttgtgtgtgatcatgtttgtacaaatatcattttgaacttaaaattattatgtactttatataaattgtggtcgaatgcaaattaaggttccccgtaacactctcttttcctaactcaatgatcataagatgcttttacattgtc

SEQ ID NO: 41714 - protein, 156 aa, Arabidopsis thaliana
  peptide (1)..(156): Ceres Seq. ID no. 13580389
  misc_feature (1)..(127): Pfam Name: Chlorophyll A-B binding protein Pfam Description: Chlorophyll A-B binding protein
  misc_feature (1)..(156): Homolog of NCBI NO: 99486 NR Description: chlorophyll a/b-binding protein (clone pINEab 31)
  misc_feature (1)..(156): Homolog of NCBI NO: 18376587 NR Description: putative chlorophyll A-B binding protein of LHCI
  misc_feature (1)..(156): Homolog of NCBI NO: 1076724 NR Description: LHCI-680, photosystem I antenna protein - barley
  misc_feature (1)..(156): Homolog of NCBI NO: 7443233 NR Description: chlorophyll a/b-binding protein type II,
  misc_feature (1)..(156): Homolog of NCBI NO: 34393511 NR Description: putative photosystem I antenna protein
  misc_feature (1)..(156): Homolog of NCBI NO: 2129879 NR Description: chlorophyll a/b-binding protein type II
  misc_feature (1)..(156): Homolog of NCBI NO: 115765 NR Description: Chlorophyll A-B binding protein 7, chloroplast
  misc_feature (1)..(156): Homolog of NCBI NO: 115766 NR Description: Chlorophyll A-B binding protein, chloroplast
  misc_feature (1)..(156): Homolog of NCBI NO: 15233120 NR Description: light-harvesting chlorophyll a/b binding protein
  misc_feature (1)..(156): Homolog of NCBI NO: 11277627 NR Description: PS I antenna protein Lhca2 [imported] -
MLGAAGIFIPEFLTKIGILNTPSWYTAGEQEYFTDKTTLFVVELILIGWAEGRRWADIIKPGSVNTDPVFPNNKLTGTDVGYPGGLWFDPLGWGSGSPAKLKELRTKEIKNGRLAMLAVMGAWFQHIYTGTGPIDNLFAHLADPGHATIFAAFTPK

SEQ ID NO: 41715 - DNA, 954 bp, Arabidopsis thaliana
  misc_feature (1)..(954): Ceres Seq. ID no. 12370854
  misc_feature: MA Experiment ID: 108434 Result: Down-regulated in Transcription
  misc_feature: MA Experiment 108434 PARAMETER Experiment Name: At_Root_Tips_cDNA_P Parameter: Tissue Value: Root Tips
  misc_feature: MA Experiment ID: 108573 Result: Up-regulated in Transcription
  misc_feature: MA Experiment 108573 PARAMETER Experiment Name: At_Drought_cDNA_P Parameter: Timepoint (hr) Value: 6
  misc_feature: MA Experiment 108573 PARAMETER Experiment Name: At_Drought_cDNA_P Parameter: Tissue Value: Aerial
  misc_feature: MA Experiment 108573 PARAMETER Experiment Name: At_Drought_cDNA_P Parameter: Treatment Value: Drought vs. No Drought
  misc_feature: MA Experiment ID: 108579 Result: Up-regulated in Transcription
  misc_feature: MA Experiment 108579 PARAMETER Experiment Name: At_4deg_Cold_cDNA_P Parameter: Temperature (deg C) Value: 4 vs. 22
  misc_feature: MA Experiment 108579 PARAMETER Experiment Name: At_4deg_Cold_cDNA_P Parameter: Timepoint (hr) Value: 6
  misc_feature: MA Experiment 108579 PARAMETER Experiment Name: At_4deg_Cold_cDNA_P Parameter: Tissue Value: Aerial
  misc_feature: MA Experiment ID: 108585 Result: Up-regulated in Transcription
  misc_feature: MA Experiment 108585 PARAMETER Experiment Name: At_5mM_NaNP_cDNA_P Parameter: Timepoint (hr) Value: 6
  misc_feature: MA Experiment 108585 PARAMETER Experiment Name: At_5mM_NaNP_cDNA_P Parameter: Tissue Value: Aerial
  misc_feature: MA Experiment 108585 PARAMETER Experiment Name: At_5mM_NaNP_cDNA_P Parameter: Treatment Value: null
  misc_feature: MA Experiment ID: 108595 Result: Up-regulated in Transcription
  misc_feature: MA Experiment 108595 PARAMETER Experiment Name: At_Ler-pi_Ovule_cDNA_P Parameter: Plant Line Value: null
  misc_feature: MA Experiment ID: 20000179 Result: Down-regulated in Transcription
  misc_feature: MA Experiment 20000179 PARAMETER Experiment Name: At_Germinating_Seeds_P Parameter: Age (hr) Value: 6 vs. 0
  misc_feature: MA Experiment 20000179 PARAMETER Experiment Name: At_Germinating_Seeds_P Parameter: Tissue Value: Germinating Seeds
  misc_feature: MA Experiment ID: 20000180 Result: Down-regulated in Transcription
  misc_feature: MA Experiment 20000180 PARAMETER Experiment Name: At_Germinating_Seeds_P Parameter: Age (hr) Value: 24 vs. 0
  misc_feature: MA Experiment 20000180 PARAMETER Experiment Name: At_Germinating_Seeds_P Parameter: Tissue Value: Germinating Seeds
acatttccttttaaattaaattgcgttaatttctcacttccctttacttcttcttcttcaccatcacaaacatcttcgtctcttgaagattccaaaaaaaacaaatcaaaagctatgcaagatccatcacgacccgctacaggttacccatacccatacccatacccgaatccacaacaacaacaaccacccaccaacgggtacccaaaccccgccgccggaaccgcttacccctaccaaaaccacaacccatactacgcgccacaaccaaacccacgcgccgtcataatccgccgtctcttcatcgtcttcacaacattcctcctactcctaggtctaatcctcttcatcttcttcctaatcgttcgtcctcaactaccagacgttaacctaaactcactctccgtctccaatttcaatgtctccaacaatcaagtctctggtaaatgggatcttcaactccaatttcgaaaccctaattcaaagatgtcacttcactacgagactgctctttgcgctatgtattacaatcgtgtctctctatccgagactaggttacaaccgtttgatcaagggaagaaagatcaaacggtggttaatgcgactctctctgtttctggtacttatgttgatggacgtttggttgattctattggtaaagagagaagtgttaaaggaaatgttgagtttgatttgaggatgatttcttatgttacgtttcgatacggtgcgtttcggaggaggagatatgttactgtgtattgtgatgatgttgctgttggtgttccggtgagtagtggtgaagggaagatggttggttcgtctaagagatgcaaaacttattgagttttagggatattatctttgactaatcttttgtaaatcgactatgtgttgttgattgattagtactattggtgatgataattgcaatgagaatagattgctactgtt

SEQ ID NO: 41716 - protein, 281 aa, Arabidopsis thaliana
  peptide (1)..(281): Ceres Seq. ID no. 12370855
  misc_feature (94)..(278): Homolog of NCBI NO: 7489141 NR Description: hin1 protein - common tobacco
  misc_feature (100)..(246): Homolog of NCBI NO: 15239459 NR Description: putative protein; protein id: At5g36970.1
  misc_feature (93)..(275): Homolog of NCBI NO: 15231227 NR Description: hairpin-induced protein, putative (HIN1)
  misc_feature (34)..(281): Homolog of NCBI NO: 25518342 NR Description: hypothetical protein F22L4.1 [imported] -
  misc_feature (103)..(281): Homolog of NCBI NO: 15220603 NR Description: hypothetical protein; protein id: At1g61760.1
  misc_feature (98)..(280): Homolog of NCBI NO: 15238828 NR Description: hairpin-induced protein, putative (HIN1); protein
  misc_feature (100)..(267): Homolog of NCBI NO: 15227542 NR Description: similar to harpin-induced protein hin1 from
  misc_feature (84)..(281): Homolog of NCBI NO: 27261042 NR Description: P0681F05.33 [Oryza sativa (japonica
  misc_feature (37)..(272): Homolog of NCBI NO: 15231224 NR Description: hypothetical protein; protein id: At3g52460.1
  misc_feature (39)..(281): Homolog of NCBI NO: 18401372 NR Description: expressed protein
TFPFKLNCVNFSLPFTSSSSPSQTSSSLEDSKKNKSKAMQDPSRPATGYPYPYPYPNPQQQQPPTNGYPNPAAGTAYPYQNHNPYYAPQPNPRAVIIRRLFIVFTTFLLLLGLILFIFFLIVRPQLPDVNLNSLSVSNFNVSNNQVSGKWDLQLQFRNPNSKMSLHYETALCAMYYNRVSLSETRLQPFDQGKKDQTVVNATLSVSGTYVDGRLVDSIGKERSVKGNVEFDLRMISYVTFRYGAFRRRRYVTVYCDDVAVGVPVSSGEGKMVGSSKRCKTY

SEQ ID NO: 41717 - protein, 243 aa, Arabidopsis thaliana
  peptide (1)..(243): Ceres Seq. ID no. 12370856
  misc_feature (56)..(240): Homolog of NCBI NO: 7489141 NR Description: hin1 protein - common tobacco
  misc_feature (62)..(208): Homolog of NCBI NO: 15239459 NR Description: putative protein; protein id: At5g36970.1
  misc_feature (55)..(237): Homolog of NCBI NO: 15231227 NR Description: hairpin-induced protein, putative (HIN1)
  misc_feature (1)..(243): Homolog of NCBI NO: 25518342 NR Description: hypothetical protein F22L4.1 [imported] -
  misc_feature (65)..(243): Homolog of NCBI NO: 15220603 NR Description: hypothetical protein; protein id: At1g61760.1
  misc_feature (60)..(242): Homolog of NCBI NO: 15238828 NR Description: hairpin-induced protein, putative (HIN1); protein
  misc_feature (62)..(229): Homolog of NCBI NO: 15227542 NR Description: similar to harpin-induced protein hin1 from
  misc_feature (46)..(243): Homolog of NCBI NO: 27261042 NR Description: P0681F05.33 [Oryza sativa (japonica
  misc_feature (1)..(234): Homolog of NCBI NO: 15231224 NR Description: hypothetical protein; protein id: At3g52460.1
  misc_feature (1)..(243): Homolog of NCBI NO: 18401372 NR Description: expressed protein
MQDPSRPATGYPYPYPYPNPQQQQPPTNGYPNPAAGTAYPYQNHNPYYAPQPNPRAVIIRRLFIVFTTFLLLLGLILFIFFLIVRPQLPDVNLNSLSVSNFNVSNNQVSGKWDLQLQFRNPNSKMSLHYETALCAMYYNRVSLSETRLQPFDQGKKDQTVVNATLSVSGTYVDGRLVDSIGKERSVKGNVEFDLRMISYVTFRYGAFRRRRYVTVYCDDVAVGVPVSSGEGKMVGSSKRCKTY

SEQ ID NO: 41718 - DNA, 1004 bp, Arabidopsis thaliana
  misc_feature (1)..(1004): Ceres Seq. ID no. 13488041
  misc_feature: MA Experiment ID: 108501 Result: Down-regulated in Transcription
  misc_feature: MA Experiment 108501 PARAMETER Experiment Name: At_ap2_floral_buds_cDNA_P Parameter: Plant Line Value: ap2 (Ler.)
  misc_feature: MA Experiment 108501 PARAMETER Experiment Name: At_ap2_floral_buds_cDNA_P Parameter: Tissue Value: Closed Flower
  misc_feature: MA Experiment ID: 108561 Result: Down-regulated in Transcription
  misc_feature: MA Experiment 108561 PARAMETER Experiment Name: At_100uM_ABA_cDNA_P Parameter: Timepoint (hr) Value: 6
  misc_feature: MA Experiment 108561 PARAMETER Experiment Name: At_100uM_ABA_cDNA_P Parameter: Tissue Value: Aerial
  misc_feature: MA Experiment 108561 PARAMETER Experiment Name: At_100uM_ABA_cDNA_P Parameter: Treatment Value: 100uM ABA vs. No Treatment
  misc_feature: MA Experiment ID: 108609 Result: Down-regulated in Transcription
  misc_feature: MA Experiment 108609 PARAMETER Experiment Name: At_100uM_ABA_cDNA_P Parameter: Timepoint (hr) Value: 24
  misc_feature: MA Experiment 108609 PARAMETER Experiment Name: At_100uM_ABA_cDNA_P Parameter: Tissue Value: Aerial
  misc_feature: MA Experiment 108609 PARAMETER Experiment Name: At_100uM_ABA_cDNA_P Parameter: Treatment Value: 100uM ABA vs. No Treatment
  misc_feature: MA Experiment ID: 108668 Result: Down-regulated in Transcription
  misc_feature: MA Experiment 108668 PARAMETER Experiment Name: At_2mM_SA_cDNA_P Parameter: Plant Line Value: WS
  misc_feature: MA Experiment 108668 PARAMETER Experiment Name: At_2mM_SA_cDNA_P Parameter: Timepoint (hr) Value: 6
  misc_feature: MA Experiment 108668 PARAMETER Experiment Name: At_2mM_SA_cDNA_P Parameter: Treatment Value: 2mM SA vs. No Treatment
  misc_feature: MA Experiment ID: 20000069 Result: Down-regulated in Transcription
  misc_feature: MA Experiment 20000069 PARAMETER Experiment Name: At_100uM_ABA_Mutants_cDNA_P Parameter: Plant Line Value: CS23
  misc_feature: MA Experiment 20000069 PARAMETER Experiment Name: At_100uM_ABA_Mutants_cDNA_P Parameter: Timepoint (hr) Value: 6
  misc_feature: MA Experiment 20000069 PARAMETER Experiment Name: At_100uM_ABA_Mutants_cDNA_P Parameter: Tissue Value: Aerial
  misc_feature: MA Experiment 20000069 PARAMETER Experiment Name: At_100uM_ABA_Mutants_cDNA_P Parameter: Treatment Value: 100uM ABA vs. No Treatment
  misc_feature: MA Experiment ID: 20000070 Result: Down-regulated in Transcription
  misc_feature: MA Experiment 20000070 PARAMETER Experiment Name: At_100uM_ABA_Mutants_cDNA_P Parameter: Plant Line Value: CS24
  misc_feature: MA Experiment 20000070 PARAMETER Experiment Name: At_100uM_ABA_Mutants_cDNA_P Parameter: Timepoint (hr) Value: 6
  misc_feature: MA Experiment 20000070 PARAMETER Experiment Name: At_100uM_ABA_Mutants_cDNA_P Parameter: Tissue Value: Aerial
  misc_feature: MA Experiment 20000070 PARAMETER Experiment Name: At_100uM_ABA_Mutants_cDNA_P Parameter: Treatment Value: 100uM ABA vs. No Treatment
  misc_feature: MA Experiment ID: 20000071 Result: Down-regulated in Transcription
  misc_feature: MA Experiment 20000071 PARAMETER Experiment Name: At_100uM_ABA_Mutants_cDNA_P Parameter: Plant Line Value: CS8104
  misc_feature: MA Experiment 20000071 PARAMETER Experiment Name: At_100uM_ABA_Mutants_cDNA_P Parameter: Timepoint (hr) Value: 6
  misc_feature: MA Experiment 20000071 PARAMETER Experiment Name: At_100uM_ABA_Mutants_cDNA_P Parameter: Tissue Value: Aerial
  misc_feature: MA Experiment 20000071 PARAMETER Experiment Name: At_100uM_ABA_Mutants_cDNA_P Parameter: Treatment Value: 100uM ABA vs. No Treatment
  misc_feature: MA Experiment ID: 20000072 Result: Down-regulated in Transcription
  misc_feature: MA Experiment 20000072 PARAMETER Experiment Name: At_100uM_ABA_Mutants_cDNA_P Parameter: Plant Line Value: CS8105
  misc_feature: MA Experiment 20000072 PARAMETER Experiment Name: At_100uM_ABA_Mutants_cDNA_P Parameter: Timepoint (hr) Value: 6
  misc_feature: MA Experiment 20000072 PARAMETER Experiment Name: At_100uM_ABA_Mutants_cDNA_P Parameter: Tissue Value: Aerial
  misc_feature: MA Experiment 20000072 PARAMETER Experiment Name: At_100uM_ABA_Mutants_cDNA_P Parameter: Treatment Value: 100uM ABA vs. No Treatment
  misc_feature: MA Experiment ID: 20000086 Result: Down-regulated in Transcription
  misc_feature: MA Experiment 20000086 PARAMETER Experiment Name: At_100uM_ABA_Mutants_cDNA_P Parameter: Plant Line Value: CS22
  misc_feature: MA Experiment 20000086 PARAMETER Experiment Name: At_100uM_ABA_Mutants_cDNA_P Parameter: Timepoint (hr) Value: 6
  misc_feature: MA Experiment 20000086 PARAMETER Experiment Name: At_100uM_ABA_Mutants_cDNA_P Parameter: Tissue Value: Aerial
  misc_feature: MA Experiment 20000086 PARAMETER Experiment Name: At_100uM_ABA_Mutants_cDNA_P Parameter: Treatment Value: 100uM ABA vs. No Treatment
  misc_feature: MA Experiment ID: 20000089 Result: Down-regulated in Transcription
  misc_feature: MA Experiment ID: 20000090 Result: Down-regulated in Transcription
  misc_feature: MA Experiment ID: 20000117 Result: Down-regulated in Transcription
  misc_feature: MA Experiment 20000117 PARAMETER Experiment Name: At_100uM_ABA_Mutants_cDNA_P Parameter: Plant Line Value: Columbia
  misc_feature: MA Experiment 20000117 PARAMETER Experiment Name: At_100uM_ABA_Mutants_cDNA_P Parameter: Timepoint (hr) Value: 6
  misc_feature: MA Experiment 20000117 PARAMETER Experiment Name: At_100uM_ABA_Mutants_cDNA_P Parameter: Tissue Value: Aerial
  misc_feature: MA Experiment 20000117 PARAMETER Experiment Name: At_100uM_ABA_Mutants_cDNA_P Parameter: Treatment Value: 100uM ABA vs. No Treatment
attacagccatacagaaatatcacactaactacaaaagatagtgcaaggaatgtgatgtacgagaagaggattaaagatgagtgagcatcattttgtgtttgtgcatggtgcagggcatggaggatggtgttggtacaagctggctaattcactgagggataatggacataaggctacatgtatagacctcaagggtgctggtatcaacccaactgatccaaacactgtctcttctttggatgactacgacgagcctctctatgccttcctctcccaacttcccaacgatcaaaaggtcattcttgtgagccacagcgttggaggagggagcatgacggctgccatgtgcctctttccttccaaagtttccttggcggtttacgtcgcagcagccatggtcaaacctggtaccttgattcctgaaagactcaaaaatgtaatgaagatatgttcaggattgatagaggaggaaactgagaagatatgggactttactttcggaaatggaccacaaaatctcccaacaagcatcatgatgaaacctgagtatgttcgggacaagttttacaacgagagccccatggaggattacacactggcaaccacacttctgcgtccggcccctgtcatggcattcataggcataatggatattccgggagctccagagactgacaaaatcccaagagtgtacgtgaagacaggcaaggaccatttgttcgaaccagttcttcaagaggtaatgttggccctgtggcctcctgctcacaccttccttcttccggacagtgaccactctgcttttttctcccaacctcaagaactctatcaattcctccttcaagcagcctcatctctttctccctgatatttatgtctctctggaactcttttaaatccatcttttggatacttacttagcttgcataaaactgaatcatattcatatatattatgagatacagaaaaaggagcctacaataataattgctatgtaaatgtt

SEQ ID NO: 41719 - protein, 263 aa, Arabidopsis thaliana
  peptide (1)..(263): Ceres Seq. ID no. 13488042
  misc_feature (6)..(258): Homolog of NCBI NO: 30681236 NR Description: hydrolase family [Arabidopsis thaliana]
  misc_feature (6)..(258): Homolog of NCBI NO: 7485010 NR Description: host response protein homolog T5L19.30 -
  misc_feature (1)..(263): Homolog of NCBI NO: 15230077 NR Description: hydrolase, alpha/beta fold family [Arabidopsis
  misc_feature (6)..(258): Homolog of NCBI NO: 21595837 NR Description: polyneuridine aldehyde esterase, putative
  misc_feature (6)..(258): Homolog of NCBI NO: 25518661 NR Description: hypothetical protein F12G12.19 - Arabidopsis
  misc_feature (6)..(258): Homolog of NCBI NO: 15218463 NR Description: hydrolase, alpha/beta fold family [Arabidopsis
  misc_feature (5)..(261): Homolog of NCBI NO: 15228391 NR Description: hydrolase, alpha/beta fold family [Arabidopsis
  misc_feature (5)..(261): Homolog of NCBI NO: 15235844 NR Description: esterase/lipase/thioesterase family [Arabidopsis
  misc_feature (5)..(261): Homolog of NCBI NO: 15866583 NR Description: hypothetical protein [Capsella rubella]
  misc_feature (1)..(263): Homolog of NCBI NO: 15237165 NR Description: hydrolase, alpha/beta fold family [Arabidopsis
MSEHHFVFVHGAGHGGWCWYKLANSLRDNGHKATCIDLKGAGINPTDPNTVSSLDDYDEPLYAFLSQLPNDQKVILVSHSVGGGSMTAAMCLFPSKVSLAVYVAAAMVKPGTLIPERLKNVMKICSGLIEEETEKIWDFTFGNGPQNLPTSIMMKPEYVRDKFYNESPMEDYTLATTLLRPAPVMAFIGIMDIPGAPETDKIPRVYVKTGKDHLFEPVLQEVMLALWPPAHTFLLPDSDHSAFFSQPQELYQFLLQAASSLSP

SEQ ID NO: 41720 - protein, 178 aa, Arabidopsis thaliana
  peptide (1)..(178): Ceres Seq. ID no. 13488043
  misc_feature (1)..(173): Homolog of NCBI NO: 30681236 NR Description: hydrolase family [Arabidopsis thaliana]
  misc_feature (1)..(173): Homolog of NCBI NO: 7485010 NR Description: host response protein homolog T5L19.30 -
  misc_feature (1)..(178): Homolog of NCBI NO: 15230077 NR Description: hydrolase, alpha/beta fold family [Arabidopsis
  misc_feature (1)..(173): Homolog of NCBI NO: 25518661 NR Description: hypothetical protein F12G12.19 - Arabidopsis
  misc_feature (1)..(173): Homolog of NCBI NO: 21595837 NR Description: polyneuridine aldehyde esterase, putative
  misc_feature (1)..(173): Homolog of NCBI NO: 15218463 NR Description: hydrolase, alpha/beta fold family [Arabidopsis
  misc_feature (1)..(176): Homolog of NCBI NO: 15228391 NR Description: hydrolase, alpha/beta fold family [Arabidopsis
  misc_feature (1)..(176): Homolog of NCBI NO: 15235844 NR Description: esterase/lipase/thioesterase family [Arabidopsis
  misc_feature (1)..(176): Homolog of NCBI NO: 15866583 NR Description: hypothetical protein [Capsella rubella]
  misc_feature (1)..(178): Homolog of NCBI NO: 15237165 NR Description: hydrolase, alpha/beta fold family [Arabidopsis
MTAAMCLFPSKVSLAVYVAAAMVKPGTLIPERLKNVMKICSGLIEEETEKIWDFTFGNGPQNLPTSIMMKPEYVRDKFYNESPMEDYTLATTLLRPAPVMAFIGIMDIPGAPETDKIPRVYVKTGKDHLFEPVLQEVMLALWPPAHTFLLPDSDHSAFFSQPQELYQFLLQAASSLSP

SEQ ID NO: 41721 - protein, 174 aa, Arabidopsis thaliana
  peptide (1)..(174): Ceres Seq. ID no. 13488044
  misc_feature (1)..(169): Homolog of NCBI NO: 30681236 NR Description: hydrolase family [Arabidopsis thaliana]
  misc_feature (1)..(169): Homolog of NCBI NO: 7485010 NR Description: host response protein homolog T5L19.30 -
  misc_feature (1)..(174): Homolog of NCBI NO: 15230077 NR Description: hydrolase, alpha/beta fold family [Arabidopsis
  misc_feature (1)..(169): Homolog of NCBI NO: 21595837 NR Description: polyneuridine aldehyde esterase, putative
  misc_feature (1)..(169): Homolog of NCBI NO: 25518661 NR Description: hypothetical protein F12G12.19 - Arabidopsis
  misc_feature (1)..(169): Homolog of NCBI NO: 15218463 NR Description: hydrolase, alpha/beta fold family [Arabidopsis
  misc_feature (1)..(172): Homolog of NCBI NO: 15228391 NR Description: hydrolase, alpha/beta fold family [Arabidopsis
  misc_feature (1)..(172): Homolog of NCBI NO: 15235844 NR Description: esterase/lipase/thioesterase family [Arabidopsis
  misc_feature (1)..(172): Homolog of NCBI NO: 15866583 NR Description: hypothetical protein [Capsella rubella]
  misc_feature (1)..(174): Homolog of NCBI NO: 15237165 NR Description: hydrolase, alpha/beta fold family [Arabidopsis
MCLFPSKVSLAVYVAAAMVKPGTLIPERLKNVMKICSGLIEEETEKIWDFTFGNGPQNLPTSIMMKPEYVRDKFYNESPMEDYTLATTLLRPAPVMAFIGIMDIPGAPETDKIPRVYVKTGKDHLFEPVLQEVMLALWPPAHTFLLPDSDHSAFFSQPQELYQFLLQAASSLSP

SEQ ID NO: 41722 - DNA, 769 bp, Arabidopsis thaliana
  misc_feature (1)..(769): Ceres Seq. ID no. 12559300
  misc_feature: MA Experiment ID: 20000179 Result: Up-regulated in Transcription
  misc_feature: MA Experiment 20000179 PARAMETER Experiment Name: At_Germinating_Seeds_P Parameter: Age (hr) Value: 6 vs. 0
  misc_feature: MA Experiment 20000179 PARAMETER Experiment Name: At_Germinating_Seeds_P Parameter: Tissue Value: Germinating Seeds
gaagaagaaaagatctgagaggtggtcgaatgatccaagagaagaagaacaatctctcttagatcgtttgatctgatccaatcgaagaagaagaagaagatgggaatcttgttcacgcggatgttctcttccgtctttggtaacaaagaagctcgaatcctcgtcctcggtctcgacaatgctggaaaaaccacaatcctctatcggcttcagatgggggaagttgtctctacgattccgactattggatttaacgttgagactgtgcagtacaacaatatcaagtttcaggtctgggatttaggtggacaaacaagcatcaggccatactggcgatgctatttcccgaatacacaagcagtgatctatgttgttgactcgagtgatacagatagaatcggggtggcgaaagaggagtttcatgcaattttagaggaagatgaattgaaaggtgcggtggttctgatatttgcaaacaagcagaagccttggagttgcataagataaagagtcgtcaatgggcaatcttcaaaacttgtgctgtgaaaggcgagggacttttcgagggattggactggttgagtaatacattggaagtcgggaagtggctaaaaatcatcgtcatacaccaatctgtcacatttctcaagagtgtaactttgatcatttttacttattggtttgtttagtatttttttttgtcttagttcttcatcttaaagagttaatatcaatgacatgttcacttaatattctctttttgttgttt

SEQ ID NO: 41723 - protein, 135 aa, Arabidopsis thaliana
  peptide (1)..(135): Ceres Seq. ID no. 12559301
  misc_feature (4)..(128): Pfam Name: ADP-ribosylation factor family Pfam Description: ADP-ribosylation factor family
  misc_feature (1)..(128): Homolog of NCBI NO: 23508140 NR Description: ADP-ribosylation factor-like protein [Plasmodium
  misc_feature (1)..(128): Homolog of NCBI NO: 34909214 NR Description: putative ADP-ribosylation factor
  misc_feature (9)..(134): Homolog of NCBI NO: 24664933 NR Description: Arflike at 72A CG6025-PA
  misc_feature (1)..(134): Homolog of NCBI NO: 29841386 NR Description: similar to GenBank Accession Number M61127
  misc_feature (1)..(128): Homolog of NCBI NO: 4502227 NR Description: ADP-ribosylation factor-like 1 [Homo sapiens]
  misc_feature (1)..(128): Homolog of NCBI NO: 11693150 NR Description: ADP-ribosylation factor-like 1 [Rattus
  misc_feature (1)..(128): Homolog of NCBI NO: 13385340 NR Description: ADP-ribosylation-like 1 [Mus musculus]
  misc_feature (1)..(128): Homolog of NCBI NO: 40253742 NR Description: putative ADP-ribosylation factor 3
  misc_feature (1)..(128): Homolog of NCBI NO: 3182922 NR Description: ADP-ribosylation factor 1
  misc_feature (1)..(128): Homolog of NCBI NO: 30682545 NR Description: ADP-ribosylation factor 3 (ARF3) [Arabidopsis
MGILFTRMFSSVFGNKEARILVLGLDNAGKTTILYRLQMGEVVSTIPTIGFNVETVQYNNIKFQVWDLGGQTSIRPYWRCYFPNTQAVIYVVDSSDTDRIGVAKEEFHAILEEDELKGAVVLIFANKQKPWSCIR

SEQ ID NO: 41724 - protein, 128 aa, Arabidopsis thaliana
  peptide (1)..(128): Ceres Seq. ID no. 12559302
  misc_feature (1)..(121): Pfam Name: ADP-ribosylation factor family Pfam Description: ADP-ribosylation factor family
  misc_feature (1)..(121): Homolog of NCBI NO: 23508140 NR Description: ADP-ribosylation factor-like protein [Plasmodium
  misc_feature (1)..(121): Homolog of NCBI NO: 34909214 NR Description: putative ADP-ribosylation factor
  misc_feature (2)..(127): Homolog of NCBI NO: 24664933 NR Description: Arflike at 72A CG6025-PA
  misc_feature (1)..(127): Homolog of NCBI NO: 29841386 NR Description: similar to GenBank Accession Number M61127
  misc_feature (1)..(121): Homolog of NCBI NO: 4502227 NR Description: ADP-ribosylation factor-like 1 [Homo sapiens]
  misc_feature (1)..(121): Homolog of NCBI NO: 11693150 NR Description: ADP-ribosylation factor-like 1 [Rattus
  misc_feature (1)..(121): Homolog of NCBI NO: 13385340 NR Description: ADP-ribosylation-like 1 [Mus musculus]
  misc_feature (1)..(121): Homolog of NCBI NO: 40253742 NR Description: putative ADP-ribosylation factor 3
  misc_feature (1)..(121): Homolog of NCBI NO: 3182922 NR Description: ADP-ribosylation factor 1
  misc_feature (1)..(121): Homolog of NCBI NO: 30682545 NR Description: ADP-ribosylation factor 3 (ARF3) [Arabidopsis
MFSSVFGNKEARILVLGLDNAGKTTILYRLQMGEVVSTIPTIGFNVETVQYNNIKFQVWDLGGQTSIRPYWRCYFPNTQAVIYVVDSSDTDRIGVAKEEFHAILEEDELKGAVVLIFANKQKPWSCIR

SEQ ID NO: 41725 - protein, 97 aa, Arabidopsis thaliana
  peptide (1)..(97): Ceres Seq. ID no. 12559303
  misc_feature (1)..(90): Pfam Name: ADP-ribosylation factor family Pfam Description: ADP-ribosylation factor family
  misc_feature (1)..(90): Homolog of NCBI NO: 23508140 NR Description: ADP-ribosylation factor-like protein [Plasmodium
  misc_feature (1)..(90): Homolog of NCBI NO: 34909214 NR Description: putative ADP-ribosylation factor
  misc_feature (1)..(96): Homolog of NCBI NO: 24664933 NR Description: Arflike at 72A CG6025-PA
  misc_feature (1)..(96): Homolog of NCBI NO: 29841386 NR Description: similar to GenBank Accession Number M61127
  misc_feature (1)..(90): Homolog of NCBI NO: 4502227 NR Description: ADP-ribosylation factor-like 1 [Homo sapiens]
  misc_feature (1)..(90): Homolog of NCBI NO: 11693150 NR Description: ADP-ribosylation factor-like 1 [Rattus
  misc_feature (1)..(90): Homolog of NCBI NO: 13385340 NR Description: ADP-ribosylation-like 1 [Mus musculus]
  misc_feature (1)..(90): Homolog of NCBI NO: 40253742 NR Description: putative ADP-ribosylation factor 3
  misc_feature (1)..(90): Homolog of NCBI NO: 3182922 NR Description: ADP-ribosylation factor 1
  misc_feature (1)..(90): Homolog of NCBI NO: 30682545 NR Description: ADP-ribosylation factor 3 (ARF3) [Arabidopsis
MGEVVSTIPTIGFNVETVQYNNIKFQVWDLGGQTSIRPYWRCYFPNTQAVIYVVDSSDTDRIGVAKEEFHAILEEDELKGAVVLIFANKQKPWSCIR

SEQ ID NO: 41726 - DNA, 936 bp, Arabidopsis thaliana
  misc_feature (1)..(936): Ceres Seq. ID no. 13575113
  misc_feature: MA Experiment ID: 108434 Result: Down-regulated in Transcription
  misc_feature: MA Experiment 108434 PARAMETER Experiment Name: At_Root_Tips_cDNA_P Parameter: Tissue Value: Root Tips
  misc_feature: MA Experiment ID: 108462 Result: Up-regulated in Transcription
  misc_feature: MA Experiment 108462 PARAMETER Experiment Name: At_Germinating_Seeds_cDNA_P Parameter: Age (day) Value: 2 vs. 0
  misc_feature: MA Experiment 108462 PARAMETER Experiment Name: At_Germinating_Seeds_cDNA_P Parameter: Tissue Value: Germinating Seeds
  misc_feature: MA Experiment ID: 108464 Result: Up-regulated in Transcription
  misc_feature: MA Experiment 108464 PARAMETER Experiment Name: At_Germinating_Seeds_cDNA_P Parameter: Age (day) Value: 4 vs. 0
  misc_feature: MA Experiment 108464 PARAMETER Experiment Name: At_Germinating_Seeds_cDNA_P Parameter: Tissue Value: Germinating Seeds
  misc_feature: MA Experiment ID: 108501 Result: Up-regulated in Transcription
  misc_feature: MA Experiment 108501 PARAMETER Experiment Name: At_ap2_floral_buds_cDNA_P Parameter: Plant Line Value: ap2 (Ler.)
  misc_feature: MA Experiment 108501 PARAMETER Experiment Name: At_ap2_floral_buds_cDNA_P Parameter: Tissue Value: Closed Flower
acatttcgtttgaaacattcttgtctgaactaaaacctagaaaaaatggctgaggaatcaccaagatatgctatagttactggagggaatagaggaattggatttgagatatgcagacaattagcaaacaaagggattagggttattttgacatctagagatgagaaacaagggcttgaagctgttgagacattgaagaaagagcttgagatttctgatcaaagcattgtctttcatcagcttgatgtctctgatcctgttagtgtcacttctcttgctgagtttgtgaaaacccatttcggaaaactcgatatcttgatcaataatgctggggttggtggtgtaatcactgatgttgatgctttaagagctgggacagggaaagaaggtttcaagtgggaggaaactatcactgagacttatgagctagctgaggaatgcataaagattaactattatggaccaaagagaatgtgtgaggcgtttattccacttttgcagttatctgattctccaagaatcattaacgtatcatccttcatgggtcaagtaaagaatttagtaaacgaatgggcaaaagggatcctgagtgacgcagagaatctaacggaggtaagaattgaccaagtgatcaaccaacttctcaatgatctgaaagaagatacggctaagacaaaatattgggctaaagtcatgtcggcttacgttgtttcgaaagccggtttgaatgcttacacgaggatcttagcgaagaaacatcccgagattcgcgttaactcggtttgtcctggatttgttaagactgatatgaattttaaaactggaattttatctgtggaagaaggagcatcaagtcctgtgaggttagctttgcttccacatcaagaatctccttctggttgcttctttgatcgcaaacaagtttcagagttctga

SEQ ID NO: 41727 - protein, 296 aa, Arabidopsis thaliana
  peptide (1)..(296): Ceres Seq. ID no. 13575114
  misc_feature (7)..(296): Homolog of NCBI NO: 38346772 NR Description: OSJNBa0081C01.23 [Oryza sativa (japonica
  misc_feature (7)..(294): Homolog of NCBI NO: 38346769 NR Description: OSJNBa0081C01.20 [Oryza sativa (japonica
  misc_feature (5)..(296): Homolog of NCBI NO: 38346767 NR Description: OSJNBa0081C01.18 [Oryza sativa (japonica
  misc_feature (7)..(295): Homolog of NCBI NO: 33146492 NR Description: carbonyl reductase -like protein
  misc_feature (1)..(100): Homolog of NCBI NO: 34559416 NR Description: (-)-isopiperitenone reductase [Mentha x piperita]
  misc_feature (89)..(290): Homolog of NCBI NO: 34559416 NR Description: (-)-isopiperitenone reductase [Mentha x piperita]
  misc_feature (7)..(296): Homolog of NCBI NO: 25518668 NR Description: hypothetical protein T1N6.22 - Arabidopsis
  misc_feature (6)..(296): Homolog of NCBI NO: 18378884 NR Description: short-chain dehydrogenase/reductase family
  misc_feature (1)..(296): Homolog of NCBI NO: 15233062 NR Description: short-chain dehydrogenase/reductase family
  misc_feature (1)..(296): Homolog of NCBI NO: 15224100 NR Description: short-chain dehydrogenase/reductase family
MAEESPRYAIVTGGNRGIGFEICRQLANKGIRVILTSRDEKQGLEAVETLKKELEISDQSIVFHQLDVSDPVSVTSLAEFVKTHFGKLDILINNAGVGGVITDVDALRAGTGKEGFKWEETITETYELAEECIKINYYGPKRMCEAFIPLLQLSDSPRIINVSSFMGQVKNLVNEWAKGILSDAENLTEVRIDQVINQLLNDLKEDTAKTKYWAKVMSAYVVSKAGLNAYTRILAKKHPEIRVNSVCPGFVKTDMNFKTGILSVEEGASSPVRLALLPHQESPSGCFFDRKQVSEF

SEQ ID NO: 41728 - protein, 154 aa, Arabidopsis thaliana
  peptide (1)..(154): Ceres Seq. ID no. 13575115
  misc_feature (1)..(154): Homolog of NCBI NO: 38346774 NR Description: OSJNBa0081C01.25 [Oryza sativa (japonica
  misc_feature (1)..(154): Homolog of NCBI NO: 38346772 NR Description: OSJNBa0081C01.23 [Oryza sativa (japonica
  misc_feature (1)..(152): Homolog of NCBI NO: 38346769 NR Description: OSJNBa0081C01.20 [Oryza sativa (japonica
  misc_feature (1)..(154): Homolog of NCBI NO: 38346767 NR Description: OSJNBa0081C01.18 [Oryza sativa (japonica
  misc_feature (1)..(153): Homolog of NCBI NO: 33146492 NR Description: carbonyl reductase -like protein
  misc_feature (1)..(148): Homolog of NCBI NO: 34559416 NR Description: (-)-isopiperitenone reductase [Mentha x piperita]
  misc_feature (1)..(154): Homolog of NCBI NO: 25518668 NR Description: hypothetical protein T1N6.22 - Arabidopsis
  misc_feature (1)..(154): Homolog of NCBI NO: 18378884 NR Description: short-chain dehydrogenase/reductase family
  misc_feature (1)..(154): Homolog of NCBI NO: 15233062 NR Description: short-chain dehydrogenase/reductase family
  misc_feature (1)..(154): Homolog of NCBI NO: 15224100 NR Description: short-chain dehydrogenase/reductase family
MCEAFIPLLQLSDSPRIINVSSFMGQVKNLVNEWAKGILSDAENLTEVRIDQVINQLLNDLKEDTAKTKYWAKVMSAYVVSKAGLNAYTRILAKKHPEIRVNSVCPGFVKTDMNFKTGILSVEEGASSPVRLALLPHQESPSGCFFDRKQVSEF

SEQ ID NO: 41729 - DNA, 1396 bp, Arabidopsis thaliana
  misc_feature (1)..(1396): Ceres Seq. ID no. 13491738
  misc_feature: MA Experiment ID: 108434 Result: Up-regulated in Transcription
  misc_feature: MA Experiment 108434 PARAMETER Experiment Name: At_Root_Tips_cDNA_P Parameter: Tissue Value: Root Tips
  misc_feature: MA Experiment ID: 108461 Result: Up-regulated in Transcription
  misc_feature: MA Experiment 108461 PARAMETER Experiment Name: At_Germinating_Seeds_cDNA_P Parameter: Age (day) Value: 1 vs. 0
  misc_feature: MA Experiment 108461 PARAMETER Experiment Name: At_Germinating_Seeds_cDNA_P Parameter: Tissue Value: Germinating Seeds
  misc_feature: MA Experiment ID: 20000113 Result: Down-regulated in Transcription
  misc_feature: MA Experiment 20000113 PARAMETER Experiment Name: At_42deg_Heat_cDNA_P Parameter: Temperature (deg C) Value: 42 vs. 22
  misc_feature: MA Experiment 20000113 PARAMETER Experiment Name: At_42deg_Heat_cDNA_P Parameter: Timepoint (hr) Value: 8
  misc_feature: MA Experiment 20000113 PARAMETER Experiment Name: At_42deg_Heat_cDNA_P Parameter: Tissue Value: Aerial
  misc_feature: MA Experiment ID: 20000234 Result: Up-regulated in Transcription
  misc_feature: MA Experiment 20000234 PARAMETER Experiment Name: At_Siliques_P Parameter: Age (day) Value: 21
  misc_feature: MA Experiment 20000234 PARAMETER Experiment Name: At_Siliques_P Parameter: Organism Value: A. thaliana
  misc_feature: MA Experiment 20000234 PARAMETER Experiment Name: At_Siliques_P Parameter: Plant Line Value: WS
  misc_feature: MA Experiment 20000234 PARAMETER Experiment Name: At_Siliques_P Parameter: Tissue Value: Less Than 5mm Siliques vs. Whole Plant
gtttccgaaacgttgggctttgcttagctgcgacattttcagtgaacgaagaaaaccacggtagtagactagtagttgtagaaaaaaacaaaacgaaatcgaagaagaagagaggaaggatgaagaagatcccggtgcttctcatgggctgcggaggcgttggccgccaccttcttcaacacatcgtctcttgccgatcgcttcacgccaaaatgggagttcatatacgggtgattggagtatgtgatagtaaatccttagttgctccaatggatgtgctcaaagaggaactgaatgatgaactcttgtcagaagtttgccttatcaaatcaactggttctgcattatcgaagttgggtgctttgggtggatatcgagtcgtccatgattccgagttaagcacggaaacagaagagattgcaaaacttcttggtaaatctacaggcttagctgtggtggattgctcagccagcatggagacgattgaaatattgatgaaggcagttgacttgggttgctgtattgtcctggcaaataagaagcctgttacttcaacgctggaacattacgacaaattggctttgcatccgcgattcatccgccatgaatctactgttggtgctggtcttcctgtcatcgcatccttgaaccgcataatttcgtctggagatcctgttcataggattgtcggtagtttgagcggtaccttgggatatgtaatgagtgagcttgaagatggcaagcctctaagccaagttgttcaagctgccaaaaagctggggtacactgaaccagatccacgtgacgacctcggtggcatggatgttgctagaaagggtttgattcttgctcgacttcttgggaagaggataattatggacagcattaagatagagagcttgtatccagaagagatgggacctggactcatgtctgtggatgatttcctccataatggaatagtaaaacttgatcagaatatagaggagagagttaaaaaagcttcatcaaaagggtgtgtgcttcgttatgtctgtgtgattgagggttcaagcgttcaagttggcattcgagaagtttcaaaagattcaccattgggacggctaagaggcagtgacaatatagtagagatatatagccgttgctacaaggagcagcctttggtgattcaaggtgccggagccgggaacgacacaactgcagccggtgttcttgcagacatcatcgacttgcaggatctttttcactgagaggaggctgtggtatttagtttttatcaaaataataataacacaattcataattgatctcttctctgatcttgtcaaggcagaaaattagccaacaagaacgtggcctctccttaacattaccaaaaagagattttttttttttc

SEQ ID NO: 41730 - protein, 415 aa, Arabidopsis thaliana
  peptide (1)..(415): Ceres Seq. ID no. 13491739
  misc_feature (210)..(408): Pfam Name: Homoserine dehydrogenase Pfam Description: Homoserine dehydrogenase
  misc_feature (151)..(408): Homolog of NCBI NO: 19548975 NR Description: aspartokinase I-homoserine dehydrogenase I
  misc_feature (151)..(408): Homolog of NCBI NO: 30061573 NR Description: aspartokinase I, homoserine dehydrogenase I
  misc_feature (151)..(408): Homolog of NCBI NO: 16127996 NR Description: aspartokinase I, homoserine dehydrogenase I
  misc_feature (43)..(101): Homolog of NCBI NO: 26245920 NR Description: Aspartokinase I; Homoserine dehydrogenase I
  misc_feature (151)..(408): Homolog of NCBI NO: 26245920 NR Description: Aspartokinase I; Homoserine dehydrogenase I
  misc_feature (146)..(408): Homolog of NCBI NO: 22971485 NR Description: hypothetical protein [Chloroflexus aurantiacus]
  misc_feature (26)..(96): Homolog of NCBI NO: 15601978 NR Description: ThrA [Pasteurella multocida]
  misc_feature (105)..(408): Homolog of NCBI NO: 15601978 NR Description: ThrA [Pasteurella multocida]
  misc_feature (40)..(415): Homolog of NCBI NO: 21537197 NR Description: homoserine dehydrogenase-like protein
  misc_feature (40)..(415): Homolog of NCBI NO: 15242147 NR Description: homoserine dehydrogenase family [Arabidopsis
FRNVGLCLAATFSVNEENHGSRLVVVEKNKTKSKKKRGRMKKIPVLLMGCGGVGRHLLQHIVSCRSLHAKMGVHIRVIGVCDSKSLVAPMDVLKEELNDELLSEVCLIKSTGSALSKLGALGGYRVVHDSELSTETEEIAKLLGKSTGLAVVDCSASMETIEILMKAVDLGCCIVLANKKPVTSTLEHYDKLALHPRFIRHESTVGAGLPVIASLNRIISSGDPVHRIVGSLSGTLGYVMSELEDGKPLSQVVQAAKKLGYTEPDPRDDLGGMDVARKGLILARLLGKRIIMDSIKIESLYPEEMGPGLMSVDDFLHNGIVKLDQNIEERVKKASSKGCVLRYVCVIEGSSVQVGIREVSKDSPLGRLRGSDNIVEIYSRCYKEQPLVIQGAGAGNDTTAAGVLADIIDLQDLFH

SEQ ID NO: 41731 - protein, 376 aa, Arabidopsis thaliana
  peptide (1)..(376): Ceres Seq. ID no. 13491740
  misc_feature (171)..(369): Pfam Name: Homoserine dehydrogenase Pfam Description: Homoserine dehydrogenase
  misc_feature (112)..(369): Homolog of NCBI NO: 19548975 NR Description: aspartokinase I-homoserine dehydrogenase I
  misc_feature (112)..(369): Homolog of NCBI NO: 30061573 NR Description: aspartokinase I, homoserine dehydrogenase I
  misc_feature (112)..(369): Homolog of NCBI NO: 16127996 NR Description: aspartokinase I, homoserine dehydrogenase I
  misc_feature (4)..(62): Homolog of NCBI NO: 26245920 NR Description: Aspartokinase I; Homoserine dehydrogenase I
  misc_feature (112)..(369): Homolog of NCBI NO: 26245920 NR Description: Aspartokinase I; Homoserine dehydrogenase I
  misc_feature (107)..(369): Homolog of NCBI NO: 22971485 NR Description: hypothetical protein [Chloroflexus aurantiacus]
  misc_feature (1)..(57): Homolog of NCBI NO: 15601978 NR Description: ThrA [Pasteurella multocida]
  misc_feature (66)..(369): Homolog of NCBI NO: 15601978 NR Description: ThrA [Pasteurella multocida]
  misc_feature (1)..(376): Homolog of NCBI NO: 21537197 NR Description: homoserine dehydrogenase-like protein
  misc_feature (1)..(376): Homolog of NCBI NO: 15242147 NR Description: homoserine dehydrogenase family [Arabidopsis
MKKIPVLLMGCGGVGRHLLQHIVSCRSLHAKMGVHIRVIGVCDSKSLVAPMDVLKEELNDELLSEVCLIKSTGSALSKLGALGGYRVVHDSELSTETEEIAKLLGKSTGLAVVDCSASMETIEILMKAVDLGCCIVLANKKPVTSTLEHYDKLALHPRFIRHESTVGAGLPVIASLNRIISSGDPVHRIVGSLSGTLGYVMSELEDGKPLSQVVQAAKKLGYTEPDPRDDLGGMDVARKGLILARLLGKRIIMDSIKIESLYPEEMGPGLMSVDDFLHNGIVKLDQNIEERVKKASSKGCVLRYVCVIEGSSVQVGIREVSKDSPLGRLRGSDNIVEIYSRCYKEQPLVIQGAGAGNDTTAAGVLADIIDLQDLFH

SEQ ID NO: 41732 - protein, 368 aa, Arabidopsis thaliana
  peptide (1)..(368): Ceres Seq. ID no. 13491741
  misc_feature (163)..(361): Pfam Name: Homoserine dehydrogenase Pfam Description: Homoserine dehydrogenase
  misc_feature (104)..(361): Homolog of NCBI NO: 19548975 NR Description: aspartokinase I-homoserine dehydrogenase I
  misc_feature (104)..(361): Homolog of NCBI NO: 30061573 NR Description: aspartokinase I, homoserine dehydrogenase I
  misc_feature (104)..(361): Homolog of NCBI NO: 16127996 NR Description: aspartokinase I, homoserine dehydrogenase I
  misc_feature (1)..(54): Homolog of NCBI NO: 26245920 NR Description: Aspartokinase I; Homoserine dehydrogenase I
  misc_feature (104)..(361): Homolog of NCBI NO: 26245920 NR Description: Aspartokinase I; Homoserine dehydrogenase I
  misc_feature (99)..(361): Homolog of NCBI NO: 22971485 NR Description: hypothetical protein [Chloroflexus aurantiacus]
  misc_feature (1)..(49): Homolog of NCBI NO: 15601978 NR Description: ThrA [Pasteurella multocida]
  misc_feature (58)..(361): Homolog of NCBI NO: 15601978 NR Description: ThrA [Pasteurella multocida]
  misc_feature (1)..(368): Homolog of NCBI NO: 21537197 NR Description: homoserine dehydrogenase-like protein
  misc_feature (1)..(368): Homolog of NCBI NO: 15242147 NR Description: homoserine dehydrogenase family [Arabidopsis
MGCGGVGRHLLQHIVSCRSLHAKMGVHIRVIGVCDSKSLVAPMDVLKEELNDELLSEVCLIKSTGSALSKLGALGGYRVVHDSELSTETEEIAKLLGKSTGLAVVDCSASMETIEILMKAVDLGCCIVLANKKPVTSTLEHYDKLALHPRFIRHESTVGAGLPVIASLNRIISSGDPVHRIVGSLSGTLGYVMSELEDGKPLSQVVQAAKKLGYTEPDPRDDLGGMDVARKGLILARLLGKRIIMDSIKIESLYPEEMGPGLMSVDDFLHNGIVKLDQNIEERVKKASSKGCVLRYVCVIEGSSVQVGIREVSKDSPLGRLRGSDNIVEIYSRCYKEQPLVIQGAGAGNDTTAAGVLADIIDLQDLFH

SEQ ID NO: 41733 - DNA, 1455 bp, Arabidopsis thaliana
  misc_feature (1)..(1455): Ceres Seq. ID no. 12348463
  misc_feature: MA Experiment ID: 108434 Result: Down-regulated in Transcription
  misc_feature: MA Experiment 108434 PARAMETER Experiment Name: At_Root_Tips_cDNA_P Parameter: Tissue Value: Root Tips
  misc_feature: MA Experiment ID: 108469 Result: Up-regulated in Transcription
  misc_feature: MA Experiment ID: 108488 Result: Down-regulated in Transcription
  misc_feature: MA Experiment ID: 108573 Result: Up-regulated in Transcription
  misc_feature: MA Experiment 108573 PARAMETER Experiment Name: At_Drought_cDNA_P Parameter: Timepoint (hr) Value: 6
  misc_feature: MA Experiment 108573 PARAMETER Experiment Name: At_Drought_cDNA_P Parameter: Tissue Value: Aerial
  misc_feature: MA Experiment 108573 PARAMETER Experiment Name: At_Drought_cDNA_P Parameter: Treatment Value: Drought vs. No Drought
  misc_feature: MA Experiment ID: 108577 Result: Down-regulated in Transcription
  misc_feature: MA Experiment 108577 PARAMETER Experiment Name: At_42deg_Heat_cDNA_P Parameter: Temperature (deg C) Value: 42 vs. 22
  misc_feature: MA Experiment 108577 PARAMETER Experiment Name: At_42deg_Heat_cDNA_P Parameter: Timepoint (hr) Value: 6
  misc_feature: MA Experiment 108577 PARAMETER Experiment Name: At_42deg_Heat_cDNA_P Parameter: Tissue Value: Aerial
  misc_feature: MA Experiment ID: 108585 Result: Up-regulated in Transcription
  misc_feature: MA Experiment 108585 PARAMETER Experiment Name: At_5mM_NaNP_cDNA_P Parameter: Timepoint (hr) Value: 6
  misc_feature: MA Experiment 108585 PARAMETER Experiment Name: At_5mM_NaNP_cDNA_P Parameter: Tissue Value: Aerial
  misc_feature: MA Experiment 108585 PARAMETER Experiment Name: At_5mM_NaNP_cDNA_P Parameter: Treatment Value: null
  misc_feature: MA Experiment ID: 108668 Result: Up-regulated in Transcription
  misc_feature: MA Experiment 108668 PARAMETER Experiment Name: At_2mM_SA_cDNA_P Parameter: Plant Line Value: WS
  misc_feature: MA Experiment 108668 PARAMETER Experiment Name: At_2mM_SA_cDNA_P Parameter: Timepoint (hr) Value: 6
  misc_feature: MA Experiment 108668 PARAMETER Experiment Name: At_2mM_SA_cDNA_P Parameter: Treatment Value: 2mM SA vs. No Treatment
  misc_feature: MA Experiment ID: 20000070 Result: Up-regulated in Transcription
  misc_feature: MA Experiment 20000070 PARAMETER Experiment Name: At_100uM_ABA_Mutants_cDNA_P Parameter: Plant Line Value: CS24
  misc_feature: MA Experiment 20000070 PARAMETER Experiment Name: At_100uM_ABA_Mutants_cDNA_P Parameter: Timepoint (hr) Value: 6
  misc_feature: MA Experiment 20000070 PARAMETER Experiment Name: At_100uM_ABA_Mutants_cDNA_P Parameter: Tissue Value: Aerial
  misc_feature: MA Experiment 20000070 PARAMETER Experiment Name: At_100uM_ABA_Mutants_cDNA_P Parameter: Treatment Value: 100uM ABA vs. No Treatment
  misc_feature: MA Experiment ID: 20000071 Result: Up-regulated in Transcription
  misc_feature: MA Experiment 20000071 PARAMETER Experiment Name: At_100uM_ABA_Mutants_cDNA_P Parameter: Plant Line Value: CS8104
  misc_feature: MA Experiment 20000071 PARAMETER Experiment Name: At_100uM_ABA_Mutants_cDNA_P Parameter: Timepoint (hr) Value: 6
  misc_feature: MA Experiment 20000071 PARAMETER Experiment Name: At_100uM_ABA_Mutants_cDNA_P Parameter: Tissue Value: Aerial
  misc_feature: MA Experiment 20000071 PARAMETER Experiment Name: At_100uM_ABA_Mutants_cDNA_P Parameter: Treatment Value: 100uM ABA vs. No Treatment
  misc_feature: MA Experiment ID: 20000072 Result: Up-regulated in Transcription
  misc_feature: MA Experiment 20000072 PARAMETER Experiment Name: At_100uM_ABA_Mutants_cDNA_P Parameter: Plant Line Value: CS8105
  misc_feature: MA Experiment 20000072 PARAMETER Experiment Name: At_100uM_ABA_Mutants_cDNA_P Parameter: Timepoint (hr) Value: 6
  misc_feature: MA Experiment 20000072 PARAMETER Experiment Name: At_100uM_ABA_Mutants_cDNA_P Parameter: Tissue Value: Aerial
  misc_feature: MA Experiment 20000072 PARAMETER Experiment Name: At_100uM_ABA_Mutants_cDNA_P Parameter: Treatment Value: 100uM ABA vs. No Treatment
  misc_feature: MA Experiment ID: 20000086 Result: Up-regulated in Transcription
  misc_feature: MA Experiment 20000086 PARAMETER Experiment Name: At_100uM_ABA_Mutants_cDNA_P Parameter: Plant Line Value: CS22
  misc_feature: MA Experiment 20000086 PARAMETER Experiment Name: At_100uM_ABA_Mutants_cDNA_P Parameter: Timepoint (hr) Value: 6
  misc_feature: MA Experiment 20000086 PARAMETER Experiment Name: At_100uM_ABA_Mutants_cDNA_P Parameter: Tissue Value: Aerial
  misc_feature: MA Experiment 20000086 PARAMETER Experiment Name: At_100uM_ABA_Mutants_cDNA_P Parameter: Treatment Value: 100uM ABA vs. No Treatment
  misc_feature: MA Experiment ID: 20000087 Result: Up-regulated in Transcription
  misc_feature: MA Experiment 20000087 PARAMETER Experiment Name: At_100uM_ABA_Mutants_cDNA_P Parameter: Plant Line Value: WS
  misc_feature: MA Experiment 20000087 PARAMETER Experiment Name: At_100uM_ABA_Mutants_cDNA_P Parameter: Timepoint (hr) Value: 6
  misc_feature: MA Experiment 20000087 PARAMETER Experiment Name: At_100uM_ABA_Mutants_cDNA_P Parameter: Tissue Value: Aerial
  misc_feature: MA Experiment 20000087 PARAMETER Experiment Name: At_100uM_ABA_Mutants_cDNA_P Parameter: Treatment Value: 100uM ABA vs. No Treatment
  misc_feature: MA Experiment ID: 20000090 Result: Up-regulated in Transcription
  misc_feature: MA Experiment ID: 20000117 Result: Up-regulated in Transcription
  misc_feature: MA Experiment 20000117 PARAMETER Experiment Name: At_100uM_ABA_Mutants_cDNA_P Parameter: Plant Line Value: Columbia
  misc_feature: MA Experiment 20000117 PARAMETER Experiment Name: At_100uM_ABA_Mutants_cDNA_P Parameter: Timepoint (hr) Value: 6
  misc_feature: MA Experiment 20000117 PARAMETER Experiment Name: At_100uM_ABA_Mutants_cDNA_P Parameter: Tissue Value: Aerial
  misc_feature: MA Experiment 20000117 PARAMETER Experiment Name: At_100uM_ABA_Mutants_cDNA_P Parameter: Treatment Value: 100uM ABA vs. No Treatment
  misc_feature: MA Experiment ID: 20000182 Result: Up-regulated in Transcription
  misc_feature: MA Experiment 20000182 PARAMETER Experiment Name: At_2mM_SA_P Parameter: Age (day) Value: 14
  misc_feature: MA Experiment 20000182 PARAMETER Experiment Name: At_2mM_SA_P Parameter: Organism Value: A. thaliana
  misc_feature: MA Experiment 20000182 PARAMETER Experiment Name: At_2mM_SA_P Parameter: Plant Line Value: WS
  misc_feature: MA Experiment 20000182 PARAMETER Experiment Name: At_2mM_SA_P Parameter: Timepoint (hr) Value: 6
  misc_feature: MA Experiment 20000182 PARAMETER Experiment Name: At_2mM_SA_P Parameter: Tissue Value: Aerial
  misc_feature: MA Experiment 20000182 PARAMETER Experiment Name: At_2mM_SA_P Parameter: Treatment Value: 2mM SA vs. No Treatment
  misc_feature: MA Experiment ID: 20001905 Result: Up-regulated in Transcription
  misc_feature: MA Experiment 20001905 PARAMETER Experiment Name: At_Drought_Reproduction_P Parameter: Age (day) Value: 40
  misc_feature: MA Experiment 20001905 PARAMETER Experiment Name: At_Drought_Reproduction_P Parameter: Organism Value: A. thaliana
  misc_feature: MA Experiment 20001905 PARAMETER Experiment Name: At_Drought_Reproduction_P Parameter: Plant Line Value: WS
  misc_feature: MA Experiment 20001905 PARAMETER Experiment Name: At_Drought_Reproduction_P Parameter: Timepoint (day) Value: 10
  misc_feature: MA Experiment 20001905 PARAMETER Experiment Name: At_Drought_Reproduction_P Parameter: Tissue Value: Rosettes
  misc_feature: MA Experiment 20001905 PARAMETER Experiment Name: At_Drought_Reproduction_P Parameter: Treatment Value: Drought vs. No Drought
aataaacaatcaaaaagagaaaaaaagaaagaaggtctgtgagatcccaattacaatttcgcaaggctttttgcaatttccatctgtcgctcaccggaggaattagaacgtgctccgaatctcttctcttccccaaatagattccgatcgattacgcaaccaaattctcggcgtttgaatttttttttccggagaacaggtggtttcttcttctccaggaagatttttgattcttctgtcggatgatttctcagtgaaaatcatggaatcggtatcatcacgcggcggagaccccgtcgtaaaaccgtcgatggaggtctggcatttccagattgctgtctatttcgctttcggattcttcttcttgaggcttgtcctcgatagatacgtctttcaaaggatagctctttggcttttgagtactggttctgctccgattaaattgaatgatgctgctactcgggcaaaaatcgtcaaatgcaaagagtccttgtggaaattgttgtattatgctgcttgtgactttttcgttctacaagtcatttatcacgagccgtgggctagagatatcaaactctacttccacggttggcctaatcaagagttgaagctttcaataaagctttactatatgtgccagtgcggtttttatgtgtatggtgtggctgcgttgcttgcatgggagacaagaagaaaggattttgctgtcatgatgtctcaccatgtaattacaatcatcctgcttagctactcctacttaaccagttttttccggattggagcaatcatcctagcccttcatgatgcaagtgatgtctttatggaaactgctaaaattttcaagtactctgaaaaagaatttggagcaagtgtatgttttgcattatttgctgtctcctggctattgctacggttgatatacttcccattttggatcatcagggccacgagcattgaactcctggattatttggatatgacatcagctgaaggcacattgatgtactattctttcaacactatgttactaatgctgcttgttttccacatatattggtggtatctcatttgtgccatgattgtaagactacttaaaaacagaggaaaagttggagaagacataagatccgattcagaggatgatgatgattagtcttgtaagatacggaacatgtttccacttctccaaccaaaccatttagctgctgaagaatttgttttcagcttcattaccttactgactagcgttggaggtaaacaaaaaaaagaagaaaaggttatagattttttttcagttttgtattggtctgagtccatttcgacattagactgcatattctctttgacatataagaaaaaaaaaacagaaactctgggtttcttgtgttgttcggtgatgtataaaacaatattggaagtctctctgtaaatgcaattcctcattgtatggttttc

SEQ ID NO: 41734 - protein, 296 aa, Arabidopsis thaliana
  peptide (1)..(296): Ceres Seq. ID no. 12348464
  misc_feature (91)..(296): Pfam Name: Longevity-assurance protein (LAG1) Pfam Description: Longevity-assurance protein (LAG1)
  misc_feature (70)..(296): Homolog of NCBI NO: 21358551 NR Description: Longevity assurance gene 1 CG3576-PB
  misc_feature (70)..(296): Homolog of NCBI NO: 31241781 NR Description: ENSANGP00000012836 [Anopheles gambiae]
  misc_feature (1)..(229): Homolog of NCBI NO: 30683361 NR Description: longevity assurance protein -related [Arabidopsis
  misc_feature (26)..(296): Homolog of NCBI NO: 7688742 NR Description: ASC1 [Lycopersicon esculentum]
  misc_feature (15)..(296): Homolog of NCBI NO: 16974114 NR Description: putative resistance protein [Lycopersicon
  misc_feature (30)..(296): Homolog of NCBI NO: 18404559 NR Description: expressed protein
  misc_feature (1)..(296): Homolog of NCBI NO: 25518747 NR Description: hypothetical protein F13B4.7 - Arabidopsis
  misc_feature (22)..(295): Homolog of NCBI NO: 34901974 NR Description: unknown protein [Oryza sativa (japonica
  misc_feature (1)..(296): Homolog of NCBI NO: 7658241 NR Description: LAG1 homolog 2 [Arabidopsis thaliana]
  misc_feature (1)..(296): Homolog of NCBI NO: 15230323 NR Description: longevity factor-like protein
MESVSSRGGDPVVKPSMEVWHFQIAVYFAFGFFFLRLVLDRYVFQRIALWLLSTGSAPIKLNDAATRAKIVKCKESLWKLLYYAACDFFVLQVIYHEPWARDIKLYFHGWPNQELKLSIKLYYMCQCGFYVYGVAALLAWETRRKDFAVMMSHHVITIILLSYSYLTSFFRIGAIILALHDASDVFMETAKIFKYSEKEFGASVCFALFAVSWLLLRLIYFPFWIIRATSIELLDYLDMTSAEGTLMYYSFNTMLLMLLVFHIYWWYLICAMIVRLLKNRGKVGEDIRSDSEDDDD

SEQ ID NO: 41735 - protein, 280 aa, Arabidopsis thaliana
  peptide (1)..(280): Ceres Seq. ID no. 12348465
  misc_feature (75)..(280): Pfam Name: Longevity-assurance protein (LAG1) Pfam Description: Longevity-assurance protein (LAG1)
  misc_feature (54)..(280): Homolog of NCBI NO: 21358551 NR Description: Longevity assurance gene 1 CG3576-PB
  misc_feature (54)..(280): Homolog of NCBI NO: 31241781 NR Description: ENSANGP00000012836 [Anopheles gambiae]
  misc_feature (1)..(213): Homolog of NCBI NO: 30683361 NR Description: longevity assurance protein -related [Arabidopsis
  misc_feature (10)..(280): Homolog of NCBI NO: 7688742 NR Description: ASC1 [Lycopersicon esculentum]
  misc_feature (1)..(280): Homolog of NCBI NO: 16974114 NR Description: putative resistance protein [Lycopersicon
  misc_feature (14)..(280): Homolog of NCBI NO: 18404559 NR Description: expressed protein
  misc_feature (1)..(280): Homolog of NCBI NO: 25518747 NR Description: hypothetical protein F13B4.7 - Arabidopsis
  misc_feature (6)..(279): Homolog of NCBI NO: 34901974 NR Description: unknown protein [Oryza sativa (japonica
  misc_feature (1)..(280): Homolog of NCBI NO: 7658241 NR Description: LAG1 homolog 2 [Arabidopsis thaliana]
  misc_feature (1)..(280): Homolog of NCBI NO: 15230323 NR Description: longevity factor-like protein
MEVWHFQIAVYFAFGFFFLRLVLDRYVFQRIALWLLSTGSAPIKLNDAATRAKIVKCKESLWKLLYYAACDFFVLQVIYHEPWARDIKLYFHGWPNQELKLSIKLYYMCQCGFYVYGVAALLAWETRRKDFAVMMSHHVITIILLSYSYLTSFFRIGAIILALHDASDVFMETAKIFKYSEKEFGASVCFALFAVSWLLLRLIYFPFWIIRATSIELLDYLDMTSAEGTLMYYSFNTMLLMLLVFHIYWWYLICAMIVRLLKNRGKVGEDIRSDSEDDDD

SEQ ID NO: 41736 - protein, 173 aa, Arabidopsis thaliana
  peptide (1)..(173): Ceres Seq. ID no. 12348466
  misc_feature (1)..(173): Pfam Name: Longevity-assurance protein (LAG1) Pfam Description: Longevity-assurance protein (LAG1)
  misc_feature (1)..(173): Homolog of NCBI NO: 21358551 NR Description: Longevity assurance gene 1 CG3576-PB
  misc_feature (1)..(173): Homolog of NCBI NO: 31241781 NR Description: ENSANGP00000012836 [Anopheles gambiae]
  misc_feature (1)..(106): Homolog of NCBI NO: 30683361 NR Description: longevity assurance protein -related [Arabidopsis
  misc_feature (1)..(173): Homolog of NCBI NO: 7688742 NR Description: ASC1 [Lycopersicon esculentum]
  misc_feature (1)..(173): Homolog of NCBI NO: 16974114 NR Description: putative resistance protein [Lycopersicon
  misc_feature (1)..(173): Homolog of NCBI NO: 18404559 NR Description: expressed protein
  misc_feature (1)..(173): Homolog of NCBI NO: 25518747 NR Description: hypothetical protein F13B4.7 - Arabidopsis
  misc_feature (1)..(172): Homolog of NCBI NO: 34901974 NR Description: unknown protein [Oryza sativa (japonica
  misc_feature (1)..(173): Homolog of NCBI NO: 7658241 NR Description: LAG1 homolog 2 [Arabidopsis thaliana]
  misc_feature (1)..(173): Homolog of NCBI NO: 15230323 NR Description: longevity factor-like protein
MCQCGFYVYGVAALLAWETRRKDFAVMMSHHVITIILLSYSYLTSFFRIGAIILALHDASDVFMETAKIFKYSEKEFGASVCFALFAVSWLLLRLIYFPFWIIRATSIELLDYLDMTSAEGTLMYYSFNTMLLMLLVFHIYWWYLICAMIVRLLKNRGKVGEDIRSDSEDDDD

SEQ ID NO: 41737 - DNA, 1793 bp, Arabidopsis thaliana
  misc_feature (1)..(1793): Ceres Seq. ID no. 12327929
  misc_feature: MA Experiment ID: 108434 Result: Down-regulated in Transcription
  misc_feature: MA Experiment 108434 PARAMETER Experiment Name: At_Root_Tips_cDNA_P Parameter: Tissue Value: Root Tips
  misc_feature: MA Experiment ID: 108573 Result: Up-regulated in Transcription
  misc_feature: MA Experiment 108573 PARAMETER Experiment Name: At_Drought_cDNA_P Parameter: Timepoint (hr) Value: 6
  misc_feature: MA Experiment 108573 PARAMETER Experiment Name: At_Drought_cDNA_P Parameter: Tissue Value: Aerial
  misc_feature: MA Experiment 108573 PARAMETER Experiment Name: At_Drought_cDNA_P Parameter: Treatment Value: Drought vs. No Drought
  misc_feature: MA Experiment ID: 108668 Result: Up-regulated in Transcription
  misc_feature: MA Experiment 108668 PARAMETER Experiment Name: At_2mM_SA_cDNA_P Parameter: Plant Line Value: WS
  misc_feature: MA Experiment 108668 PARAMETER Experiment Name: At_2mM_SA_cDNA_P Parameter: Timepoint (hr) Value: 6
  misc_feature: MA Experiment 108668 PARAMETER Experiment Name: At_2mM_SA_cDNA_P Parameter: Treatment Value: 2mM SA vs. No Treatment
  misc_feature: MA Experiment ID: 20000112 Result: Up-regulated in Transcription
  misc_feature: MA Experiment 20000112 PARAMETER Experiment Name: At_42deg_Heat_cDNA_P Parameter: Temperature (deg C) Value: 42 vs. 22
  misc_feature: MA Experiment 20000112 PARAMETER Experiment Name: At_42deg_Heat_cDNA_P Parameter: Timepoint (hr) Value: 2
  misc_feature: MA Experiment 20000112 PARAMETER Experiment Name: At_42deg_Heat_cDNA_P Parameter: Tissue Value: Aerial
  misc_feature: MA Experiment ID: 20000113 Result: Up-regulated in Transcription
  misc_feature: MA Experiment 20000113 PARAMETER Experiment Name: At_42deg_Heat_cDNA_P Parameter: Temperature (deg C) Value: 42 vs. 22
  misc_feature: MA Experiment 20000113 PARAMETER Experiment Name: At_42deg_Heat_cDNA_P Parameter: Timepoint (hr) Value: 8
  misc_feature: MA Experiment 20000113 PARAMETER Experiment Name: At_42deg_Heat_cDNA_P Parameter: Tissue Value: Aerial
  misc_feature: MA Experiment ID: 20001450 Result: Up-regulated in Transcription
  misc_feature: MA Experiment 20001450 PARAMETER Experiment Name: At_Far-red-induction_P Parameter: Age (day) Value: 7
  misc_feature: MA Experiment 20001450 PARAMETER Experiment Name: At_Far-red-induction_P Parameter: Light Value: Far-red vs. White
  misc_feature: MA Experiment 20001450 PARAMETER Experiment Name: At_Far-red-induction_P Parameter: Organism Value: A. thaliana
  misc_feature: MA Experiment 20001450 PARAMETER Experiment Name: At_Far-red-induction_P Parameter: Plant Line Value: Columbia
  misc_feature: MA Experiment 20001450 PARAMETER Experiment Name: At_Far-red-induction_P Parameter: Timepoint (hr) Value: 8
  misc_feature: MA Experiment 20001450 PARAMETER Experiment Name: At_Far-red-induction_P Parameter: Tissue Value: Whole Plant
  misc_feature: MA Experiment ID: 20001451 Result: Up-regulated in Transcription
  misc_feature: MA Experiment 20001451 PARAMETER Experiment Name: At_Far-red-induction_P Parameter: Age (day) Value: 7
  misc_feature: MA Experiment 20001451 PARAMETER Experiment Name: At_Far-red-induction_P Parameter: Light Value: Far-red vs. White
  misc_feature: MA Experiment 20001451 PARAMETER Experiment Name: At_Far-red-induction_P Parameter: Organism Value: A. thaliana
  misc_feature: MA Experiment 20001451 PARAMETER Experiment Name: At_Far-red-induction_P Parameter: Plant Line Value: Columbia
  misc_feature: MA Experiment 20001451 PARAMETER Experiment Name: At_Far-red-induction_P Parameter: Timepoint (hr) Value: 24
  misc_feature: MA Experiment 20001451 PARAMETER Experiment Name: At_Far-red-induction_P Parameter: Tissue Value: Whole Plant
  misc_feature: MA Experiment ID: 20001911 Result: Up-regulated in Transcription
  misc_feature: MA Experiment 20001911 PARAMETER Experiment Name: At_Drought_Reproduction_P Parameter: Age (day) Value: 40
  misc_feature: MA Experiment 20001911 PARAMETER Experiment Name: At_Drought_Reproduction_P Parameter: Organism Value: A. thaliana
  misc_feature: MA Experiment 20001911 PARAMETER Experiment Name: At_Drought_Reproduction_P Parameter: Plant Line Value: WS
  misc_feature: MA Experiment 20001911 PARAMETER Experiment Name: At_Drought_Reproduction_P Parameter: Timepoint (day) Value: 10
  misc_feature: MA Experiment 20001911 PARAMETER Experiment Name: At_Drought_Reproduction_P Parameter: Tissue Value: Flowers
  misc_feature: MA Experiment 20001911 PARAMETER Experiment Name: At_Drought_Reproduction_P Parameter: Treatment Value: Drought vs. No Drought
aaaagagtctttgtcattgtcttccttcttcttcctttttctctccccccccattatcttcggcgaatcatgaatctagggttttgttttctcccataaccctagattttcttccatcaatcttatatttttctcatttcttcttctccgttttagctcatctcccgattcatctcgatttccatggagggagcgggagagacgacgacgtcggaggggcatttgacttcggcagcagcttttgtggaagggggaattcaagatgcttgtgatgatgcttgtagcatttgtcttgaatccttctgcgaaagcgatccttctactttgactagttgcaagcatgagtatcatcttcaatgcattcttgagtggtgtcaaagaagctcacagtgccctatgtgttggcaatcaattagtctcaaagaccccacaagtcaggagttgcttgaggctgtggaacaggagaggaatttccgcttcaatccaactagaaatgccaccatatttcgtcatccaactcttggtgattttgaattacaacatcttccagtgggggtggataatgctgagattgaagaacgaatcattcagcacttggctgctgctgctgctatgggacgagcaagacatggggtaagaagggaaggccacagaagcaggtcgtcaagtcaaggacatcaacagttcatggtgttctcttcgcaacctaatgcttcttctcctccacctcatcctcccatgccttcttctccatctcagagagatgagagtgacacagtgtcaaaccttcctcacaatgctttaggggagggttctcatcagtcaaacacgcagccaccaacttcttctcatccccgccaggtttctccctcagcatctgattcaaacagcaggcctcttaatcaatcttccccaagtgaacaagatagagctggaccatcagaactccagtcattttcggaatcacttaagtctcgattaaacgctgtctccacgagatacaaagaatcgatatcaaagaatacaaggaactggaaagatagacttttttctcgcaacacgtccatggcagatcttggctctgaggttaaaagagaggtcagtgccggaatcgccactgtgtcccgcatgatggaacgtttagaaacgagagaaaacagtagacccagcactgcatctgtatcagatgtctctgaaaatcacactcctgaaacaaacaatgagcacaatagagcagcagcgggtgatgaacattctgtgaatgaaagaggtgttaaagaaacatgtgcgactggttctggttcaagctaataagtgagtgccagcatcttgttggcaaagagagaggaagatgttgtccattgtgaaattctgataatatatatatacagagtcagaagtctcaaaagtgtggagcataggaagaaggttattattgataaagaaaaagagttttccgattatcaataaataagaaaagttatatatatgaccaaaaggaggccttaaagacgcctctttctgtgttatgtcaaacaaacaaaaaaaaaactaaagagaaaaattagagtaaaagacctgtgtggggttgttggttatttggtcggtctgttgtaaattcacattgtcgttcacattacggatttctatgaatttctacttatgtatcttcaaaaacttggtctagcaaaaccaatttaatgtatcgattccagtgtactatagttatgatggtgtcgtgtgacttctgtcgaacaaacaaaattatggtgcttaataatggttttcgattt

SEQ ID NO: 41738 - protein, 375 aa, Arabidopsis thaliana
  peptide (1)..(375): Ceres Seq. ID no. 12327930
  misc_feature (33)..(73): Pfam Name: Zinc finger, C3HC4 type (RING finger) Pfam Description: Zinc finger, C3HC4 type (RING finger)
  misc_feature (30)..(282): Homolog of NCBI NO: 11358783 NR Description: RING-H2 finger protein RHF1a
  misc_feature (15)..(282): Homolog of NCBI NO: 26450997 NR Description: putative RING-H2 finger protein RHF1a
  misc_feature (15)..(282): Homolog of NCBI NO: 30682750 NR Description: zinc finger (C3HC4-type RING finger) protein
  misc_feature (15)..(282): Homolog of NCBI NO: 25360953 NR Description: RING-H2 finger protein RHF1a [imported] -
  misc_feature (1)..(114): Homolog of NCBI NO: 32400766 NR Description: RING-H2 finger protein [Triticum aestivum]
  misc_feature (6)..(308): Homolog of NCBI NO: 27819501 NR Description: putative zinc finger protein
  misc_feature (3)..(350): Homolog of NCBI NO: 32493110 NR Description: putative RING-H2 zinc finger protein
  misc_feature (1)..(352): Homolog of NCBI NO: 26451710 NR Description: putative RING-H2 finger protein RHF2a
  misc_feature (1)..(375): Homolog of NCBI NO: 30688252 NR Description: zinc finger (C3HC4-type RING finger) protein
  misc_feature (1)..(375): Homolog of NCBI NO: 18420424 NR Description: Expressed protein
MEGAGETTTSEGHLTSAAAFVEGGIQDACDDACSICLESFCESDPSTLTSCKHEYHLQCILEWCQRSSQCPMCWQSISLKDPTSQELLEAVEQERNFRFNPTRNATIFRHPTLGDFELQHLPVGVDNAEIEERIIQHLAAAAAMGRARHGVRREGHRSRSSSQGHQQFMVFSSQPNASSPPPHPPMPSSPSQRDESDTVSNLPHNALGEGSHQSNTQPPTSSHPRQVSPSASDSNSRPLNQSSPSEQDRAGPSELQSFSESLKSRLNAVSTRYKESISKNTRNWKDRLFSRNTSMADLGSEVKREVSAGIATVSRMMERLETRENSRPSTASVSDVSENHTPETNNEHNRAAAGDEHSVNERGVKETCATGSGSS

SEQ ID NO: 41739 - protein, 304 aa, Arabidopsis thaliana
  peptide (1)..(304): Ceres Seq. ID no. 12327931
  misc_feature (1)..(211): Homolog of NCBI NO: 11358783 NR Description: RING-H2 finger protein RHF1a
  misc_feature (1)..(211): Homolog of NCBI NO: 26450997 NR Description: putative RING-H2 finger protein RHF1a
  misc_feature (1)..(211): Homolog of NCBI NO: 30682750 NR Description: zinc finger (C3HC4-type RING finger) protein
  misc_feature (1)..(211): Homolog of NCBI NO: 25360953 NR Description: RING-H2 finger protein RHF1a [imported] -
  misc_feature (1)..(43): Homolog of NCBI NO: 32400766 NR Description: RING-H2 finger protein [Triticum aestivum]
  misc_feature (1)..(237): Homolog of NCBI NO: 27819501 NR Description: putative zinc finger protein
  misc_feature (1)..(279): Homolog of NCBI NO: 32493110 NR Description: putative RING-H2 zinc finger protein
  misc_feature (1)..(281): Homolog of NCBI NO: 26451710 NR Description: putative RING-H2 finger protein RHF2a
  misc_feature (1)..(304): Homolog of NCBI NO: 30688252 NR Description: zinc finger (C3HC4-type RING finger) protein
  misc_feature (1)..(304): Homolog of NCBI NO: 18420424 NR Description: Expressed protein
MCWQSISLKDPTSQELLEAVEQERNFRFNPTRNATIFRHPTLGDFELQHLPVGVDNAEIEERIIQHLAAAAAMGRARHGVRREGHRSRSSSQGHQQFMVFSSQPNASSPPPHPPMPSSPSQRDESDTVSNLPHNALGEGSHQSNTQPPTSSHPRQVSPSASDSNSRPLNQSSPSEQDRAGPSELQSFSESLKSRLNAVSTRYKESISKNTRNWKDRLFSRNTSMADLGSEVKREVSAGIATVSRMMERLETRENSRPSTASVSDVSENHTPETNNEHNRAAAGDEHSVNERGVKETCATGSGSS

SEQ ID NO: 41740 - protein, 232 aa, Arabidopsis thaliana
  peptide (1)..(232): Ceres Seq. ID no. 12327932
  misc_feature (45)..(191): Homolog of NCBI NO: 7485164 NR Description: hypothetical protein - Arabidopsis thaliana
  misc_feature (1)..(139): Homolog of NCBI NO: 11358783 NR Description: RING-H2 finger protein RHF1a
  misc_feature (1)..(139): Homolog of NCBI NO: 26450997 NR Description: putative RING-H2 finger protein RHF1a
  misc_feature (1)..(139): Homolog of NCBI NO: 30682750 NR Description: zinc finger (C3HC4-type RING finger) protein
  misc_feature (1)..(139): Homolog of NCBI NO: 25360953 NR Description: RING-H2 finger protein RHF1a [imported] -
  misc_feature (1)..(165): Homolog of NCBI NO: 27819501 NR Description: putative zinc finger protein
  misc_feature (1)..(207): Homolog of NCBI NO: 32493110 NR Description: putative RING-H2 zinc finger protein
  misc_feature (1)..(209): Homolog of NCBI NO: 26451710 NR Description: putative RING-H2 finger protein RHF2a
  misc_feature (1)..(232): Homolog of NCBI NO: 30688252 NR Description: zinc finger (C3HC4-type RING finger) protein
  misc_feature (1)..(232): Homolog of NCBI NO: 18420424 NR Description: Expressed protein
MGRARHGVRREGHRSRSSSQGHQQFMVFSSQPNASSPPPHPPMPSSPSQRDESDTVSNLPHNALGEGSHQSNTQPPTSSHPRQVSPSASDSNSRPLNQSSPSEQDRAGPSELQSFSESLKSRLNAVSTRYKESISKNTRNWKDRLFSRNTSMADLGSEVKREVSAGIATVSRMMERLETRENSRPSTASVSDVSENHTPETNNEHNRAAAGDEHSVNERGVKETCATGSGSS

SEQ ID NO: 41741 - DNA, 1253 bp, Arabidopsis thaliana
  misc_feature (1)..(1253): Ceres Seq. ID no. 12348467
  misc_feature: MA Experiment ID: 108461 Result: Up-regulated in Transcription
  misc_feature: MA Experiment 108461 PARAMETER Experiment Name: At_Germinating_Seeds_cDNA_P Parameter: Age (day) Value: 1 vs. 0
  misc_feature: MA Experiment 108461 PARAMETER Experiment Name: At_Germinating_Seeds_cDNA_P Parameter: Tissue Value: Germinating Seeds
  misc_feature: MA Experiment ID: 108462 Result: Up-regulated in Transcription
  misc_feature: MA Experiment 108462 PARAMETER Experiment Name: At_Germinating_Seeds_cDNA_P Parameter: Age (day) Value: 2 vs. 0
  misc_feature: MA Experiment 108462 PARAMETER Experiment Name: At_Germinating_Seeds_cDNA_P Parameter: Tissue Value: Germinating Seeds
  misc_feature: MA Experiment ID: 108463 Result: Up-regulated in Transcription
  misc_feature: MA Experiment 108463 PARAMETER Experiment Name: At_Germinating_Seeds_cDNA_P Parameter: Age (day) Value: 3 vs. 0
  misc_feature: MA Experiment 108463 PARAMETER Experiment Name: At_Germinating_Seeds_cDNA_P Parameter: Tissue Value: Germinating Seeds
  misc_feature: MA Experiment ID: 108488 Result: Down-regulated in Transcription
  misc_feature: MA Experiment ID: 108489 Result: Up-regulated in Transcription
  misc_feature: MA Experiment ID: 108594 Result: Down-regulated in Transcription
  misc_feature: MA Experiment 108594 PARAMETER Experiment Name: At_Ler-rhl_Root_cDNA_P Parameter: Plant Line Value: null
  misc_feature: MA Experiment ID: 108595 Result: Down-regulated in Transcription
  misc_feature: MA Experiment 108595 PARAMETER Experiment Name: At_Ler-pi_Ovule_cDNA_P Parameter: Plant Line Value: null
  misc_feature: MA Experiment ID: 20000180 Result: Up-regulated in Transcription
  misc_feature: MA Experiment 20000180 PARAMETER Experiment Name: At_Germinating_Seeds_P Parameter: Age (hr) Value: 24 vs. 0
  misc_feature: MA Experiment 20000180 PARAMETER Experiment Name: At_Germinating_Seeds_P Parameter: Tissue Value: Germinating Seeds
  misc_feature: MA Experiment ID: 20000184 Result: Up-regulated in Transcription
  misc_feature: MA Experiment 20000184 PARAMETER Experiment Name: At_Shoots__P Parameter: Age (day) Value: 7
  misc_feature: MA Experiment 20000184 PARAMETER Experiment Name: At_Shoots__P Parameter: Tissue Value: Shoots vs. Whole Plant
  misc_feature: MA Experiment ID: 20000185 Result: Up-regulated in Transcription
  misc_feature: MA Experiment 20000185 PARAMETER Experiment Name: At_Roots__P Parameter: Age (day) Value: 7 vs. 21
  misc_feature: MA Experiment 20000185 PARAMETER Experiment Name: At_Roots__P Parameter: Organism Value: A. thaliana
  misc_feature: MA Experiment 20000185 PARAMETER Experiment Name: At_Roots__P Parameter: Tissue Value: Roots vs. Whole Plant
  misc_feature: MA Experiment ID: 20000227 Result: Up-regulated in Transcription
  misc_feature: MA Experiment 20000227 PARAMETER Experiment Name: At_Root-Tips-vs-Tops_P Parameter: Tissue Value: Root Tips vs. Root Tops
  misc_feature: MA Experiment ID: 20000265 Result: Up-regulated in Transcription
  misc_feature: MA Experiment 20000265 PARAMETER Experiment Name: At_Open_Flower_P Parameter: Age (day) Value: 21
  misc_feature: MA Experiment 20000265 PARAMETER Experiment Name: At_Open_Flower_P Parameter: Plant Line Value: WS
  misc_feature: MA Experiment 20000265 PARAMETER Experiment Name: At_Open_Flower_P Parameter: Tissue Value: Closed Flower vs. Whole Plant
  misc_feature: MA Experiment ID: 20000438 Result: Up-regulated in Transcription
  misc_feature: MA Experiment 20000438 PARAMETER Experiment Name: At_Shoots__P Parameter: Age (day) Value: 14
  misc_feature: MA Experiment 20000438 PARAMETER Experiment Name: At_Shoots__P Parameter: Tissue Value: Shoots vs. Whole Plant
  misc_feature: MA Experiment ID: 20000439 Result: Up-regulated in Transcription
  misc_feature: MA Experiment 20000439 PARAMETER Experiment Name: At_Roots__P Parameter: Age (day) Value: 14 vs. 21
  misc_feature: MA Experiment 20000439 PARAMETER Experiment Name: At_Roots__P Parameter: Organism Value: A. thaliana
  misc_feature: MA Experiment 20000439 PARAMETER Experiment Name: At_Roots__P Parameter: Tissue Value: Roots vs. Whole Plant
  misc_feature: MA Experiment ID: 20000495 Result: Up-regulated in Transcription
  misc_feature: MA Experiment 20000495 PARAMETER Experiment Name: At_Guard_Cells_P Parameter: Harvest Date Value: 8/2/2002
  misc_feature: MA Experiment 20000495 PARAMETER Experiment Name: At_Guard_Cells_P Parameter: Organism Value: A. thaliana
  misc_feature: MA Experiment 20000495 PARAMETER Experiment Name: At_Guard_Cells_P Parameter: Tissue Value: Guard Cells vs. Leaves
  misc_feature: MA Experiment ID: 20000794 Result: Up-regulated in Transcription
  misc_feature: MA Experiment 20000794 PARAMETER Experiment Name: At_Petals_P Parameter: Age (day) Value: 23-25 days
  misc_feature: MA Experiment 20000794 PARAMETER Experiment Name: At_Petals_P Parameter: Plant Line Value: WS
  misc_feature: MA Experiment 20000794 PARAMETER Experiment Name: At_Petals_P Parameter: Tissue Value: Petals vs. Whole plant
  misc_feature: MA Experiment ID: 20001450 Result: Up-regulated in Transcription
  misc_feature: MA Experiment 20001450 PARAMETER Experiment Name: At_Far-red-induction_P Parameter: Age (day) Value: 7
  misc_feature: MA Experiment 20001450 PARAMETER Experiment Name: At_Far-red-induction_P Parameter: Light Value: Far-red vs. White
  misc_feature: MA Experiment 20001450 PARAMETER Experiment Name: At_Far-red-induction_P Parameter: Organism Value: A. thaliana
  misc_feature: MA Experiment 20001450 PARAMETER Experiment Name: At_Far-red-induction_P Parameter: Plant Line Value: Columbia
  misc_feature: MA Experiment 20001450 PARAMETER Experiment Name: At_Far-red-induction_P Parameter: Timepoint (hr) Value: 8
  misc_feature: MA Experiment 20001450 PARAMETER Experiment Name: At_Far-red-induction_P Parameter: Tissue Value: Whole Plant
aactttgtccatcccaattctctctttttttttttttttgtttccctaatgttttagacaaacacaattttccataattatttatttattcaatttttatctgtttttgggttacatatatcatcatcatcggagactgccatatttgttaatcgtgatattaatttaactaatgtctcaaacaagctactaccgatcaccgttcggagacacgacttacaccaaagtgttcgtcggaggattagcgtgggaaactcctaccgacgaaatgcgtcgttacttcgaacagttcggagagattcttgaagccgtcatcatcaccgataaaaacaccggcaagtctaaaggctacggattcgtgacgtttcgggagtcggactcagccacgagagccgtcgctgatccaaatccggtgatcgacggaagaaaagccaattgtaatattgcatcttttggacggcctcgaccatcgccgcctcgaggtcgaggacaaacaggaagtccgagtcagtaccaaagtggaggaccatcaacctataccgggatggctgcaccactgccaccggctgcagctccccagctcatgtatccgtcatacgggtacacctataaccctgatcaatttgggtaccaccaagcattgtacaacacacagttgcaacaagcacaatactatcagcagcagcaacagctttatggaggaggagcaacatcaccatcatcatcaggagcaaccatcatgccttctccatactattatggctattctcttcaagctcctagagtaccataccaacaccatcatcatcttcctcaaccatataatcctcaacaacatcatcatcaacggttttcttctccttctttcctcgtttacccatccaattcctcttttgcccctcctctccaaggagtactatcttcttccaccgaatctgaagcagtaccacaacaagtaccagctgcagaaggcgaagcaacaacgactgctcctgaaatcacaacaagcaacaccaaagaacctatttcttcttgatctctctctcatttcccaatttgtacaatcttcacatttttacctctctctctctgaaaaaaagaaaacagctaattcatttatttctcaaccagagcaatgacttgagccccaagaagacagactcaacactgtcaaacttaaaaagacggctcaagataaatctcttgtcatattttgctctttttctgacggaatatatataaaaattagagcc

SEQ ID NO: 41742 - protein, 287 aa, Arabidopsis thaliana
  peptide (1)..(287): Ceres Seq. ID no. 12348468
  misc_feature (19)..(76): Pfam Name: RNA recognition motif. (a.k.a. RRM, RBD, or RNP domain) Pfam Description: RNA recognition motif. (a.k.a. RRM, RBD, or RNP
  misc_feature (12)..(245): Homolog of NCBI NO: 18395177 NR Description: RRM-containing protein
  misc_feature (6)..(271): Homolog of NCBI NO: 23505939 NR Description: At1g20880/F9H16_14 [Arabidopsis thaliana]
  misc_feature (6)..(271): Homolog of NCBI NO: 15010636 NR Description: At1g20880/F9H16_14 [Arabidopsis thaliana]
  misc_feature (6)..(271): Homolog of NCBI NO: 18394923 NR Description: RRM-containing protein
  misc_feature (6)..(279): Homolog of NCBI NO: 22330665 NR Description: RRM-containing protein; protein id: At1g76460.1
  misc_feature (11)..(257): Homolog of NCBI NO: 34907334 NR Description: P0698A10.29 [Oryza sativa (japonica
  misc_feature (1)..(144): Homolog of NCBI NO: 18395106 NR Description: RRM-containing protein
  misc_feature (1)..(287): Homolog of NCBI NO: 25518109 NR Description: T16E15.6 protein - Arabidopsis thaliana
  misc_feature (1)..(287): Homolog of NCBI NO: 25405025 NR Description: protein F3F9.20 [imported] - Arabidopsis thaliana
  misc_feature (1)..(287): Homolog of NCBI NO: 18411885 NR Description: RRM-containing protein
MSQTSYYRSPFGDTTYTKVFVGGLAWETPTDEMRRYFEQFGEILEAVIITDKNTGKSKGYGFVTFRESDSATRAVADPNPVIDGRKANCNIASFGRPRPSPPRGRGQTGSPSQYQSGGPSTYTGMAAPLPPAAAPQLMYPSYGYTYNPDQFGYHQALYNTQLQQAQYYQQQQQLYGGGATSPSSSGATIMPSPYYYGYSLQAPRVPYQHHHHLPQPYNPQQHHHQRFSSPSFLVYPSNSSFAPPLQGVLSSSTESEAVPQQVPAAEGEATTTAPEITTSNTKEPISS

SEQ ID NO: 41743 - protein, 255 aa, Arabidopsis thaliana
  peptide (1)..(255): Ceres Seq. ID no. 12348469
  misc_feature (1)..(44): Pfam Name: RNA recognition motif. (a.k.a. RRM, RBD, or RNP domain) Pfam Description: RNA recognition motif. (a.k.a. RRM, RBD, or RNP
  misc_feature (1)..(213): Homolog of NCBI NO: 18395177 NR Description: RRM-containing protein
  misc_feature (1)..(239): Homolog of NCBI NO: 23505939 NR Description: At1g20880/F9H16_14 [Arabidopsis thaliana]
  misc_feature (1)..(239): Homolog of NCBI NO: 15010636 NR Description: At1g20880/F9H16_14 [Arabidopsis thaliana]
  misc_feature (1)..(239): Homolog of NCBI NO: 18394923 NR Description: RRM-containing protein
  misc_feature (1)..(247): Homolog of NCBI NO: 22330665 NR Description: RRM-containing protein; protein id: At1g76460.1
  misc_feature (1)..(225): Homolog of NCBI NO: 34907334 NR Description: P0698A10.29 [Oryza sativa (japonica
  misc_feature (1)..(112): Homolog of NCBI NO: 18395106 NR Description: RRM-containing protein
  misc_feature (1)..(255): Homolog of NCBI NO: 25518109 NR Description: T16E15.6 protein - Arabidopsis thaliana
  misc_feature (1)..(255): Homolog of NCBI NO: 25405025 NR Description: protein F3F9.20 [imported] - Arabidopsis thaliana
  misc_feature (1)..(255): Homolog of NCBI NO: 18411885 NR Description: RRM-containing protein
MRRYFEQFGEILEAVIITDKNTGKSKGYGFVTFRESDSATRAVADPNPVIDGRKANCNIASFGRPRPSPPRGRGQTGSPSQYQSGGPSTYTGMAAPLPPAAAPQLMYPSYGYTYNPDQFGYHQALYNTQLQQAQYYQQQQQLYGGGATSPSSSGATIMPSPYYYGYSLQAPRVPYQHHHHLPQPYNPQQHHHQRFSSPSFLVYPSNSSFAPPLQGVLSSSTESEAVPQQVPAAEGEATTTAPEITTSNTKEPISS

SEQ ID NO: 41744 - protein, 163 aa, Arabidopsis thaliana
  peptide (1)..(163): Ceres Seq. ID no. 12348470
  misc_feature (1)..(121): Homolog of NCBI NO: 18395177 NR Description: RRM-containing protein
  misc_feature (1)..(147): Homolog of NCBI NO: 23505939 NR Description: At1g20880/F9H16_14 [Arabidopsis thaliana]
  misc_feature (1)..(147): Homolog of NCBI NO: 15010636 NR Description: At1g20880/F9H16_14 [Arabidopsis thaliana]
  misc_feature (1)..(147): Homolog of NCBI NO: 18394923 NR Description: RRM-containing protein
  misc_feature (1)..(155): Homolog of NCBI NO: 22330665 NR Description: RRM-containing protein; protein id: At1g76460.1
  misc_feature (1)..(133): Homolog of NCBI NO: 34907334 NR Description: P0698A10.29 [Oryza sativa (japonica
  misc_feature (1)..(20): Homolog of NCBI NO: 18395106 NR Description: RRM-containing protein
  misc_feature (1)..(163): Homolog of NCBI NO: 25518109 NR Description: T16E15.6 protein - Arabidopsis thaliana
  misc_feature (1)..(163): Homolog of NCBI NO: 25405025 NR Description: protein F3F9.20 [imported] - Arabidopsis thaliana
  misc_feature (1)..(163): Homolog of NCBI NO: 18411885 NR Description: RRM-containing protein
MAAPLPPAAAPQLMYPSYGYTYNPDQFGYHQALYNTQLQQAQYYQQQQQLYGGGATSPSSSGATIMPSPYYYGYSLQAPRVPYQHHHHLPQPYNPQQHHHQRFSSPSFLVYPSNSSFAPPLQGVLSSSTESEAVPQQVPAAEGEATTTAPEITTSNTKEPISS

SEQ ID NO: 41745 - DNA, 1736 bp, Arabidopsis thaliana
  misc_feature (1)..(1736): Ceres Seq. ID no. 13489087
  misc_feature: MA Experiment ID: 108434 Result: Up-regulated in Transcription
  misc_feature: MA Experiment 108434 PARAMETER Experiment Name: At_Root_Tips_cDNA_P Parameter: Tissue Value: Root Tips
  misc_feature: MA Experiment ID: 108461 Result: Up-regulated in Transcription
  misc_feature: MA Experiment 108461 PARAMETER Experiment Name: At_Germinating_Seeds_cDNA_P Parameter: Age (day) Value: 1 vs. 0
  misc_feature: MA Experiment 108461 PARAMETER Experiment Name: At_Germinating_Seeds_cDNA_P Parameter: Tissue Value: Germinating Seeds
  misc_feature: MA Experiment ID: 108595 Result: Down-regulated in Transcription
  misc_feature: MA Experiment 108595 PARAMETER Experiment Name: At_Ler-pi_Ovule_cDNA_P Parameter: Plant Line Value: null
  misc_feature: MA Experiment ID: 20000113 Result: Down-regulated in Transcription
  misc_feature: MA Experiment 20000113 PARAMETER Experiment Name: At_42deg_Heat_cDNA_P Parameter: Temperature (deg C) Value: 42 vs. 22
  misc_feature: MA Experiment 20000113 PARAMETER Experiment Name: At_42deg_Heat_cDNA_P Parameter: Timepoint (hr) Value: 8
  misc_feature: MA Experiment 20000113 PARAMETER Experiment Name: At_42deg_Heat_cDNA_P Parameter: Tissue Value: Aerial
  misc_feature: MA Experiment ID: 20000179 Result: Up-regulated in Transcription
  misc_feature: MA Experiment 20000179 PARAMETER Experiment Name: At_Germinating_Seeds_P Parameter: Age (hr) Value: 6 vs. 0
  misc_feature: MA Experiment 20000179 PARAMETER Experiment Name: At_Germinating_Seeds_P Parameter: Tissue Value: Germinating Seeds
  misc_feature: MA Experiment ID: 20000180 Result: Up-regulated in Transcription
  misc_feature: MA Experiment 20000180 PARAMETER Experiment Name: At_Germinating_Seeds_P Parameter: Age (hr) Value: 24 vs. 0
  misc_feature: MA Experiment 20000180 PARAMETER Experiment Name: At_Germinating_Seeds_P Parameter: Tissue Value: Germinating Seeds
  misc_feature: MA Experiment ID: 20000185 Result: Up-regulated in Transcription
  misc_feature: MA Experiment 20000185 PARAMETER Experiment Name: At_Roots__P Parameter: Age (day) Value: 7 vs. 21
  misc_feature: MA Experiment 20000185 PARAMETER Experiment Name: At_Roots__P Parameter: Organism Value: A. thaliana
  misc_feature: MA Experiment 20000185 PARAMETER Experiment Name: At_Roots__P Parameter: Tissue Value: Roots vs. Whole Plant
  misc_feature: MA Experiment ID: 20000224 Result: Down-regulated in Transcription
  misc_feature: MA Experiment ID: 20000227 Result: Up-regulated in Transcription
  misc_feature: MA Experiment 20000227 PARAMETER Experiment Name: At_Root-Tips-vs-Tops_P Parameter: Tissue Value: Root Tips vs. Root Tops
  misc_feature: MA Experiment ID: 20000234 Result: Up-regulated in Transcription
  misc_feature: MA Experiment 20000234 PARAMETER Experiment Name: At_Siliques_P Parameter: Age (day) Value: 21
  misc_feature: MA Experiment 20000234 PARAMETER Experiment Name: At_Siliques_P Parameter: Organism Value: A. thaliana
  misc_feature: MA Experiment 20000234 PARAMETER Experiment Name: At_Siliques_P Parameter: Plant Line Value: WS
  misc_feature: MA Experiment 20000234 PARAMETER Experiment Name: At_Siliques_P Parameter: Tissue Value: Less Than 5mm Siliques vs. Whole Plant
  misc_feature: MA Experiment ID: 20000265 Result: Up-regulated in Transcription
  misc_feature: MA Experiment 20000265 PARAMETER Experiment Name: At_Open_Flower_P Parameter: Age (day) Value: 21
  misc_feature: MA Experiment 20000265 PARAMETER Experiment Name: At_Open_Flower_P Parameter: Plant Line Value: WS
  misc_feature: MA Experiment 20000265 PARAMETER Experiment Name: At_Open_Flower_P Parameter: Tissue Value: Closed Flower vs. Whole Plant
  misc_feature: MA Experiment ID: 20000286 Result: Up-regulated in Transcription
  misc_feature: MA Experiment 20000286 PARAMETER Experiment Name: At_Open_Flower_P Parameter: Age (day) Value: 21
  misc_feature: MA Experiment 20000286 PARAMETER Experiment Name: At_Open_Flower_P Parameter: Plant Line Value: WS
  misc_feature: MA Experiment 20000286 PARAMETER Experiment Name: At_Open_Flower_P Parameter: Tissue Value: Half Open vs. Whole Plant
  misc_feature: MA Experiment ID: 20000794 Result: Up-regulated in Transcription
  misc_feature: MA Experiment 20000794 PARAMETER Experiment Name: At_Petals_P Parameter: Age (day) Value: 23-25 days
  misc_feature: MA Experiment 20000794 PARAMETER Experiment Name: At_Petals_P Parameter: Plant Line Value: WS
  misc_feature: MA Experiment 20000794 PARAMETER Experiment Name: At_Petals_P Parameter: Tissue Value: Petals vs. Whole plant
  misc_feature: MA Experiment ID: 20001248 Result: Up-regulated in Transcription
  misc_feature: MA Experiment 20001248 PARAMETER Experiment Name: At_Far-red-induction_P Parameter: Age (day) Value: 7
  misc_feature: MA Experiment 20001248 PARAMETER Experiment Name: At_Far-red-induction_P Parameter: Light Value: Far-red vs. White
  misc_feature: MA Experiment 20001248 PARAMETER Experiment Name: At_Far-red-induction_P Parameter: Organism Value: A. thaliana
  misc_feature: MA Experiment 20001248 PARAMETER Experiment Name: At_Far-red-induction_P Parameter: Plant Line Value: Columbia
  misc_feature: MA Experiment 20001248 PARAMETER Experiment Name: At_Far-red-induction_P Parameter: Timepoint (hr) Value: 4
  misc_feature: MA Experiment 20001248 PARAMETER Experiment Name: At_Far-red-induction_P Parameter: Tissue Value: Whole Plant
  misc_feature: MA Experiment ID: 20001911 Result: Down-regulated in Transcription
  misc_feature: MA Experiment 20001911 PARAMETER Experiment Name: At_Drought_Reproduction_P Parameter: Age (day) Value: 40
  misc_feature: MA Experiment 20001911 PARAMETER Experiment Name: At_Drought_Reproduction_P Parameter: Organism Value: A. thaliana
  misc_feature: MA Experiment 20001911 PARAMETER Experiment Name: At_Drought_Reproduction_P Parameter: Plant Line Value: WS
  misc_feature: MA Experiment 20001911 PARAMETER Experiment Name: At_Drought_Reproduction_P Parameter: Timepoint (day) Value: 10
  misc_feature: MA Experiment 20001911 PARAMETER Experiment Name: At_Drought_Reproduction_P Parameter: Tissue Value: Flowers
  misc_feature: MA Experiment 20001911 PARAMETER Experiment Name: At_Drought_Reproduction_P Parameter: Treatment Value: Drought vs. No Drought
tagttatcgtcgctgattcaccaacaacaacaacatcacaagaaagcgtcctcttttataggaccctctgtccctgtttctctctccagttttattgtagaattcgctgtcattttcacaacgactcacttctttcagctctctccattcggcgctctcttctggaattgaagaatcaagattagcaatggcccatacatcagaatctgtgaatcctagagatgtttgcattgtgggtgttgcacgtactccaatgggtggctttctcggatctctttcatctttacctgccacaaagcttggatctttagctattgcagctgctttgaagagagcaaatgttgatccagctcttgttcaagaagttgtctttggcaatgttcttagtgctaatttgggtcaagctcctgctcgtcaagctgctttaggtgcaggaatccctaactctgttatctgtactacagttaacaaggtttgtgcatcaggcatgaaagcggtaatgattgctgctcaaagtatccagttagggatcaatgatgtagttgtggcgggtggtatggaaagcatgtctaatacaccaaaatatttggcagaagcaaggaagggatctcgttttggtcatgattctttagtagatggaatgttgaaggatggactatgggatgtctataacgactgtgggatgggaagctgtgcagaattatgcgctgagaagtttcagattacaagggagcagcaagatgactatgcagttcagagttttgagcgtggtattgctgcccaggaagctggcgccttcacatgggaaatcgtcccggttgaagtttctggaggaagaggtaggccatcaaccattgttgacaaggacgaaggtcttgggaagtttgatgctgcaaaattgaggaaactccgtcctagtttcaaagagaatggagggactgttacagctggaaatgcgtctagcataagtgatggtgcagctgcccttgtcctagtgagcggagagaaggctcttcagctaggacttctagtattagcaaaaattaaagggtatggtgacgcagctcaggaaccagagtttttcactactgctcctgctcttgctataccaaaagccattgcacatgctggtttggaatcttctcaagttgattactatgagatcaatgaagcatttgcagttgtagcacttgcaaatcaaaagctactcgggattgctccagagaaagtgaacgtaaatggaggagctgtctccttaggacaccctctaggctgcagtggcgcccgtattctaatcacgttgcttgggatactaaagaagagaaacggaaagtacggtgtgggaggagtgtgcaacggaggaggaggtgcttctgctctagttcttgagctcctttgatgcattatgaatccaggttggtaaactaaatagatggatctatctctcatccaacttccatgagtcagtcattgcactttacgttttatgttagttggtctctcaataaaggagtgatcgttgatgttgttaagtctatttatttatatgaactcggcttctttttttctcttaccggtgacagtcagttattgaatcatggaccgatttaccgtagttaatgatttatcctcatgtactcattaaaacgtcgaccaagatttgacatttgatggataaatttaagtacacaatgtgtatgtaagacaagaaaataataataattggacatttctgt

SEQ ID NO: 41746 - protein, 403 aa, Arabidopsis thaliana
  peptide (1)..(403): Ceres Seq. ID no. 13489088
  misc_feature (10)..(273): Pfam Name: Thiolase, N-terminal domain Pfam Description: Thiolase, N-terminal domain
  misc_feature (12)..(401): Homolog of NCBI NO: 11257345 NR Description: probable acetyl-CoA C-acetyltransferase (EC
  misc_feature (12)..(401): Homolog of NCBI NO: 19113478 NR Description: acetyl-coa acetyltransferase (EC 2.3.1.9)
  misc_feature (5)..(403): Homolog of NCBI NO: 34894172 NR Description: putative acetoacyl-CoA-thiolase
  misc_feature (4)..(403): Homolog of NCBI NO: 30695277 NR Description: acetyl-CoA C-acetyltransferase
  misc_feature (4)..(403): Homolog of NCBI NO: 15238793 NR Description: acetoacyl-CoA-thiolase
  misc_feature (1)..(403): Homolog of NCBI NO: 16417944 NR Description: acetyl Co-A acetyltransferase [Hevea brasiliensis]
  misc_feature (1)..(403): Homolog of NCBI NO: 7433657 NR Description: acetyl-CoA C-acetyltransferase (EC 2.3.1.9),
  misc_feature (7)..(403): Homolog of NCBI NO: 30695409 NR Description: acetyl-CoA C-acetyltransferase
  misc_feature (1)..(403): Homolog of NCBI NO: 30695411 NR Description: acetyl-CoA C-acetyltransferase
  misc_feature (1)..(403): Homolog of NCBI NO: 8777413 NR Description: acetyl-CoA C-acetyltransferase [Arabidopsis
MAHTSESVNPRDVCIVGVARTPMGGFLGSLSSLPATKLGSLAIAAALKRANVDPALVQEVVFGNVLSANLGQAPARQAALGAGIPNSVICTTVNKVCASGMKAVMIAAQSIQLGINDVVVAGGMESMSNTPKYLAEARKGSRFGHDSLVDGMLKDGLWDVYNDCGMGSCAELCAEKFQITREQQDDYAVQSFERGIAAQEAGAFTWEIVPVEVSGGRGRPSTIVDKDEGLGKFDAAKLRKLRPSFKENGGTVTAGNASSISDGAAALVLVSGEKALQLGLLVLAKIKGYGDAAQEPEFFTTAPALAIPKAIAHAGLESSQVDYYEINEAFAVVALANQKLLGIAPEKVNVNGGAVSLGHPLGCSGARILITLLGILKKRNGKYGVGGVCNGGGGASALVLELL

SEQ ID NO: 41747 - protein, 381 aa, Arabidopsis thaliana
  peptide (1)..(381): Ceres Seq. ID no. 13489089
  misc_feature (1)..(251): Pfam Name: Thiolase, N-terminal domain Pfam Description: Thiolase, N-terminal domain
  misc_feature (1)..(379): Homolog of NCBI NO: 11257345 NR Description: probable acetyl-CoA C-acetyltransferase (EC
  misc_feature (1)..(379): Homolog of NCBI NO: 19113478 NR Description: acetyl-coa acetyltransferase (EC 2.3.1.9)
  misc_feature (1)..(381): Homolog of NCBI NO: 34894172 NR Description: putative acetoacyl-CoA-thiolase
  misc_feature (1)..(381): Homolog of NCBI NO: 30695277 NR Description: acetyl-CoA C-acetyltransferase
  misc_feature (1)..(381): Homolog of NCBI NO: 15238793 NR Description: acetoacyl-CoA-thiolase
  misc_feature (1)..(381): Homolog of NCBI NO: 16417944 NR Description: acetyl Co-A acetyltransferase [Hevea brasiliensis]
  misc_feature (1)..(381): Homolog of NCBI NO: 7433657 NR Description: acetyl-CoA C-acetyltransferase (EC 2.3.1.9),
  misc_feature (1)..(381): Homolog of NCBI NO: 30695409 NR Description: acetyl-CoA C-acetyltransferase
  misc_feature (1)..(381): Homolog of NCBI NO: 30695411 NR Description: acetyl-CoA C-acetyltransferase
  misc_feature (1)..(381): Homolog of NCBI NO: 8777413 NR Description: acetyl-CoA C-acetyltransferase [Arabidopsis
MGGFLGSLSSLPATKLGSLAIAAALKRANVDPALVQEVVFGNVLSANLGQAPARQAALGAGIPNSVICTTVNKVCASGMKAVMIAAQSIQLGINDVVVAGGMESMSNTPKYLAEARKGSRFGHDSLVDGMLKDGLWDVYNDCGMGSCAELCAEKFQITREQQDDYAVQSFERGIAAQEAGAFTWEIVPVEVSGGRGRPSTIVDKDEGLGKFDAAKLRKLRPSFKENGGTVTAGNASSISDGAAALVLVSGEKALQLGLLVLAKIKGYGDAAQEPEFFTTAPALAIPKAIAHAGLESSQVDYYEINEAFAVVALANQKLLGIAPEKVNVNGGAVSLGHPLGCSGARILITLLGILKKRNGKYGVGGVCNGGGGASALVLELL

SEQ ID NO: 41748 - protein, 303 aa, Arabidopsis thaliana
  peptide (1)..(303): Ceres Seq. ID no. 13489090
  misc_feature (1)..(173): Pfam Name: Thiolase, N-terminal domain Pfam Description: Thiolase, N-terminal domain
  misc_feature (1)..(301): Homolog of NCBI NO: 11257345 NR Description: probable acetyl-CoA C-acetyltransferase (EC
  misc_feature (1)..(301): Homolog of NCBI NO: 19113478 NR Description: acetyl-coa acetyltransferase (EC 2.3.1.9)
  misc_feature (1)..(303): Homolog of NCBI NO: 34894172 NR Description: putative acetoacyl-CoA-thiolase
  misc_feature (1)..(303): Homolog of NCBI NO: 30695277 NR Description: acetyl-CoA C-acetyltransferase
  misc_feature (1)..(303): Homolog of NCBI NO: 15238793 NR Description: acetoacyl-CoA-thiolase
  misc_feature (1)..(303): Homolog of NCBI NO: 16417944 NR Description: acetyl Co-A acetyltransferase [Hevea brasiliensis]
  misc_feature (1)..(303): Homolog of NCBI NO: 7433657 NR Description: acetyl-CoA C-acetyltransferase (EC 2.3.1.9),
  misc_feature (1)..(303): Homolog of NCBI NO: 30695409 NR Description: acetyl-CoA C-acetyltransferase
  misc_feature (1)..(303): Homolog of NCBI NO: 30695411 NR Description: acetyl-CoA C-acetyltransferase
  misc_feature (1)..(303): Homolog of NCBI NO: 8777413 NR Description: acetyl-CoA C-acetyltransferase [Arabidopsis
MKAVMIAAQSIQLGINDVVVAGGMESMSNTPKYLAEARKGSRFGHDSLVDGMLKDGLWDVYNDCGMGSCAELCAEKFQITREQQDDYAVQSFERGIAAQEAGAFTWEIVPVEVSGGRGRPSTIVDKDEGLGKFDAAKLRKLRPSFKENGGTVTAGNASSISDGAAALVLVSGEKALQLGLLVLAKIKGYGDAAQEPEFFTTAPALAIPKAIAHAGLESSQVDYYEINEAFAVVALANQKLLGIAPEKVNVNGGAVSLGHPLGCSGARILITLLGILKKRNGKYGVGGVCNGGGGASALVLELL

SEQ ID NO: 41749 - DNA, 1651 bp, Arabidopsis thaliana
  misc_feature (1)..(1651): Ceres Seq. ID no. 12338072
  misc_feature: MA Experiment ID: 20000173 Result: Down-regulated in Transcription
  misc_feature: MA Experiment 20000173 PARAMETER Experiment Name: At_42deg_Heat_P Parameter: Age (day) Value: 14
  misc_feature: MA Experiment 20000173 PARAMETER Experiment Name: At_42deg_Heat_P Parameter: Organism Value: A. thaliana
  misc_feature: MA Experiment 20000173 PARAMETER Experiment Name: At_42deg_Heat_P Parameter: Plant Line Value: WS
  misc_feature: MA Experiment 20000173 PARAMETER Experiment Name: At_42deg_Heat_P Parameter: Temperature (deg C) Value: 42 vs. 22
  misc_feature: MA Experiment 20000173 PARAMETER Experiment Name: At_42deg_Heat_P Parameter: Timepoint (hr) Value: 6
  misc_feature: MA Experiment 20000173 PARAMETER Experiment Name: At_42deg_Heat_P Parameter: Tissue Value: Aerial
  misc_feature: MA Experiment ID: 20000184 Result: Down-regulated in Transcription
  misc_feature: MA Experiment 20000184 PARAMETER Experiment Name: At_Shoots__P Parameter: Age (day) Value: 7
  misc_feature: MA Experiment 20000184 PARAMETER Experiment Name: At_Shoots__P Parameter: Tissue Value: Shoots vs. Whole Plant
  misc_feature: MA Experiment ID: 20000234 Result: Down-regulated in Transcription
  misc_feature: MA Experiment 20000234 PARAMETER Experiment Name: At_Siliques_P Parameter: Age (day) Value: 21
  misc_feature: MA Experiment 20000234 PARAMETER Experiment Name: At_Siliques_P Parameter: Organism Value: A. thaliana
  misc_feature: MA Experiment 20000234 PARAMETER Experiment Name: At_Siliques_P Parameter: Plant Line Value: WS
  misc_feature: MA Experiment 20000234 PARAMETER Experiment Name: At_Siliques_P Parameter: Tissue Value: Less Than 5mm Siliques vs. Whole Plant
  misc_feature: MA Experiment ID: 20001560 Result: Down-regulated in Transcription
  misc_feature: MA Experiment 20001560 PARAMETER Experiment Name: At_Drought_Soil_Dry_P Parameter: Age (day) Value: 28
  misc_feature: MA Experiment 20001560 PARAMETER Experiment Name: At_Drought_Soil_Dry_P Parameter: Organism Value: A. thaliana
  misc_feature: MA Experiment 20001560 PARAMETER Experiment Name: At_Drought_Soil_Dry_P Parameter: Plant Line Value: WS
  misc_feature: MA Experiment 20001560 PARAMETER Experiment Name: At_Drought_Soil_Dry_P Parameter: Post Timepoint (hr) Value: None
  misc_feature: MA Experiment 20001560 PARAMETER Experiment Name: At_Drought_Soil_Dry_P Parameter: Post-Treatment Value: None
  misc_feature: MA Experiment 20001560 PARAMETER Experiment Name: At_Drought_Soil_Dry_P Parameter: Timepoint (day) Value: 14
  misc_feature: MA Experiment 20001560 PARAMETER Experiment Name: At_Drought_Soil_Dry_P Parameter: Treatment Value: Drought vs. No Drought
ccattggtgttcggaacataagagagaatccaactgatcatcagcttctaatagatctattggtctttccattgggaagagatagttttaatcagacaggaatgtcacttgttggttttgcatttagcaaccagacttataagcctcctccgatatttggcccttatattttcaaagctgatttgtacaaacagttctctggtatgatgaacccttgtcacacacacaatcaaactagaactaaaggttgttattgataactcatttgctctgcctttctttttgtcacagatgtagaagtttcatcaaagtcatcaaacaaaagcattctcattggagcagtagttggtgttgttgttcttctactattgttaacaatagctgggatttacgctcttaggcagaagaagagagctgaaagagcaactggtcaaaataatccttttgctaaatgggatacaagtaagagtagtattgatgctccgcagctaatgggagcaaaagcgtttacttttgaggagctgaagaaatgcactgacaacttttcagaggcaaatgatgttggcggtggaggttacggcaaggtttatagagggattcttcctaatgggcaactcatagcaatcaaaagggctcaacaaggatctttgcaaggagggttggagttcaaaactgagattgagcttctctcaagggtccatcataagaatgttgtcagactcttgggcttctgctttgaccggaatgaacaaatgctcgtatatgagtacatttcaaacgggtctcttaaagacagtctgtcagggaagagtgggattcgattggattggaccagaaggcttaaaatagcacttggttcaggcaagggcttggcttatcttcatgaacttgctgatcctccaattatacatagagacatcaaatcaaataacatattacttgatgaaaatctaaccgcaaaggttgccgacttcggtctctccaaacttgtgggagaccctgagaaaactcatgtcacaacacaagtcaaaggaaccatgggctacttggatccagagtactacatgacgaatcaattaacggagaagagcgatgtgtatgggtttggtgtggttttactcgagctattaaccggtagaagtccgatagagagaggcaaatatgtggtgagagaggtgaagacaaagatgaataaatctcgtagtttgtatgacctgcaggagttgttggacacaacgatcatagcaagcagtgggaatctaaaagggttcgagaagtatgtagacttggctttgagatgtgtggaggaggaaggagttaataggccatcaatgggtgaggttgtgaaagagattgagaacataatgcagcttgcgggattaaatcctaactcagattcagcaacgagttcaagaacgtatgaggacgcaatcaaaggatctggtgatccttatggcagtgaatcgtttcagtacagtgggaattttccagcttcaaagcttgagccccaatgattgattatgtttctttttgttattttgttatttcgtaagtgacttcatacttgaaatgccttgtgaatgtggagtagcatgattctgtttgatatgtggtcgctgattataaagcagatgaatgaagagccaaacgc

SEQ ID NO: 41750 - protein, 340 aa, Arabidopsis thaliana; identical to SEQ ID NO: 40084
  peptide (1)..(340): Ceres Seq. ID no. 12338073
  misc_feature (18)..(218): Pfam Name: Protein kinase domain Pfam Description: Protein kinase domain
  misc_feature (1)..(337): Homolog of NCBI NO: 10177784 NR Description: receptor protein kinase-like protein [Arabidopsis
  misc_feature (1)..(309): Homolog of NCBI NO: 15222211 NR Description: leucine-rich repeat transmembrane protein kinase,
  misc_feature (1)..(337): Homolog of NCBI NO: 15240244 NR Description: leucine-rich repeat transmembrane protein kinase,
  misc_feature (1)..(340): Homolog of NCBI NO: 7715608 NR Description: F20B17.5 [Arabidopsis thaliana]
  misc_feature (1)..(340): Homolog of NCBI NO: 30699436 NR Description: leucine-rich repeat transmembrane protein kinase,
  misc_feature (1)..(340): Homolog of NCBI NO: 34909240 NR Description: putative receptor protein kinase
  misc_feature (1)..(340): Homolog of NCBI NO: 15240549 NR Description: leucine-rich repeat transmembrane protein kinase,
  misc_feature (1)..(336): Homolog of NCBI NO: 15240547 NR Description: leucine-rich repeat transmembrane protein kinase,
  misc_feature (1)..(319): Homolog of NCBI NO: 8978273 NR Description: receptor protein kinase-like [Arabidopsis
  misc_feature (1)..(340): Homolog of NCBI NO: 30695748 NR Description: receptor protein kinase-related [Arabidopsis

SEQ ID NO: 41751 - protein, 253 aa, Arabidopsis thaliana; identical to SEQ ID NO: 40085
  peptide (1)..(253): Ceres Seq. ID no. 12338074
  misc_feature (1)..(131): Pfam Name: Protein kinase domain Pfam Description: Protein kinase domain
  misc_feature (1)..(250): Homolog of NCBI NO: 10177784 NR Description: receptor protein kinase-like protein [Arabidopsis
  misc_feature (1)..(222): Homolog of NCBI NO: 15222211 NR Description: leucine-rich repeat transmembrane protein kinase,
  misc_feature (1)..(250): Homolog of NCBI NO: 15240244 NR Description: leucine-rich repeat transmembrane protein kinase,
  misc_feature (1)..(253): Homolog of NCBI NO: 7715608 NR Description: F20B17.5 [Arabidopsis thaliana]
  misc_feature (1)..(253): Homolog of NCBI NO: 30699436 NR Description: leucine-rich repeat transmembrane protein kinase,
  misc_feature (1)..(253): Homolog of NCBI NO: 34909240 NR Description: putative receptor protein kinase
  misc_feature (1)..(253): Homolog of NCBI NO: 15240549 NR Description: leucine-rich repeat transmembrane protein kinase,
  misc_feature (1)..(249): Homolog of NCBI NO: 15240547 NR Description: leucine-rich repeat transmembrane protein kinase,
  misc_feature (1)..(232): Homolog of NCBI NO: 8978273 NR Description: receptor protein kinase-like [Arabidopsis
  misc_feature (1)..(253): Homolog of NCBI NO: 30695748 NR Description: receptor protein kinase-related [Arabidopsis

SEQ ID NO: 41752 - DNA, 1175 bp, Arabidopsis thaliana
  misc_feature (1)..(1175): Ceres Seq. ID no. 12371056
  misc_feature: MA Experiment ID: 108576 Result: Up-regulated in Transcription
  misc_feature: MA Experiment 108576 PARAMETER Experiment Name: At_42deg_Heat_cDNA_P Parameter: Temperature (deg C) Value: 42 vs. 22
  misc_feature: MA Experiment 108576 PARAMETER Experiment Name: At_42deg_Heat_cDNA_P Parameter: Timepoint (hr) Value: 1
  misc_feature: MA Experiment 108576 PARAMETER Experiment Name: At_42deg_Heat_cDNA_P Parameter: Tissue Value: Aerial
  misc_feature: MA Experiment ID: 20000173 Result: Down-regulated in Transcription
  misc_feature: MA Experiment 20000173 PARAMETER Experiment Name: At_42deg_Heat_P Parameter: Age (day) Value: 14
  misc_feature: MA Experiment 20000173 PARAMETER Experiment Name: At_42deg_Heat_P Parameter: Organism Value: A. thaliana
  misc_feature: MA Experiment 20000173 PARAMETER Experiment Name: At_42deg_Heat_P Parameter: Plant Line Value: WS
  misc_feature: MA Experiment 20000173 PARAMETER Experiment Name: At_42deg_Heat_P Parameter: Temperature (deg C) Value: 42 vs. 22
  misc_feature: MA Experiment 20000173 PARAMETER Experiment Name: At_42deg_Heat_P Parameter: Timepoint (hr) Value: 6
  misc_feature: MA Experiment 20000173 PARAMETER Experiment Name: At_42deg_Heat_P Parameter: Tissue Value: Aerial
  misc_feature: MA Experiment ID: 20000180 Result: Up-regulated in Transcription
  misc_feature: MA Experiment 20000180 PARAMETER Experiment Name: At_Germinating_Seeds_P Parameter: Age (hr) Value: 24 vs. 0
  misc_feature: MA Experiment 20000180 PARAMETER Experiment Name: At_Germinating_Seeds_P Parameter: Tissue Value: Germinating Seeds
  misc_feature: MA Experiment ID: 20000182 Result: Down-regulated in Transcription
  misc_feature: MA Experiment 20000182 PARAMETER Experiment Name: At_2mM_SA_P Parameter: Age (day) Value: 14
  misc_feature: MA Experiment 20000182 PARAMETER Experiment Name: At_2mM_SA_P Parameter: Organism Value: A. thaliana
  misc_feature: MA Experiment 20000182 PARAMETER Experiment Name: At_2mM_SA_P Parameter: Plant Line Value: WS
  misc_feature: MA Experiment 20000182 PARAMETER Experiment Name: At_2mM_SA_P Parameter: Timepoint (hr) Value: 6
  misc_feature: MA Experiment 20000182 PARAMETER Experiment Name: At_2mM_SA_P Parameter: Tissue Value: Aerial
  misc_feature: MA Experiment 20000182 PARAMETER Experiment Name: At_2mM_SA_P Parameter: Treatment Value: 2mM SA vs. No Treatment
  misc_feature: MA Experiment ID: 20000184 Result: Down-regulated in Transcription
  misc_feature: MA Experiment 20000184 PARAMETER Experiment Name: At_Shoots__P Parameter: Age (day) Value: 7
  misc_feature: MA Experiment 20000184 PARAMETER Experiment Name: At_Shoots__P Parameter: Tissue Value: Shoots vs. Whole Plant
  misc_feature: MA Experiment ID: 20000227 Result: Down-regulated in Transcription
  misc_feature: MA Experiment 20000227 PARAMETER Experiment Name: At_Root-Tips-vs-Tops_P Parameter: Tissue Value: Root Tips vs. Root Tops
  misc_feature: MA Experiment ID: 20000234 Result: Down-regulated in Transcription
  misc_feature: MA Experiment 20000234 PARAMETER Experiment Name: At_Siliques_P Parameter: Age (day) Value: 21
  misc_feature: MA Experiment 20000234 PARAMETER Experiment Name: At_Siliques_P Parameter: Organism Value: A. thaliana
  misc_feature: MA Experiment 20000234 PARAMETER Experiment Name: At_Siliques_P Parameter: Plant Line Value: WS
  misc_feature: MA Experiment 20000234 PARAMETER Experiment Name: At_Siliques_P Parameter: Tissue Value: Less Than 5mm Siliques vs. Whole Plant
  misc_feature: MA Experiment ID: 20000235 Result: Down-regulated in Transcription
  misc_feature: MA Experiment 20000235 PARAMETER Experiment Name: At_Siliques_P Parameter: Age (day) Value: 21
  misc_feature: MA Experiment 20000235 PARAMETER Experiment Name: At_Siliques_P Parameter: Organism Value: A. thaliana
  misc_feature: MA Experiment 20000235 PARAMETER Experiment Name: At_Siliques_P Parameter: Plant Line Value: WS
  misc_feature: MA Experiment 20000235 PARAMETER Experiment Name: At_Siliques_P Parameter: Tissue Value: 5-10mm Siliques vs. Whole Plant
  misc_feature: MA Experiment ID: 20000265 Result: Down-regulated in Transcription
  misc_feature: MA Experiment 20000265 PARAMETER Experiment Name: At_Open_Flower_P Parameter: Age (day) Value: 21
  misc_feature: MA Experiment 20000265 PARAMETER Experiment Name: At_Open_Flower_P Parameter: Plant Line Value: WS
  misc_feature: MA Experiment 20000265 PARAMETER Experiment Name: At_Open_Flower_P Parameter: Tissue Value: Closed Flower vs. Whole Plant
  misc_feature: MA Experiment ID: 20000286 Result: Down-regulated in Transcription
  misc_feature: MA Experiment 20000286 PARAMETER Experiment Name: At_Open_Flower_P Parameter: Age (day) Value: 21
  misc_feature: MA Experiment 20000286 PARAMETER Experiment Name: At_Open_Flower_P Parameter: Plant Line Value: WS
  misc_feature: MA Experiment 20000286 PARAMETER Experiment Name: At_Open_Flower_P Parameter: Tissue Value: Half Open vs. Whole Plant
  misc_feature: MA Experiment ID: 20000437 Result: Down-regulated in Transcription
  misc_feature: MA Experiment 20000437 PARAMETER Experiment Name: At_Drought_P Parameter: Age (day) Value: 8
  misc_feature: MA Experiment 20000437 PARAMETER Experiment Name: At_Drought_P Parameter: Organism Value: A. thaliana
  misc_feature: MA Experiment 20000437 PARAMETER Experiment Name: At_Drought_P Parameter: Plant Line Value: WS
  misc_feature: MA Experiment 20000437 PARAMETER Experiment Name: At_Drought_P Parameter: Timepoint (hr) Value: 24
  misc_feature: MA Experiment 20000437 PARAMETER Experiment Name: At_Drought_P Parameter: Tissue Value: Whole Plant
  misc_feature: MA Experiment 20000437 PARAMETER Experiment Name: At_Drought_P Parameter: Treatment Value: Drought vs. No Drought
  misc_feature: MA Experiment ID: 20001247 Result: Down-regulated in Transcription
  misc_feature: MA Experiment 20001247 PARAMETER Experiment Name: At_Far-red-induction_P Parameter: Age (day) Value: 7
  misc_feature: MA Experiment 20001247 PARAMETER Experiment Name: At_Far-red-induction_P Parameter: Light Value: Far-red vs. White
  misc_feature: MA Experiment 20001247 PARAMETER Experiment Name: At_Far-red-induction_P Parameter: Organism Value: A. thaliana
  misc_feature: MA Experiment 20001247 PARAMETER Experiment Name: At_Far-red-induction_P Parameter: Plant Line Value: Columbia
  misc_feature: MA Experiment 20001247 PARAMETER Experiment Name: At_Far-red-induction_P Parameter: Timepoint (hr) Value: 1
  misc_feature: MA Experiment 20001247 PARAMETER Experiment Name: At_Far-red-induction_P Parameter: Tissue Value: Whole Plant
  misc_feature: MA Experiment ID: 20001248 Result: Down-regulated in Transcription
  misc_feature: MA Experiment 20001248 PARAMETER Experiment Name: At_Far-red-induction_P Parameter: Age (day) Value: 7
  misc_feature: MA Experiment 20001248 PARAMETER Experiment Name: At_Far-red-induction_P Parameter: Light Value: Far-red vs. White
  misc_feature: MA Experiment 20001248 PARAMETER Experiment Name: At_Far-red-induction_P Parameter: Organism Value: A. thaliana
  misc_feature: MA Experiment 20001248 PARAMETER Experiment Name: At_Far-red-induction_P Parameter: Plant Line Value: Columbia
  misc_feature: MA Experiment 20001248 PARAMETER Experiment Name: At_Far-red-induction_P Parameter: Timepoint (hr) Value: 4
  misc_feature: MA Experiment 20001248 PARAMETER Experiment Name: At_Far-red-induction_P Parameter: Tissue Value: Whole Plant
  misc_feature: MA Experiment ID: 20001450 Result: Down-regulated in Transcription
  misc_feature: MA Experiment 20001450 PARAMETER Experiment Name: At_Far-red-induction_P Parameter: Age (day) Value: 7
  misc_feature: MA Experiment 20001450 PARAMETER Experiment Name: At_Far-red-induction_P Parameter: Light Value: Far-red vs. White
  misc_feature: MA Experiment 20001450 PARAMETER Experiment Name: At_Far-red-induction_P Parameter: Organism Value: A. thaliana
  misc_feature: MA Experiment 20001450 PARAMETER Experiment Name: At_Far-red-induction_P Parameter: Plant Line Value: Columbia
  misc_feature: MA Experiment 20001450 PARAMETER Experiment Name: At_Far-red-induction_P Parameter: Timepoint (hr) Value: 8
  misc_feature: MA Experiment 20001450 PARAMETER Experiment Name: At_Far-red-induction_P Parameter: Tissue Value: Whole Plant
  misc_feature: MA Experiment ID: 20001451 Result: Down-regulated in Transcription
  misc_feature: MA Experiment 20001451 PARAMETER Experiment Name: At_Far-red-induction_P Parameter: Age (day) Value: 7
  misc_feature: MA Experiment 20001451 PARAMETER Experiment Name: At_Far-red-induction_P Parameter: Light Value: Far-red vs. White
  misc_feature: MA Experiment 20001451 PARAMETER Experiment Name: At_Far-red-induction_P Parameter: Organism Value: A. thaliana
  misc_feature: MA Experiment 20001451 PARAMETER Experiment Name: At_Far-red-induction_P Parameter: Plant Line Value: Columbia
  misc_feature: MA Experiment 20001451 PARAMETER Experiment Name: At_Far-red-induction_P Parameter: Timepoint (hr) Value: 24
  misc_feature: MA Experiment 20001451 PARAMETER Experiment Name: At_Far-red-induction_P Parameter: Tissue Value: Whole Plant
  misc_feature: MA Experiment ID: 20001558 Result: Down-regulated in Transcription
  misc_feature: MA Experiment 20001558 PARAMETER Experiment Name: At_Drought_Soil_Dry_P Parameter: Age (day) Value: 27
  misc_feature: MA Experiment 20001558 PARAMETER Experiment Name: At_Drought_Soil_Dry_P Parameter: Organism Value: A. thaliana
  misc_feature: MA Experiment 20001558 PARAMETER Experiment Name: At_Drought_Soil_Dry_P Parameter: Plant Line Value: WS
  misc_feature: MA Experiment 20001558 PARAMETER Experiment Name: At_Drought_Soil_Dry_P Parameter: Post Timepoint (hr) Value: 6
  misc_feature: MA Experiment 20001558 PARAMETER Experiment Name: At_Drought_Soil_Dry_P Parameter: Post-Treatment Value: Re-Water vs. No Drought
  misc_feature: MA Experiment 20001558 PARAMETER Experiment Name: At_Drought_Soil_Dry_P Parameter: Timepoint (day) Value: 13
  misc_feature: MA Experiment 20001558 PARAMETER Experiment Name: At_Drought_Soil_Dry_P Parameter: Treatment Value: Drought vs. No Drought
aattaaaaacattcagacacaaatttagtttcttcttcttttggttctgtctgaatccaatttttttttattttatttcctccaccaccgtgaaatatgatcgccgccggagctaaatcgctactagggctttcgatggcttctccaaaagggctttccgatagcaattcaagatctgttgttgttgttcgtgcttgtgtttcgatggatggatctcaaactctgagtcataacaaaaatggatctattcctgagcttaaatccattaacggtcacactggacaaaagcaaggacctttgtctacggtcggaaactcgacaaatataaagtggcatgaatgttctgttgagaaagttgatagacagagattgcttgatcagaaaggatgtgttatttgggtcaccggtcttagtggttcagggaagagtactttggcttgtgctttgaatcagatgttgtatcaaaaggggaagctttgttatattcttgatggtgataatgttaggcatggcttaaaccgtgatcttagctttaaagctgaggatcgtgcagagaatattcgtagagttggagaggttgctaagctttttgcggatgctggaataatctgcattgcgagtttgatatctccttatagaacagatagggacgcttgtcgaaatttgctccccgagggagattttgttgaggtgttcatggatgtaccgcttagtgtttgcgaagcgagggatccaaagggtctttacaagcttgctcgtgcaggaaagatcaaaggttttaccgggatcgatgacccttacgagccaccattgaactgcgagatttctctaggacgcgaaggaggaacttctcctatcgaaatggctgaaaaggtcgtcggatacttagataacaagggttatcttcaagcataacatacttctagatacacaaatttgttatctcacggtcatagttctattttacgagccaaagtataaaagtaagcatgatccatggctgttttatggaatcacaagttcgacaaaatatatataaatctcataatttttcttgtccctttttcttgtattataaatctttgatgttatggttctgtatataatatgagtaaaatgaaggttaagcctaataaccatttgatatgatctataatacaatatactttgtatgc

SEQ ID NO: 41753 - protein, 272 aa, Arabidopsis thaliana
  peptide (1)..(272): Ceres Seq. ID no. 12371057
  misc_feature (96)..(252): Pfam Name: Adenylylsulphate kinase Pfam Description: Adenylylsulphate kinase
  misc_feature (55)..(252): Homolog of NCBI NO: 21537248 NR Description: adenylylsulfate kinase-like protein [Arabidopsis
  misc_feature (2)..(252): Homolog of NCBI NO: 18425199 NR Description: adenylylsulfate kinase-like protein
  misc_feature (50)..(270): Homolog of NCBI NO: 6563285 NR Description: adenosine-5'-phosphosulfate kinase [Zea mays]
  misc_feature (69)..(270): Homolog of NCBI NO: 34393551 NR Description: putative adenosine-5'-phosphosulfate kinase
  misc_feature (55)..(272): Homolog of NCBI NO: 9757873 NR Description: adenylylsulfate kinase-like protein [Arabidopsis
  misc_feature (68)..(271): Homolog of NCBI NO: 15228666 NR Description: putative adenylylsulfate kinase; protein id:
  misc_feature (64)..(271): Homolog of NCBI NO: 15236087 NR Description: adenosine-5-phosphosulfate-kinase
  misc_feature (3)..(272): Homolog of NCBI NO: 7387809 NR Description: Adenylylsulfate kinase, chloroplast precursor kinase) (Adenosine-5'phosphosulfate kinase) (ATP
  misc_feature (1)..(272): Homolog of NCBI NO: 21553403 NR Description: putative adenosine phosphosulfate kinase
  misc_feature (1)..(272): Homolog of NCBI NO: 15225999 NR Description: putative adenosine phosphosulfate kinase
MIAAGAKSLLGLSMASPKGLSDSNSRSVVVVRACVSMDGSQTLSHNKNGSIPELKSINGHTGQKQGPLSTVGNSTNIKWHECSVEKVDRQRLLDQKGCVIWVTGLSGSGKSTLACALNQMLYQKGKLCYILDGDNVRHGLNRDLSFKAEDRAENIRRVGEVAKLFADAGIICIASLISPYRTDRDACRNLLPEGDFVEVFMDVPLSVCEARDPKGLYKLARAGKIKGFTGIDDPYEPPLNCEISLGREGGTSPIEMAEKVVGYLDNKGYLQA

SEQ ID NO: 41754 - protein, 259 aa, Arabidopsis thaliana
  peptide (1)..(259): Ceres Seq. ID no. 12371058
  misc_feature (83)..(239): Pfam Name: Adenylylsulphate kinase Pfam Description: Adenylylsulphate kinase
  misc_feature (42)..(239): Homolog of NCBI NO: 21537248 NR Description: adenylylsulfate kinase-like protein [Arabidopsis
  misc_feature (1)..(239): Homolog of NCBI NO: 18425199 NR Description: adenylylsulfate kinase-like protein
  misc_feature (37)..(257): Homolog of NCBI NO: 6563285 NR Description: adenosine-5'-phosphosulfate kinase [Zea mays]
  misc_feature (56)..(257): Homolog of NCBI NO: 34393551 NR Description: putative adenosine-5'-phosphosulfate kinase
  misc_feature (42)..(259): Homolog of NCBI NO: 9757873 NR Description: adenylylsulfate kinase-like protein [Arabidopsis
  misc_feature (55)..(258): Homolog of NCBI NO: 15228666 NR Description: putative adenylylsulfate kinase; protein id:
  misc_feature (51)..(258): Homolog of NCBI NO: 15236087 NR Description: adenosine-5-phosphosulfate-kinase
  misc_feature (1)..(259): Homolog of NCBI NO: 7387809 NR Description: Adenylylsulfate kinase, chloroplast precursor kinase) (Adenosine-5'phosphosulfate kinase) (ATP
  misc_feature (1)..(259): Homolog of NCBI NO: 21553403 NR Description: putative adenosine phosphosulfate kinase
  misc_feature (1)..(259): Homolog of NCBI NO: 15225999 NR Description: putative adenosine phosphosulfate kinase
MASPKGLSDSNSRSVVVVRACVSMDGSQTLSHNKNGSIPELKSINGHTGQKQGPLSTVGNSTNIKWHECSVEKVDRQRLLDQKGCVIWVTGLSGSGKSTLACALNQMLYQKGKLCYILDGDNVRHGLNRDLSFKAEDRAENIRRVGEVAKLFADAGIICIASLISPYRTDRDACRNLLPEGDFVEVFMDVPLSVCEARDPKGLYKLARAGKIKGFTGIDDPYEPPLNCEISLGREGGTSPIEMAEKVVGYLDNKGYLQA

SEQ ID NO: 41755 - protein, 236 aa, Arabidopsis thaliana
  peptide (1)..(236): Ceres Seq. ID no. 12371059
  misc_feature (60)..(216): Pfam Name: Adenylylsulphate kinase Pfam Description: Adenylylsulphate kinase
  misc_feature (19)..(216): Homolog of NCBI NO: 21537248 NR Description: adenylylsulfate kinase-like protein [Arabidopsis
  misc_feature (1)..(216): Homolog of NCBI NO: 18425199 NR Description: adenylylsulfate kinase-like protein
  misc_feature (14)..(234): Homolog of NCBI NO: 6563285 NR Description: adenosine-5'-phosphosulfate kinase [Zea mays]
  misc_feature (33)..(234): Homolog of NCBI NO: 34393551 NR Description: putative adenosine-5'-phosphosulfate kinase
  misc_feature (19)..(236): Homolog of NCBI NO: 9757873 NR Description: adenylylsulfate kinase-like protein [Arabidopsis
  misc_feature (32)..(235): Homolog of NCBI NO: 15228666 NR Description: putative adenylylsulfate kinase; protein id:
  misc_feature (28)..(235): Homolog of NCBI NO: 15236087 NR Description: adenosine-5-phosphosulfate-kinase
  misc_feature (1)..(236): Homolog of NCBI NO: 7387809 NR Description: Adenylylsulfate kinase, chloroplast precursor kinase) (Adenosine-5'phosphosulfate kinase) (ATP
  misc_feature (1)..(236): Homolog of NCBI NO: 21553403 NR Description: putative adenosine phosphosulfate kinase
  misc_feature (1)..(236): Homolog of NCBI NO: 15225999 NR Description: putative adenosine phosphosulfate kinase
MDGSQTLSHNKNGSIPELKSINGHTGQKQGPLSTVGNSTNIKWHECSVEKVDRQRLLDQKGCVIWVTGLSGSGKSTLACALNQMLYQKGKLCYILDGDNVRHGLNRDLSFKAEDRAENIRRVGEVAKLFADAGIICIASLISPYRTDRDACRNLLPEGDFVEVFMDVPLSVCEARDPKGLYKLARAGKIKGFTGIDDPYEPPLNCEISLGREGGTSPIEMAEKVVGYLDNKGYLQA

SEQ ID NO: 41756 - DNA, 1996 bp, Arabidopsis thaliana
  misc_feature (1)..(1996): Ceres Seq. ID no. 12639081
  misc_feature: MA Experiment ID: 108433 Result: Up-regulated in Transcription
  misc_feature: MA Experiment 108433 PARAMETER Experiment Name: At_rhl_Mutant2_cDNA_P Parameter: Age (day) Value: 7
  misc_feature: MA Experiment 108433 PARAMETER Experiment Name: At_rhl_Mutant2_cDNA_P Parameter: Organism Value: A. thaliana
  misc_feature: MA Experiment 108433 PARAMETER Experiment Name: At_rhl_Mutant2_cDNA_P Parameter: Plant Line Value: rhl Mutant vs. wt landsburg
  misc_feature: MA Experiment 108433 PARAMETER Experiment Name: At_rhl_Mutant2_cDNA_P Parameter: Tissue Value: Roots
  misc_feature: MA Experiment ID: 108462 Result: Up-regulated in Transcription
  misc_feature: MA Experiment 108462 PARAMETER Experiment Name: At_Germinating_Seeds_cDNA_P Parameter: Age (day) Value: 2 vs. 0
  misc_feature: MA Experiment 108462 PARAMETER Experiment Name: At_Germinating_Seeds_cDNA_P Parameter: Tissue Value: Germinating Seeds
  misc_feature: MA Experiment ID: 108464 Result: Up-regulated in Transcription
  misc_feature: MA Experiment 108464 PARAMETER Experiment Name: At_Germinating_Seeds_cDNA_P Parameter: Age (day) Value: 4 vs. 0
  misc_feature: MA Experiment 108464 PARAMETER Experiment Name: At_Germinating_Seeds_cDNA_P Parameter: Tissue Value: Germinating Seeds
  misc_feature: MA Experiment ID: 108585 Result: Up-regulated in Transcription
  misc_feature: MA Experiment 108585 PARAMETER Experiment Name: At_5mM_NaNP_cDNA_P Parameter: Timepoint (hr) Value: 6
  misc_feature: MA Experiment 108585 PARAMETER Experiment Name: At_5mM_NaNP_cDNA_P Parameter: Tissue Value: Aerial
  misc_feature: MA Experiment 108585 PARAMETER Experiment Name: At_5mM_NaNP_cDNA_P Parameter: Treatment Value: null
  misc_feature: MA Experiment ID: 108668 Result: Up-regulated in Transcription
  misc_feature: MA Experiment 108668 PARAMETER Experiment Name: At_2mM_SA_cDNA_P Parameter: Plant Line Value: WS
  misc_feature: MA Experiment 108668 PARAMETER Experiment Name: At_2mM_SA_cDNA_P Parameter: Timepoint (hr) Value: 6
  misc_feature: MA Experiment 108668 PARAMETER Experiment Name: At_2mM_SA_cDNA_P Parameter: Treatment Value: 2mM SA vs. No Treatment
  misc_feature: MA Experiment ID: 20000173 Result: Down-regulated in Transcription
  misc_feature: MA Experiment 20000173 PARAMETER Experiment Name: At_42deg_Heat_P Parameter: Age (day) Value: 14
  misc_feature: MA Experiment 20000173 PARAMETER Experiment Name: At_42deg_Heat_P Parameter: Organism Value: A. thaliana
  misc_feature: MA Experiment 20000173 PARAMETER Experiment Name: At_42deg_Heat_P Parameter: Plant Line Value: WS
  misc_feature: MA Experiment 20000173 PARAMETER Experiment Name: At_42deg_Heat_P Parameter: Temperature (deg C) Value: 42 vs. 22
  misc_feature: MA Experiment 20000173 PARAMETER Experiment Name: At_42deg_Heat_P Parameter: Timepoint (hr) Value: 6
  misc_feature: MA Experiment 20000173 PARAMETER Experiment Name: At_42deg_Heat_P Parameter: Tissue Value: Aerial
  misc_feature: MA Experiment ID: 20000182 Result: Up-regulated in Transcription
  misc_feature: MA Experiment 20000182 PARAMETER Experiment Name: At_2mM_SA_P Parameter: Age (day) Value: 14
  misc_feature: MA Experiment 20000182 PARAMETER Experiment Name: At_2mM_SA_P Parameter: Organism Value: A. thaliana
  misc_feature: MA Experiment 20000182 PARAMETER Experiment Name: At_2mM_SA_P Parameter: Plant Line Value: WS
  misc_feature: MA Experiment 20000182 PARAMETER Experiment Name: At_2mM_SA_P Parameter: Timepoint (hr) Value: 6
  misc_feature: MA Experiment 20000182 PARAMETER Experiment Name: At_2mM_SA_P Parameter: Tissue Value: Aerial
  misc_feature: MA Experiment 20000182 PARAMETER Experiment Name: At_2mM_SA_P Parameter: Treatment Value: 2mM SA vs. No Treatment
  misc_feature: MA Experiment ID: 20000184 Result: Down-regulated in Transcription
  misc_feature: MA Experiment 20000184 PARAMETER Experiment Name: At_Shoots__P Parameter: Age (day) Value: 7
  misc_feature: MA Experiment 20000184 PARAMETER Experiment Name: At_Shoots__P Parameter: Tissue Value: Shoots vs. Whole Plant
  misc_feature: MA Experiment ID: 20000234 Result: Down-regulated in Transcription
  misc_feature: MA Experiment 20000234 PARAMETER Experiment Name: At_Siliques_P Parameter: Age (day) Value: 21
  misc_feature: MA Experiment 20000234 PARAMETER Experiment Name: At_Siliques_P Parameter: Organism Value: A. thaliana
  misc_feature: MA Experiment 20000234 PARAMETER Experiment Name: At_Siliques_P Parameter: Plant Line Value: WS
  misc_feature: MA Experiment 20000234 PARAMETER Experiment Name: At_Siliques_P Parameter: Tissue Value: Less Than 5mm Siliques vs. Whole Plant
  misc_feature: MA Experiment ID: 20000264 Result: Down-regulated in Transcription
  misc_feature: MA Experiment 20000264 PARAMETER Experiment Name: At_Open_Flower_P Parameter: Age (day) Value: 21
  misc_feature: MA Experiment 20000264 PARAMETER Experiment Name: At_Open_Flower_P Parameter: Plant Line Value: WS
  misc_feature: MA Experiment 20000264 PARAMETER Experiment Name: At_Open_Flower_P Parameter: Tissue Value: Open Flower vs. Whole Plant
  misc_feature: MA Experiment ID: 20000265 Result: Down-regulated in Transcription
  misc_feature: MA Experiment 20000265 PARAMETER Experiment Name: At_Open_Flower_P Parameter: Age (day) Value: 21
  misc_feature: MA Experiment 20000265 PARAMETER Experiment Name: At_Open_Flower_P Parameter: Plant Line Value: WS
  misc_feature: MA Experiment 20000265 PARAMETER Experiment Name: At_Open_Flower_P Parameter: Tissue Value: Closed Flower vs. Whole Plant
  misc_feature: MA Experiment ID: 20000286 Result: Down-regulated in Transcription
  misc_feature: MA Experiment 20000286 PARAMETER Experiment Name: At_Open_Flower_P Parameter: Age (day) Value: 21
  misc_feature: MA Experiment 20000286 PARAMETER Experiment Name: At_Open_Flower_P Parameter: Plant Line Value: WS
  misc_feature: MA Experiment 20000286 PARAMETER Experiment Name: At_Open_Flower_P Parameter: Tissue Value: Half Open vs. Whole Plant
  misc_feature: MA Experiment ID: 20000438 Result: Down-regulated in Transcription
  misc_feature: MA Experiment 20000438 PARAMETER Experiment Name: At_Shoots__P Parameter: Age (day) Value: 14
  misc_feature: MA Experiment 20000438 PARAMETER Experiment Name: At_Shoots__P Parameter: Tissue Value: Shoots vs. Whole Plant
  misc_feature: MA Experiment ID: 20000445 Result: Up-regulated in Transcription
  misc_feature: MA Experiment 20000445 PARAMETER Experiment Name: At_100uM_NAA__P Parameter: Age (day) Value: 14
  misc_feature: MA Experiment 20000445 PARAMETER Experiment Name: At_100uM_NAA__P Parameter: Organism Value: A. thaliana
  misc_feature: MA Experiment 20000445 PARAMETER Experiment Name: At_100uM_NAA__P Parameter: Plant Line Value: WS
  misc_feature: MA Experiment 20000445 PARAMETER Experiment Name: At_100uM_NAA__P Parameter: Timepoint (hr) Value: 6
  misc_feature: MA Experiment 20000445 PARAMETER Experiment Name: At_100uM_NAA__P Parameter: Tissue Value: Aerial
  misc_feature: MA Experiment 20000445 PARAMETER Experiment Name: At_100uM_NAA__P Parameter: Treatment Value: 100uM NAA vs. No Treatment
  misc_feature: MA Experiment ID: 20001557 Result: Down-regulated in Transcription
  misc_feature: MA Experiment 20001557 PARAMETER Experiment Name: At_Drought_Soil_Dry_P Parameter: Age (day) Value: 27
  misc_feature: MA Experiment 20001557 PARAMETER Experiment Name: At_Drought_Soil_Dry_P Parameter: Organism Value: A. thaliana
  misc_feature: MA Experiment 20001557 PARAMETER Experiment Name: At_Drought_Soil_Dry_P Parameter: Plant Line Value: WS
  misc_feature: MA Experiment 20001557 PARAMETER Experiment Name: At_Drought_Soil_Dry_P Parameter: Post Timepoint (hr) Value: 3
  misc_feature: MA Experiment 20001557 PARAMETER Experiment Name: At_Drought_Soil_Dry_P Parameter: Post-Treatment Value: Re-Water vs. No Drought
  misc_feature: MA Experiment 20001557 PARAMETER Experiment Name: At_Drought_Soil_Dry_P Parameter: Timepoint (day) Value: 13
  misc_feature: MA Experiment 20001557 PARAMETER Experiment Name: At_Drought_Soil_Dry_P Parameter: Treatment Value: Drought vs. No Drought
  misc_feature: MA Experiment ID: 20001560 Result: Down-regulated in Transcription
  misc_feature: MA Experiment 20001560 PARAMETER Experiment Name: At_Drought_Soil_Dry_P Parameter: Age (day) Value: 28
  misc_feature: MA Experiment 20001560 PARAMETER Experiment Name: At_Drought_Soil_Dry_P Parameter: Organism Value: A. thaliana
  misc_feature: MA Experiment 20001560 PARAMETER Experiment Name: At_Drought_Soil_Dry_P Parameter: Plant Line Value: WS
  misc_feature: MA Experiment 20001560 PARAMETER Experiment Name: At_Drought_Soil_Dry_P Parameter: Post Timepoint (hr) Value: None
  misc_feature: MA Experiment 20001560 PARAMETER Experiment Name: At_Drought_Soil_Dry_P Parameter: Post-Treatment Value: None
  misc_feature: MA Experiment 20001560 PARAMETER Experiment Name: At_Drought_Soil_Dry_P Parameter: Timepoint (day) Value: 14
  misc_feature: MA Experiment 20001560 PARAMETER Experiment Name: At_Drought_Soil_Dry_P Parameter: Treatment Value: Drought vs. No Drought
ctagtctgccatttttctttctcgtcctgtttccattctctctccgatcaaaaccagcccaattcgatcggagacatcacagaatggaaccagatcttcatgaccagcaacaacaacaacgagtccacagcgtagtcataatcactctcccaccatctgatgatccttcacaaggcaaaacaatctctgctttcactctcactgaccacgattacccactcgaaatcccacccgaggataacccaaacccgagttttcaacccgacccacttcaccgaaaccaacaatctcgcctcttgttctcggatctctcaatgaattcgccgagattagttctgggtcttctcggaatctcgcttctcgcggttgctttctacgcctctgtttttcccaactctgttcaaatgtttagggtttctcctgatgagaggaaccgtgacgacgacgataatctccgtgaaacggcgtcgtttgttttccctgtatatcacaaattgagagctcgagagttccacgagcggatcttagaggaagatttaggtttagagaatgaaaactttgtggaatcaatggatttagagctggtcaaccctgtaaaagtcaacgatgttttatctacaagtgccggttctattgactcctccactacgatttttcccgtcggtggtaatgtgtatccagatgggctgtattatacacgcattcttgttggaaagcctgaagatggacaatactatcatcttgatattgatacgggaagtgaattgacttggatccaatgtgatgctccttgtactagttgtgctaagggagcaaatcaactatataagcctagaaaagataacttagtgagatcttcagaggccttttgtgtagaagtccaaaggaatcaactgacagaacattgtgaaaattgtcatcaatgtgactacgagattgaatatgctgatcatagctactccatgggagttctcaccaaagataagtttcatctcaaactccataacggatcactagccgagtcagatatagttttcgggtgcgggtatgatcagcaaggactactgttgaatactctgctaaagacagacgggattctcggtctaagcagagctaaaattagcttaccttctcaacttgcaagcagaggtattatcagcaatgtggttggccattgccttgcctctgatttaaacggtgaaggatatatcttcatgggaagtgatttggttccatcacacggaatgacatgggttcctatgcttcacgattcccgcttggatgcttatcagatgcaagttacaaagatgagctacgggcagggtatgcttagcttagatggggaaaacggaagagtagggaaagtcttatttgacacaggaagttcctatacatacttccctaaccaggcttactcccaattggtcacatcacttcaagaagtttctggtttagaactaacacgcgatgattcagacgaaacactgcctatctgctggcgagccaaaactaacttcccgtttagttccttgtcggatgttaagaagttcttcagaccaataactctgcaaatagggagcaaatggttgatcatatcaagaaaacttttgattcaacccgaggattacttgatcatcagcaacaaaggaaatgtctgtcttgggatattagatggaagcagtgttcatgatggttccactattattcttggagatatctcgatgcgtggacacttgatcgtgtacgacaatgtgaaacggagaatcggatggatgaaatcagattgcgtccggcctcgtgagattgatcacaatgtacctttctttcaaggctgaaggagccataattcttacatatgtgatatgtgtataattaacctgacacatacacgcttgtataatagtactcgtgattacatattgtgtaacataaattgtaaaagactaatcaagttttgatctgtaacatatcaatgcaatcatattaataataagac

SEQ ID NO: 41757 - protein, 610 aa, Arabidopsis thaliana
  peptide (1)..(610): Ceres Seq. ID no. 12639082
  misc_feature (213)..(602): Homolog of NCBI NO: 7489412 NR Description: probable aspartic proteinase (EC 3.4.23.-) -
  misc_feature (213)..(599): Homolog of NCBI NO: 33340111 NR Description: nucellin-like protein [Oryza sativa]
  misc_feature (236)..(597): Homolog of NCBI NO: 21805926 NR Description: nucellin-like aspartic protease [Zea mays]
  misc_feature (192)..(595): Homolog of NCBI NO: 7484812 NR Description: aspartic proteinase homolog F17M5.250 -
  misc_feature (214)..(595): Homolog of NCBI NO: 26452545 NR Description: putative nucellin [Arabidopsis thaliana]
  misc_feature (214)..(595): Homolog of NCBI NO: 18418224 NR Description: nucellin -like protein
  misc_feature (213)..(595): Homolog of NCBI NO: 25350204 NR Description: nucellin-like protein, 27671-25467
  misc_feature (194)..(595): Homolog of NCBI NO: 15219354 NR Description: nucellin, putative; protein id: At1g44130.1
  misc_feature (213)..(595): Homolog of NCBI NO: 30699263 NR Description: nucellin protein, putative [Arabidopsis thaliana]
  misc_feature (213)..(604): Homolog of NCBI NO: 30699261 NR Description: nucellin protein, putative [Arabidopsis thaliana]
  misc_feature (213)..(602): Homolog of NCBI NO: 7489412 NR Description: probable aspartic proteinase (EC 3.4.23.-) -
  misc_feature (213)..(599): Homolog of NCBI NO: 33340111 NR Description: nucellin-like protein [Oryza sativa]
  misc_feature (236)..(597): Homolog of NCBI NO: 21805926 NR Description: nucellin-like aspartic protease [Zea mays]
  misc_feature (192)..(595): Homolog of NCBI NO: 7484812 NR Description: aspartic proteinase homolog F17M5.250 -
  misc_feature (214)..(595): Homolog of NCBI NO: 26452545 NR Description: putative nucellin [Arabidopsis thaliana]
  misc_feature (214)..(595): Homolog of NCBI NO: 18418224 NR Description: nucellin -like protein
  misc_feature (213)..(595): Homolog of NCBI NO: 25350204 NR Description: nucellin-like protein, 27671-25467
  misc_feature (194)..(595): Homolog of NCBI NO: 15219354 NR Description: nucellin, putative; protein id: At1g44130.1
  misc_feature (213)..(595): Homolog of NCBI NO: 30699263 NR Description: nucellin protein, putative [Arabidopsis thaliana]
  misc_feature (213)..(604): Homolog of NCBI NO: 30699261 NR Description: nucellin protein, putative [Arabidopsis thaliana]
  misc_feature (213)..(602): Homolog of NCBI NO: 7489412 NR Description: probable aspartic proteinase (EC 3.4.23.-) -
  misc_feature (213)..(599): Homolog of NCBI NO: 33340111 NR Description: nucellin-like protein [Oryza sativa]
  misc_feature (236)..(597): Homolog of NCBI NO: 21805926 NR Description: nucellin-like aspartic protease [Zea mays]
  misc_feature (192)..(595): Homolog of NCBI NO: 7484812 NR Description: aspartic proteinase homolog F17M5.250 -
  misc_feature (214)..(595): Homolog of NCBI NO: 26452545 NR Description: putative nucellin [Arabidopsis thaliana]
  misc_feature (214)..(595): Homolog of NCBI NO: 18418224 NR Description: nucellin -like protein
  misc_feature (213)..(595): Homolog of NCBI NO: 25350204 NR Description: nucellin-like protein, 27671-25467
  misc_feature (194)..(595): Homolog of NCBI NO: 15219354 NR Description: nucellin, putative; protein id: At1g44130.1
  misc_feature (213)..(595): Homolog of NCBI NO: 30699263 NR Description: nucellin protein, putative [Arabidopsis thaliana]
  misc_feature (213)..(604): Homolog of NCBI NO: 30699261 NR Description: nucellin protein, putative [Arabidopsis thaliana]
SLPFFFLVLFPFSLRSKPAQFDRRHHRMEPDLHDQQQQQRVHSVVIITLPPSDDPSQGKTISAFTLTDHDYPLEIPPEDNPNPSFQPDPLHRNQQSRLLFSDLSMNSPRLVLGLLGISLLAVAFYASVFPNSVQMFRVSPDERNRDDDDNLRETASFVFPVYHKLRAREFHERILEEDLGLENENFVESMDLELVNPVKVNDVLSTSAGSIDSSTTIFPVGGNVYPDGLYYTRILVGKPEDGQYYHLDIDTGSELTWIQCDAPCTSCAKGANQLYKPRKDNLVRSSEAFCVEVQRNQLTEHCENCHQCDYEIEYADHSYSMGVLTKDKFHLKLHNGSLAESDIVFGCGYDQQGLLLNTLLKTDGILGLSRAKISLPSQLASRGIISNVVGHCLASDLNGEGYIFMGSDLVPSHGMTWVPMLHDSRLDAYQMQVTKMSYGQGMLSLDGENGRVGKVLFDTGSSYTYFPNQAYSQLVTSLQEVSGLELTRDDSDETLPICWRAKTNFPFSSLSDVKKFFRPITLQIGSKWLIISRKLLIQPEDYLIISNKGNVCLGILDGSSVHDGSTIILGDISMRGHLIVYDNVKRRIGWMKSDCVRPREIDHNVPFFQG

SEQ ID NO: 41758 - protein, 583 aa, Arabidopsis thaliana [sequence omitted]

SEQ ID NO: 41759 - protein, 506 aa, Arabidopsis thaliana
  peptide (1)..(506): Ceres Seq. ID no. 12639084
  misc_feature (109)..(498): Homolog of NCBI NO: 7489412 NR Description: probable aspartic proteinase (EC 3.4.23.-) -
  misc_feature (109)..(495): Homolog of NCBI NO: 33340111 NR Description: nucellin-like protein [Oryza sativa]
  misc_feature (132)..(493): Homolog of NCBI NO: 21805926 NR Description: nucellin-like aspartic protease [Zea mays]
  misc_feature (88)..(491): Homolog of NCBI NO: 7484812 NR Description: aspartic proteinase homolog F17M5.250 -
  misc_feature (110)..(491): Homolog of NCBI NO: 26452545 NR Description: putative nucellin [Arabidopsis thaliana]
  misc_feature (110)..(491): Homolog of NCBI NO: 18418224 NR Description: nucellin -like protein
  misc_feature (109)..(491): Homolog of NCBI NO: 25350204 NR Description: nucellin-like protein, 27671-25467
  misc_feature (90)..(491): Homolog of NCBI NO: 15219354 NR Description: nucellin, putative; protein id: At1g44130.1
  misc_feature (109)..(491): Homolog of NCBI NO: 30699263 NR Description: nucellin protein, putative [Arabidopsis thaliana]
  misc_feature (109)..(500): Homolog of NCBI NO: 30699261 NR Description: nucellin protein, putative [Arabidopsis thaliana]
  misc_feature (109)..(498): Homolog of NCBI NO: 7489412 NR Description: probable aspartic proteinase (EC 3.4.23.-) -
  misc_feature (109)..(495): Homolog of NCBI NO: 33340111 NR Description: nucellin-like protein [Oryza sativa]
  misc_feature (132)..(493): Homolog of NCBI NO: 21805926 NR Description: nucellin-like aspartic protease [Zea mays]
  misc_feature (88)..(491): Homolog of NCBI NO: 7484812 NR Description: aspartic proteinase homolog F17M5.250 -
  misc_feature (110)..(491): Homolog of NCBI NO: 26452545 NR Description: putative nucellin [Arabidopsis thaliana]
  misc_feature (110)..(491): Homolog of NCBI NO: 18418224 NR Description: nucellin -like protein
  misc_feature (109)..(491): Homolog of NCBI NO: 25350204 NR Description: nucellin-like protein, 27671-25467
  misc_feature (90)..(491): Homolog of NCBI NO: 15219354 NR Description: nucellin, putative; protein id: At1g44130.1
  misc_feature (109)..(491): Homolog of NCBI NO: 30699263 NR Description: nucellin protein, putative [Arabidopsis thaliana]
  misc_feature (109)..(500): Homolog of NCBI NO: 30699261 NR Description: nucellin protein, putative [Arabidopsis thaliana]
  misc_feature (109)..(498): Homolog of NCBI NO: 7489412 NR Description: probable aspartic proteinase (EC 3.4.23.-) -
  misc_feature (109)..(495): Homolog of NCBI NO: 33340111 NR Description: nucellin-like protein [Oryza sativa]
  misc_feature (132)..(493): Homolog of NCBI NO: 21805926 NR Description: nucellin-like aspartic protease [Zea mays]
  misc_feature (88)..(491): Homolog of NCBI NO: 7484812 NR Description: aspartic proteinase homolog F17M5.250 -
  misc_feature (110)..(491): Homolog of NCBI NO: 26452545 NR Description: putative nucellin [Arabidopsis thaliana]
  misc_feature (110)..(491): Homolog of NCBI NO: 18418224 NR Description: nucellin -like protein
  misc_feature (109)..(491): Homolog of NCBI NO: 25350204 NR Description: nucellin-like protein, 27671-25467
  misc_feature (90)..(491): Homolog of NCBI NO: 15219354 NR Description: nucellin, putative; protein id: At1g44130.1
  misc_feature (109)..(491): Homolog of NCBI NO: 30699263 NR Description: nucellin protein, putative [Arabidopsis thaliana]
  misc_feature (109)..(500): Homolog of NCBI NO: 30699261 NR Description: nucellin protein, putative [Arabidopsis thaliana]
MNSPRLVLGLLGISLLAVAFYASVFPNSVQMFRVSPDERNRDDDDNLRETASFVFPVYHKLRAREFHERILEEDLGLENENFVESMDLELVNPVKVNDVLSTSAGSIDSSTTIFPVGGNVYPDGLYYTRILVGKPEDGQYYHLDIDTGSELTWIQCDAPCTSCAKGANQLYKPRKDNLVRSSEAFCVEVQRNQLTEHCENCHQCDYEIEYADHSYSMGVLTKDKFHLKLHNGSLAESDIVFGCGYDQQGLLLNTLLKTDGILGLSRAKISLPSQLASRGIISNVVGHCLASDLNGEGYIFMGSDLVPSHGMTWVPMLHDSRLDAYQMQVTKMSYGQGMLSLDGENGRVGKVLFDTGSSYTYFPNQAYSQLVTSLQEVSGLELTRDDSDETLPICWRAKTNFPFSSLSDVKKFFRPITLQIGSKWLIISRKLLIQPEDYLIISNKGNVCLGILDGSSVHDGSTIILGDISMRGHLIVYDNVKRRIGWMKSDCVRPREIDHNVPFFQG

SEQ ID NO: 41760 - DNA, 817 bp, Arabidopsis thaliana
  misc_feature (1)..(817): Ceres Seq. ID no. 12323971
  misc_feature: MA Experiment ID: 20001458 Result: Up-regulated in Transcription
  misc_feature: MA Experiment 20001458 PARAMETER Experiment Name: At_50mM_NH4NO3_L-to-H_P Parameter: Age (day) Value: Undefined
  misc_feature: MA Experiment 20001458 PARAMETER Experiment Name: At_50mM_NH4NO3_L-to-H_P Parameter: Organism Value: Undefined
  misc_feature: MA Experiment 20001458 PARAMETER Experiment Name: At_50mM_NH4NO3_L-to-H_P Parameter: Plant Line Value: Undefined
  misc_feature: MA Experiment 20001458 PARAMETER Experiment Name: At_50mM_NH4NO3_L-to-H_P Parameter: Timepoint (hr) Value: 2
  misc_feature: MA Experiment 20001458 PARAMETER Experiment Name: At_50mM_NH4NO3_L-to-H_P Parameter: Tissue Value: Siliques
  misc_feature: MA Experiment 20001458 PARAMETER Experiment Name: At_50mM_NH4NO3_L-to-H_P Parameter: Treatment Value: 50mM NH4NO3 vs. 100mM Manitol
  misc_feature: MA Experiment ID: 20001557 Result: Up-regulated in Transcription
  misc_feature: MA Experiment 20001557 PARAMETER Experiment Name: At_Drought_Soil_Dry_P Parameter: Age (day) Value: 27
  misc_feature: MA Experiment 20001557 PARAMETER Experiment Name: At_Drought_Soil_Dry_P Parameter: Organism Value: A. thaliana
  misc_feature: MA Experiment 20001557 PARAMETER Experiment Name: At_Drought_Soil_Dry_P Parameter: Plant Line Value: WS
  misc_feature: MA Experiment 20001557 PARAMETER Experiment Name: At_Drought_Soil_Dry_P Parameter: Post Timepoint (hr) Value: 3
  misc_feature: MA Experiment 20001557 PARAMETER Experiment Name: At_Drought_Soil_Dry_P Parameter: Post-Treatment Value: Re-Water vs. No Drought
  misc_feature: MA Experiment 20001557 PARAMETER Experiment Name: At_Drought_Soil_Dry_P Parameter: Timepoint (day) Value: 13
  misc_feature: MA Experiment 20001557 PARAMETER Experiment Name: At_Drought_Soil_Dry_P Parameter: Treatment Value: Drought vs. No Drought
atatatcgagagagacaagccagcaagaattttcagcacacatacacacacaaaagattcaaagaatcatctagtaacaattaaaaaaggagagagaaggaaaatgaacagaatgagcaatacagtgataggattcttgaatatcctaacactaatttcctccatagttctattaggatcagctctatggatgggtaggagcaaaacgacatgcgagcattttcttcagaagccacttttgatcttaggcctagctatcttgatcttgtcagtagctggtctagtcggtgcatgttgtgacgtggcttgggtcttgtgggtgtacctcttcttcatggtcttcatcatagtcgcactcatgggtttgaccttgtttggattcatagtgactagccatagtggtggtgtggttgtcgatggtagggtttataaagagtttaagcttgaagcatatcacccttggcttaagacaagggtggtagatactaattattgggttactataaagacttgtctcttgggctcagtcacttgttccaagctcgctctttggactcctcttgattatctccaaaaagacttatctcctcttcagctgtttactgtgttggctgttgcgcgtttaaaaacgccaaacgccctcaacattacggcttcccttatggacgttacggcatgtccaaatccagacctggatgggaacagtcctggtttgttctcttttctaatgcaacaattatttttattattttcgcggcatgtaggtcaaggtggtggcatgggagagatcggtattagtgaaaaatatttatgttaa

SEQ ID NO: 41761 - protein, 271 aa, Arabidopsis thaliana
  peptide (1)..(271): Ceres Seq. ID no. 12323972
  misc_feature (38)..(222): Pfam Name: Tetraspanin family Pfam Description: Tetraspanin family
  misc_feature (35)..(198): Homolog of NCBI NO: 21537169 NR Description: senescence-associated protein-like protein
  misc_feature (35)..(181): Homolog of NCBI NO: 20197300 NR Description: hypothetical protein [Arabidopsis thaliana]
  misc_feature (35)..(198): Homolog of NCBI NO: 15234743 NR Description: senescence-associated protein homolog
  misc_feature (34)..(198): Homolog of NCBI NO: 34906104 NR Description: putative senescence-assocated protein
  misc_feature (35)..(181): Homolog of NCBI NO: 20197174 NR Description: hypothetical protein [Arabidopsis thaliana]
  misc_feature (35)..(198): Homolog of NCBI NO: 9294106 NR Description: senescence-associated protein-like [Arabidopsis
  misc_feature (35)..(198): Homolog of NCBI NO: 30682045 NR Description: senescence-associated protein family [Arabidopsis
  misc_feature (35)..(198): Homolog of NCBI NO: 28392978 NR Description: unknown protein [Arabidopsis thaliana]
  misc_feature (38)..(271): Homolog of NCBI NO: 7485549 NR Description: hypothetical protein F16G20.110 - Arabidopsis
  misc_feature (35)..(271): Homolog of NCBI NO: 30686186 NR Description: senescence-associated protein family [Arabidopsis
YIERDKPARIFSTHTHTKDSKNHLVTIKKGERRKMNRMSNTVIGFLNILTLISSIVLLGSALWMGRSKTTCEHFLQKPLLILGLAILILSVAGLVGACCDVAWVLWVYLFFMVFIIVALMGLTLFGFIVTSHSGGVVVDGRVYKEFKLEAYHPWLKTRVVDTNYWVTIKTCLLGSVTCSKLALWTPLDYLQKDLSPLQLFTVLAVARLKTPNALNITASLMDVTACPNPDLDGNSPGLFSFLMQQLFLLFSRHVGQGGGMGEIGISEKYLC

SEQ ID NO: 41762 - protein, 237 aa, Arabidopsis thaliana
  peptide (1)..(237): Ceres Seq. ID no. 12323973
  misc_feature (4)..(188): Pfam Name: Tetraspanin family Pfam Description: Tetraspanin family
  misc_feature (1)..(164): Homolog of NCBI NO: 21537169 NR Description: senescence-associated protein-like protein
  misc_feature (1)..(147): Homolog of NCBI NO: 20197300 NR Description: hypothetical protein [Arabidopsis thaliana]
  misc_feature (1)..(164): Homolog of NCBI NO: 15234743 NR Description: senescence-associated protein homolog
  misc_feature (1)..(164): Homolog of NCBI NO: 34906104 NR Description: putative senescence-assocated protein
  misc_feature (1)..(147): Homolog of NCBI NO: 20197174 NR Description: hypothetical protein [Arabidopsis thaliana]
  misc_feature (1)..(164): Homolog of NCBI NO: 9294106 NR Description: senescence-associated protein-like [Arabidopsis
  misc_feature (1)..(164): Homolog of NCBI NO: 30682045 NR Description: senescence-associated protein family [Arabidopsis
  misc_feature (1)..(164): Homolog of NCBI NO: 28392978 NR Description: unknown protein [Arabidopsis thaliana]
  misc_feature (4)..(237): Homolog of NCBI NO: 7485549 NR Description: hypothetical protein F16G20.110 - Arabidopsis
  misc_feature (1)..(237): Homolog of NCBI NO: 30686186 NR Description: senescence-associated protein family [Arabidopsis
MNRMSNTVIGFLNILTLISSIVLLGSALWMGRSKTTCEHFLQKPLLILGLAILILSVAGLVGACCDVAWVLWVYLFFMVFIIVALMGLTLFGFIVTSHSGGVVVDGRVYKEFKLEAYHPWLKTRVVDTNYWVTIKTCLLGSVTCSKLALWTPLDYLQKDLSPLQLFTVLAVARLKTPNALNITASLMDVTACPNPDLDGNSPGLFSFLMQQLFLLFSRHVGQGGGMGEIGISEKYLC

SEQ ID NO: 41763 - protein, 234 aa, Arabidopsis thaliana
  peptide (1)..(234): Ceres Seq. ID no. 12323974
  misc_feature (1)..(185): Pfam Name: Tetraspanin family Pfam Description: Tetraspanin family
  misc_feature (1)..(161): Homolog of NCBI NO: 21537169 NR Description: senescence-associated protein-like protein
  misc_feature (1)..(144): Homolog of NCBI NO: 20197300 NR Description: hypothetical protein [Arabidopsis thaliana]
  misc_feature (1)..(161): Homolog of NCBI NO: 15234743 NR Description: senescence-associated protein homolog
  misc_feature (1)..(161): Homolog of NCBI NO: 34906104 NR Description: putative senescence-assocated protein
  misc_feature (1)..(144): Homolog of NCBI NO: 20197174 NR Description: hypothetical protein [Arabidopsis thaliana]
  misc_feature (1)..(161): Homolog of NCBI NO: 9294106 NR Description: senescence-associated protein-like [Arabidopsis
  misc_feature (1)..(161): Homolog of NCBI NO: 30682045 NR Description: senescence-associated protein family [Arabidopsis
  misc_feature (1)..(161): Homolog of NCBI NO: 28392978 NR Description: unknown protein [Arabidopsis thaliana]
  misc_feature (1)..(234): Homolog of NCBI NO: 7485549 NR Description: hypothetical protein F16G20.110 - Arabidopsis
  misc_feature (1)..(234): Homolog of NCBI NO: 30686186 NR Description: senescence-associated protein family [Arabidopsis
MSNTVIGFLNILTLISSIVLLGSALWMGRSKTTCEHFLQKPLLILGLAILILSVAGLVGACCDVAWVLWVYLFFMVFIIVALMGLTLFGFIVTSHSGGVVVDGRVYKEFKLEAYHPWLKTRVVDTNYWVTIKTCLLGSVTCSKLALWTPLDYLQKDLSPLQLFTVLAVARLKTPNALNITASLMDVTACPNPDLDGNSPGLFSFLMQQLFLLFSRHVGQGGGMGEIGISEKYLC

SEQ ID NO: 41764 - DNA, 1461 bp, Arabidopsis thaliana
  misc_feature (1)..(1461): Ceres Seq. ID no. 13593429
  misc_feature: MA Experiment ID: 20000234 Result: Down-regulated in Transcription
  misc_feature: MA Experiment 20000234 PARAMETER Experiment Name: At_Siliques_P Parameter: Age (day) Value: 21
  misc_feature: MA Experiment 20000234 PARAMETER Experiment Name: At_Siliques_P Parameter: Organism Value: A. thaliana
  misc_feature: MA Experiment 20000234 PARAMETER Experiment Name: At_Siliques_P Parameter: Plant Line Value: WS
  misc_feature: MA Experiment 20000234 PARAMETER Experiment Name: At_Siliques_P Parameter: Tissue Value: Less Than 5mm Siliques vs. Whole Plant
  misc_feature: MA Experiment ID: 20000265 Result: Down-regulated in Transcription
  misc_feature: MA Experiment 20000265 PARAMETER Experiment Name: At_Open_Flower_P Parameter: Age (day) Value: 21
  misc_feature: MA Experiment 20000265 PARAMETER Experiment Name: At_Open_Flower_P Parameter: Plant Line Value: WS
  misc_feature: MA Experiment 20000265 PARAMETER Experiment Name: At_Open_Flower_P Parameter: Tissue Value: Closed Flower vs. Whole Plant
  misc_feature: MA Experiment ID: 20000438 Result: Down-regulated in Transcription
  misc_feature: MA Experiment 20000438 PARAMETER Experiment Name: At_Shoots__P Parameter: Age (day) Value: 14
  misc_feature: MA Experiment 20000438 PARAMETER Experiment Name: At_Shoots__P Parameter: Tissue Value: Shoots vs. Whole Plant
  misc_feature: MA Experiment ID: 20000794 Result: Up-regulated in Transcription
  misc_feature: MA Experiment 20000794 PARAMETER Experiment Name: At_Petals_P Parameter: Age (day) Value: 23-25 days
  misc_feature: MA Experiment 20000794 PARAMETER Experiment Name: At_Petals_P Parameter: Plant Line Value: WS
  misc_feature: MA Experiment 20000794 PARAMETER Experiment Name: At_Petals_P Parameter: Tissue Value: Petals vs. Whole plant
  misc_feature: MA Experiment ID: 20001248 Result: Up-regulated in Transcription
  misc_feature: MA Experiment 20001248 PARAMETER Experiment Name: At_Far-red-induction_P Parameter: Age (day) Value: 7
  misc_feature: MA Experiment 20001248 PARAMETER Experiment Name: At_Far-red-induction_P Parameter: Light Value: Far-red vs. White
  misc_feature: MA Experiment 20001248 PARAMETER Experiment Name: At_Far-red-induction_P Parameter: Organism Value: A. thaliana
  misc_feature: MA Experiment 20001248 PARAMETER Experiment Name: At_Far-red-induction_P Parameter: Plant Line Value: Columbia
  misc_feature: MA Experiment 20001248 PARAMETER Experiment Name: At_Far-red-induction_P Parameter: Timepoint (hr) Value: 4
  misc_feature: MA Experiment 20001248 PARAMETER Experiment Name: At_Far-red-induction_P Parameter: Tissue Value: Whole Plant
  misc_feature: MA Experiment ID: 20001558 Result: Down-regulated in Transcription
  misc_feature: MA Experiment 20001558 PARAMETER Experiment Name: At_Drought_Soil_Dry_P Parameter: Age (day) Value: 27
  misc_feature: MA Experiment 20001558 PARAMETER Experiment Name: At_Drought_Soil_Dry_P Parameter: Organism Value: A. thaliana
  misc_feature: MA Experiment 20001558 PARAMETER Experiment Name: At_Drought_Soil_Dry_P Parameter: Plant Line Value: WS
  misc_feature: MA Experiment 20001558 PARAMETER Experiment Name: At_Drought_Soil_Dry_P Parameter: Post Timepoint (hr) Value: 6
  misc_feature: MA Experiment 20001558 PARAMETER Experiment Name: At_Drought_Soil_Dry_P Parameter: Post-Treatment Value: Re-Water vs. No Drought
  misc_feature: MA Experiment 20001558 PARAMETER Experiment Name: At_Drought_Soil_Dry_P Parameter: Timepoint (day) Value: 13
  misc_feature: MA Experiment 20001558 PARAMETER Experiment Name: At_Drought_Soil_Dry_P Parameter: Treatment Value: Drought vs. No Drought
  misc_feature: MA Experiment ID: 20001560 Result: Down-regulated in Transcription
  misc_feature: MA Experiment 20001560 PARAMETER Experiment Name: At_Drought_Soil_Dry_P Parameter: Age (day) Value: 28
  misc_feature: MA Experiment 20001560 PARAMETER Experiment Name: At_Drought_Soil_Dry_P Parameter: Organism Value: A. thaliana
  misc_feature: MA Experiment 20001560 PARAMETER Experiment Name: At_Drought_Soil_Dry_P Parameter: Plant Line Value: WS
  misc_feature: MA Experiment 20001560 PARAMETER Experiment Name: At_Drought_Soil_Dry_P Parameter: Post Timepoint (hr) Value: None
  misc_feature: MA Experiment 20001560 PARAMETER Experiment Name: At_Drought_Soil_Dry_P Parameter: Post-Treatment Value: None
  misc_feature: MA Experiment 20001560 PARAMETER Experiment Name: At_Drought_Soil_Dry_P Parameter: Timepoint (day) Value: 14
  misc_feature: MA Experiment 20001560 PARAMETER Experiment Name: At_Drought_Soil_Dry_P Parameter: Treatment Value: Drought vs. No Drought
atcttaaaagaaaccgaaagctaatctccaaagggaaaaagacgtgtagcagagacctatacatacacctatacattcacgttgcgtgtgataatctactgagggttctatctatattaatccttctctgcttccttcaatctaattgcaaatcaaatggatcgtcttaagctttatttctccgttttcgttttgtctttctttatcgtctcggtttcgtcgtctgatgtcaacgacggcgatgatctcgtgatccgtcaggtggttggtggagccgagcctcaggttttgacctcagaggatcacttttctctcttcaagcggaagttcgggaaggtctacgcttccaacgaggagcatgactatagattctcggttttcaaagcgaatctcaggcgagcgaggcgtcaccagaagttggatccgtcggcgactcatggtgttacgcagttctcagatctgactcggtctgagttccgtaagaagcacttgggggttagaagtggctttaagcttcctaaagatgccaacaaggctccgattctccctaccgaaaatctccctgaggattttgattggagagatcatggcgccgttactcccgtcaaaaatcagggatcttgcggctcttgctggagtttcagcgccactggagctttggaaggtgctaacttcctcgctaccggcaaactcgtcagcctcagcgaacaacagctcgtcgactgtgatcacgagtgtgatcccgaggaggcagattcctgcgactctggttgcaatggtgggctaatgaacagcgcttttgaatacaccctcaaaaccggagggctcatgaaagaagaagactatccttacaccggaaaggacggcaagacctgcaagctagacaagtccaagatcgttgcctctgtctccaacttcagtgttatctccattgatgaagaacagattgctgcaaaccttgtcaagaacggacctcttgctgtagccatcaacgctggctatatgcagacttacattggaggagtctcatgcccttacatatgcaccaggaggctcaaccacggtgtcttattggttggctatggagcggcaggttacgctccggctaggttcaaggagaagccttactggatcatcaagaactcgtggggagagacttggggtgaaaatggtttctacaaaatctgcaaaggccgtaacatttgtggtgttgacagtatggtctccactgttgcagccaccgtctcaaccaccgcccattaagcatctcgtcaataagttttaattactttggtgatttgtatgagcgagctctctttgcgctgctgactctctctatttatctctgcttcttgcttgtaaataaaatgcgttctattgagcaaaaccgtacaatgctcattagcaatgagcccactttaacaagtatcagtttatggcccaatatatgaaagttaaatc

SEQ ID NO: 41765 - protein, 368 aa, Arabidopsis thaliana; identical to SEQ ID NO: 23807
  peptide (1)..(368): Ceres Seq. ID no. 13593430
  misc_feature (135)..(360): Pfam Name: Papain family cysteine protease Pfam Description: Papain family cysteine protease
  misc_feature (8)..(367): Homolog of NCBI NO: 7211743 NR Description: papain-like cysteine proteinase isoform II
  misc_feature (3)..(367): Homolog of NCBI NO: 7381221 NR Description: papain-like cysteine proteinase isoform II
  misc_feature (3)..(367): Homolog of NCBI NO: 7211745 NR Description: papain-like cysteine proteinase isoform III
  misc_feature (52)..(364): Homolog of NCBI NO: 516865 NR Description: putative thiol protease [Arabidopsis thaliana]
  misc_feature (8)..(367): Homolog of NCBI NO: 7381219 NR Description: papain-like cysteine proteinase isoform I
  misc_feature (8)..(367): Homolog of NCBI NO: 7211741 NR Description: papain-like cysteine proteinase isoform I
  misc_feature (1)..(364): Homolog of NCBI NO: 18399697 NR Description: cysteine proteinase A494 precursor, putative
  misc_feature (1)..(368): Homolog of NCBI NO: 18141287 NR Description: senescence-associated cysteine protease [Brassica
  misc_feature (1)..(368): Homolog of NCBI NO: 21593213 NR Description: cysteine proteinase RD19A [Arabidopsis thaliana]
  misc_feature (1)..(368): Homolog of NCBI NO: 18420375 NR Description: cysteine proteinase RD19A [Arabidopsis thaliana]

SEQ ID NO: 41766 - DNA, 1430 bp, Arabidopsis thaliana
  misc_feature (1)..(1430): Ceres Seq. ID no. 12394423
  misc_feature: MA Experiment ID: 108488 Result: Up-regulated in Transcription
  misc_feature: MA Experiment ID: 108579 Result: Down-regulated in Transcription
  misc_feature: MA Experiment 108579 PARAMETER Experiment Name: At_4deg_Cold_cDNA_P Parameter: Temperature (deg C) Value: 4 vs. 22
  misc_feature: MA Experiment 108579 PARAMETER Experiment Name: At_4deg_Cold_cDNA_P Parameter: Timepoint (hr) Value: 6
  misc_feature: MA Experiment 108579 PARAMETER Experiment Name: At_4deg_Cold_cDNA_P Parameter: Tissue Value: Aerial
  misc_feature: MA Experiment ID: 108595 Result: Down-regulated in Transcription
  misc_feature: MA Experiment 108595 PARAMETER Experiment Name: At_Ler-pi_Ovule_cDNA_P Parameter: Plant Line Value: null
  misc_feature: MA Experiment ID: 20000111 Result: Up-regulated in Transcription
  misc_feature: MA Experiment 20000111 PARAMETER Experiment Name: At_42deg_Heat_cDNA_P Parameter: Temperature (deg C) Value: 42 vs. 22
  misc_feature: MA Experiment 20000111 PARAMETER Experiment Name: At_42deg_Heat_cDNA_P Parameter: Timepoint (hr) Value: 6
  misc_feature: MA Experiment 20000111 PARAMETER Experiment Name: At_42deg_Heat_cDNA_P Parameter: Tissue Value: Aerial
  misc_feature: MA Experiment ID: 20000113 Result: Up-regulated in Transcription
  misc_feature: MA Experiment 20000113 PARAMETER Experiment Name: At_42deg_Heat_cDNA_P Parameter: Temperature (deg C) Value: 42 vs. 22
  misc_feature: MA Experiment 20000113 PARAMETER Experiment Name: At_42deg_Heat_cDNA_P Parameter: Timepoint (hr) Value: 8
  misc_feature: MA Experiment 20000113 PARAMETER Experiment Name: At_42deg_Heat_cDNA_P Parameter: Tissue Value: Aerial
  misc_feature: MA Experiment ID: 20000180 Result: Up-regulated in Transcription
  misc_feature: MA Experiment 20000180 PARAMETER Experiment Name: At_Germinating_Seeds_P Parameter: Age (hr) Value: 24 vs. 0
  misc_feature: MA Experiment 20000180 PARAMETER Experiment Name: At_Germinating_Seeds_P Parameter: Tissue Value: Germinating Seeds
  misc_feature: MA Experiment ID: 20000184 Result: Up-regulated in Transcription
  misc_feature: MA Experiment 20000184 PARAMETER Experiment Name: At_Shoots__P Parameter: Age (day) Value: 7
  misc_feature: MA Experiment 20000184 PARAMETER Experiment Name: At_Shoots__P Parameter: Tissue Value: Shoots vs. Whole Plant
  misc_feature: MA Experiment ID: 20000438 Result: Up-regulated in Transcription
  misc_feature: MA Experiment 20000438 PARAMETER Experiment Name: At_Shoots__P Parameter: Age (day) Value: 14
  misc_feature: MA Experiment 20000438 PARAMETER Experiment Name: At_Shoots__P Parameter: Tissue Value: Shoots vs. Whole Plant
acaactctgttccaagtcttatcctttcatcatcatcatcacttaccttcttcacagagagagagcttcatcatcatatgtaatgtgagatgtctcttgaacaatgcaacaagaagctctctctttcctctcgtcctctctcccttcccttcaccacaattttccctctctttctcgcctccgcttcaacaattttcccgcactttccttcaaaccaaacacttcatcatcatcttcatcattcttcaaatccccagatataccctctctctcctccaccacaacaacaacaacaacaacaaccaccgaaaccctagaatcctcaatccacgagaaactcatttacctcgattcactcggaatcgatttcctaaccctaatcaaccgtcatccacctctcctctccaccgctctctccgccgttgaatccgtcgtcgattacatgaccactccaccaataaacttcactttagaagactttcgccgcctcgtctcaatgtgtccagagcttctcacttcacctttaacctcacacacaatcccagtcatcactttcctcctccgtgaagtcggcgttgactctatctttgacctccgtcaagctttacgacgtcgtcctcgtcttctcgcttgtagcgtcgatcaccagcttagaccaacgctttactttctccagagaatcggaatcttagatccgcataaacatacgtatcttctctcttgtagcgttgacaataaactcgtaccacggattgattacttcgagaagttaggattctcgcggcggagcgccaccgcgatgtttaagagattcccgcagctgtttaattacagtattgctgagaattatgagccgaagttgaagtatttgatggtggagatggggagagatgttagagaggttcttgagtttcctcagtatttctcgtttagtttggagaatcggattaaaccgagacatgaagcttgtgctgcgaaaggtgtgaggtttccattgccggtgatgttgaagactaatgaagctggttttagagatacattggaggtacatttttgtaatgaatgatgatgaagaactcaatgaatgaagaaaccagcctctgcctacattttgagacacacacagggatggtgagttaaatcttgataagagaaagaatgttcatttacaattcacgattccgatgtatttcggtctagttattgttagtgaacgagaaatcaagtgtatgtaagtccagaaaccgtgtagagttgcgatttgcagagaattgtgattctacaattggaggcaagatgatgaatgtgtgaactgattagcgtaacggtttagttattggtcttaagtcttaacagggagaattggttctagagcttttagtccctttgatggttcgtgaaatgccattggtctatgatcggattctctg

SEQ ID NO: 41767 - protein, 320 aa, Arabidopsis thaliana
  peptide (1)..(320): Ceres Seq. ID no. 12394424
  misc_feature (40)..(311): Pfam Name: mTERF Pfam Description: mTERF
  misc_feature (81)..(309): Homolog of NCBI NO: 30699372 NR Description: expressed protein [Arabidopsis thaliana]
  misc_feature (81)..(309): Homolog of NCBI NO: 33589698 NR Description: At1g78930 [Arabidopsis thaliana]
  misc_feature (56)..(309): Homolog of NCBI NO: 15230219 NR Description: hypothetical protein; protein id: At3g18870.1
  misc_feature (85)..(313): Homolog of NCBI NO: 28392870 NR Description: unknown protein [Arabidopsis thaliana]
  misc_feature (69)..(313): Homolog of NCBI NO: 28204784 NR Description: hypothetical protein [Arabidopsis thaliana]
  misc_feature (69)..(313): Homolog of NCBI NO: 15227524 NR Description: predicted by genefinder and genscan; protein id:
  misc_feature (37)..(313): Homolog of NCBI NO: 15226787 NR Description: hypothetical protein; protein id: At2g34620.1
  misc_feature (1)..(315): Homolog of NCBI NO: 30686631 NR Description: expressed protein [Arabidopsis thaliana]
  misc_feature (1)..(320): Homolog of NCBI NO: 30686636 NR Description: expressed protein [Arabidopsis thaliana]
  misc_feature (1)..(320): Homolog of NCBI NO: 21537209 NR Description: unknown [Arabidopsis thaliana]
MQQEALSFLSSSLPSLHHNFPSLSRLRFNNFPALSFKPNTSSSSSSFFKSPDIPSLSSTTTTTTTTTTETLESSIHEKLIYLDSLGIDFLTLINRHPPLLSTALSAVESVVDYMTTPPINFTLEDFRRLVSMCPELLTSPLTSHTIPVITFLLREVGVDSIFDLRQALRRRPRLLACSVDHQLRPTLYFLQRIGILDPHKHTYLLSCSVDNKLVPRIDYFEKLGFSRRSATAMFKRFPQLFNYSIAENYEPKLKYLMVEMGRDVREVLEFPQYFSFSLENRIKPRHEACAAKGVRFPLPVMLKTNEAGFRDTLEVHFCNE

SEQ ID NO: 41768 - protein, 207 aa, Arabidopsis thaliana
  peptide (1)..(207): Ceres Seq. ID no. 12394425
  misc_feature (1)..(198): Pfam Name: mTERF Pfam Description: mTERF
  misc_feature (1)..(196): Homolog of NCBI NO: 30699372 NR Description: expressed protein [Arabidopsis thaliana]
  misc_feature (1)..(196): Homolog of NCBI NO: 33589698 NR Description: At1g78930 [Arabidopsis thaliana]
  misc_feature (1)..(196): Homolog of NCBI NO: 15230219 NR Description: hypothetical protein; protein id: At3g18870.1
  misc_feature (1)..(200): Homolog of NCBI NO: 28392870 NR Description: unknown protein [Arabidopsis thaliana]
  misc_feature (1)..(200): Homolog of NCBI NO: 28204784 NR Description: hypothetical protein [Arabidopsis thaliana]
  misc_feature (1)..(200): Homolog of NCBI NO: 15227524 NR Description: predicted by genefinder and genscan; protein id:
  misc_feature (1)..(200): Homolog of NCBI NO: 15226787 NR Description: hypothetical protein; protein id: At2g34620.1
  misc_feature (1)..(202): Homolog of NCBI NO: 30686631 NR Description: expressed protein [Arabidopsis thaliana]
  misc_feature (1)..(207): Homolog of NCBI NO: 30686636 NR Description: expressed protein [Arabidopsis thaliana]
  misc_feature (1)..(207): Homolog of NCBI NO: 21537209 NR Description: unknown [Arabidopsis thaliana]
MTTPPINFTLEDFRRLVSMCPELLTSPLTSHTIPVITFLLREVGVDSIFDLRQALRRRPRLLACSVDHQLRPTLYFLQRIGILDPHKHTYLLSCSVDNKLVPRIDYFEKLGFSRRSATAMFKRFPQLFNYSIAENYEPKLKYLMVEMGRDVREVLEFPQYFSFSLENRIKPRHEACAAKGVRFPLPVMLKTNEAGFRDTLEVHFCNE

SEQ ID NO: 41769 - protein, 189 aa, Arabidopsis thaliana
  peptide (1)..(189): Ceres Seq. ID no. 12394426
  misc_feature (1)..(180): Pfam Name: mTERF Pfam Description: mTERF
  misc_feature (1)..(178): Homolog of NCBI NO: 30699372 NR Description: expressed protein [Arabidopsis thaliana]
  misc_feature (1)..(178): Homolog of NCBI NO: 33589698 NR Description: At1g78930 [Arabidopsis thaliana]
  misc_feature (1)..(178): Homolog of NCBI NO: 15230219 NR Description: hypothetical protein; protein id: At3g18870.1
  misc_feature (1)..(182): Homolog of NCBI NO: 28392870 NR Description: unknown protein [Arabidopsis thaliana]
  misc_feature (1)..(182): Homolog of NCBI NO: 28204784 NR Description: hypothetical protein [Arabidopsis thaliana]
  misc_feature (1)..(182): Homolog of NCBI NO: 15227524 NR Description: predicted by genefinder and genscan; protein id:
  misc_feature (1)..(182): Homolog of NCBI NO: 15226787 NR Description: hypothetical protein; protein id: At2g34620.1
  misc_feature (1)..(184): Homolog of NCBI NO: 30686631 NR Description: expressed protein [Arabidopsis thaliana]
  misc_feature (1)..(189): Homolog of NCBI NO: 30686636 NR Description: expressed protein [Arabidopsis thaliana]
  misc_feature (1)..(189): Homolog of NCBI NO: 21537209 NR Description: unknown [Arabidopsis thaliana]
MCPELLTSPLTSHTIPVITFLLREVGVDSIFDLRQALRRRPRLLACSVDHQLRPTLYFLQRIGILDPHKHTYLLSCSVDNKLVPRIDYFEKLGFSRRSATAMFKRFPQLFNYSIAENYEPKLKYLMVEMGRDVREVLEFPQYFSFSLENRIKPRHEACAAKGVRFPLPVMLKTNEAGFRDTLEVHFCNE

SEQ ID NO: 41770 - DNA, 1109 bp, Arabidopsis thaliana; identical to SEQ ID NO: 39262
  misc_feature (1)..(1109): Ceres Seq. ID no. 13600811
  misc_feature: MA Experiment ID: 20000111 Result: Down-regulated in Transcription
  misc_feature: MA Experiment 20000111 PARAMETER Experiment Name: At_42deg_Heat_cDNA_P Parameter: Temperature (deg C) Value: 42 vs. 22
  misc_feature: MA Experiment 20000111 PARAMETER Experiment Name: At_42deg_Heat_cDNA_P Parameter: Timepoint (hr) Value: 6
  misc_feature: MA Experiment 20000111 PARAMETER Experiment Name: At_42deg_Heat_cDNA_P Parameter: Tissue Value: Aerial
  misc_feature: MA Experiment ID: 20000173 Result: Down-regulated in Transcription
  misc_feature: MA Experiment 20000173 PARAMETER Experiment Name: At_42deg_Heat_P Parameter: Age (day) Value: 14
  misc_feature: MA Experiment 20000173 PARAMETER Experiment Name: At_42deg_Heat_P Parameter: Organism Value: A. thaliana
  misc_feature: MA Experiment 20000173 PARAMETER Experiment Name: At_42deg_Heat_P Parameter: Plant Line Value: WS
  misc_feature: MA Experiment 20000173 PARAMETER Experiment Name: At_42deg_Heat_P Parameter: Temperature (deg C) Value: 42 vs. 22
  misc_feature: MA Experiment 20000173 PARAMETER Experiment Name: At_42deg_Heat_P Parameter: Timepoint (hr) Value: 6
  misc_feature: MA Experiment 20000173 PARAMETER Experiment Name: At_42deg_Heat_P Parameter: Tissue Value: Aerial
  misc_feature: MA Experiment ID: 20000179 Result: Up-regulated in Transcription
  misc_feature: MA Experiment 20000179 PARAMETER Experiment Name: At_Germinating_Seeds_P Parameter: Age (hr) Value: 6 vs. 0
  misc_feature: MA Experiment 20000179 PARAMETER Experiment Name: At_Germinating_Seeds_P Parameter: Tissue Value: Germinating Seeds
  misc_feature: MA Experiment ID: 20000184 Result: Down-regulated in Transcription
  misc_feature: MA Experiment 20000184 PARAMETER Experiment Name: At_Shoots__P Parameter: Age (day) Value: 7
  misc_feature: MA Experiment 20000184 PARAMETER Experiment Name: At_Shoots__P Parameter: Tissue Value: Shoots vs. Whole Plant
  misc_feature: MA Experiment ID: 20000185 Result: Up-regulated in Transcription
  misc_feature: MA Experiment 20000185 PARAMETER Experiment Name: At_Roots__P Parameter: Age (day) Value: 7 vs. 21
  misc_feature: MA Experiment 20000185 PARAMETER Experiment Name: At_Roots__P Parameter: Organism Value: A. thaliana
  misc_feature: MA Experiment 20000185 PARAMETER Experiment Name: At_Roots__P Parameter: Tissue Value: Roots vs. Whole Plant
  misc_feature: MA Experiment ID: 20000794 Result: Up-regulated in Transcription
  misc_feature: MA Experiment 20000794 PARAMETER Experiment Name: At_Petals_P Parameter: Age (day) Value: 23-25 days
  misc_feature: MA Experiment 20000794 PARAMETER Experiment Name: At_Petals_P Parameter: Plant Line Value: WS
  misc_feature: MA Experiment 20000794 PARAMETER Experiment Name: At_Petals_P Parameter: Tissue Value: Petals vs. Whole plant

SEQ ID NO: 41771 - protein, 326 aa, Arabidopsis thaliana; identical to SEQ ID NO: 39263
  peptide (1)..(326): Ceres Seq. ID no. 13600812
  misc_feature (247)..(326): Pfam Name: UBX domain Pfam Description: UBX domain
  misc_feature (247)..(326): Pfam Name: UBX domain Pfam Description: UBX domain
  misc_feature (100)..(325): Homolog of NCBI NO: 32492162 NR Description: OSJNBb0048E02.1 [Oryza sativa (japonica
  misc_feature (34)..(325): Homolog of NCBI NO: 32489879 NR Description: OSJNBa0060P14.10 [Oryza sativa (japonica
  misc_feature (41)..(322): Homolog of NCBI NO: 7485149 NR Description: hypothetical protein - Arabidopsis thaliana
  misc_feature (41)..(326): Homolog of NCBI NO: 15292665 NR Description: putative phosphatase [Arabidopsis thaliana]
  misc_feature (41)..(326): Homolog of NCBI NO: 18414442 NR Description: phosphatase like protein [Arabidopsis thaliana]
  misc_feature (100)..(325): Homolog of NCBI NO: 32492162 NR Description: OSJNBb0048E02.1 [Oryza sativa (japonica
  misc_feature (41)..(322): Homolog of NCBI NO: 7485149 NR Description: hypothetical protein - Arabidopsis thaliana
  misc_feature (41)..(326): Homolog of NCBI NO: 18414442 NR Description: phosphatase like protein [Arabidopsis thaliana]
  misc_feature (25)..(326): Homolog of NCBI NO: 15234731 NR Description: expressed protein [Arabidopsis thaliana]
  misc_feature (25)..(326): Homolog of NCBI NO: 18412499 NR Description: membrane trafficking factor -related [Arabidopsis
  misc_feature (25)..(326): Homolog of NCBI NO: 7487458 NR Description: hypothetical protein T27D20.10 - Arabidopsis
  misc_feature (16)..(325): Homolog of NCBI NO: 13123657 NR Description: phosphatase-like protein Mtc923 [Medicago
  misc_feature (3)..(325): Homolog of NCBI NO: 13123659 NR Description: phosphatase-like protein Psc923 [Pisum sativum]
  misc_feature (41)..(326): Homolog of NCBI NO: 15292665 NR Description: putative phosphatase [Arabidopsis thaliana]
  misc_feature (34)..(325): Homolog of NCBI NO: 32489879 NR Description: OSJNBa0060P14.10 [Oryza sativa (japonica
  misc_feature (3)..(325): Homolog of NCBI NO: 13123659 NR Description: phosphatase-like protein Psc923 [Pisum sativum]
  misc_feature (16)..(325): Homolog of NCBI NO: 13123657 NR Description: phosphatase-like protein Mtc923 [Medicago
  misc_feature (25)..(326): Homolog of NCBI NO: 7487458 NR Description: hypothetical protein T27D20.10 - Arabidopsis
  misc_feature (25)..(326): Homolog of NCBI NO: 18412499 NR Description: membrane trafficking factor -related [Arabidopsis
  misc_feature (25)..(326): Homolog of NCBI NO: 15234731 NR Description: expressed protein [Arabidopsis thaliana]

SEQ ID NO: 41772 - protein, 302 aa, Arabidopsis thaliana; identical to SEQ ID NO: 39264
  peptide (1)..(302): Ceres Seq. ID no. 13600813
  misc_feature (223)..(302): Pfam Name: UBX domain Pfam Description: UBX domain
  misc_feature (223)..(302): Pfam Name: UBX domain Pfam Description: UBX domain
  misc_feature (76)..(301): Homolog of NCBI NO: 32492162 NR Description: OSJNBb0048E02.1 [Oryza sativa (japonica
  misc_feature (10)..(301): Homolog of NCBI NO: 32489879 NR Description: OSJNBa0060P14.10 [Oryza sativa (japonica
  misc_feature (17)..(298): Homolog of NCBI NO: 7485149 NR Description: hypothetical protein - Arabidopsis thaliana
  misc_feature (17)..(302): Homolog of NCBI NO: 15292665 NR Description: putative phosphatase [Arabidopsis thaliana]
  misc_feature (17)..(302): Homolog of NCBI NO: 18414442 NR Description: phosphatase like protein [Arabidopsis thaliana]
  misc_feature (76)..(301): Homolog of NCBI NO: 32492162 NR Description: OSJNBb0048E02.1 [Oryza sativa (japonica
  misc_feature (17)..(298): Homolog of NCBI NO: 7485149 NR Description: hypothetical protein - Arabidopsis thaliana
  misc_feature (17)..(302): Homolog of NCBI NO: 18414442 NR Description: phosphatase like protein [Arabidopsis thaliana]
  misc_feature (1)..(302): Homolog of NCBI NO: 15234731 NR Description: expressed protein [Arabidopsis thaliana]
  misc_feature (1)..(302): Homolog of NCBI NO: 18412499 NR Description: membrane trafficking factor -related [Arabidopsis
  misc_feature (1)..(302): Homolog of NCBI NO: 7487458 NR Description: hypothetical protein T27D20.10 - Arabidopsis
  misc_feature (1)..(301): Homolog of NCBI NO: 13123657 NR Description: phosphatase-like protein Mtc923 [Medicago
  misc_feature (1)..(301): Homolog of NCBI NO: 13123659 NR Description: phosphatase-like protein Psc923 [Pisum sativum]
  misc_feature (17)..(302): Homolog of NCBI NO: 15292665 NR Description: putative phosphatase [Arabidopsis thaliana]
  misc_feature (10)..(301): Homolog of NCBI NO: 32489879 NR Description: OSJNBa0060P14.10 [Oryza sativa (japonica
  misc_feature (1)..(301): Homolog of NCBI NO: 13123659 NR Description: phosphatase-like protein Psc923 [Pisum sativum]
  misc_feature (1)..(301): Homolog of NCBI NO: 13123657 NR Description: phosphatase-like protein Mtc923 [Medicago
  misc_feature (1)..(302): Homolog of NCBI NO: 7487458 NR Description: hypothetical protein T27D20.10 - Arabidopsis
  misc_feature (1)..(302): Homolog of NCBI NO: 18412499 NR Description: membrane trafficking factor -related [Arabidopsis
  misc_feature (1)..(302): Homolog of NCBI NO: 15234731 NR Description: expressed protein [Arabidopsis thaliana]

SEQ ID NO: 41773 - protein, 251 aa, Arabidopsis thaliana; identical to SEQ ID NO: 39265
  peptide (1)..(251): Ceres Seq. ID no. 13600814
  misc_feature (172)..(251): Pfam Name: UBX domain Pfam Description: UBX domain
  misc_feature (172)..(251): Pfam Name: UBX domain Pfam Description: UBX domain
  misc_feature (25)..(250): Homolog of NCBI NO: 32492162 NR Description: OSJNBb0048E02.1 [Oryza sativa (japonica
  misc_feature (1)..(250): Homolog of NCBI NO: 32489879 NR Description: OSJNBa0060P14.10 [Oryza sativa (japonica
  misc_feature (1)..(247): Homolog of NCBI NO: 7485149 NR Description: hypothetical protein - Arabidopsis thaliana
  misc_feature (1)..(251): Homolog of NCBI NO: 15292665 NR Description: putative phosphatase [Arabidopsis thaliana]
  misc_feature (1)..(251): Homolog of NCBI NO: 18414442 NR Description: phosphatase like protein [Arabidopsis thaliana]
  misc_feature (25)..(250): Homolog of NCBI NO: 32492162 NR Description: OSJNBb0048E02.1 [Oryza sativa (japonica
  misc_feature (1)..(247): Homolog of NCBI NO: 7485149 NR Description: hypothetical protein - Arabidopsis thaliana
  misc_feature (1)..(251): Homolog of NCBI NO: 18414442 NR Description: phosphatase like protein [Arabidopsis thaliana]
  misc_feature (1)..(251): Homolog of NCBI NO: 15234731 NR Description: expressed protein [Arabidopsis thaliana]
  misc_feature (1)..(251): Homolog of NCBI NO: 18412499 NR Description: membrane trafficking factor -related [Arabidopsis
  misc_feature (1)..(251): Homolog of NCBI NO: 7487458 NR Description: hypothetical protein T27D20.10 - Arabidopsis
  misc_feature (1)..(250): Homolog of NCBI NO: 13123657 NR Description: phosphatase-like protein Mtc923 [Medicago
  misc_feature (1)..(250): Homolog of NCBI NO: 13123659 NR Description: phosphatase-like protein Psc923 [Pisum sativum]
  misc_feature (1)..(251): Homolog of NCBI NO: 15292665 NR Description: putative phosphatase [Arabidopsis thaliana]
  misc_feature (1)..(250): Homolog of NCBI NO: 32489879 NR Description: OSJNBa0060P14.10 [Oryza sativa (japonica
  misc_feature (1)..(250): Homolog of NCBI NO: 13123659 NR Description: phosphatase-like protein Psc923 [Pisum sativum]
  misc_feature (1)..(250): Homolog of NCBI NO: 13123657 NR Description: phosphatase-like protein Mtc923 [Medicago
  misc_feature (1)..(251): Homolog of NCBI NO: 7487458 NR Description: hypothetical protein T27D20.10 - Arabidopsis
  misc_feature (1)..(251): Homolog of NCBI NO: 18412499 NR Description: membrane trafficking factor -related [Arabidopsis
  misc_feature (1)..(251): Homolog of NCBI NO: 15234731 NR Description: expressed protein [Arabidopsis thaliana]

SEQ ID NO: 41774 - DNA, 866 bp, Arabidopsis thaliana
  misc_feature (1)..(866): Ceres Seq. ID no. 12325818
  misc_feature: MA Experiment ID: 108434 Result: Down-regulated in Transcription
  misc_feature: MA Experiment 108434 PARAMETER Experiment Name: At_Root_Tips_cDNA_P Parameter: Tissue Value: Root Tips
  misc_feature: MA Experiment ID: 108463 Result: Up-regulated in Transcription
  misc_feature: MA Experiment 108463 PARAMETER Experiment Name: At_Germinating_Seeds_cDNA_P Parameter: Age (day) Value: 3 vs. 0
  misc_feature: MA Experiment 108463 PARAMETER Experiment Name: At_Germinating_Seeds_cDNA_P Parameter: Tissue Value: Germinating Seeds
  misc_feature: MA Experiment ID: 108488 Result: Down-regulated in Transcription
  misc_feature: MA Experiment ID: 108572 Result: Up-regulated in Transcription
  misc_feature: MA Experiment 108572 PARAMETER Experiment Name: At_Drought_cDNA_P Parameter: Timepoint (hr) Value: 1
  misc_feature: MA Experiment 108572 PARAMETER Experiment Name: At_Drought_cDNA_P Parameter: Tissue Value: Aerial
  misc_feature: MA Experiment 108572 PARAMETER Experiment Name: At_Drought_cDNA_P Parameter: Treatment Value: Drought vs. No Drought
  misc_feature: MA Experiment ID: 108585 Result: Up-regulated in Transcription
  misc_feature: MA Experiment 108585 PARAMETER Experiment Name: At_5mM_NaNP_cDNA_P Parameter: Timepoint (hr) Value: 6
  misc_feature: MA Experiment 108585 PARAMETER Experiment Name: At_5mM_NaNP_cDNA_P Parameter: Tissue Value: Aerial
  misc_feature: MA Experiment 108585 PARAMETER Experiment Name: At_5mM_NaNP_cDNA_P Parameter: Treatment Value: null
  misc_feature: MA Experiment ID: 108607 Result: Up-regulated in Transcription
  misc_feature: MA Experiment 108607 PARAMETER Experiment Name: At_100uM_ABA_cDNA_P Parameter: Timepoint (hr) Value: 4
  misc_feature: MA Experiment 108607 PARAMETER Experiment Name: At_100uM_ABA_cDNA_P Parameter: Tissue Value: Aerial
  misc_feature: MA Experiment 108607 PARAMETER Experiment Name: At_100uM_ABA_cDNA_P Parameter: Treatment Value: 100uM ABA vs. No Treatment
  misc_feature: MA Experiment ID: 108668 Result: Up-regulated in Transcription
  misc_feature: MA Experiment 108668 PARAMETER Experiment Name: At_2mM_SA_cDNA_P Parameter: Plant Line Value: WS
  misc_feature: MA Experiment 108668 PARAMETER Experiment Name: At_2mM_SA_cDNA_P Parameter: Timepoint (hr) Value: 6
  misc_feature: MA Experiment 108668 PARAMETER Experiment Name: At_2mM_SA_cDNA_P Parameter: Treatment Value: 2mM SA vs. No Treatment
  misc_feature: MA Experiment ID: 20000069 Result: Up-regulated in Transcription
  misc_feature: MA Experiment 20000069 PARAMETER Experiment Name: At_100uM_ABA_Mutants_cDNA_P Parameter: Plant Line Value: CS23
  misc_feature: MA Experiment 20000069 PARAMETER Experiment Name: At_100uM_ABA_Mutants_cDNA_P Parameter: Timepoint (hr) Value: 6
  misc_feature: MA Experiment 20000069 PARAMETER Experiment Name: At_100uM_ABA_Mutants_cDNA_P Parameter: Tissue Value: Aerial
  misc_feature: MA Experiment 20000069 PARAMETER Experiment Name: At_100uM_ABA_Mutants_cDNA_P Parameter: Treatment Value: 100uM ABA vs. No Treatment
  misc_feature: MA Experiment ID: 20000171 Result: Up-regulated in Transcription
  misc_feature: MA Experiment 20000171 PARAMETER Experiment Name: At_42deg_Heat_P Parameter: Age (day) Value: 14
  misc_feature: MA Experiment 20000171 PARAMETER Experiment Name: At_42deg_Heat_P Parameter: Organism Value: A. thaliana
  misc_feature: MA Experiment 20000171 PARAMETER Experiment Name: At_42deg_Heat_P Parameter: Plant Line Value: WS
  misc_feature: MA Experiment 20000171 PARAMETER Experiment Name: At_42deg_Heat_P Parameter: Temperature (deg C) Value: 42 vs. 22
  misc_feature: MA Experiment 20000171 PARAMETER Experiment Name: At_42deg_Heat_P Parameter: Timepoint (hr) Value: 1
  misc_feature: MA Experiment 20000171 PARAMETER Experiment Name: At_42deg_Heat_P Parameter: Tissue Value: Aerial
  misc_feature: MA Experiment ID: 20000173 Result: Up-regulated in Transcription
  misc_feature: MA Experiment 20000173 PARAMETER Experiment Name: At_42deg_Heat_P Parameter: Age (day) Value: 14
  misc_feature: MA Experiment 20000173 PARAMETER Experiment Name: At_42deg_Heat_P Parameter: Organism Value: A. thaliana
  misc_feature: MA Experiment 20000173 PARAMETER Experiment Name: At_42deg_Heat_P Parameter: Plant Line Value: WS
  misc_feature: MA Experiment 20000173 PARAMETER Experiment Name: At_42deg_Heat_P Parameter: Temperature (deg C) Value: 42 vs. 22
  misc_feature: MA Experiment 20000173 PARAMETER Experiment Name: At_42deg_Heat_P Parameter: Timepoint (hr) Value: 6
  misc_feature: MA Experiment 20000173 PARAMETER Experiment Name: At_42deg_Heat_P Parameter: Tissue Value: Aerial
  misc_feature: MA Experiment ID: 20000451 Result: Down-regulated in Transcription
  misc_feature: MA Experiment 20000451 PARAMETER Experiment Name: At_CS6879_Shoots-Roots_P Parameter: Age (day) Value: 14
  misc_feature: MA Experiment 20000451 PARAMETER Experiment Name: At_CS6879_Shoots-Roots_P Parameter: Organism Value: A. thaliana
  misc_feature: MA Experiment 20000451 PARAMETER Experiment Name: At_CS6879_Shoots-Roots_P Parameter: Plant Line Value: CS6879 vs. WS
  misc_feature: MA Experiment 20000451 PARAMETER Experiment Name: At_CS6879_Shoots-Roots_P Parameter: Tissue Value: Roots
taaaaataatttagacaaaacaaagatgggagagagagagcaagtgaaactgttgggaacatggtacagtccggtcgtgataagagcaaagatcgatcttcgtctcaaatcggttgattatgattacgttgaagagaacttgttcggatctaagagtgagcttcttctcaaatcgaacccggtttacaagaaagtcccggttctcatccacaacactaaaccggtttgtgtgtctcttaacatcgttgaatacatcgacgagacgtggaactcatctggatcgtccattcttccttctcatccttatgatcgtgcccttgctcgcttctggtctgtctttgttgatgacaagtggttaccgactttgatggcagctgtggtcgctaaatcggaagaagcaaaagcaaaaggcatggaagaagtggaagaagggttgttgcaactagatgctgcgtttattgctctaagcaaagggaaatctttttttggcggtgaaacaatcgggttcatagacatttgccttggaagctttttagttctcttaaaagctagagagaagcttaaaaacgaaaagattttagacgaattaaaaactccttctctttatagatgggccaaccagtttttgtcaaatgaaatggtgaagaatgtggtgccggatattgataaagtcgccaagtttatagaagagtttgaggatagagctcaatatatccggtgcttctagatcttgagatcatcacagaaatagttagaaaagagtggaggtttagtcttggcttcaaagtcaaacttgttatctccaaaaacagagtttcatatggtttattcatatgttagttaatctaaaagaagaacatggttcc

SEQ ID NO: 41775 - protein, 241 aa, Arabidopsis thaliana
  peptide (1)..(241): Ceres Seq. ID no. 12325819
  misc_feature (15)..(87): Pfam Name: Glutathione S-transferase, N-terminal domain Pfam Description: Glutathione S-transferase, N-terminal domain
  misc_feature (13)..(230): Homolog of NCBI NO: 6652874 NR Description: glutathione S-transferase 3 [Papaver somniferum]
  misc_feature (13)..(230): Homolog of NCBI NO: 6652870 NR Description: glutathione S-transferase 1 [Papaver somniferum]
  misc_feature (1)..(236): Homolog of NCBI NO: 6856103 NR Description: glutathione S-transferase [Gossypium hirsutum]
  misc_feature (15)..(236): Homolog of NCBI NO: 15375408 NR Description: glutathione S-transferase [Arabidopsis thaliana]
  misc_feature (15)..(236): Homolog of NCBI NO: 11096016 NR Description: glutathione S-transferase [Arabidopsis thaliana]
  misc_feature (13)..(236): Homolog of NCBI NO: 15218517 NR Description: glutathione transferase, putative
  misc_feature (9)..(236): Homolog of NCBI NO: 13877559 NR Description: similar to glutathione S-transferase [Arabidopsis
  misc_feature (9)..(236): Homolog of NCBI NO: 15218872 NR Description: glutathione transferase, putative
  misc_feature (9)..(241): Homolog of NCBI NO: 15218868 NR Description: glutathione transferase, putative
  misc_feature (9)..(241): Homolog of NCBI NO: 21537210 NR Description: glutathione S-transferase, putative [Arabidopsis
KNNLDKTKMGEREQVKLLGTWYSPVVIRAKIDLRLKSVDYDYVEENLFGSKSELLLKSNPVYKKVPVLIHNTKPVCVSLNIVEYIDETWNSSGSSILPSHPYDRALARFWSVFVDDKWLPTLMAAVVAKSEEAKAKGMEEVEEGLLQLDAAFIALSKGKSFFGGETIGFIDICLGSFLVLLKAREKLKNEKILDELKTPSLYRWANQFLSNEMVKNVVPDIDKVAKFIEEFEDRAQYIRCF

SEQ ID NO: 41776 - protein, 233 aa, Arabidopsis thaliana
  peptide (1)..(233): Ceres Seq. ID no. 12325820
  misc_feature (7)..(79): Pfam Name: Glutathione S-transferase, N-terminal domain Pfam Description: Glutathione S-transferase, N-terminal domain
  misc_feature (5)..(222): Homolog of NCBI NO: 6652874 NR Description: glutathione S-transferase 3 [Papaver somniferum]
  misc_feature (5)..(222): Homolog of NCBI NO: 6652870 NR Description: glutathione S-transferase 1 [Papaver somniferum]
  misc_feature (1)..(228): Homolog of NCBI NO: 6856103 NR Description: glutathione S-transferase [Gossypium hirsutum]
  misc_feature (7)..(228): Homolog of NCBI NO: 15375408 NR Description: glutathione S-transferase [Arabidopsis thaliana]
  misc_feature (7)..(228): Homolog of NCBI NO: 11096016 NR Description: glutathione S-transferase [Arabidopsis thaliana]
  misc_feature (5)..(228): Homolog of NCBI NO: 15218517 NR Description: glutathione transferase, putative
  misc_feature (1)..(228): Homolog of NCBI NO: 13877559 NR Description: similar to glutathione S-transferase [Arabidopsis
  misc_feature (1)..(228): Homolog of NCBI NO: 15218872 NR Description: glutathione transferase, putative
  misc_feature (1)..(233): Homolog of NCBI NO: 15218868 NR Description: glutathione transferase, putative
  misc_feature (1)..(233): Homolog of NCBI NO: 21537210 NR Description: glutathione S-transferase, putative [Arabidopsis
MGEREQVKLLGTWYSPVVIRAKIDLRLKSVDYDYVEENLFGSKSELLLKSNPVYKKVPVLIHNTKPVCVSLNIVEYIDETWNSSGSSILPSHPYDRALARFWSVFVDDKWLPTLMAAVVAKSEEAKAKGMEEVEEGLLQLDAAFIALSKGKSFFGGETIGFIDICLGSFLVLLKAREKLKNEKILDELKTPSLYRWANQFLSNEMVKNVVPDIDKVAKFIEEFEDRAQYIRCF

SEQ ID NO: 41777 - DNA, 1747 bp, Arabidopsis thaliana
  misc_feature (1)..(1747): Ceres Seq. ID no. 13489173
  misc_feature: MA Experiment ID: 20000113 Result: Down-regulated in Transcription
  misc_feature: MA Experiment 20000113 PARAMETER Experiment Name: At_42deg_Heat_cDNA_P Parameter: Temperature (deg C) Value: 42 vs. 22
  misc_feature: MA Experiment 20000113 PARAMETER Experiment Name: At_42deg_Heat_cDNA_P Parameter: Timepoint (hr) Value: 8
  misc_feature: MA Experiment 20000113 PARAMETER Experiment Name: At_42deg_Heat_cDNA_P Parameter: Tissue Value: Aerial
  misc_feature: MA Experiment ID: 20000171 Result: Down-regulated in Transcription
  misc_feature: MA Experiment 20000171 PARAMETER Experiment Name: At_42deg_Heat_P Parameter: Age (day) Value: 14
  misc_feature: MA Experiment 20000171 PARAMETER Experiment Name: At_42deg_Heat_P Parameter: Organism Value: A. thaliana
  misc_feature: MA Experiment 20000171 PARAMETER Experiment Name: At_42deg_Heat_P Parameter: Plant Line Value: WS
  misc_feature: MA Experiment 20000171 PARAMETER Experiment Name: At_42deg_Heat_P Parameter: Temperature (deg C) Value: 42 vs. 22
  misc_feature: MA Experiment 20000171 PARAMETER Experiment Name: At_42deg_Heat_P Parameter: Timepoint (hr) Value: 1
  misc_feature: MA Experiment 20000171 PARAMETER Experiment Name: At_42deg_Heat_P Parameter: Tissue Value: Aerial
tgaatcgaactcagatttcgaagaagcagatctcacaatgtctggaaaacagcaaaatcatcgttctacttcctccagacccagatccaaaaccctaatcctcatcggctctctcttcaccgtctctctactcgtcatcctctacacctcttcttcctcctcccgagcctccatctccaatcccaacccgtcggaccgaccagagacgtccttcgttacctcgcttgagcatttcttaatatataaagctccgaagctctcgttaccggttagagacgacacggtgcgtggcgagagtgatgatgatgtgaggaagctcgatgagatggtgttcgagagagagaatcgttggttgaacgaagatccgggatatcctgttgaatttccgattaaggtttacgtgtatgagatgccgaagaagtttactttcgatcttctctggttatttcacaatacttacaaagagacttcgaatgctacctctaatggtagccctgtgcatcgtctaatcgaacagcattctattgactattggctttgggctgatctgatatctcctgaatctgaaaggcgtttgaaaagtgtcgtgagagttcagaagcagcaggacgccgactttttctatgttccgtttttcactacaatcagctttttcttgttggagaagcagcaatgcaaagcactctatagggaagctttgaagtgggtcactgatcagcctgcttggaagaggtccgagggaagggatcacatatttcctattcatcatccttggtccttcaagtctgtccgcaaatttgtgaaaaacgcaatctggcttttaccagatatggactccactggcaattggtataagcctgggcaagtttcattggagaaagacctaattcttccttatgttcccaatgttgatatctgtgataccaaatgcttgtcagaaagtgcaccaatgagaaccacattactttttttccgagggcggcttaagcgaaatgcagggggtaaaatacgtgccaaacttggtgcagaattaagtggtatcaaggatataataatttctgaggggactgccggagagggaggaaaattggcagcgcaacgtggcatgcgtagatctttattctgtttgtgtcctgctggtgacacaccatcttcagcgaggttgtttgatgccattgtcagtggctgtatacctgttatagtcagtgacgagttggaatttccttttgaaggaatacttgattacaagaaggttgctgtgcttgtttcttccagtgatgcaatacagccagggtggcttgtaaaccatctgagaagtcttacgcccttccaagtcaaggggttgcagaataatcttgctcaatactctcgccatttcctatattcgagccctgctcagccattaggtccagaggacttgacatggagaatgatagccggaaagctggtgaatatcaagcttcacacgaggaggtcacagcgggtcgtgaaaggatctaggagtatttgcagatgcgattgctggagatccaactctacagcctccaattctttgagttctctcttgtcttaagaccgatcactctgacttcacattccagtcttgaataccctagatatatactgtggaatgtgtatcctattcaattttaacattgtttgctattttatataatgtaattcctgttcatcttcgcaacttggctacttttagctacgtggaaatattatgaaactaacattttat

SEQ ID NO: 41778 - protein, 523 aa, Arabidopsis thaliana
  peptide (1)..(523): Ceres Seq. ID no. 13489174
  misc_feature (132)..(452): Pfam Name: Exostosin family Pfam Description: Exostosin family
  misc_feature (125)..(497): Homolog of NCBI NO: 15228598 NR Description: Exostosin family [Arabidopsis thaliana]
  misc_feature (130)..(494): Homolog of NCBI NO: 25406363 NR Description: F25A4.34 [imported] - Arabidopsis thaliana
  misc_feature (130)..(494): Homolog of NCBI NO: 18410670 NR Description: Exostosin family [Arabidopsis thaliana]
  misc_feature (129)..(495): Homolog of NCBI NO: 22330483 NR Description: Exostosin family [Arabidopsis thaliana]
  misc_feature (112)..(501): Homolog of NCBI NO: 15230692 NR Description: Exostosin family [Arabidopsis thaliana]
  misc_feature (124)..(513): Homolog of NCBI NO: 15241619 NR Description: Exostosin family [Arabidopsis thaliana]
  misc_feature (129)..(507): Homolog of NCBI NO: 34899802 NR Description: OJ1092_A07.9 [Oryza sativa (japonica
  misc_feature (119)..(513): Homolog of NCBI NO: 30686300 NR Description: Exostosin family [Arabidopsis thaliana]
  misc_feature (13)..(477): Homolog of NCBI NO: 34909176 NR Description: P0468B07.31 [Oryza sativa (japonica
  misc_feature (13)..(523): Homolog of NCBI NO: 15237870 NR Description: Exostosin family [Arabidopsis thaliana]
ESNSDFEEADLTMSGKQQNHRSTSSRPRSKTLILIGSLFTVSLLVILYTSSSSSRASISNPNPSDRPETSFVTSLEHFLIYKAPKLSLPVRDDTVRGESDDDVRKLDEMVFERENRWLNEDPGYPVEFPIKVYVYEMPKKFTFDLLWLFHNTYKETSNATSNGSPVHRLIEQHSIDYWLWADLISPESERRLKSVVRVQKQQDADFFYVPFFTTISFFLLEKQQCKALYREALKWVTDQPAWKRSEGRDHIFPIHHPWSFKSVRKFVKNAIWLLPDMDSTGNWYKPGQVSLEKDLILPYVPNVDICDTKCLSESAPMRTTLLFFRGRLKRNAGGKIRAKLGAELSGIKDIIISEGTAGEGGKLAAQRGMRRSLFCLCPAGDTPSSARLFDAIVSGCIPVIVSDELEFPFEGILDYKKVAVLVSSSDAIQPGWLVNHLRSLTPFQVKGLQNNLAQYSRHFLYSSPAQPLGPEDLTWRMIAGKLVNIKLHTRRSQRVVKGSRSICRCDCWRSNSTASNSLSSLLS

SEQ ID NO: 41779 - protein, 511 aa, Arabidopsis thaliana
  peptide (1)..(511): Ceres Seq. ID no. 13489175
  misc_feature (120)..(440): Pfam Name: Exostosin family Pfam Description: Exostosin family
  misc_feature (113)..(485): Homolog of NCBI NO: 15228598 NR Description: Exostosin family [Arabidopsis thaliana]
  misc_feature (118)..(482): Homolog of NCBI NO: 25406363 NR Description: F25A4.34 [imported] - Arabidopsis thaliana
  misc_feature (118)..(482): Homolog of NCBI NO: 18410670 NR Description: Exostosin family [Arabidopsis thaliana]
  misc_feature (117)..(483): Homolog of NCBI NO: 22330483 NR Description: Exostosin family [Arabidopsis thaliana]
  misc_feature (100)..(489): Homolog of NCBI NO: 15230692 NR Description: Exostosin family [Arabidopsis thaliana]
  misc_feature (112)..(501): Homolog of NCBI NO: 15241619 NR Description: Exostosin family [Arabidopsis thaliana]
  misc_feature (117)..(495): Homolog of NCBI NO: 34899802 NR Description: OJ1092_A07.9 [Oryza sativa (japonica
  misc_feature (107)..(501): Homolog of NCBI NO: 30686300 NR Description: Exostosin family [Arabidopsis thaliana]
  misc_feature (1)..(465): Homolog of NCBI NO: 34909176 NR Description: P0468B07.31 [Oryza sativa (japonica
  misc_feature (1)..(511): Homolog of NCBI NO: 15237870 NR Description: Exostosin family [Arabidopsis thaliana]
MSGKQQNHRSTSSRPRSKTLILIGSLFTVSLLVILYTSSSSSRASISNPNPSDRPETSFVTSLEHFLIYKAPKLSLPVRDDTVRGESDDDVRKLDEMVFERENRWLNEDPGYPVEFPIKVYVYEMPKKFTFDLLWLFHNTYKETSNATSNGSPVHRLIEQHSIDYWLWADLISPESERRLKSVVRVQKQQDADFFYVPFFTTISFFLLEKQQCKALYREALKWVTDQPAWKRSEGRDHIFPIHHPWSFKSVRKFVKNAIWLLPDMDSTGNWYKPGQVSLEKDLILPYVPNVDICDTKCLSESAPMRTTLLFFRGRLKRNAGGKIRAKLGAELSGIKDIIISEGTAGEGGKLAAQRGMRRSLFCLCPAGDTPSSARLFDAIVSGCIPVIVSDELEFPFEGILDYKKVAVLVSSSDAIQPGWLVNHLRSLTPFQVKGLQNNLAQYSRHFLYSSPAQPLGPEDLTWRMIAGKLVNIKLHTRRSQRVVKGSRSICRCDCWRSNSTASNSLSSLLS

SEQ ID NO: 41780 - protein, 415 aa, Arabidopsis thaliana
  peptide (1)..(415): Ceres Seq. ID no. 13489176
  misc_feature (24)..(344): Pfam Name: Exostosin family Pfam Description: Exostosin family
  misc_feature (17)..(389): Homolog of NCBI NO: 15228598 NR Description: Exostosin family [Arabidopsis thaliana]
  misc_feature (22)..(386): Homolog of NCBI NO: 25406363 NR Description: F25A4.34 [imported] - Arabidopsis thaliana
  misc_feature (22)..(386): Homolog of NCBI NO: 18410670 NR Description: Exostosin family [Arabidopsis thaliana]
  misc_feature (21)..(387): Homolog of NCBI NO: 22330483 NR Description: Exostosin family [Arabidopsis thaliana]
  misc_feature (4)..(393): Homolog of NCBI NO: 15230692 NR Description: Exostosin family [Arabidopsis thaliana]
  misc_feature (16)..(405): Homolog of NCBI NO: 15241619 NR Description: Exostosin family [Arabidopsis thaliana]
  misc_feature (21)..(399): Homolog of NCBI NO: 34899802 NR Description: OJ1092_A07.9 [Oryza sativa (japonica
  misc_feature (11)..(405): Homolog of NCBI NO: 30686300 NR Description: Exostosin family [Arabidopsis thaliana]
  misc_feature (1)..(369): Homolog of NCBI NO: 34909176 NR Description: P0468B07.31 [Oryza sativa (japonica
  misc_feature (1)..(415): Homolog of NCBI NO: 15237870 NR Description: Exostosin family [Arabidopsis thaliana]
MVFERENRWLNEDPGYPVEFPIKVYVYEMPKKFTFDLLWLFHNTYKETSNATSNGSPVHRLIEQHSIDYWLWADLISPESERRLKSVVRVQKQQDADFFYVPFFTTISFFLLEKQQCKALYREALKWVTDQPAWKRSEGRDHIFPIHHPWSFKSVRKFVKNAIWLLPDMDSTGNWYKPGQVSLEKDLILPYVPNVDICDTKCLSESAPMRTTLLFFRGRLKRNAGGKIRAKLGAELSGIKDIIISEGTAGEGGKLAAQRGMRRSLFCLCPAGDTPSSARLFDAIVSGCIPVIVSDELEFPFEGILDYKKVAVLVSSSDAIQPGWLVNHLRSLTPFQVKGLQNNLAQYSRHFLYSSPAQPLGPEDLTWRMIAGKLVNIKLHTRRSQRVVKGSRSICRCDCWRSNSTASNSLSSLLS

SEQ ID NO: 41781 - DNA, 1291 bp, Arabidopsis thaliana
  misc_feature (1)..(1291): Ceres Seq. ID no. 12421839
  misc_feature: MA Experiment ID: 108434 Result: Up-regulated in Transcription
  misc_feature: MA Experiment 108434 PARAMETER Experiment Name: At_Root_Tips_cDNA_P Parameter: Tissue Value: Root Tips
  misc_feature: MA Experiment ID: 108462 Result: Down-regulated in Transcription
  misc_feature: MA Experiment 108462 PARAMETER Experiment Name: At_Germinating_Seeds_cDNA_P Parameter: Age (day) Value: 2 vs. 0
  misc_feature: MA Experiment 108462 PARAMETER Experiment Name: At_Germinating_Seeds_cDNA_P Parameter: Tissue Value: Germinating Seeds
  misc_feature: MA Experiment ID: 108463 Result: Down-regulated in Transcription
  misc_feature: MA Experiment 108463 PARAMETER Experiment Name: At_Germinating_Seeds_cDNA_P Parameter: Age (day) Value: 3 vs. 0
  misc_feature: MA Experiment 108463 PARAMETER Experiment Name: At_Germinating_Seeds_cDNA_P Parameter: Tissue Value: Germinating Seeds
  misc_feature: MA Experiment ID: 108464 Result: Down-regulated in Transcription
  misc_feature: MA Experiment 108464 PARAMETER Experiment Name: At_Germinating_Seeds_cDNA_P Parameter: Age (day) Value: 4 vs. 0
  misc_feature: MA Experiment 108464 PARAMETER Experiment Name: At_Germinating_Seeds_cDNA_P Parameter: Tissue Value: Germinating Seeds
  misc_feature: MA Experiment ID: 108561 Result: Down-regulated in Transcription
  misc_feature: MA Experiment 108561 PARAMETER Experiment Name: At_100uM_ABA_cDNA_P Parameter: Timepoint (hr) Value: 6
  misc_feature: MA Experiment 108561 PARAMETER Experiment Name: At_100uM_ABA_cDNA_P Parameter: Tissue Value: Aerial
  misc_feature: MA Experiment 108561 PARAMETER Experiment Name: At_100uM_ABA_cDNA_P Parameter: Treatment Value: 100uM ABA vs. No Treatment
  misc_feature: MA Experiment ID: 108585 Result: Down-regulated in Transcription
  misc_feature: MA Experiment 108585 PARAMETER Experiment Name: At_5mM_NaNP_cDNA_P Parameter: Timepoint (hr) Value: 6
  misc_feature: MA Experiment 108585 PARAMETER Experiment Name: At_5mM_NaNP_cDNA_P Parameter: Tissue Value: Aerial
  misc_feature: MA Experiment 108585 PARAMETER Experiment Name: At_5mM_NaNP_cDNA_P Parameter: Treatment Value: null
  misc_feature: MA Experiment ID: 108595 Result: Down-regulated in Transcription
  misc_feature: MA Experiment 108595 PARAMETER Experiment Name: At_Ler-pi_Ovule_cDNA_P Parameter: Plant Line Value: null
  misc_feature: MA Experiment ID: 108605 Result: Down-regulated in Transcription
  misc_feature: MA Experiment 108605 PARAMETER Experiment Name: At_100uM_ABA_cDNA_P Parameter: Timepoint (hr) Value: 6
  misc_feature: MA Experiment 108605 PARAMETER Experiment Name: At_100uM_ABA_cDNA_P Parameter: Tissue Value: Aerial
  misc_feature: MA Experiment 108605 PARAMETER Experiment Name: At_100uM_ABA_cDNA_P Parameter: Treatment Value: 100uM ABA vs. No Treatment
  misc_feature: MA Experiment ID: 108607 Result: Down-regulated in Transcription
  misc_feature: MA Experiment 108607 PARAMETER Experiment Name: At_100uM_ABA_cDNA_P Parameter: Timepoint (hr) Value: 4
  misc_feature: MA Experiment 108607 PARAMETER Experiment Name: At_100uM_ABA_cDNA_P Parameter: Tissue Value: Aerial
  misc_feature: MA Experiment 108607 PARAMETER Experiment Name: At_100uM_ABA_cDNA_P Parameter: Treatment Value: 100uM ABA vs. No Treatment
  misc_feature: MA Experiment ID: 20000069 Result: Down-regulated in Transcription
  misc_feature: MA Experiment 20000069 PARAMETER Experiment Name: At_100uM_ABA_Mutants_cDNA_P Parameter: Plant Line Value: CS23
  misc_feature: MA Experiment 20000069 PARAMETER Experiment Name: At_100uM_ABA_Mutants_cDNA_P Parameter: Timepoint (hr) Value: 6
  misc_feature: MA Experiment 20000069 PARAMETER Experiment Name: At_100uM_ABA_Mutants_cDNA_P Parameter: Tissue Value: Aerial
  misc_feature: MA Experiment 20000069 PARAMETER Experiment Name: At_100uM_ABA_Mutants_cDNA_P Parameter: Treatment Value: 100uM ABA vs. No Treatment
  misc_feature: MA Experiment ID: 20000070 Result: Down-regulated in Transcription
  misc_feature: MA Experiment 20000070 PARAMETER Experiment Name: At_100uM_ABA_Mutants_cDNA_P Parameter: Plant Line Value: CS24
  misc_feature: MA Experiment 20000070 PARAMETER Experiment Name: At_100uM_ABA_Mutants_cDNA_P Parameter: Timepoint (hr) Value: 6
  misc_feature: MA Experiment 20000070 PARAMETER Experiment Name: At_100uM_ABA_Mutants_cDNA_P Parameter: Tissue Value: Aerial
  misc_feature: MA Experiment 20000070 PARAMETER Experiment Name: At_100uM_ABA_Mutants_cDNA_P Parameter: Treatment Value: 100uM ABA vs. No Treatment
  misc_feature: MA Experiment ID: 20000071 Result: Down-regulated in Transcription
  misc_feature: MA Experiment 20000071 PARAMETER Experiment Name: At_100uM_ABA_Mutants_cDNA_P Parameter: Plant Line Value: CS8104
  misc_feature: MA Experiment 20000071 PARAMETER Experiment Name: At_100uM_ABA_Mutants_cDNA_P Parameter: Timepoint (hr) Value: 6
  misc_feature: MA Experiment 20000071 PARAMETER Experiment Name: At_100uM_ABA_Mutants_cDNA_P Parameter: Tissue Value: Aerial
  misc_feature: MA Experiment 20000071 PARAMETER Experiment Name: At_100uM_ABA_Mutants_cDNA_P Parameter: Treatment Value: 100uM ABA vs. No Treatment
  misc_feature: MA Experiment ID: 20000072 Result: Down-regulated in Transcription
  misc_feature: MA Experiment 20000072 PARAMETER Experiment Name: At_100uM_ABA_Mutants_cDNA_P Parameter: Plant Line Value: CS8105
  misc_feature: MA Experiment 20000072 PARAMETER Experiment Name: At_100uM_ABA_Mutants_cDNA_P Parameter: Timepoint (hr) Value: 6
  misc_feature: MA Experiment 20000072 PARAMETER Experiment Name: At_100uM_ABA_Mutants_cDNA_P Parameter: Tissue Value: Aerial
  misc_feature: MA Experiment 20000072 PARAMETER Experiment Name: At_100uM_ABA_Mutants_cDNA_P Parameter: Treatment Value: 100uM ABA vs. No Treatment
  misc_feature: MA Experiment ID: 20000087 Result: Down-regulated in Transcription
  misc_feature: MA Experiment 20000087 PARAMETER Experiment Name: At_100uM_ABA_Mutants_cDNA_P Parameter: Plant Line Value: WS
  misc_feature: MA Experiment 20000087 PARAMETER Experiment Name: At_100uM_ABA_Mutants_cDNA_P Parameter: Timepoint (hr) Value: 6
  misc_feature: MA Experiment 20000087 PARAMETER Experiment Name: At_100uM_ABA_Mutants_cDNA_P Parameter: Tissue Value: Aerial
  misc_feature: MA Experiment 20000087 PARAMETER Experiment Name: At_100uM_ABA_Mutants_cDNA_P Parameter: Treatment Value: 100uM ABA vs. No Treatment
  misc_feature: MA Experiment ID: 20000117 Result: Down-regulated in Transcription
  misc_feature: MA Experiment 20000117 PARAMETER Experiment Name: At_100uM_ABA_Mutants_cDNA_P Parameter: Plant Line Value: Columbia
  misc_feature: MA Experiment 20000117 PARAMETER Experiment Name: At_100uM_ABA_Mutants_cDNA_P Parameter: Timepoint (hr) Value: 6
  misc_feature: MA Experiment 20000117 PARAMETER Experiment Name: At_100uM_ABA_Mutants_cDNA_P Parameter: Tissue Value: Aerial
  misc_feature: MA Experiment 20000117 PARAMETER Experiment Name: At_100uM_ABA_Mutants_cDNA_P Parameter: Treatment Value: 100uM ABA vs. No Treatment
  misc_feature: MA Experiment ID: 20000314 Result: Down-regulated in Transcription
  misc_feature: MA Experiment 20000314 PARAMETER Experiment Name: At_14day_Shoots-Roots_Sub_P Parameter: Age (day) Value: 14
  misc_feature: MA Experiment 20000314 PARAMETER Experiment Name: At_14day_Shoots-Roots_Sub_P Parameter: Organism Value: A. thaliana
  misc_feature: MA Experiment 20000314 PARAMETER Experiment Name: At_14day_Shoots-Roots_Sub_P Parameter: Plant Line Value: WS
  misc_feature: MA Experiment 20000314 PARAMETER Experiment Name: At_14day_Shoots-Roots_Sub_P Parameter: Tissue Value: Roots vs. Whole Plant
  misc_feature: MA Experiment ID: 20001807 Result: Up-regulated in Transcription
  misc_feature: MA Experiment 20001807 PARAMETER Experiment Name: At_50mM_NH4NO3_L-to-H_Sub_P Parameter: Timepoint (hr) Value: 6
  misc_feature: MA Experiment 20001807 PARAMETER Experiment Name: At_50mM_NH4NO3_L-to-H_Sub_P Parameter: Tissue Value: Leaf
  misc_feature: MA Experiment 20001807 PARAMETER Experiment Name: At_50mM_NH4NO3_L-to-H_Sub_P Parameter: Treatment Value: 50mM NH4NO3 vs 100mM Mannitol
atccaaaactctctcagtcatggctcttcttcgtcttcctggcatttccctccaaattctaggtcacaaatcaaaccagaagaaccctaatcccaatgttgccttcaccaatcactctctctctttatctactccttcactatgtcgtctccatcgtcacgcgacgtttccagactcaattccagcaaaatccagaaacctcacttcgtacttctccaccacaacacaagagatttctaaaaccagattgattgctcagaatgttccatggacatctacacctgaagatattagatcgttgttcgagaagtacgggagtgttatcgacattgagatgtctatgcataagaaggaaagaaatagaggtttggtgttcattgaaatggcttctcctgaagaagctgcaacagctcttaaatctcttgaatcgtgtgaatatgagggtcgtcgtttgaaggtagactatgcaaagaccaaaaagaagaagacatatgcgccgcgtgagacgccttcaccagtgcctacattcaatttgtttgttgcaaacttggcatttgaagcaagggccaagcatcttaaggagttctttgatgcagacactggtaatgttgtctccactgaagttatattccatgaaaatccaaggaggtcgagtggttacgggtttgtctctttcaaaaccaagaaacaggccgaggcagcgcttattgagttccaaggaaaggattttttgggaaggccaatccgattagctaaaagcaaacagtttgtgaagttgcaagcaaaagaagggttgcagccaccagaggaggaagcagaggaggaaccatctcagtctgagacaatgacccaagagcacgaaactccggctgcataaaacttagaagtcttcgttgcaggatcattgttggagatattggaattgacgaagaagcttcgagcttttaggtctttattcttcttagtttttgaccaacaagaggagtgggtacatacaagtagtacctaccttgagtaaatggtggagaggtaagaagtacaagaccgattttgttagaactgaaaactagtaagagacaggtattaccaaacgtcagtatcagaccagatcaaatctcaagaaacaaactcatgtggctcctacgaaacttgctttgttcagttaaacacaatgcttctttgtttgtcatctactttcgattacttgtttgcgtttgttatatgcttagtgtgtaacttcatatatgaacccgtactcttaagaaagttatgttagtaatttgtaaaacgc

SEQ ID NO: 41782 - protein, 291 aa, Arabidopsis thaliana
  peptide (1)..(291): Ceres Seq. ID no. 12421840
  misc_feature (178)..(250): Pfam Name: RNA recognition motif. (a.k.a. RRM, RBD, or RNP domain) Pfam Description: RNA recognition motif. (a.k.a. RRM, RBD, or RNP
  misc_feature (74)..(281): Homolog of NCBI NO: 681912 NR Description: cp33 [Arabidopsis thaliana]
  misc_feature (75)..(263): Homolog of NCBI NO: 8163877 NR Description: enhancer binding protein-1; EBP1 [Entamoeba
  misc_feature (82)..(281): Homolog of NCBI NO: 34394882 NR Description: putative RNA-binding protein
  misc_feature (80)..(250): Homolog of NCBI NO: 38346724 NR Description: OSJNBa0086O06.22 [Oryza sativa (japonica
  misc_feature (55)..(144): Homolog of NCBI NO: 25407474 NR Description: hypothetical protein AT4g09050 [imported] -
  misc_feature (80)..(287): Homolog of NCBI NO: 15226983 NR Description: chloroplast RNA-binding protein cp33, putative
  misc_feature (7)..(77): Homolog of NCBI NO: 25407474 NR Description: hypothetical protein AT4g09050 [imported] -
  misc_feature (122)..(291): Homolog of NCBI NO: 25407472 NR Description: hypothetical protein AT4g09040 [imported] -
  misc_feature (7)..(77): Homolog of NCBI NO: 22328520 NR Description: RRM-containing protein
  misc_feature (55)..(291): Homolog of NCBI NO: 22328520 NR Description: RRM-containing protein
SKTLSVMALLRLPGISLQILGHKSNQKNPNPNVAFTNHSLSLSTPSLCRLHRHATFPDSIPAKSRNLTSYFSTTTQEISKTRLIAQNVPWTSTPEDIRSLFEKYGSVIDIEMSMHKKERNRGLVFIEMASPEEAATALKSLESCEYEGRRLKVDYAKTKKKKTYAPRETPSPVPTFNLFVANLAFEARAKHLKEFFDADTGNVVSTEVIFHENPRRSSGYGFVSFKTKKQAEAALIEFQGKDFLGRPIRLAKSKQFVKLQAKEGLQPPEEEAEEEPSQSETMTQEHETPAA

SEQ ID NO: 41783 - protein, 285 aa, Arabidopsis thaliana
  peptide (1)..(285): Ceres Seq. ID no. 12421841
  misc_feature (172)..(244): Pfam Name: RNA recognition motif. (a.k.a. RRM, RBD, or RNP domain) Pfam Description: RNA recognition motif. (a.k.a. RRM, RBD, or RNP
  misc_feature (68)..(275): Homolog of NCBI NO: 681912 NR Description: cp33 [Arabidopsis thaliana]
  misc_feature (69)..(257): Homolog of NCBI NO: 8163877 NR Description: enhancer binding protein-1; EBP1 [Entamoeba
  misc_feature (76)..(275): Homolog of NCBI NO: 34394882 NR Description: putative RNA-binding protein
  misc_feature (74)..(244): Homolog of NCBI NO: 38346724 NR Description: OSJNBa0086O06.22 [Oryza sativa (japonica
  misc_feature (49)..(138): Homolog of NCBI NO: 25407474 NR Description: hypothetical protein AT4g09050 [imported] -
  misc_feature (74)..(281): Homolog of NCBI NO: 15226983 NR Description: chloroplast RNA-binding protein cp33, putative
  misc_feature (1)..(71): Homolog of NCBI NO: 25407474 NR Description: hypothetical protein AT4g09050 [imported] -
  misc_feature (116)..(285): Homolog of NCBI NO: 25407472 NR Description: hypothetical protein AT4g09040 [imported] -
  misc_feature (1)..(71): Homolog of NCBI NO: 22328520 NR Description: RRM-containing protein
  misc_feature (49)..(285): Homolog of NCBI NO: 22328520 NR Description: RRM-containing protein
MALLRLPGISLQILGHKSNQKNPNPNVAFTNHSLSLSTPSLCRLHRHATFPDSIPAKSRNLTSYFSTTTQEISKTRLIAQNVPWTSTPEDIRSLFEKYGSVIDIEMSMHKKERNRGLVFIEMASPEEAATALKSLESCEYEGRRLKVDYAKTKKKKTYAPRETPSPVPTFNLFVANLAFEARAKHLKEFFDADTGNVVSTEVIFHENPRRSSGYGFVSFKTKKQAEAALIEFQGKDFLGRPIRLAKSKQFVKLQAKEGLQPPEEEAEEEPSQSETMTQEHETPAA

SEQ ID NO: 41784 - protein, 180 aa, Arabidopsis thaliana
  peptide (1)..(180): Ceres Seq. ID no. 12421842
  misc_feature (67)..(139): Pfam Name: RNA recognition motif. (a.k.a. RRM, RBD, or RNP domain) Pfam Description: RNA recognition motif. (a.k.a. RRM, RBD, or RNP
  misc_feature (1)..(168): Homolog of NCBI NO: 7446339 NR Description: probable RNA-binding protein cp33 precursor -
  misc_feature (1)..(170): Homolog of NCBI NO: 17064758 NR Description: ubiquitin / ribosomal protein CEP52 [Arabidopsis
  misc_feature (1)..(170): Homolog of NCBI NO: 681912 NR Description: cp33 [Arabidopsis thaliana]
  misc_feature (1)..(152): Homolog of NCBI NO: 8163877 NR Description: enhancer binding protein-1; EBP1 [Entamoeba
  misc_feature (1)..(170): Homolog of NCBI NO: 34394882 NR Description: putative RNA-binding protein
  misc_feature (1)..(139): Homolog of NCBI NO: 38346724 NR Description: OSJNBa0086O06.22 [Oryza sativa (japonica
  misc_feature (1)..(33): Homolog of NCBI NO: 25407474 NR Description: hypothetical protein AT4g09050 [imported] -
  misc_feature (1)..(176): Homolog of NCBI NO: 15226983 NR Description: chloroplast RNA-binding protein cp33, putative
  misc_feature (11)..(180): Homolog of NCBI NO: 25407472 NR Description: hypothetical protein AT4g09040 [imported] -
  misc_feature (1)..(180): Homolog of NCBI NO: 22328520 NR Description: RRM-containing protein
MSMHKKERNRGLVFIEMASPEEAATALKSLESCEYEGRRLKVDYAKTKKKKTYAPRETPSPVPTFNLFVANLAFEARAKHLKEFFDADTGNVVSTEVIFHENPRRSSGYGFVSFKTKKQAEAALIEFQGKDFLGRPIRLAKSKQFVKLQAKEGLQPPEEEAEEEPSQSETMTQEHETPAA

SEQ ID NO: 41785 - DNA, 1779 bp, Arabidopsis thaliana
  misc_feature (1)..(1779): Ceres Seq. ID no. 12370733
  misc_feature: MA Experiment ID: 108434 Result: Down-regulated in Transcription
  misc_feature: MA Experiment 108434 PARAMETER Experiment Name: At_Root_Tips_cDNA_P Parameter: Tissue Value: Root Tips
  misc_feature: MA Experiment ID: 108463 Result: Up-regulated in Transcription
  misc_feature: MA Experiment 108463 PARAMETER Experiment Name: At_Germinating_Seeds_cDNA_P Parameter: Age (day) Value: 3 vs. 0
  misc_feature: MA Experiment 108463 PARAMETER Experiment Name: At_Germinating_Seeds_cDNA_P Parameter: Tissue Value: Germinating Seeds
  misc_feature: MA Experiment ID: 108464 Result: Up-regulated in Transcription
  misc_feature: MA Experiment 108464 PARAMETER Experiment Name: At_Germinating_Seeds_cDNA_P Parameter: Age (day) Value: 4 vs. 0
  misc_feature: MA Experiment 108464 PARAMETER Experiment Name: At_Germinating_Seeds_cDNA_P Parameter: Tissue Value: Germinating Seeds
  misc_feature: MA Experiment ID: 108569 Result: Up-regulated in Transcription
  misc_feature: MA Experiment 108569 PARAMETER Experiment Name: At_0.001%_MeJA__cDNA_P Parameter: Timepoint (hr) Value: 6
  misc_feature: MA Experiment 108569 PARAMETER Experiment Name: At_0.001%_MeJA__cDNA_P Parameter: Tissue Value: Aerial
  misc_feature: MA Experiment 108569 PARAMETER Experiment Name: At_0.001%_MeJA__cDNA_P Parameter: Treatment Value: 0.001% MeJA vs. No Treatment
  misc_feature: MA Experiment ID: 108579 Result: Up-regulated in Transcription
  misc_feature: MA Experiment 108579 PARAMETER Experiment Name: At_4deg_Cold_cDNA_P Parameter: Temperature (deg C) Value: 4 vs. 22
  misc_feature: MA Experiment 108579 PARAMETER Experiment Name: At_4deg_Cold_cDNA_P Parameter: Timepoint (hr) Value: 6
  misc_feature: MA Experiment 108579 PARAMETER Experiment Name: At_4deg_Cold_cDNA_P Parameter: Tissue Value: Aerial
  misc_feature: MA Experiment ID: 108668 Result: Up-regulated in Transcription
  misc_feature: MA Experiment 108668 PARAMETER Experiment Name: At_2mM_SA_cDNA_P Parameter: Plant Line Value: WS
  misc_feature: MA Experiment 108668 PARAMETER Experiment Name: At_2mM_SA_cDNA_P Parameter: Timepoint (hr) Value: 6
  misc_feature: MA Experiment 108668 PARAMETER Experiment Name: At_2mM_SA_cDNA_P Parameter: Treatment Value: 2mM SA vs. No Treatment
  misc_feature: MA Experiment ID: 20000113 Result: Down-regulated in Transcription
  misc_feature: MA Experiment 20000113 PARAMETER Experiment Name: At_42deg_Heat_cDNA_P Parameter: Temperature (deg C) Value: 42 vs. 22
  misc_feature: MA Experiment 20000113 PARAMETER Experiment Name: At_42deg_Heat_cDNA_P Parameter: Timepoint (hr) Value: 8
  misc_feature: MA Experiment 20000113 PARAMETER Experiment Name: At_42deg_Heat_cDNA_P Parameter: Tissue Value: Aerial
  misc_feature: MA Experiment ID: 20000144 Result: Down-regulated in Transcription
  misc_feature: MA Experiment 20000144 PARAMETER Experiment Name: At_42deg_Heat_cDNA_P Parameter: Temperature (deg C) Value: 42 vs. 22
  misc_feature: MA Experiment 20000144 PARAMETER Experiment Name: At_42deg_Heat_cDNA_P Parameter: Timepoint (hr) Value: 1
  misc_feature: MA Experiment 20000144 PARAMETER Experiment Name: At_42deg_Heat_cDNA_P Parameter: Tissue Value: Aerial
  misc_feature: MA Experiment ID: 20000171 Result: Down-regulated in Transcription
  misc_feature: MA Experiment 20000171 PARAMETER Experiment Name: At_42deg_Heat_P Parameter: Age (day) Value: 14
  misc_feature: MA Experiment 20000171 PARAMETER Experiment Name: At_42deg_Heat_P Parameter: Organism Value: A. thaliana
  misc_feature: MA Experiment 20000171 PARAMETER Experiment Name: At_42deg_Heat_P Parameter: Plant Line Value: WS
  misc_feature: MA Experiment 20000171 PARAMETER Experiment Name: At_42deg_Heat_P Parameter: Temperature (deg C) Value: 42 vs. 22
  misc_feature: MA Experiment 20000171 PARAMETER Experiment Name: At_42deg_Heat_P Parameter: Timepoint (hr) Value: 1
  misc_feature: MA Experiment 20000171 PARAMETER Experiment Name: At_42deg_Heat_P Parameter: Tissue Value: Aerial
  misc_feature: MA Experiment ID: 20000173 Result: Down-regulated in Transcription
  misc_feature: MA Experiment 20000173 PARAMETER Experiment Name: At_42deg_Heat_P Parameter: Age (day) Value: 14
  misc_feature: MA Experiment 20000173 PARAMETER Experiment Name: At_42deg_Heat_P Parameter: Organism Value: A. thaliana
  misc_feature: MA Experiment 20000173 PARAMETER Experiment Name: At_42deg_Heat_P Parameter: Plant Line Value: WS
  misc_feature: MA Experiment 20000173 PARAMETER Experiment Name: At_42deg_Heat_P Parameter: Temperature (deg C) Value: 42 vs. 22
  misc_feature: MA Experiment 20000173 PARAMETER Experiment Name: At_42deg_Heat_P Parameter: Timepoint (hr) Value: 6
  misc_feature: MA Experiment 20000173 PARAMETER Experiment Name: At_42deg_Heat_P Parameter: Tissue Value: Aerial
  misc_feature: MA Experiment ID: 20000182 Result: Up-regulated in Transcription
  misc_feature: MA Experiment 20000182 PARAMETER Experiment Name: At_2mM_SA_P Parameter: Age (day) Value: 14
  misc_feature: MA Experiment 20000182 PARAMETER Experiment Name: At_2mM_SA_P Parameter: Organism Value: A. thaliana
  misc_feature: MA Experiment 20000182 PARAMETER Experiment Name: At_2mM_SA_P Parameter: Plant Line Value: WS
  misc_feature: MA Experiment 20000182 PARAMETER Experiment Name: At_2mM_SA_P Parameter: Timepoint (hr) Value: 6
  misc_feature: MA Experiment 20000182 PARAMETER Experiment Name: At_2mM_SA_P Parameter: Tissue Value: Aerial
  misc_feature: MA Experiment 20000182 PARAMETER Experiment Name: At_2mM_SA_P Parameter: Treatment Value: 2mM SA vs. No Treatment
  misc_feature: MA Experiment ID: 20000184 Result: Down-regulated in Transcription
  misc_feature: MA Experiment 20000184 PARAMETER Experiment Name: At_Shoots__P Parameter: Age (day) Value: 7
  misc_feature: MA Experiment 20000184 PARAMETER Experiment Name: At_Shoots__P Parameter: Tissue Value: Shoots vs. Whole Plant
  misc_feature: MA Experiment ID: 20000185 Result: Down-regulated in Transcription
  misc_feature: MA Experiment 20000185 PARAMETER Experiment Name: At_Roots__P Parameter: Age (day) Value: 7 vs. 21
  misc_feature: MA Experiment 20000185 PARAMETER Experiment Name: At_Roots__P Parameter: Organism Value: A. thaliana
  misc_feature: MA Experiment 20000185 PARAMETER Experiment Name: At_Roots__P Parameter: Tissue Value: Roots vs. Whole Plant
  misc_feature: MA Experiment ID: 20000227 Result: Down-regulated in Transcription
  misc_feature: MA Experiment 20000227 PARAMETER Experiment Name: At_Root-Tips-vs-Tops_P Parameter: Tissue Value: Root Tips vs. Root Tops
  misc_feature: MA Experiment ID: 20000234 Result: Down-regulated in Transcription
  misc_feature: MA Experiment 20000234 PARAMETER Experiment Name: At_Siliques_P Parameter: Age (day) Value: 21
  misc_feature: MA Experiment 20000234 PARAMETER Experiment Name: At_Siliques_P Parameter: Organism Value: A. thaliana
  misc_feature: MA Experiment 20000234 PARAMETER Experiment Name: At_Siliques_P Parameter: Plant Line Value: WS
  misc_feature: MA Experiment 20000234 PARAMETER Experiment Name: At_Siliques_P Parameter: Tissue Value: Less Than 5mm Siliques vs. Whole Plant
  misc_feature: MA Experiment ID: 20000264 Result: Down-regulated in Transcription
  misc_feature: MA Experiment 20000264 PARAMETER Experiment Name: At_Open_Flower_P Parameter: Age (day) Value: 21
  misc_feature: MA Experiment 20000264 PARAMETER Experiment Name: At_Open_Flower_P Parameter: Plant Line Value: WS
  misc_feature: MA Experiment 20000264 PARAMETER Experiment Name: At_Open_Flower_P Parameter: Tissue Value: Open Flower vs. Whole Plant
  misc_feature: MA Experiment ID: 20000265 Result: Down-regulated in Transcription
  misc_feature: MA Experiment 20000265 PARAMETER Experiment Name: At_Open_Flower_P Parameter: Age (day) Value: 21
  misc_feature: MA Experiment 20000265 PARAMETER Experiment Name: At_Open_Flower_P Parameter: Plant Line Value: WS
  misc_feature: MA Experiment 20000265 PARAMETER Experiment Name: At_Open_Flower_P Parameter: Tissue Value: Closed Flower vs. Whole Plant
  misc_feature: MA Experiment ID: 20000286 Result: Down-regulated in Transcription
  misc_feature: MA Experiment 20000286 PARAMETER Experiment Name: At_Open_Flower_P Parameter: Age (day) Value: 21
  misc_feature: MA Experiment 20000286 PARAMETER Experiment Name: At_Open_Flower_P Parameter: Plant Line Value: WS
  misc_feature: MA Experiment 20000286 PARAMETER Experiment Name: At_Open_Flower_P Parameter: Tissue Value: Half Open vs. Whole Plant
  misc_feature: MA Experiment ID: 20000437 Result: Down-regulated in Transcription
  misc_feature: MA Experiment 20000437 PARAMETER Experiment Name: At_Drought_P Parameter: Age (day) Value: 8
  misc_feature: MA Experiment 20000437 PARAMETER Experiment Name: At_Drought_P Parameter: Organism Value: A. thaliana
  misc_feature: MA Experiment 20000437 PARAMETER Experiment Name: At_Drought_P Parameter: Plant Line Value: WS
  misc_feature: MA Experiment 20000437 PARAMETER Experiment Name: At_Drought_P Parameter: Timepoint (hr) Value: 24
  misc_feature: MA Experiment 20000437 PARAMETER Experiment Name: At_Drought_P Parameter: Tissue Value: Whole Plant
  misc_feature: MA Experiment 20000437 PARAMETER Experiment Name: At_Drought_P Parameter: Treatment Value: Drought vs. No Drought
  misc_feature: MA Experiment ID: 20000438 Result: Down-regulated in Transcription
  misc_feature: MA Experiment 20000438 PARAMETER Experiment Name: At_Shoots__P Parameter: Age (day) Value: 14
  misc_feature: MA Experiment 20000438 PARAMETER Experiment Name: At_Shoots__P Parameter: Tissue Value: Shoots vs. Whole Plant
  misc_feature: MA Experiment ID: 20000439 Result: Down-regulated in Transcription
  misc_feature: MA Experiment 20000439 PARAMETER Experiment Name: At_Roots__P Parameter: Age (day) Value: 14 vs. 21
  misc_feature: MA Experiment 20000439 PARAMETER Experiment Name: At_Roots__P Parameter: Organism Value: A. thaliana
  misc_feature: MA Experiment 20000439 PARAMETER Experiment Name: At_Roots__P Parameter: Tissue Value: Roots vs. Whole Plant
  misc_feature: MA Experiment ID: 20000794 Result: Down-regulated in Transcription
  misc_feature: MA Experiment 20000794 PARAMETER Experiment Name: At_Petals_P Parameter: Age (day) Value: 23-25 days
  misc_feature: MA Experiment 20000794 PARAMETER Experiment Name: At_Petals_P Parameter: Plant Line Value: WS
  misc_feature: MA Experiment 20000794 PARAMETER Experiment Name: At_Petals_P Parameter: Tissue Value: Petals vs. Whole plant
  misc_feature: MA Experiment ID: 20001555 Result: Down-regulated in Transcription
  misc_feature: MA Experiment 20001555 PARAMETER Experiment Name: At_Drought_Soil_Dry_P Parameter: Age (day) Value: 24
  misc_feature: MA Experiment 20001555 PARAMETER Experiment Name: At_Drought_Soil_Dry_P Parameter: Organism Value: A. thaliana
  misc_feature: MA Experiment 20001555 PARAMETER Experiment Name: At_Drought_Soil_Dry_P Parameter: Plant Line Value: WS
  misc_feature: MA Experiment 20001555 PARAMETER Experiment Name: At_Drought_Soil_Dry_P Parameter: Post Timepoint (hr) Value: None
  misc_feature: MA Experiment 20001555 PARAMETER Experiment Name: At_Drought_Soil_Dry_P Parameter: Post-Treatment Value: None
  misc_feature: MA Experiment 20001555 PARAMETER Experiment Name: At_Drought_Soil_Dry_P Parameter: Timepoint (day) Value: 10
  misc_feature: MA Experiment 20001555 PARAMETER Experiment Name: At_Drought_Soil_Dry_P Parameter: Treatment Value: Drought vs. No Drought
  misc_feature: MA Experiment ID: 20001556 Result: Down-regulated in Transcription
  misc_feature: MA Experiment 20001556 PARAMETER Experiment Name: At_Drought_Soil_Dry_P Parameter: Age (day) Value: 26
  misc_feature: MA Experiment 20001556 PARAMETER Experiment Name: At_Drought_Soil_Dry_P Parameter: Organism Value: A. thaliana
  misc_feature: MA Experiment 20001556 PARAMETER Experiment Name: At_Drought_Soil_Dry_P Parameter: Plant Line Value: WS
  misc_feature: MA Experiment 20001556 PARAMETER Experiment Name: At_Drought_Soil_Dry_P Parameter: Post Timepoint (hr) Value: None
  misc_feature: MA Experiment 20001556 PARAMETER Experiment Name: At_Drought_Soil_Dry_P Parameter: Post-Treatment Value: None
  misc_feature: MA Experiment 20001556 PARAMETER Experiment Name: At_Drought_Soil_Dry_P Parameter: Timepoint (day) Value: 12
  misc_feature: MA Experiment 20001556 PARAMETER Experiment Name: At_Drought_Soil_Dry_P Parameter: Treatment Value: Drought vs. No Drought
  misc_feature: MA Experiment ID: 20001557 Result: Down-regulated in Transcription
  misc_feature: MA Experiment 20001557 PARAMETER Experiment Name: At_Drought_Soil_Dry_P Parameter: Age (day) Value: 27
  misc_feature: MA Experiment 20001557 PARAMETER Experiment Name: At_Drought_Soil_Dry_P Parameter: Organism Value: A. thaliana
  misc_feature: MA Experiment 20001557 PARAMETER Experiment Name: At_Drought_Soil_Dry_P Parameter: Plant Line Value: WS
  misc_feature: MA Experiment 20001557 PARAMETER Experiment Name: At_Drought_Soil_Dry_P Parameter: Post Timepoint (hr) Value: 3
  misc_feature: MA Experiment 20001557 PARAMETER Experiment Name: At_Drought_Soil_Dry_P Parameter: Post-Treatment Value: Re-Water vs. No Drought
  misc_feature: MA Experiment 20001557 PARAMETER Experiment Name: At_Drought_Soil_Dry_P Parameter: Timepoint (day) Value: 13
  misc_feature: MA Experiment 20001557 PARAMETER Experiment Name: At_Drought_Soil_Dry_P Parameter: Treatment Value: Drought vs. No Drought
  misc_feature: MA Experiment ID: 20001558 Result: Down-regulated in Transcription
  misc_feature: MA Experiment 20001558 PARAMETER Experiment Name: At_Drought_Soil_Dry_P Parameter: Age (day) Value: 27
  misc_feature: MA Experiment 20001558 PARAMETER Experiment Name: At_Drought_Soil_Dry_P Parameter: Organism Value: A. thaliana
  misc_feature: MA Experiment 20001558 PARAMETER Experiment Name: At_Drought_Soil_Dry_P Parameter: Plant Line Value: WS
  misc_feature: MA Experiment 20001558 PARAMETER Experiment Name: At_Drought_Soil_Dry_P Parameter: Post Timepoint (hr) Value: 6
  misc_feature: MA Experiment 20001558 PARAMETER Experiment Name: At_Drought_Soil_Dry_P Parameter: Post-Treatment Value: Re-Water vs. No Drought
  misc_feature: MA Experiment 20001558 PARAMETER Experiment Name: At_Drought_Soil_Dry_P Parameter: Timepoint (day) Value: 13
  misc_feature: MA Experiment 20001558 PARAMETER Experiment Name: At_Drought_Soil_Dry_P Parameter: Treatment Value: Drought vs. No Drought
  misc_feature: MA Experiment ID: 20001560 Result: Down-regulated in Transcription
  misc_feature: MA Experiment 20001560 PARAMETER Experiment Name: At_Drought_Soil_Dry_P Parameter: Age (day) Value: 28
  misc_feature: MA Experiment 20001560 PARAMETER Experiment Name: At_Drought_Soil_Dry_P Parameter: Organism Value: A. thaliana
  misc_feature: MA Experiment 20001560 PARAMETER Experiment Name: At_Drought_Soil_Dry_P Parameter: Plant Line Value: WS
  misc_feature: MA Experiment 20001560 PARAMETER Experiment Name: At_Drought_Soil_Dry_P Parameter: Post Timepoint (hr) Value: None
  misc_feature: MA Experiment 20001560 PARAMETER Experiment Name: At_Drought_Soil_Dry_P Parameter: Post-Treatment Value: None
  misc_feature: MA Experiment 20001560 PARAMETER Experiment Name: At_Drought_Soil_Dry_P Parameter: Timepoint (day) Value: 14
  misc_feature: MA Experiment 20001560 PARAMETER Experiment Name: At_Drought_Soil_Dry_P Parameter: Treatment Value: Drought vs. No Drought
  misc_feature: MA Experiment ID: 20001904 Result: Down-regulated in Transcription
  misc_feature: MA Experiment 20001904 PARAMETER Experiment Name: At_Drought_Reproduction_P Parameter: Age (day) Value: 37
  misc_feature: MA Experiment 20001904 PARAMETER Experiment Name: At_Drought_Reproduction_P Parameter: Organism Value: A. thaliana
  misc_feature: MA Experiment 20001904 PARAMETER Experiment Name: At_Drought_Reproduction_P Parameter: Plant Line Value: WS
  misc_feature: MA Experiment 20001904 PARAMETER Experiment Name: At_Drought_Reproduction_P Parameter: Timepoint (day) Value: 7
  misc_feature: MA Experiment 20001904 PARAMETER Experiment Name: At_Drought_Reproduction_P Parameter: Tissue Value: Rosettes
  misc_feature: MA Experiment 20001904 PARAMETER Experiment Name: At_Drought_Reproduction_P Parameter: Treatment Value: Drought vs. No Drought
  misc_feature: MA Experiment ID: 20001905 Result: Down-regulated in Transcription
  misc_feature: MA Experiment 20001905 PARAMETER Experiment Name: At_Drought_Reproduction_P Parameter: Age (day) Value: 40
  misc_feature: MA Experiment 20001905 PARAMETER Experiment Name: At_Drought_Reproduction_P Parameter: Organism Value: A. thaliana
  misc_feature: MA Experiment 20001905 PARAMETER Experiment Name: At_Drought_Reproduction_P Parameter: Plant Line Value: WS
  misc_feature: MA Experiment 20001905 PARAMETER Experiment Name: At_Drought_Reproduction_P Parameter: Timepoint (day) Value: 10
  misc_feature: MA Experiment 20001905 PARAMETER Experiment Name: At_Drought_Reproduction_P Parameter: Tissue Value: Rosettes
  misc_feature: MA Experiment 20001905 PARAMETER Experiment Name: At_Drought_Reproduction_P Parameter: Treatment Value: Drought vs. No Drought
gctttttctgattgcttctctgatctcttatctctaattctaatccatagtaaactcgatttcatcatcttctgctcacaacacttactgttgttgttgttgttgttattgttcttctcgattcactcgatcgatgttgttcaaaatgcgttcttttgtggcttttgtgctccttctgagctggttcggttcgtgttgttctctcaaggaccaagctgtagattttctcaaaagtgaagatagtttaaagaaagatctatcgtcagatgaagattccacgtatttgaaagcttttggatttcacaggaaaacacttgtccgtaacccttacaaagacttgccttcaagaaaagaccgcaaaaaccgtgttgtggctgcaactacaacaccatcatcatccccagaacctgctccaaaacatgtttcaactaaagcttcaacagtttcagagccacaaaagagatcatctacacaagatgtttcaccttctccatctgcgccacttgcaaactctcccattccaagaaactctcattcttctgttcctttagttgttggctgcgtaggcggtgctttttttcttctccttgtagctaccggtctctactttttcacaagtaaggccgggaaaactgtgaatccttggcgtactggtcttagtggacaacttcagaaagtattcgttactggtattcctgtactcaaaagatctgagattgaagctgcatgtgaagattttagtaatgtcattggatcttgtcccattgggaagttgttcaaaggaacattatcaagtggagtggagattgctgttgcttcttttgctactactactgccaaagactggaaggacagtacagaaattcacttcaggaagaagatcgaaatgttatcgaagatcaaccacaagaattttgcaaaccttcttggttattgtgaagaaaaggaacctttcaccaggatcttgatctttgagtatgctccaaatggatcactctttgagcatttacattataaagaatcagaacacttggattggggaatgcggttaagaattgcaatgggattagcatattgccttgaccatatgcaccaactcaatccacctatagctcacaccaatctcgtctcatcatctcttcagctcacagaggattatgctgtcaaagtatcagatttcagtttcggttcatctgagacagagactaacatcaacaacaacacagtcatagacacacacatctcagccttgaatccagaagacaacatttacagctttggtttactgttattcgaaatgataaccgggaaactcatagaatccgttaacaaacctgactcagtagatagctcgctggttgatttcttaagaggagagactctagccaaaatggtagatccaacactggaatcttatgatgccaagattgagaatataggtgaagtgatcaaatcatgccttaggactgacccgaaagagagacctacaatgcaagaagtcacaggatggttacgggagatcacgggattgtcaccgaacgatgctacaccgaaattgtcacctctttggtgggcagagttggaggttttgtccacggcgtaagagagaccccttcactaataaaactgtatatattttgaagatgtgagttttgtaagtgtctgttttatttatctctcgtaatattggtaaagcaaaattgaagttctcttcaagtttagtaaatttacaaacatgtatatgataaattagtgtgcatatcggaaaaaagttcttgc

SEQ ID NO: 41786 - protein, 489 aa, Arabidopsis thaliana
  peptide (1)..(489): Ceres Seq. ID no. 12370734
  misc_feature (200)..(460): Pfam Name: Protein kinase domain Pfam Description: Protein kinase domain
  misc_feature (70)..(488): Homolog of NCBI NO: 30684487 NR Description: leucine-rich repeat transmembrane protein kinase,
  misc_feature (70)..(488): Homolog of NCBI NO: 7268658 NR Description: putative protein (fragment) [Arabidopsis thaliana]
  misc_feature (70)..(488): Homolog of NCBI NO: 7486276 NR Description: hypothetical protein F28A21.50 - Arabidopsis
  misc_feature (82)..(488): Homolog of NCBI NO: 15242513 NR Description: leucine-rich repeat transmembrane protein kinase,
  misc_feature (26)..(487): Homolog of NCBI NO: 34911074 NR Description: putative receptor protein kinase-like protein
  misc_feature (167)..(488): Homolog of NCBI NO: 28916446 NR Description: ser-thr protein kinase [Gossypium hirsutum]
  misc_feature (252)..(489): Homolog of NCBI NO: 25408681 NR Description: probable protein kinase [imported] - Arabidopsis
  misc_feature (6)..(489): Homolog of NCBI NO: 15228810 NR Description: putative protein kinase
  misc_feature (5)..(489): Homolog of NCBI NO: 4588001 NR Description: hypothetical Ser-Thr protein kinase [Arabidopsis
  misc_feature (1)..(489): Homolog of NCBI NO: 18405327 NR Description: putative protein kinase
MLFKMRSFVAFVLLLSWFGSCCSLKDQAVDFLKSEDSLKKDLSSDEDSTYLKAFGFHRKTLVRNPYKDLPSRKDRKNRVVAATTTPSSSPEPAPKHVSTKASTVSEPQKRSSTQDVSPSPSAPLANSPIPRNSHSSVPLVVGCVGGAFFLLLVATGLYFFTSKAGKTVNPWRTGLSGQLQKVFVTGIPVLKRSEIEAACEDFSNVIGSCPIGKLFKGTLSSGVEIAVASFATTTAKDWKDSTEIHFRKKIEMLSKINHKNFANLLGYCEEKEPFTRILIFEYAPNGSLFEHLHYKESEHLDWGMRLRIAMGLAYCLDHMHQLNPPIAHTNLVSSSLQLTEDYAVKVSDFSFGSSETETNINNNTVIDTHISALNPEDNIYSFGLLLFEMITGKLIESVNKPDSVDSSLVDFLRGETLAKMVDPTLESYDAKIENIGEVIKSCLRTDPKERPTMQEVTGWLREITGLSPNDATPKLSPLWWAELEVLSTA

SEQ ID NO: 41787 - protein, 485 aa, Arabidopsis thaliana
  peptide (1)..(485): Ceres Seq. ID no. 12370735
  misc_feature (196)..(456): Pfam Name: Protein kinase domain Pfam Description: Protein kinase domain
  misc_feature (66)..(484): Homolog of NCBI NO: 30684487 NR Description: leucine-rich repeat transmembrane protein kinase,
  misc_feature (66)..(484): Homolog of NCBI NO: 7268658 NR Description: putative protein (fragment) [Arabidopsis thaliana]
  misc_feature (66)..(484): Homolog of NCBI NO: 7486276 NR Description: hypothetical protein F28A21.50 - Arabidopsis
  misc_feature (78)..(484): Homolog of NCBI NO: 15242513 NR Description: leucine-rich repeat transmembrane protein kinase,
  misc_feature (22)..(483): Homolog of NCBI NO: 34911074 NR Description: putative receptor protein kinase-like protein
  misc_feature (163)..(484): Homolog of NCBI NO: 28916446 NR Description: ser-thr protein kinase [Gossypium hirsutum]
  misc_feature (248)..(485): Homolog of NCBI NO: 25408681 NR Description: probable protein kinase [imported] - Arabidopsis
  misc_feature (2)..(485): Homolog of NCBI NO: 15228810 NR Description: putative protein kinase
  misc_feature (1)..(485): Homolog of NCBI NO: 4588001 NR Description: hypothetical Ser-Thr protein kinase [Arabidopsis
  misc_feature (1)..(485): Homolog of NCBI NO: 18405327 NR Description: putative protein kinase
MRSFVAFVLLLSWFGSCCSLKDQAVDFLKSEDSLKKDLSSDEDSTYLKAFGFHRKTLVRNPYKDLPSRKDRKNRVVAATTTPSSSPEPAPKHVSTKASTVSEPQKRSSTQDVSPSPSAPLANSPIPRNSHSSVPLVVGCVGGAFFLLLVATGLYFFTSKAGKTVNPWRTGLSGQLQKVFVTGIPVLKRSEIEAACEDFSNVIGSCPIGKLFKGTLSSGVEIAVASFATTTAKDWKDSTEIHFRKKIEMLSKINHKNFANLLGYCEEKEPFTRILIFEYAPNGSLFEHLHYKESEHLDWGMRLRIAMGLAYCLDHMHQLNPPIAHTNLVSSSLQLTEDYAVKVSDFSFGSSETETNINNNTVIDTHISALNPEDNIYSFGLLLFEMITGKLIESVNKPDSVDSSLVDFLRGETLAKMVDPTLESYDAKIENIGEVIKSCLRTDPKERPTMQEVTGWLREITGLSPNDATPKLSPLWWAELEVLSTA

SEQ ID NO: 41788 - DNA, 1952 bp, Arabidopsis thaliana
  misc_feature (1)..(1952): Ceres Seq. ID no. 12330636
  misc_feature: MA Experiment ID: 108434 Result: Up-regulated in Transcription
  misc_feature: MA Experiment 108434 PARAMETER Experiment Name: At_Root_Tips_cDNA_P Parameter: Tissue Value: Root Tips
  misc_feature: MA Experiment ID: 108461 Result: Up-regulated in Transcription
  misc_feature: MA Experiment 108461 PARAMETER Experiment Name: At_Germinating_Seeds_cDNA_P Parameter: Age (day) Value: 1 vs. 0
  misc_feature: MA Experiment 108461 PARAMETER Experiment Name: At_Germinating_Seeds_cDNA_P Parameter: Tissue Value: Germinating Seeds
  misc_feature: MA Experiment ID: 108462 Result: Up-regulated in Transcription
  misc_feature: MA Experiment 108462 PARAMETER Experiment Name: At_Germinating_Seeds_cDNA_P Parameter: Age (day) Value: 2 vs. 0
  misc_feature: MA Experiment 108462 PARAMETER Experiment Name: At_Germinating_Seeds_cDNA_P Parameter: Tissue Value: Germinating Seeds
  misc_feature: MA Experiment ID: 108463 Result: Up-regulated in Transcription
  misc_feature: MA Experiment 108463 PARAMETER Experiment Name: At_Germinating_Seeds_cDNA_P Parameter: Age (day) Value: 3 vs. 0
  misc_feature: MA Experiment 108463 PARAMETER Experiment Name: At_Germinating_Seeds_cDNA_P Parameter: Tissue Value: Germinating Seeds
  misc_feature: MA Experiment ID: 108464 Result: Up-regulated in Transcription
  misc_feature: MA Experiment 108464 PARAMETER Experiment Name: At_Germinating_Seeds_cDNA_P Parameter: Age (day) Value: 4 vs. 0
  misc_feature: MA Experiment 108464 PARAMETER Experiment Name: At_Germinating_Seeds_cDNA_P Parameter: Tissue Value: Germinating Seeds
  misc_feature: MA Experiment ID: 108595 Result: Down-regulated in Transcription
  misc_feature: MA Experiment 108595 PARAMETER Experiment Name: At_Ler-pi_Ovule_cDNA_P Parameter: Plant Line Value: null
  misc_feature: MA Experiment ID: 108668 Result: Down-regulated in Transcription
  misc_feature: MA Experiment 108668 PARAMETER Experiment Name: At_2mM_SA_cDNA_P Parameter: Plant Line Value: WS
  misc_feature: MA Experiment 108668 PARAMETER Experiment Name: At_2mM_SA_cDNA_P Parameter: Timepoint (hr) Value: 6
  misc_feature: MA Experiment 108668 PARAMETER Experiment Name: At_2mM_SA_cDNA_P Parameter: Treatment Value: 2mM SA vs. No Treatment
  misc_feature: MA Experiment ID: 20000069 Result: Down-regulated in Transcription
  misc_feature: MA Experiment 20000069 PARAMETER Experiment Name: At_100uM_ABA_Mutants_cDNA_P Parameter: Plant Line Value: CS23
  misc_feature: MA Experiment 20000069 PARAMETER Experiment Name: At_100uM_ABA_Mutants_cDNA_P Parameter: Timepoint (hr) Value: 6
  misc_feature: MA Experiment 20000069 PARAMETER Experiment Name: At_100uM_ABA_Mutants_cDNA_P Parameter: Tissue Value: Aerial
  misc_feature: MA Experiment 20000069 PARAMETER Experiment Name: At_100uM_ABA_Mutants_cDNA_P Parameter: Treatment Value: 100uM ABA vs. No Treatment
  misc_feature: MA Experiment ID: 20000072 Result: Down-regulated in Transcription
  misc_feature: MA Experiment 20000072 PARAMETER Experiment Name: At_100uM_ABA_Mutants_cDNA_P Parameter: Plant Line Value: CS8105
  misc_feature: MA Experiment 20000072 PARAMETER Experiment Name: At_100uM_ABA_Mutants_cDNA_P Parameter: Timepoint (hr) Value: 6
  misc_feature: MA Experiment 20000072 PARAMETER Experiment Name: At_100uM_ABA_Mutants_cDNA_P Parameter: Tissue Value: Aerial
  misc_feature: MA Experiment 20000072 PARAMETER Experiment Name: At_100uM_ABA_Mutants_cDNA_P Parameter: Treatment Value: 100uM ABA vs. No Treatment
  misc_feature: MA Experiment ID: 20000086 Result: Down-regulated in Transcription
  misc_feature: MA Experiment 20000086 PARAMETER Experiment Name: At_100uM_ABA_Mutants_cDNA_P Parameter: Plant Line Value: CS22
  misc_feature: MA Experiment 20000086 PARAMETER Experiment Name: At_100uM_ABA_Mutants_cDNA_P Parameter: Timepoint (hr) Value: 6
  misc_feature: MA Experiment 20000086 PARAMETER Experiment Name: At_100uM_ABA_Mutants_cDNA_P Parameter: Tissue Value: Aerial
  misc_feature: MA Experiment 20000086 PARAMETER Experiment Name: At_100uM_ABA_Mutants_cDNA_P Parameter: Treatment Value: 100uM ABA vs. No Treatment
  misc_feature: MA Experiment ID: 20000087 Result: Down-regulated in Transcription
  misc_feature: MA Experiment 20000087 PARAMETER Experiment Name: At_100uM_ABA_Mutants_cDNA_P Parameter: Plant Line Value: WS
  misc_feature: MA Experiment 20000087 PARAMETER Experiment Name: At_100uM_ABA_Mutants_cDNA_P Parameter: Timepoint (hr) Value: 6
  misc_feature: MA Experiment 20000087 PARAMETER Experiment Name: At_100uM_ABA_Mutants_cDNA_P Parameter: Tissue Value: Aerial
  misc_feature: MA Experiment 20000087 PARAMETER Experiment Name: At_100uM_ABA_Mutants_cDNA_P Parameter: Treatment Value: 100uM ABA vs. No Treatment
  misc_feature: MA Experiment ID: 20000090 Result: Down-regulated in Transcription
  misc_feature: MA Experiment ID: 20000111 Result: Up-regulated in Transcription
  misc_feature: MA Experiment 20000111 PARAMETER Experiment Name: At_42deg_Heat_cDNA_P Parameter: Temperature (deg C) Value: 42 vs. 22
  misc_feature: MA Experiment 20000111 PARAMETER Experiment Name: At_42deg_Heat_cDNA_P Parameter: Timepoint (hr) Value: 6
  misc_feature: MA Experiment 20000111 PARAMETER Experiment Name: At_42deg_Heat_cDNA_P Parameter: Tissue Value: Aerial
  misc_feature: MA Experiment ID: 20000173 Result: Up-regulated in Transcription
  misc_feature: MA Experiment 20000173 PARAMETER Experiment Name: At_42deg_Heat_P Parameter: Age (day) Value: 14
  misc_feature: MA Experiment 20000173 PARAMETER Experiment Name: At_42deg_Heat_P Parameter: Organism Value: A. thaliana
  misc_feature: MA Experiment 20000173 PARAMETER Experiment Name: At_42deg_Heat_P Parameter: Plant Line Value: WS
  misc_feature: MA Experiment 20000173 PARAMETER Experiment Name: At_42deg_Heat_P Parameter: Temperature (deg C) Value: 42 vs. 22
  misc_feature: MA Experiment 20000173 PARAMETER Experiment Name: At_42deg_Heat_P Parameter: Timepoint (hr) Value: 6
  misc_feature: MA Experiment 20000173 PARAMETER Experiment Name: At_42deg_Heat_P Parameter: Tissue Value: Aerial
  misc_feature: MA Experiment ID: 20000179 Result: Up-regulated in Transcription
  misc_feature: MA Experiment 20000179 PARAMETER Experiment Name: At_Germinating_Seeds_P Parameter: Age (hr) Value: 6 vs. 0
  misc_feature: MA Experiment 20000179 PARAMETER Experiment Name: At_Germinating_Seeds_P Parameter: Tissue Value: Germinating Seeds
  misc_feature: MA Experiment ID: 20000227 Result: Up-regulated in Transcription
  misc_feature: MA Experiment 20000227 PARAMETER Experiment Name: At_Root-Tips-vs-Tops_P Parameter: Tissue Value: Root Tips vs. Root Tops
  misc_feature: MA Experiment ID: 20000437 Result: Down-regulated in Transcription
  misc_feature: MA Experiment 20000437 PARAMETER Experiment Name: At_Drought_P Parameter: Age (day) Value: 8
  misc_feature: MA Experiment 20000437 PARAMETER Experiment Name: At_Drought_P Parameter: Organism Value: A. thaliana
  misc_feature: MA Experiment 20000437 PARAMETER Experiment Name: At_Drought_P Parameter: Plant Line Value: WS
  misc_feature: MA Experiment 20000437 PARAMETER Experiment Name: At_Drought_P Parameter: Timepoint (hr) Value: 24
  misc_feature: MA Experiment 20000437 PARAMETER Experiment Name: At_Drought_P Parameter: Tissue Value: Whole Plant
  misc_feature: MA Experiment 20000437 PARAMETER Experiment Name: At_Drought_P Parameter: Treatment Value: Drought vs. No Drought
  misc_feature: MA Experiment ID: 20001905 Result: Down-regulated in Transcription
  misc_feature: MA Experiment 20001905 PARAMETER Experiment Name: At_Drought_Reproduction_P Parameter: Age (day) Value: 40
  misc_feature: MA Experiment 20001905 PARAMETER Experiment Name: At_Drought_Reproduction_P Parameter: Organism Value: A. thaliana
  misc_feature: MA Experiment 20001905 PARAMETER Experiment Name: At_Drought_Reproduction_P Parameter: Plant Line Value: WS
  misc_feature: MA Experiment 20001905 PARAMETER Experiment Name: At_Drought_Reproduction_P Parameter: Timepoint (day) Value: 10
  misc_feature: MA Experiment 20001905 PARAMETER Experiment Name: At_Drought_Reproduction_P Parameter: Tissue Value: Rosettes
  misc_feature: MA Experiment 20001905 PARAMETER Experiment Name: At_Drought_Reproduction_P Parameter: Treatment Value: Drought vs. No Drought
aaaggagtcttttttatttgttatctctcatctctctctctctttctctctgagctttgctttttatcaaacaagcatcatcatcacatccacttccttcttcttcctttctctgtctgtctcttaacccaaatgtggactctttgagccgttattagatctctgccgcttcaataatggggagcttatcttctgaggaagacgacgaagtctcttccgagagatgcggaagttacagtcccagcgccgacattagcgagtccgagagttccagcagcttctcctgccaccgcttcgacggcgagggtgcctctagctccatcccttcttcccctcgagttgtcgctggtagaggattttacttcccggccccagtcatgcttccggtgatcggcggcaaagatgtggtctgggatgacaaacaaccagacaacgatttatccgaaattgagatgatgaaggagagatttgctaagctacttctcggggaagacatgtctggtggaggtaaaggggtttgtacggcgcttgctatctccaacgccatcaccaatctctctgcgactgtgtttggcgaactatggaggcttgagcctcttgctcctcagaagaaggccatgtggcgcagagaacttgagtggctgctctgtgttagcgattctatcgttgagctcattccttccattcagcagttccctggaggcggaacttatgagatcatggagacccgtccacgttctgatctctatgccaatctccctgctctcaagaagctcgatgctatgttgatcgatatgcttgacgctttctccgatactgagttctggtacactgatcgcggcatagttcttggtgattgtgacaaggattcttacaattctccagcttccgttaggcaggaggacaagtggtggctgccttgccctaaggttccgcctaacggtttgtcagaagaggccaggaagaaactgcagcagtgtcgggactttgctaaccagattctcaaggctgcattggcaattaacagtggcgtgcttgccgaaatggagattcccgacccttacttggagactttgcccaagagcgggaaggaatgtcttggagagatcatctaccagtacttaactgcaaacaagttctctcccgaatgcctcctggactgtcttgatctctcatcggaacatcagactcttgaaatcgccaaccggattgaggcggctgtgcatgtttggagacaaaagaatgggaggaggcacaagaagcaggcgaaactaaagctgtcttcttggggtggcaaggttaaaggccttgttaatgacaacgaaagaaatgatttccttgtgcagagagccgagaccctcttgcagagtctcaggatccgtttcccgggacttccccagacaacgctggacatgaacaagattcagtacaacaaggatgtagggcaatcaattctggagagttactctagggtgatggagagcatggccttcaacatcacggccagaatagatgatgtgctttatgttgatgatgccatgagaagatccatctctgtcacagaatcgctatccctattcagcatcaatggactcaaccctcaaaaagcgttctctgtgcagagctctccgcacggttcaccatttgcaacgcctgccctaagtgtagcatcaagaagcccgaggagagcaccgccgctgtattcagtgaagaggaatgggacgagagagaagggaatagtgggagaaacagagaaagcatggtcgtatgcagggaatctgagttcaagaagagtaacgggagtgacgccggaaagagattaagattgaaaatagaagaatgtaaatcaatggttgtagagactgtagttgtttcttgtttgtctgactacgaagacgaatgtggtaatagcaacaagaatgttatcttatgtggagttttgaaatgttgtt

SEQ ID NO: 41789 - protein, 548 aa, Arabidopsis thaliana
  peptide (1)..(548): Ceres Seq. ID no. 12330637
  misc_feature (13)..(459): Pfam Name: Domain of unknown function (DUF315) Pfam Description: Domain of unknown function (DUF315)
  misc_feature (33)..(477): Homolog of NCBI NO: 34901740 NR Description: P0434A03.36 [Oryza sativa (japonica
  misc_feature (33)..(477): Homolog of NCBI NO: 33146611 NR Description: hypothetical protein [Oryza sativa (japonica
  misc_feature (90)..(458): Homolog of NCBI NO: 15236138 NR Description: putative protein; protein id: At4g00460.1
  misc_feature (82)..(517): Homolog of NCBI NO: 15228166 NR Description: putative protein; protein id: At3g55660.1
  misc_feature (6)..(457): Homolog of NCBI NO: 37536670 NR Description: hypothetical protein [Oryza sativa (japonica
  misc_feature (84)..(521): Homolog of NCBI NO: 15239292 NR Description: putative protein; protein id: At5g05940.1
  misc_feature (85)..(507): Homolog of NCBI NO: 15241663 NR Description: putative protein; protein id: At5g02010.1
  misc_feature (5)..(514): Homolog of NCBI NO: 34908302 NR Description: P0005H10.23 [Oryza sativa (japonica
  misc_feature (1)..(547): Homolog of NCBI NO: 15810309 NR Description: unknown protein [Arabidopsis thaliana]
  misc_feature (1)..(548): Homolog of NCBI NO: 15233845 NR Description: putative protein
MGSLSSEEDDEVSSERCGSYSPSADISESESSSSFSCHRFDGEGASSSIPSSPRVVAGRGFYFPAPVMLPVIGGKDVVWDDKQPDNDLSEIEMMKERFAKLLLGEDMSGGGKGVCTALAISNAITNLSATVFGELWRLEPLAPQKKAMWRRELEWLLCVSDSIVELIPSIQQFPGGGTYEIMETRPRSDLYANLPALKKLDAMLIDMLDAFSDTEFWYTDRGIVLGDCDKDSYNSPASVRQEDKWWLPCPKVPPNGLSEEARKKLQQCRDFANQILKAALAINSGVLAEMEIPDPYLETLPKSGKECLGEIIYQYLTANKFSPECLLDCLDLSSEHQTLEIANRIEAAVHVWRQKNGRRHKKQAKLKLSSWGGKVKGLVNDNERNDFLVQRAETLLQSLRIRFPGLPQTTLDMNKIQYNKDVGQSILESYSRVMESMAFNITARIDDVLYVDDAMRRSISVTESLSLFSINGLNPQKAFSVQSSPHGSPFATPALSVASRSPRRAPPLYSVKRNGTREKGIVGETEKAWSYAGNLSSRRVTGVTPERD

SEQ ID NO: 41790 - protein, 481 aa, Arabidopsis thaliana
  peptide (1)..(481): Ceres Seq. ID no. 12330638
  misc_feature (1)..(392): Pfam Name: Domain of unknown function (DUF315) Pfam Description: Domain of unknown function (DUF315)
  misc_feature (1)..(410): Homolog of NCBI NO: 34901740 NR Description: P0434A03.36 [Oryza sativa (japonica
  misc_feature (1)..(410): Homolog of NCBI NO: 33146611 NR Description: hypothetical protein [Oryza sativa (japonica
  misc_feature (23)..(391): Homolog of NCBI NO: 15236138 NR Description: putative protein; protein id: At4g00460.1
  misc_feature (15)..(450): Homolog of NCBI NO: 15228166 NR Description: putative protein; protein id: At3g55660.1
  misc_feature (1)..(390): Homolog of NCBI NO: 37536670 NR Description: hypothetical protein [Oryza sativa (japonica
  misc_feature (17)..(454): Homolog of NCBI NO: 15239292 NR Description: putative protein; protein id: At5g05940.1
  misc_feature (18)..(440): Homolog of NCBI NO: 15241663 NR Description: putative protein; protein id: At5g02010.1
  misc_feature (1)..(447): Homolog of NCBI NO: 34908302 NR Description: P0005H10.23 [Oryza sativa (japonica
  misc_feature (1)..(480): Homolog of NCBI NO: 15810309 NR Description: unknown protein [Arabidopsis thaliana]
  misc_feature (1)..(481): Homolog of NCBI NO: 15233845 NR Description: putative protein
MLPVIGGKDVVWDDKQPDNDLSEIEMMKERFAKLLLGEDMSGGGKGVCTALAISNAITNLSATVFGELWRLEPLAPQKKAMWRRELEWLLCVSDSIVELIPSIQQFPGGGTYEIMETRPRSDLYANLPALKKLDAMLIDMLDAFSDTEFWYTDRGIVLGDCDKDSYNSPASVRQEDKWWLPCPKVPPNGLSEEARKKLQQCRDFANQILKAALAINSGVLAEMEIPDPYLETLPKSGKECLGEIIYQYLTANKFSPECLLDCLDLSSEHQTLEIANRIEAAVHVWRQKNGRRHKKQAKLKLSSWGGKVKGLVNDNERNDFLVQRAETLLQSLRIRFPGLPQTTLDMNKIQYNKDVGQSILESYSRVMESMAFNITARIDDVLYVDDAMRRSISVTESLSLFSINGLNPQKAFSVQSSPHGSPFATPALSVASRSPRRAPPLYSVKRNGTREKGIVGETEKAWSYAGNLSSRRVTGVTPERD

SEQ ID NO: 41791 - protein, 456 aa, Arabidopsis thaliana
  peptide (1)..(456): Ceres Seq. ID no. 12330639
  misc_feature (1)..(367): Pfam Name: Domain of unknown function (DUF315) Pfam Description: Domain of unknown function (DUF315)
  misc_feature (1)..(385): Homolog of NCBI NO: 34901740 NR Description: P0434A03.36 [Oryza sativa (japonica
  misc_feature (1)..(385): Homolog of NCBI NO: 33146611 NR Description: hypothetical protein [Oryza sativa (japonica
  misc_feature (1)..(366): Homolog of NCBI NO: 15236138 NR Description: putative protein; protein id: At4g00460.1
  misc_feature (1)..(425): Homolog of NCBI NO: 15228166 NR Description: putative protein; protein id: At3g55660.1
  misc_feature (1)..(365): Homolog of NCBI NO: 37536670 NR Description: hypothetical protein [Oryza sativa (japonica
  misc_feature (1)..(429): Homolog of NCBI NO: 15239292 NR Description: putative protein; protein id: At5g05940.1
  misc_feature (1)..(415): Homolog of NCBI NO: 15241663 NR Description: putative protein; protein id: At5g02010.1
  misc_feature (1)..(422): Homolog of NCBI NO: 34908302 NR Description: P0005H10.23 [Oryza sativa (japonica
  misc_feature (1)..(455): Homolog of NCBI NO: 15810309 NR Description: unknown protein [Arabidopsis thaliana]
  misc_feature (1)..(456): Homolog of NCBI NO: 15233845 NR Description: putative protein
MMKERFAKLLLGEDMSGGGKGVCTALAISNAITNLSATVFGELWRLEPLAPQKKAMWRRELEWLLCVSDSIVELIPSIQQFPGGGTYEIMETRPRSDLYANLPALKKLDAMLIDMLDAFSDTEFWYTDRGIVLGDCDKDSYNSPASVRQEDKWWLPCPKVPPNGLSEEARKKLQQCRDFANQILKAALAINSGVLAEMEIPDPYLETLPKSGKECLGEIIYQYLTANKFSPECLLDCLDLSSEHQTLEIANRIEAAVHVWRQKNGRRHKKQAKLKLSSWGGKVKGLVNDNERNDFLVQRAETLLQSLRIRFPGLPQTTLDMNKIQYNKDVGQSILESYSRVMESMAFNITARIDDVLYVDDAMRRSISVTESLSLFSINGLNPQKAFSVQSSPHGSPFATPALSVASRSPRRAPPLYSVKRNGTREKGIVGETEKAWSYAGNLSSRRVTGVTPERD

SEQ ID NO: 41792 - DNA, 1885 bp, Arabidopsis thaliana
  misc_feature (1)..(1885): Ceres Seq. ID no. 13497214
  misc_feature: MA Experiment ID: 108434 Result: Down-regulated in Transcription
  misc_feature: MA Experiment 108434 PARAMETER Experiment Name: At_Root_Tips_cDNA_P Parameter: Tissue Value: Root Tips
  misc_feature: MA Experiment ID: 108463 Result: Up-regulated in Transcription
  misc_feature: MA Experiment 108463 PARAMETER Experiment Name: At_Germinating_Seeds_cDNA_P Parameter: Age (day) Value: 3 vs. 0
  misc_feature: MA Experiment 108463 PARAMETER Experiment Name: At_Germinating_Seeds_cDNA_P Parameter: Tissue Value: Germinating Seeds
  misc_feature: MA Experiment ID: 108464 Result: Up-regulated in Transcription
  misc_feature: MA Experiment 108464 PARAMETER Experiment Name: At_Germinating_Seeds_cDNA_P Parameter: Age (day) Value: 4 vs. 0
  misc_feature: MA Experiment 108464 PARAMETER Experiment Name: At_Germinating_Seeds_cDNA_P Parameter: Tissue Value: Germinating Seeds
  misc_feature: MA Experiment ID: 108489 Result: Up-regulated in Transcription
  misc_feature: MA Experiment ID: 108573 Result: Up-regulated in Transcription
  misc_feature: MA Experiment 108573 PARAMETER Experiment Name: At_Drought_cDNA_P Parameter: Timepoint (hr) Value: 6
  misc_feature: MA Experiment 108573 PARAMETER Experiment Name: At_Drought_cDNA_P Parameter: Tissue Value: Aerial
  misc_feature: MA Experiment 108573 PARAMETER Experiment Name: At_Drought_cDNA_P Parameter: Treatment Value: Drought vs. No Drought
  misc_feature: MA Experiment ID: 108576 Result: Down-regulated in Transcription
  misc_feature: MA Experiment 108576 PARAMETER Experiment Name: At_42deg_Heat_cDNA_P Parameter: Temperature (deg C) Value: 42 vs. 22
  misc_feature: MA Experiment 108576 PARAMETER Experiment Name: At_42deg_Heat_cDNA_P Parameter: Timepoint (hr) Value: 1
  misc_feature: MA Experiment 108576 PARAMETER Experiment Name: At_42deg_Heat_cDNA_P Parameter: Tissue Value: Aerial
  misc_feature: MA Experiment ID: 108595 Result: Down-regulated in Transcription
  misc_feature: MA Experiment 108595 PARAMETER Experiment Name: At_Ler-pi_Ovule_cDNA_P Parameter: Plant Line Value: null
  misc_feature: MA Experiment ID: 108608 Result: Down-regulated in Transcription
  misc_feature: MA Experiment 108608 PARAMETER Experiment Name: At_100uM_ABA_cDNA_P Parameter: Timepoint (hr) Value: 1
  misc_feature: MA Experiment 108608 PARAMETER Experiment Name: At_100uM_ABA_cDNA_P Parameter: Tissue Value: Aerial
  misc_feature: MA Experiment 108608 PARAMETER Experiment Name: At_100uM_ABA_cDNA_P Parameter: Treatment Value: 100uM ABA vs. No Treatment
  misc_feature: MA Experiment ID: 20000069 Result: Down-regulated in Transcription
  misc_feature: MA Experiment 20000069 PARAMETER Experiment Name: At_100uM_ABA_Mutants_cDNA_P Parameter: Plant Line Value: CS23
  misc_feature: MA Experiment 20000069 PARAMETER Experiment Name: At_100uM_ABA_Mutants_cDNA_P Parameter: Timepoint (hr) Value: 6
  misc_feature: MA Experiment 20000069 PARAMETER Experiment Name: At_100uM_ABA_Mutants_cDNA_P Parameter: Tissue Value: Aerial
  misc_feature: MA Experiment 20000069 PARAMETER Experiment Name: At_100uM_ABA_Mutants_cDNA_P Parameter: Treatment Value: 100uM ABA vs. No Treatment
  misc_feature: MA Experiment ID: 20000070 Result: Down-regulated in Transcription
  misc_feature: MA Experiment 20000070 PARAMETER Experiment Name: At_100uM_ABA_Mutants_cDNA_P Parameter: Plant Line Value: CS24
  misc_feature: MA Experiment 20000070 PARAMETER Experiment Name: At_100uM_ABA_Mutants_cDNA_P Parameter: Timepoint (hr) Value: 6
  misc_feature: MA Experiment 20000070 PARAMETER Experiment Name: At_100uM_ABA_Mutants_cDNA_P Parameter: Tissue Value: Aerial
  misc_feature: MA Experiment 20000070 PARAMETER Experiment Name: At_100uM_ABA_Mutants_cDNA_P Parameter: Treatment Value: 100uM ABA vs. No Treatment
  misc_feature: MA Experiment ID: 20000071 Result: Down-regulated in Transcription
  misc_feature: MA Experiment 20000071 PARAMETER Experiment Name: At_100uM_ABA_Mutants_cDNA_P Parameter: Plant Line Value: CS8104
  misc_feature: MA Experiment 20000071 PARAMETER Experiment Name: At_100uM_ABA_Mutants_cDNA_P Parameter: Timepoint (hr) Value: 6
  misc_feature: MA Experiment 20000071 PARAMETER Experiment Name: At_100uM_ABA_Mutants_cDNA_P Parameter: Tissue Value: Aerial
  misc_feature: MA Experiment 20000071 PARAMETER Experiment Name: At_100uM_ABA_Mutants_cDNA_P Parameter: Treatment Value: 100uM ABA vs. No Treatment
  misc_feature: MA Experiment ID: 20000072 Result: Down-regulated in Transcription
  misc_feature: MA Experiment 20000072 PARAMETER Experiment Name: At_100uM_ABA_Mutants_cDNA_P Parameter: Plant Line Value: CS8105
  misc_feature: MA Experiment 20000072 PARAMETER Experiment Name: At_100uM_ABA_Mutants_cDNA_P Parameter: Timepoint (hr) Value: 6
  misc_feature: MA Experiment 20000072 PARAMETER Experiment Name: At_100uM_ABA_Mutants_cDNA_P Parameter: Tissue Value: Aerial
  misc_feature: MA Experiment 20000072 PARAMETER Experiment Name: At_100uM_ABA_Mutants_cDNA_P Parameter: Treatment Value: 100uM ABA vs. No Treatment
  misc_feature: MA Experiment ID: 20000086 Result: Down-regulated in Transcription
  misc_feature: MA Experiment 20000086 PARAMETER Experiment Name: At_100uM_ABA_Mutants_cDNA_P Parameter: Plant Line Value: CS22
  misc_feature: MA Experiment 20000086 PARAMETER Experiment Name: At_100uM_ABA_Mutants_cDNA_P Parameter: Timepoint (hr) Value: 6
  misc_feature: MA Experiment 20000086 PARAMETER Experiment Name: At_100uM_ABA_Mutants_cDNA_P Parameter: Tissue Value: Aerial
  misc_feature: MA Experiment 20000086 PARAMETER Experiment Name: At_100uM_ABA_Mutants_cDNA_P Parameter: Treatment Value: 100uM ABA vs. No Treatment
  misc_feature: MA Experiment ID: 20000087 Result: Down-regulated in Transcription
  misc_feature: MA Experiment 20000087 PARAMETER Experiment Name: At_100uM_ABA_Mutants_cDNA_P Parameter: Plant Line Value: WS
  misc_feature: MA Experiment 20000087 PARAMETER Experiment Name: At_100uM_ABA_Mutants_cDNA_P Parameter: Timepoint (hr) Value: 6
  misc_feature: MA Experiment 20000087 PARAMETER Experiment Name: At_100uM_ABA_Mutants_cDNA_P Parameter: Tissue Value: Aerial
  misc_feature: MA Experiment 20000087 PARAMETER Experiment Name: At_100uM_ABA_Mutants_cDNA_P Parameter: Treatment Value: 100uM ABA vs. No Treatment
  misc_feature: MA Experiment ID: 20000088 Result: Down-regulated in Transcription
  misc_feature: MA Experiment 20000088 PARAMETER Experiment Name: At_100uM_ABA_Mutants_cDNA_P Parameter: Plant Line Value: Landsberg
  misc_feature: MA Experiment 20000088 PARAMETER Experiment Name: At_100uM_ABA_Mutants_cDNA_P Parameter: Timepoint (hr) Value: 6
  misc_feature: MA Experiment 20000088 PARAMETER Experiment Name: At_100uM_ABA_Mutants_cDNA_P Parameter: Tissue Value: Aerial
  misc_feature: MA Experiment 20000088 PARAMETER Experiment Name: At_100uM_ABA_Mutants_cDNA_P Parameter: Treatment Value: 100uM ABA vs. No Treatment
  misc_feature: MA Experiment ID: 20000089 Result: Down-regulated in Transcription
  misc_feature: MA Experiment ID: 20000090 Result: Down-regulated in Transcription
  misc_feature: MA Experiment ID: 20000117 Result: Down-regulated in Transcription
  misc_feature: MA Experiment 20000117 PARAMETER Experiment Name: At_100uM_ABA_Mutants_cDNA_P Parameter: Plant Line Value: Columbia
  misc_feature: MA Experiment 20000117 PARAMETER Experiment Name: At_100uM_ABA_Mutants_cDNA_P Parameter: Timepoint (hr) Value: 6
  misc_feature: MA Experiment 20000117 PARAMETER Experiment Name: At_100uM_ABA_Mutants_cDNA_P Parameter: Tissue Value: Aerial
  misc_feature: MA Experiment 20000117 PARAMETER Experiment Name: At_100uM_ABA_Mutants_cDNA_P Parameter: Treatment Value: 100uM ABA vs. No Treatment
  misc_feature: MA Experiment ID: 20000166 Result: Down-regulated in Transcription
  misc_feature: MA Experiment 20000166 PARAMETER Experiment Name: At_100uM_ABA_P Parameter: Age (day) Value: 14
  misc_feature: MA Experiment 20000166 PARAMETER Experiment Name: At_100uM_ABA_P Parameter: Organism Value: A. thaliana
  misc_feature: MA Experiment 20000166 PARAMETER Experiment Name: At_100uM_ABA_P Parameter: Plant Line Value: WS
  misc_feature: MA Experiment 20000166 PARAMETER Experiment Name: At_100uM_ABA_P Parameter: Timepoint (hr) Value: 1
  misc_feature: MA Experiment 20000166 PARAMETER Experiment Name: At_100uM_ABA_P Parameter: Tissue Value: Aerial
  misc_feature: MA Experiment 20000166 PARAMETER Experiment Name: At_100uM_ABA_P Parameter: Treatment Value: 100uM ABA vs. No Treatment
  misc_feature: MA Experiment ID: 20000224 Result: Up-regulated in Transcription
  misc_feature: MA Experiment ID: 20000234 Result: Down-regulated in Transcription
  misc_feature: MA Experiment 20000234 PARAMETER Experiment Name: At_Siliques_P Parameter: Age (day) Value: 21
  misc_feature: MA Experiment 20000234 PARAMETER Experiment Name: At_Siliques_P Parameter: Organism Value: A. thaliana
  misc_feature: MA Experiment 20000234 PARAMETER Experiment Name: At_Siliques_P Parameter: Plant Line Value: WS
  misc_feature: MA Experiment 20000234 PARAMETER Experiment Name: At_Siliques_P Parameter: Tissue Value: Less Than 5mm Siliques vs. Whole Plant
  misc_feature: MA Experiment ID: 20000235 Result: Down-regulated in Transcription
  misc_feature: MA Experiment 20000235 PARAMETER Experiment Name: At_Siliques_P Parameter: Age (day) Value: 21
  misc_feature: MA Experiment 20000235 PARAMETER Experiment Name: At_Siliques_P Parameter: Organism Value: A. thaliana
  misc_feature: MA Experiment 20000235 PARAMETER Experiment Name: At_Siliques_P Parameter: Plant Line Value: WS
  misc_feature: MA Experiment 20000235 PARAMETER Experiment Name: At_Siliques_P Parameter: Tissue Value: 5-10mm Siliques vs. Whole Plant
  misc_feature: MA Experiment ID: 20000264 Result: Down-regulated in Transcription
  misc_feature: MA Experiment 20000264 PARAMETER Experiment Name: At_Open_Flower_P Parameter: Age (day) Value: 21
  misc_feature: MA Experiment 20000264 PARAMETER Experiment Name: At_Open_Flower_P Parameter: Plant Line Value: WS
  misc_feature: MA Experiment 20000264 PARAMETER Experiment Name: At_Open_Flower_P Parameter: Tissue Value: Open Flower vs. Whole Plant
  misc_feature: MA Experiment ID: 20000265 Result: Down-regulated in Transcription
  misc_feature: MA Experiment 20000265 PARAMETER Experiment Name: At_Open_Flower_P Parameter: Age (day) Value: 21
  misc_feature: MA Experiment 20000265 PARAMETER Experiment Name: At_Open_Flower_P Parameter: Plant Line Value: WS
  misc_feature: MA Experiment 20000265 PARAMETER Experiment Name: At_Open_Flower_P Parameter: Tissue Value: Closed Flower vs. Whole Plant
  misc_feature: MA Experiment ID: 20000286 Result: Down-regulated in Transcription
  misc_feature: MA Experiment 20000286 PARAMETER Experiment Name: At_Open_Flower_P Parameter: Age (day) Value: 21
  misc_feature: MA Experiment 20000286 PARAMETER Experiment Name: At_Open_Flower_P Parameter: Plant Line Value: WS
  misc_feature: MA Experiment 20000286 PARAMETER Experiment Name: At_Open_Flower_P Parameter: Tissue Value: Half Open vs. Whole Plant
  misc_feature: MA Experiment ID: 20000308 Result: Down-regulated in Transcription
  misc_feature: MA Experiment 20000308 PARAMETER Experiment Name: At_100mM_NaCl__P Parameter: Age (day) Value: 17
  misc_feature: MA Experiment 20000308 PARAMETER Experiment Name: At_100mM_NaCl__P Parameter: Organism Value: A. thaliana
  misc_feature: MA Experiment 20000308 PARAMETER Experiment Name: At_100mM_NaCl__P Parameter: Plant Line Value: WS
  misc_feature: MA Experiment 20000308 PARAMETER Experiment Name: At_100mM_NaCl__P Parameter: Timepoint (hr) Value: 72
  misc_feature: MA Experiment 20000308 PARAMETER Experiment Name: At_100mM_NaCl__P Parameter: Tissue Value: Whole Plant
  misc_feature: MA Experiment 20000308 PARAMETER Experiment Name: At_100mM_NaCl__P Parameter: Treatment Value: 100mM NaCl vs. No Treatment
  misc_feature: MA Experiment ID: 20000451 Result: Down-regulated in Transcription
  misc_feature: MA Experiment 20000451 PARAMETER Experiment Name: At_CS6879_Shoots-Roots_P Parameter: Age (day) Value: 14
  misc_feature: MA Experiment 20000451 PARAMETER Experiment Name: At_CS6879_Shoots-Roots_P Parameter: Organism Value: A. thaliana
  misc_feature: MA Experiment 20000451 PARAMETER Experiment Name: At_CS6879_Shoots-Roots_P Parameter: Plant Line Value: CS6879 vs. WS
  misc_feature: MA Experiment 20000451 PARAMETER Experiment Name: At_CS6879_Shoots-Roots_P Parameter: Tissue Value: Roots
  misc_feature: MA Experiment ID: 20000495 Result: Down-regulated in Transcription
  misc_feature: MA Experiment 20000495 PARAMETER Experiment Name: At_Guard_Cells_P Parameter: Harvest Date Value: 8/2/2002
  misc_feature: MA Experiment 20000495 PARAMETER Experiment Name: At_Guard_Cells_P Parameter: Organism Value: A. thaliana
  misc_feature: MA Experiment 20000495 PARAMETER Experiment Name: At_Guard_Cells_P Parameter: Tissue Value: Guard Cells vs. Leaves
  misc_feature: MA Experiment ID: 20000496 Result: Down-regulated in Transcription
  misc_feature: MA Experiment 20000496 PARAMETER Experiment Name: At_Guard_Cells_P Parameter: Harvest Date Value: 7/19/2002
  misc_feature: MA Experiment 20000496 PARAMETER Experiment Name: At_Guard_Cells_P Parameter: Organism Value: Canola
  misc_feature: MA Experiment 20000496 PARAMETER Experiment Name: At_Guard_Cells_P Parameter: Tissue Value: Guard Cells vs. Leaves
  misc_feature: MA Experiment ID: 20000527 Result: Up-regulated in Transcription
  misc_feature: MA Experiment 20000527 PARAMETER Experiment Name: At_10percent_PEG_P Parameter: Age (day) Value: 20
  misc_feature: MA Experiment 20000527 PARAMETER Experiment Name: At_10percent_PEG_P Parameter: Organism Value: A. thaliana
  misc_feature: MA Experiment 20000527 PARAMETER Experiment Name: At_10percent_PEG_P Parameter: Plant Line Value: WS
  misc_feature: MA Experiment 20000527 PARAMETER Experiment Name: At_10percent_PEG_P Parameter: Timepoint (day) Value: 20
  misc_feature: MA Experiment 20000527 PARAMETER Experiment Name: At_10percent_PEG_P Parameter: Tissue Value: Whole Plant
  misc_feature: MA Experiment 20000527 PARAMETER Experiment Name: At_10percent_PEG_P Parameter: Treatment Value: 10percent PEG vs. No Treatment
  misc_feature: MA Experiment ID: 20001450 Result: Up-regulated in Transcription
  misc_feature: MA Experiment 20001450 PARAMETER Experiment Name: At_Far-red-induction_P Parameter: Age (day) Value: 7
  misc_feature: MA Experiment 20001450 PARAMETER Experiment Name: At_Far-red-induction_P Parameter: Light Value: Far-red vs. White
  misc_feature: MA Experiment 20001450 PARAMETER Experiment Name: At_Far-red-induction_P Parameter: Organism Value: A. thaliana
  misc_feature: MA Experiment 20001450 PARAMETER Experiment Name: At_Far-red-induction_P Parameter: Plant Line Value: Columbia
  misc_feature: MA Experiment 20001450 PARAMETER Experiment Name: At_Far-red-induction_P Parameter: Timepoint (hr) Value: 8
  misc_feature: MA Experiment 20001450 PARAMETER Experiment Name: At_Far-red-induction_P Parameter: Tissue Value: Whole Plant
  misc_feature: MA Experiment ID: 20001451 Result: Up-regulated in Transcription
  misc_feature: MA Experiment 20001451 PARAMETER Experiment Name: At_Far-red-induction_P Parameter: Age (day) Value: 7
  misc_feature: MA Experiment 20001451 PARAMETER Experiment Name: At_Far-red-induction_P Parameter: Light Value: Far-red vs. White
  misc_feature: MA Experiment 20001451 PARAMETER Experiment Name: At_Far-red-induction_P Parameter: Organism Value: A. thaliana
  misc_feature: MA Experiment 20001451 PARAMETER Experiment Name: At_Far-red-induction_P Parameter: Plant Line Value: Columbia
  misc_feature: MA Experiment 20001451 PARAMETER Experiment Name: At_Far-red-induction_P Parameter: Timepoint (hr) Value: 24
  misc_feature: MA Experiment 20001451 PARAMETER Experiment Name: At_Far-red-induction_P Parameter: Tissue Value: Whole Plant
  misc_feature: MA Experiment ID: 20001459 Result: Up-regulated in Transcription
  misc_feature: MA Experiment 20001459 PARAMETER Experiment Name: At_50mM_NH4NO3_L-to-H_P Parameter: Age (day) Value: Undefined
  misc_feature: MA Experiment 20001459 PARAMETER Experiment Name: At_50mM_NH4NO3_L-to-H_P Parameter: Organism Value: Undefined
  misc_feature: MA Experiment 20001459 PARAMETER Experiment Name: At_50mM_NH4NO3_L-to-H_P Parameter: Plant Line Value: Undefined
  misc_feature: MA Experiment 20001459 PARAMETER Experiment Name: At_50mM_NH4NO3_L-to-H_P Parameter: Timepoint (hr) Value: 4
  misc_feature: MA Experiment 20001459 PARAMETER Experiment Name: At_50mM_NH4NO3_L-to-H_P Parameter: Tissue Value: Siliques
  misc_feature: MA Experiment 20001459 PARAMETER Experiment Name: At_50mM_NH4NO3_L-to-H_P Parameter: Treatment Value: 50mM NH4NO3 vs. 100mM Manitol
  misc_feature: MA Experiment ID: 20001555 Result: Down-regulated in Transcription
  misc_feature: MA Experiment 20001555 PARAMETER Experiment Name: At_Drought_Soil_Dry_P Parameter: Age (day) Value: 24
  misc_feature: MA Experiment 20001555 PARAMETER Experiment Name: At_Drought_Soil_Dry_P Parameter: Organism Value: A. thaliana
  misc_feature: MA Experiment 20001555 PARAMETER Experiment Name: At_Drought_Soil_Dry_P Parameter: Plant Line Value: WS
  misc_feature: MA Experiment 20001555 PARAMETER Experiment Name: At_Drought_Soil_Dry_P Parameter: Post Timepoint (hr) Value: None
  misc_feature: MA Experiment 20001555 PARAMETER Experiment Name: At_Drought_Soil_Dry_P Parameter: Post-Treatment Value: None
  misc_feature: MA Experiment 20001555 PARAMETER Experiment Name: At_Drought_Soil_Dry_P Parameter: Timepoint (day) Value: 10
  misc_feature: MA Experiment 20001555 PARAMETER Experiment Name: At_Drought_Soil_Dry_P Parameter: Treatment Value: Drought vs. No Drought
  misc_feature: MA Experiment ID: 20001556 Result: Down-regulated in Transcription
  misc_feature: MA Experiment 20001556 PARAMETER Experiment Name: At_Drought_Soil_Dry_P Parameter: Age (day) Value: 26
  misc_feature: MA Experiment 20001556 PARAMETER Experiment Name: At_Drought_Soil_Dry_P Parameter: Organism Value: A. thaliana
  misc_feature: MA Experiment 20001556 PARAMETER Experiment Name: At_Drought_Soil_Dry_P Parameter: Plant Line Value: WS
  misc_feature: MA Experiment 20001556 PARAMETER Experiment Name: At_Drought_Soil_Dry_P Parameter: Post Timepoint (hr) Value: None
  misc_feature: MA Experiment 20001556 PARAMETER Experiment Name: At_Drought_Soil_Dry_P Parameter: Post-Treatment Value: None
  misc_feature: MA Experiment 20001556 PARAMETER Experiment Name: At_Drought_Soil_Dry_P Parameter: Timepoint (day) Value: 12
  misc_feature: MA Experiment 20001556 PARAMETER Experiment Name: At_Drought_Soil_Dry_P Parameter: Treatment Value: Drought vs. No Drought
  misc_feature: MA Experiment ID: 20001557 Result: Down-regulated in Transcription
  misc_feature: MA Experiment 20001557 PARAMETER Experiment Name: At_Drought_Soil_Dry_P Parameter: Age (day) Value: 27
  misc_feature: MA Experiment 20001557 PARAMETER Experiment Name: At_Drought_Soil_Dry_P Parameter: Organism Value: A. thaliana
  misc_feature: MA Experiment 20001557 PARAMETER Experiment Name: At_Drought_Soil_Dry_P Parameter: Plant Line Value: WS
  misc_feature: MA Experiment 20001557 PARAMETER Experiment Name: At_Drought_Soil_Dry_P Parameter: Post Timepoint (hr) Value: 3
  misc_feature: MA Experiment 20001557 PARAMETER Experiment Name: At_Drought_Soil_Dry_P Parameter: Post-Treatment Value: Re-Water vs. No Drought
  misc_feature: MA Experiment 20001557 PARAMETER Experiment Name: At_Drought_Soil_Dry_P Parameter: Timepoint (day) Value: 13
  misc_feature: MA Experiment 20001557 PARAMETER Experiment Name: At_Drought_Soil_Dry_P Parameter: Treatment Value: Drought vs. No Drought
  misc_feature: MA Experiment ID: 20001558 Result: Down-regulated in Transcription
  misc_feature: MA Experiment 20001558 PARAMETER Experiment Name: At_Drought_Soil_Dry_P Parameter: Age (day) Value: 27
  misc_feature: MA Experiment 20001558 PARAMETER Experiment Name: At_Drought_Soil_Dry_P Parameter: Organism Value: A. thaliana
  misc_feature: MA Experiment 20001558 PARAMETER Experiment Name: At_Drought_Soil_Dry_P Parameter: Plant Line Value: WS
  misc_feature: MA Experiment 20001558 PARAMETER Experiment Name: At_Drought_Soil_Dry_P Parameter: Post Timepoint (hr) Value: 6
  misc_feature: MA Experiment 20001558 PARAMETER Experiment Name: At_Drought_Soil_Dry_P Parameter: Post-Treatment Value: Re-Water vs. No Drought
  misc_feature: MA Experiment 20001558 PARAMETER Experiment Name: At_Drought_Soil_Dry_P Parameter: Timepoint (day) Value: 13
  misc_feature: MA Experiment 20001558 PARAMETER Experiment Name: At_Drought_Soil_Dry_P Parameter: Treatment Value: Drought vs. No Drought
  misc_feature: MA Experiment ID: 20001560 Result: Down-regulated in Transcription
  misc_feature: MA Experiment 20001560 PARAMETER Experiment Name: At_Drought_Soil_Dry_P Parameter: Age (day) Value: 28
  misc_feature: MA Experiment 20001560 PARAMETER Experiment Name: At_Drought_Soil_Dry_P Parameter: Organism Value: A. thaliana
  misc_feature: MA Experiment 20001560 PARAMETER Experiment Name: At_Drought_Soil_Dry_P Parameter: Plant Line Value: WS
  misc_feature: MA Experiment 20001560 PARAMETER Experiment Name: At_Drought_Soil_Dry_P Parameter: Post Timepoint (hr) Value: None
  misc_feature: MA Experiment 20001560 PARAMETER Experiment Name: At_Drought_Soil_Dry_P Parameter: Post-Treatment Value: None
  misc_feature: MA Experiment 20001560 PARAMETER Experiment Name: At_Drought_Soil_Dry_P Parameter: Timepoint (day) Value: 14
  misc_feature: MA Experiment 20001560 PARAMETER Experiment Name: At_Drought_Soil_Dry_P Parameter: Treatment Value: Drought vs. No Drought
agaagaggaaacaaagagaagtagcgtcctctcttcaatttcaaccggcactttcttctcttcttcttcttcttcccaatcttcctcgtctctttacctacacctatatatatatatatatatatatctccttccctcacacacatacctgcacagctacaataatctacttcccctctttcaataacggaattaatagtaatctaatcggaagattcaagcgagaaatcgatttggttgtctgttaatttgttgggaaataaattgaaataggagattgattggatggtgagaaggcaagaggaggagaagaaggcggagaagggaatgcgtctggggaaatacgagctagggaggacgctcggcgagggtaatttcggtaaagttaaattcgctaaagataccgtctccggtcattccttcgccgttaaaatcatcgacaagtctcgtatcgccgatctcaacttctccttacagataaaaagagagatccggactctgaaaatgttgaaacatccccacattgttagattacatgaggtcttggctagcaaaacgaaaattaatatggtaatggaacttgttaccggaggagaattgttcgacagaattgtttccaacggaaaattaacagaaactgatggaagaaaaatgtttcagcagcttatcgatggaatcagctactgtcatagcaaaggtgttttccacagggatctcaagctagagaatgttcttcttgatgcaaagggacatataaagatcactgattttggcctcagtgctctgcctcagcattttagggatgacggattgttgcatacaacctgtggaagtcctaattacgttgcgcctgaggttttagctaacagaggctacgatggtgcagcatcagacatatggtcctgtggtgtaatcttgtatgtgattctaaccggatgtcttcctttcgacgacagaaaccttgcagttctttaccagaagatatgtaaaggagacccaccaataccaagatggttatccccgggtgcaagaaccatgattaagagaatgcttgatccaaatccagtcacgaggatcacagttgtgggtattaaagccagcgagtggttcaaacttgagtacattccttcaattcccgatgatgatgacgaagaagaagttgacacagacgatgatgctttctcaatccaagaactcggatcagaagaagggaagggcagtgattcaccgaccatcatcaatgcgtttcagttaatcggaatgtcttcctttcttgacctgtccggtttctttgaacaagagaatgtatcagagaggagaataagattcacttcaaatagctcagcaaaagatttactggagaaaatcgaaacagccgttacagaaatgggattcagtgtacaaaagaaacatgccaagttaagagtaaaccaggaggagagaacccagaaaggtcaagttggtttatcagtaacagctgaggttttcgagataaagccgtcactgaacgtggttgagctaagaaaatcttatggcgattcatgtttatatagacagttgtacgagagactattaaaagacgtgggcacatcctcgccggagcaagagatagtaacttaggtgttggtgttttcggctgaagagatatacatagctctaataatttatcatatggaacacaccatccatgttcatataatttattatcttaagtatatataaaaggagctcgatttatatgattagtgcaaatagtaattgcatttaagtataaaccgtggcgtagatctttcctcaagaattagagattttattcactacctttgtatttgtttttattattatttggtgtggcaaatctgcctactagcaaaaaagatcccat

SEQ ID NO: 41793 - protein, 444 aa, Arabidopsis thaliana
  peptide (1)..(444): Ceres Seq. ID no. 13497215
  misc_feature (20)..(275): Pfam Name: Protein kinase domain Pfam Description: Protein kinase domain
  misc_feature (20)..(275): Pfam Name: Protein kinase domain Pfam Description: Protein kinase domain
  misc_feature (15)..(440): Homolog of NCBI NO: 23237825 NR Description: putative serine/threonine kinase
  misc_feature (6)..(440): Homolog of NCBI NO: 34894358 NR Description: unnamed protein product [Oryza sativa (japonica
  misc_feature (13)..(425): Homolog of NCBI NO: 25387053 NR Description: hypothetical protein F11A17.18 [imported] -
  misc_feature (13)..(110): Homolog of NCBI NO: 8778506 NR Description: F21D18.2 [Arabidopsis thaliana]
  misc_feature (108)..(443): Homolog of NCBI NO: 8778506 NR Description: F21D18.2 [Arabidopsis thaliana]
  misc_feature (15)..(440): Homolog of NCBI NO: 23237825 NR Description: putative serine/threonine kinase
  misc_feature (13)..(425): Homolog of NCBI NO: 25387053 NR Description: hypothetical protein F11A17.18 [imported] -
  misc_feature (108)..(443): Homolog of NCBI NO: 8778506 NR Description: F21D18.2 [Arabidopsis thaliana]
  misc_feature (1)..(425): Homolog of NCBI NO: 9294138 NR Description: serine/threonine kinase [Arabidopsis thaliana]
  misc_feature (1)..(444): Homolog of NCBI NO: 11066952 NR Description: CBL-interacting protein kinase 1 [Arabidopsis
  misc_feature (1)..(444): Homolog of NCBI NO: 18401539 NR Description: CBL-interacting protein kinase 1 [Arabidopsis
  misc_feature (1)..(444): Homolog of NCBI NO: 20260556 NR Description: unknown protein [Arabidopsis thaliana]
  misc_feature (13)..(443): Homolog of NCBI NO: 15221136 NR Description: CBL-interacting protein kinase 17 [Arabidopsis
  misc_feature (13)..(110): Homolog of NCBI NO: 8778506 NR Description: F21D18.2 [Arabidopsis thaliana]
  misc_feature (6)..(440): Homolog of NCBI NO: 34894358 NR Description: unnamed protein product [Oryza sativa (japonica
  misc_feature (13)..(443): Homolog of NCBI NO: 15221136 NR Description: CBL-interacting protein kinase 17 [Arabidopsis
  misc_feature (1)..(444): Homolog of NCBI NO: 20260556 NR Description: unknown protein [Arabidopsis thaliana]
  misc_feature (1)..(444): Homolog of NCBI NO: 18401539 NR Description: CBL-interacting protein kinase 1 [Arabidopsis
  misc_feature (1)..(444): Homolog of NCBI NO: 11066952 NR Description: CBL-interacting protein kinase 1 [Arabidopsis
  misc_feature (1)..(425): Homolog of NCBI NO: 9294138 NR Description: serine/threonine kinase [Arabidopsis thaliana]
MVRRQEEEKKAEKGMRLGKYELGRTLGEGNFGKVKFAKDTVSGHSFAVKIIDKSRIADLNFSLQIKREIRTLKMLKHPHIVRLHEVLASKTKINMVMELVTGGELFDRIVSNGKLTETDGRKMFQQLIDGISYCHSKGVFHRDLKLENVLLDAKGHIKITDFGLSALPQHFRDDGLLHTTCGSPNYVAPEVLANRGYDGAASDIWSCGVILYVILTGCLPFDDRNLAVLYQKICKGDPPIPRWLSPGARTMIKRMLDPNPVTRITVVGIKASEWFKLEYIPSIPDDDDEEEVDTDDDAFSIQELGSEEGKGSDSPTIINAFQLIGMSSFLDLSGFFEQENVSERRIRFTSNSSAKDLLEKIETAVTEMGFSVQKKHAKLRVNQEERTQKGQVGLSVTAEVFEIKPSLNVVELRKSYGDSCLYRQLYERLLKDVGTSSPEQEIVT

SEQ ID NO: 41794 - protein, 430 aa, Arabidopsis thaliana
  peptide (1)..(430): Ceres Seq. ID no. 13497216
  misc_feature (6)..(261): Pfam Name: Protein kinase domain Pfam Description: Protein kinase domain
  misc_feature (6)..(261): Pfam Name: Protein kinase domain Pfam Description: Protein kinase domain
  misc_feature (1)..(426): Homolog of NCBI NO: 23237825 NR Description: putative serine/threonine kinase
  misc_feature (1)..(426): Homolog of NCBI NO: 34894358 NR Description: unnamed protein product [Oryza sativa (japonica
  misc_feature (1)..(411): Homolog of NCBI NO: 25387053 NR Description: hypothetical protein F11A17.18 [imported] -
  misc_feature (1)..(96): Homolog of NCBI NO: 8778506 NR Description: F21D18.2 [Arabidopsis thaliana]
  misc_feature (94)..(429): Homolog of NCBI NO: 8778506 NR Description: F21D18.2 [Arabidopsis thaliana]
  misc_feature (1)..(426): Homolog of NCBI NO: 23237825 NR Description: putative serine/threonine kinase
  misc_feature (1)..(411): Homolog of NCBI NO: 25387053 NR Description: hypothetical protein F11A17.18 [imported] -
  misc_feature (94)..(429): Homolog of NCBI NO: 8778506 NR Description: F21D18.2 [Arabidopsis thaliana]
  misc_feature (1)..(411): Homolog of NCBI NO: 9294138 NR Description: serine/threonine kinase [Arabidopsis thaliana]
  misc_feature (1)..(430): Homolog of NCBI NO: 11066952 NR Description: CBL-interacting protein kinase 1 [Arabidopsis
  misc_feature (1)..(430): Homolog of NCBI NO: 18401539 NR Description: CBL-interacting protein kinase 1 [Arabidopsis
  misc_feature (1)..(430): Homolog of NCBI NO: 20260556 NR Description: unknown protein [Arabidopsis thaliana]
  misc_feature (1)..(429): Homolog of NCBI NO: 15221136 NR Description: CBL-interacting protein kinase 17 [Arabidopsis
  misc_feature (1)..(96): Homolog of NCBI NO: 8778506 NR Description: F21D18.2 [Arabidopsis thaliana]
  misc_feature (1)..(426): Homolog of NCBI NO: 34894358 NR Description: unnamed protein product [Oryza sativa (japonica
  misc_feature (1)..(429): Homolog of NCBI NO: 15221136 NR Description: CBL-interacting protein kinase 17 [Arabidopsis
  misc_feature (1)..(430): Homolog of NCBI NO: 20260556 NR Description: unknown protein [Arabidopsis thaliana]
  misc_feature (1)..(430): Homolog of NCBI NO: 18401539 NR Description: CBL-interacting protein kinase 1 [Arabidopsis
  misc_feature (1)..(430): Homolog of NCBI NO: 11066952 NR Description: CBL-interacting protein kinase 1 [Arabidopsis
  misc_feature (1)..(411): Homolog of NCBI NO: 9294138 NR Description: serine/threonine kinase [Arabidopsis thaliana]
MRLGKYELGRTLGEGNFGKVKFAKDTVSGHSFAVKIIDKSRIADLNFSLQIKREIRTLKMLKHPHIVRLHEVLASKTKINMVMELVTGGELFDRIVSNGKLTETDGRKMFQQLIDGISYCHSKGVFHRDLKLENVLLDAKGHIKITDFGLSALPQHFRDDGLLHTTCGSPNYVAPEVLANRGYDGAASDIWSCGVILYVILTGCLPFDDRNLAVLYQKICKGDPPIPRWLSPGARTMIKRMLDPNPVTRITVVGIKASEWFKLEYIPSIPDDDDEEEVDTDDDAFSIQELGSEEGKGSDSPTIINAFQLIGMSSFLDLSGFFEQENVSERRIRFTSNSSAKDLLEKIETAVTEMGFSVQKKHAKLRVNQEERTQKGQVGLSVTAEVFEIKPSLNVVELRKSYGDSCLYRQLYERLLKDVGTSSPEQEIVT

SEQ ID NO: 41795 - protein, 371 aa, Arabidopsis thaliana
  peptide (1)..(371): Ceres Seq. ID no. 13497217
  misc_feature (1)..(202): Pfam Name: Protein kinase domain Pfam Description: Protein kinase domain
  misc_feature (1)..(202): Pfam Name: Protein kinase domain Pfam Description: Protein kinase domain
  misc_feature (1)..(367): Homolog of NCBI NO: 23237825 NR Description: putative serine/threonine kinase
  misc_feature (1)..(367): Homolog of NCBI NO: 34894358 NR Description: unnamed protein product [Oryza sativa (japonica
  misc_feature (1)..(352): Homolog of NCBI NO: 25387053 NR Description: hypothetical protein F11A17.18 [imported] -
  misc_feature (1)..(37): Homolog of NCBI NO: 8778506 NR Description: F21D18.2 [Arabidopsis thaliana]
  misc_feature (35)..(370): Homolog of NCBI NO: 8778506 NR Description: F21D18.2 [Arabidopsis thaliana]
  misc_feature (1)..(367): Homolog of NCBI NO: 23237825 NR Description: putative serine/threonine kinase
  misc_feature (1)..(352): Homolog of NCBI NO: 25387053 NR Description: hypothetical protein F11A17.18 [imported] -
  misc_feature (35)..(370): Homolog of NCBI NO: 8778506 NR Description: F21D18.2 [Arabidopsis thaliana]
  misc_feature (1)..(352): Homolog of NCBI NO: 9294138 NR Description: serine/threonine kinase [Arabidopsis thaliana]
  misc_feature (1)..(371): Homolog of NCBI NO: 11066952 NR Description: CBL-interacting protein kinase 1 [Arabidopsis
  misc_feature (1)..(371): Homolog of NCBI NO: 18401539 NR Description: CBL-interacting protein kinase 1 [Arabidopsis
  misc_feature (1)..(371): Homolog of NCBI NO: 20260556 NR Description: unknown protein [Arabidopsis thaliana]
  misc_feature (1)..(370): Homolog of NCBI NO: 15221136 NR Description: CBL-interacting protein kinase 17 [Arabidopsis
  misc_feature (1)..(37): Homolog of NCBI NO: 8778506 NR Description: F21D18.2 [Arabidopsis thaliana]
  misc_feature (1)..(367): Homolog of NCBI NO: 34894358 NR Description: unnamed protein product [Oryza sativa (japonica
  misc_feature (1)..(370): Homolog of NCBI NO: 15221136 NR Description: CBL-interacting protein kinase 17 [Arabidopsis
  misc_feature (1)..(371): Homolog of NCBI NO: 20260556 NR Description: unknown protein [Arabidopsis thaliana]
  misc_feature (1)..(371): Homolog of NCBI NO: 18401539 NR Description: CBL-interacting protein kinase 1 [Arabidopsis
  misc_feature (1)..(371): Homolog of NCBI NO: 11066952 NR Description: CBL-interacting protein kinase 1 [Arabidopsis
  misc_feature (1)..(352): Homolog of NCBI NO: 9294138 NR Description: serine/threonine kinase [Arabidopsis thaliana]
MLKHPHIVRLHEVLASKTKINMVMELVTGGELFDRIVSNGKLTETDGRKMFQQLIDGISYCHSKGVFHRDLKLENVLLDAKGHIKITDFGLSALPQHFRDDGLLHTTCGSPNYVAPEVLANRGYDGAASDIWSCGVILYVILTGCLPFDDRNLAVLYQKICKGDPPIPRWLSPGARTMIKRMLDPNPVTRITVVGIKASEWFKLEYIPSIPDDDDEEEVDTDDDAFSIQELGSEEGKGSDSPTIINAFQLIGMSSFLDLSGFFEQENVSERRIRFTSNSSAKDLLEKIETAVTEMGFSVQKKHAKLRVNQEERTQKGQVGLSVTAEVFEIKPSLNVVELRKSYGDSCLYRQLYERLLKDVGTSSPEQEIVT

SEQ ID NO: 41796 - DNA, 1239 bp, Arabidopsis thaliana
  misc_feature (1)..(1239): Ceres Seq. ID no. 13488045
  misc_feature: MA Experiment ID: 108461 Result: Up-regulated in Transcription
  misc_feature: MA Experiment 108461 PARAMETER Experiment Name: At_Germinating_Seeds_cDNA_P Parameter: Age (day) Value: 1 vs. 0
  misc_feature: MA Experiment 108461 PARAMETER Experiment Name: At_Germinating_Seeds_cDNA_P Parameter: Tissue Value: Germinating Seeds
  misc_feature: MA Experiment ID: 108462 Result: Up-regulated in Transcription
  misc_feature: MA Experiment 108462 PARAMETER Experiment Name: At_Germinating_Seeds_cDNA_P Parameter: Age (day) Value: 2 vs. 0
  misc_feature: MA Experiment 108462 PARAMETER Experiment Name: At_Germinating_Seeds_cDNA_P Parameter: Tissue Value: Germinating Seeds
  misc_feature: MA Experiment ID: 108463 Result: Up-regulated in Transcription
  misc_feature: MA Experiment 108463 PARAMETER Experiment Name: At_Germinating_Seeds_cDNA_P Parameter: Age (day) Value: 3 vs. 0
  misc_feature: MA Experiment 108463 PARAMETER Experiment Name: At_Germinating_Seeds_cDNA_P Parameter: Tissue Value: Germinating Seeds
  misc_feature: MA Experiment ID: 108464 Result: Up-regulated in Transcription
  misc_feature: MA Experiment 108464 PARAMETER Experiment Name: At_Germinating_Seeds_cDNA_P Parameter: Age (day) Value: 4 vs. 0
  misc_feature: MA Experiment 108464 PARAMETER Experiment Name: At_Germinating_Seeds_cDNA_P Parameter: Tissue Value: Germinating Seeds
  misc_feature: MA Experiment ID: 108594 Result: Down-regulated in Transcription
  misc_feature: MA Experiment 108594 PARAMETER Experiment Name: At_Ler-rhl_Root_cDNA_P Parameter: Plant Line Value: null
  misc_feature: MA Experiment ID: 20000180 Result: Up-regulated in Transcription
  misc_feature: MA Experiment 20000180 PARAMETER Experiment Name: At_Germinating_Seeds_P Parameter: Age (hr) Value: 24 vs. 0
  misc_feature: MA Experiment 20000180 PARAMETER Experiment Name: At_Germinating_Seeds_P Parameter: Tissue Value: Germinating Seeds
  misc_feature: MA Experiment ID: 20000185 Result: Up-regulated in Transcription
  misc_feature: MA Experiment 20000185 PARAMETER Experiment Name: At_Roots__P Parameter: Age (day) Value: 7 vs. 21
  misc_feature: MA Experiment 20000185 PARAMETER Experiment Name: At_Roots__P Parameter: Organism Value: A. thaliana
  misc_feature: MA Experiment 20000185 PARAMETER Experiment Name: At_Roots__P Parameter: Tissue Value: Roots vs. Whole Plant
  misc_feature: MA Experiment ID: 20000439 Result: Up-regulated in Transcription
  misc_feature: MA Experiment 20000439 PARAMETER Experiment Name: At_Roots__P Parameter: Age (day) Value: 14 vs. 21
  misc_feature: MA Experiment 20000439 PARAMETER Experiment Name: At_Roots__P Parameter: Organism Value: A. thaliana
  misc_feature: MA Experiment 20000439 PARAMETER Experiment Name: At_Roots__P Parameter: Tissue Value: Roots vs. Whole Plant
  misc_feature: MA Experiment ID: 20000527 Result: Down-regulated in Transcription
  misc_feature: MA Experiment 20000527 PARAMETER Experiment Name: At_10percent_PEG_P Parameter: Age (day) Value: 20
  misc_feature: MA Experiment 20000527 PARAMETER Experiment Name: At_10percent_PEG_P Parameter: Organism Value: A. thaliana
  misc_feature: MA Experiment 20000527 PARAMETER Experiment Name: At_10percent_PEG_P Parameter: Plant Line Value: WS
  misc_feature: MA Experiment 20000527 PARAMETER Experiment Name: At_10percent_PEG_P Parameter: Timepoint (day) Value: 20
  misc_feature: MA Experiment 20000527 PARAMETER Experiment Name: At_10percent_PEG_P Parameter: Tissue Value: Whole Plant
  misc_feature: MA Experiment 20000527 PARAMETER Experiment Name: At_10percent_PEG_P Parameter: Treatment Value: 10percent PEG vs. No Treatment
  misc_feature: MA Experiment ID: 20001450 Result: Down-regulated in Transcription
  misc_feature: MA Experiment 20001450 PARAMETER Experiment Name: At_Far-red-induction_P Parameter: Age (day) Value: 7
  misc_feature: MA Experiment 20001450 PARAMETER Experiment Name: At_Far-red-induction_P Parameter: Light Value: Far-red vs. White
  misc_feature: MA Experiment 20001450 PARAMETER Experiment Name: At_Far-red-induction_P Parameter: Organism Value: A. thaliana
  misc_feature: MA Experiment 20001450 PARAMETER Experiment Name: At_Far-red-induction_P Parameter: Plant Line Value: Columbia
  misc_feature: MA Experiment 20001450 PARAMETER Experiment Name: At_Far-red-induction_P Parameter: Timepoint (hr) Value: 8
  misc_feature: MA Experiment 20001450 PARAMETER Experiment Name: At_Far-red-induction_P Parameter: Tissue Value: Whole Plant
aaattcatcaaagccaatcaaattgagagagatatcaagaaagcaaaataatgaagttggccgtggtctcagtcgttgtcatactcggagttctcgtggcttggccggtatcggctggccgaaaagacttacctggagcgggaggatacggaggcgatgacgatgatgatacaaagtcattgttccctttggacaacctattatcgtttgaattattatgataggatttgtccagattttgagaaaatcgttgttacgaaagtgagggaatggactaagagtgactcttcccttggtcccgccctcctccgccttatcttccacgattgtggcgtcacgggatgtgatgcgtctgttcttctagactacgaagggacagagagaagatctccggctagcaaaacactaagaggcttcgagctaattgacgatatcaagtccgagatggagaaatcatgccccggcaaagtatcctgcgccgacatcctaacatcagccagccgtgccgccaccgtccaacttggtggtccttactggcccaacgtctacggtcgtcgtgactccaaacactcttacgctagagacgtagagaaagtcccttcaggccgtcgtgatgttaccgcccttctcgaaacgtttcagtcatacggtctcaacgtcctcgacctagttgtcctttccggggcccacaccatcggaaaagcgtcctgtggcaccatccagtcgaggctttacaactacaacgcaaccagtggttcagatccttcgattgacgcaaaatacgctgattacttgcaacgcaggtgtcgctgggcctctgagaccgtcgatctcgaccctgtaactccagcagtgttcgataatcagtactacattaatcttcagaagcatatgggagttttgtcgactgatcaggagcttgttaaggacccaaggactgctccgcttgtaaagactttcgcagagcaatcacctcagatattcagacagcagtttgctgtgtccatggctaagctggtcaacgttggagttctcactggtgaagatcgtgtcggagagatcaggaaggtttgcagcaaatctaactccagagcttactaaattataatcatcatccctcatgagaaggatcttttgtttcttgaaataatttcttgtttggtttttgagctcttttctattgcaattttgtaatttgttgtatgaacaagaacaaaaactgtgaattattttcgttgc

SEQ ID NO: 41797 - protein, 314 aa, Arabidopsis thaliana
  peptide (1)..(314): Ceres Seq. ID no. 13488046
  misc_feature (32)..(271): Pfam Name: Peroxidase Pfam Description: Peroxidase
  misc_feature (17)..(310): Homolog of NCBI NO: 1232069 NR Description: cationic peroxidase [Stylosanthes humilis]
  misc_feature (17)..(310): Homolog of NCBI NO: 7433065 NR Description: peroxidase (EC 1.11.1.7) precursor,
  misc_feature (1)..(310): Homolog of NCBI NO: 1546692 NR Description: peroxidase; peroxidase ATP19a [Arabidopsis
  misc_feature (1)..(310): Homolog of NCBI NO: 15237128 NR Description: peroxidase, putative [Arabidopsis thaliana]
  misc_feature (17)..(310): Homolog of NCBI NO: 129808 NR Description: Cationic peroxidase 2 precursor (PNPC2)
  misc_feature (18)..(306): Homolog of NCBI NO: 1546702 NR Description: peroxidase; peroxidase ATP5a [Arabidopsis
  misc_feature (1)..(310): Homolog of NCBI NO: 18558997 NR Description: bacterial-induced peroxidase [Gossypium hirsutum]
  misc_feature (18)..(306): Homolog of NCBI NO: 30694586 NR Description: peroxidase, putative [Arabidopsis thaliana]
  misc_feature (17)..(314): Homolog of NCBI NO: 34394588 NR Description: putative peroxidase prx15 precursor
  misc_feature (18)..(314): Homolog of NCBI NO: 15221535 NR Description: cationic peroxidase, putative [Arabidopsis
MTMMIQSHCSLWTTYYRLNYYDRICPDFEKIVVTKVREWTKSDSSLGPALLRLIFHDCGVTGCDASVLLDYEGTERRSPASKTLRGFELIDDIKSEMEKSCPGKVSCADILTSASRAATVQLGGPYWPNVYGRRDSKHSYARDVEKVPSGRRDVTALLETFQSYGLNVLDLVVLSGAHTIGKASCGTIQSRLYNYNATSGSDPSIDAKYADYLQRRCRWASETVDLDPVTPAVFDNQYYINLQKHMGVLSTDQELVKDPRTAPLVKTFAEQSPQIFRQQFAVSMAKLVNVGVLTGEDRVGEIRKVCSKSNSRAY

SEQ ID NO: 41798 - protein, 312 aa, Arabidopsis thaliana
  peptide (1)..(312): Ceres Seq. ID no. 13488047
  misc_feature (30)..(269): Pfam Name: Peroxidase Pfam Description: Peroxidase
  misc_feature (15)..(308): Homolog of NCBI NO: 1232069 NR Description: cationic peroxidase [Stylosanthes humilis]
  misc_feature (15)..(308): Homolog of NCBI NO: 7433065 NR Description: peroxidase (EC 1.11.1.7) precursor,
  misc_feature (1)..(308): Homolog of NCBI NO: 1546692 NR Description: peroxidase; peroxidase ATP19a [Arabidopsis
  misc_feature (1)..(308): Homolog of NCBI NO: 15237128 NR Description: peroxidase, putative [Arabidopsis thaliana]
  misc_feature (15)..(308): Homolog of NCBI NO: 129808 NR Description: Cationic peroxidase 2 precursor (PNPC2)
  misc_feature (16)..(304): Homolog of NCBI NO: 1546702 NR Description: peroxidase; peroxidase ATP5a [Arabidopsis
  misc_feature (1)..(308): Homolog of NCBI NO: 18558997 NR Description: bacterial-induced peroxidase [Gossypium hirsutum]
  misc_feature (16)..(304): Homolog of NCBI NO: 30694586 NR Description: peroxidase, putative [Arabidopsis thaliana]
  misc_feature (15)..(312): Homolog of NCBI NO: 34394588 NR Description: putative peroxidase prx15 precursor
  misc_feature (16)..(312): Homolog of NCBI NO: 15221535 NR Description: cationic peroxidase, putative [Arabidopsis
MMIQSHCSLWTTYYRLNYYDRICPDFEKIVVTKVREWTKSDSSLGPALLRLIFHDCGVTGCDASVLLDYEGTERRSPASKTLRGFELIDDIKSEMEKSCPGKVSCADILTSASRAATVQLGGPYWPNVYGRRDSKHSYARDVEKVPSGRRDVTALLETFQSYGLNVLDLVVLSGAHTIGKASCGTIQSRLYNYNATSGSDPSIDAKYADYLQRRCRWASETVDLDPVTPAVFDNQYYINLQKHMGVLSTDQELVKDPRTAPLVKTFAEQSPQIFRQQFAVSMAKLVNVGVLTGEDRVGEIRKVCSKSNSRAY

SEQ ID NO: 41799 - protein, 311 aa, Arabidopsis thaliana
  peptide (1)..(311): Ceres Seq. ID no. 13488048
  misc_feature (29)..(268): Pfam Name: Peroxidase Pfam Description: Peroxidase
  misc_feature (14)..(307): Homolog of NCBI NO: 1232069 NR Description: cationic peroxidase [Stylosanthes humilis]
  misc_feature (14)..(307): Homolog of NCBI NO: 7433065 NR Description: peroxidase (EC 1.11.1.7) precursor,
  misc_feature (1)..(307): Homolog of NCBI NO: 1546692 NR Description: peroxidase; peroxidase ATP19a [Arabidopsis
  misc_feature (1)..(307): Homolog of NCBI NO: 15237128 NR Description: peroxidase, putative [Arabidopsis thaliana]
  misc_feature (14)..(307): Homolog of NCBI NO: 129808 NR Description: Cationic peroxidase 2 precursor (PNPC2)
  misc_feature (15)..(303): Homolog of NCBI NO: 1546702 NR Description: peroxidase; peroxidase ATP5a [Arabidopsis
  misc_feature (1)..(307): Homolog of NCBI NO: 18558997 NR Description: bacterial-induced peroxidase [Gossypium hirsutum]
  misc_feature (15)..(303): Homolog of NCBI NO: 30694586 NR Description: peroxidase, putative [Arabidopsis thaliana]
  misc_feature (14)..(311): Homolog of NCBI NO: 34394588 NR Description: putative peroxidase prx15 precursor
  misc_feature (15)..(311): Homolog of NCBI NO: 15221535 NR Description: cationic peroxidase, putative [Arabidopsis
MIQSHCSLWTTYYRLNYYDRICPDFEKIVVTKVREWTKSDSSLGPALLRLIFHDCGVTGCDASVLLDYEGTERRSPASKTLRGFELIDDIKSEMEKSCPGKVSCADILTSASRAATVQLGGPYWPNVYGRRDSKHSYARDVEKVPSGRRDVTALLETFQSYGLNVLDLVVLSGAHTIGKASCGTIQSRLYNYNATSGSDPSIDAKYADYLQRRCRWASETVDLDPVTPAVFDNQYYINLQKHMGVLSTDQELVKDPRTAPLVKTFAEQSPQIFRQQFAVSMAKLVNVGVLTGEDRVGEIRKVCSKSNSRAY

SEQ ID NO: 41800 - DNA, 1262 bp, Arabidopsis thaliana
  misc_feature (1)..(1262): Ceres Seq. ID no. 12395472
  misc_feature: MA Experiment ID: 108435 Result: Down-regulated in Transcription
  misc_feature: MA Experiment 108435 PARAMETER Experiment Name: At_stm_Mutants_cDNA_P Parameter: Plant Line Value: wt Landsburg vs stm
  misc_feature: MA Experiment 108435 PARAMETER Experiment Name: At_stm_Mutants_cDNA_P Parameter: Tissue Value: Shoot Apical Meristem Region
  misc_feature: MA Experiment ID: 108462 Result: Up-regulated in Transcription
  misc_feature: MA Experiment 108462 PARAMETER Experiment Name: At_Germinating_Seeds_cDNA_P Parameter: Age (day) Value: 2 vs. 0
  misc_feature: MA Experiment 108462 PARAMETER Experiment Name: At_Germinating_Seeds_cDNA_P Parameter: Tissue Value: Germinating Seeds
  misc_feature: MA Experiment ID: 108463 Result: Up-regulated in Transcription
  misc_feature: MA Experiment 108463 PARAMETER Experiment Name: At_Germinating_Seeds_cDNA_P Parameter: Age (day) Value: 3 vs. 0
  misc_feature: MA Experiment 108463 PARAMETER Experiment Name: At_Germinating_Seeds_cDNA_P Parameter: Tissue Value: Germinating Seeds
  misc_feature: MA Experiment ID: 108464 Result: Up-regulated in Transcription
  misc_feature: MA Experiment 108464 PARAMETER Experiment Name: At_Germinating_Seeds_cDNA_P Parameter: Age (day) Value: 4 vs. 0
  misc_feature: MA Experiment 108464 PARAMETER Experiment Name: At_Germinating_Seeds_cDNA_P Parameter: Tissue Value: Germinating Seeds
  misc_feature: MA Experiment ID: 108561 Result: Down-regulated in Transcription
  misc_feature: MA Experiment 108561 PARAMETER Experiment Name: At_100uM_ABA_cDNA_P Parameter: Timepoint (hr) Value: 6
  misc_feature: MA Experiment 108561 PARAMETER Experiment Name: At_100uM_ABA_cDNA_P Parameter: Tissue Value: Aerial
  misc_feature: MA Experiment 108561 PARAMETER Experiment Name: At_100uM_ABA_cDNA_P Parameter: Treatment Value: 100uM ABA vs. No Treatment
  misc_feature: MA Experiment ID: 108573 Result: Down-regulated in Transcription
  misc_feature: MA Experiment 108573 PARAMETER Experiment Name: At_Drought_cDNA_P Parameter: Timepoint (hr) Value: 6
  misc_feature: MA Experiment 108573 PARAMETER Experiment Name: At_Drought_cDNA_P Parameter: Tissue Value: Aerial
  misc_feature: MA Experiment 108573 PARAMETER Experiment Name: At_Drought_cDNA_P Parameter: Treatment Value: Drought vs. No Drought
  misc_feature: MA Experiment ID: 108576 Result: Down-regulated in Transcription
  misc_feature: MA Experiment 108576 PARAMETER Experiment Name: At_42deg_Heat_cDNA_P Parameter: Temperature (deg C) Value: 42 vs. 22
  misc_feature: MA Experiment 108576 PARAMETER Experiment Name: At_42deg_Heat_cDNA_P Parameter: Timepoint (hr) Value: 1
  misc_feature: MA Experiment 108576 PARAMETER Experiment Name: At_42deg_Heat_cDNA_P Parameter: Tissue Value: Aerial
  misc_feature: MA Experiment ID: 108577 Result: Down-regulated in Transcription
  misc_feature: MA Experiment 108577 PARAMETER Experiment Name: At_42deg_Heat_cDNA_P Parameter: Temperature (deg C) Value: 42 vs. 22
  misc_feature: MA Experiment 108577 PARAMETER Experiment Name: At_42deg_Heat_cDNA_P Parameter: Timepoint (hr) Value: 6
  misc_feature: MA Experiment 108577 PARAMETER Experiment Name: At_42deg_Heat_cDNA_P Parameter: Tissue Value: Aerial
  misc_feature: MA Experiment ID: 108579 Result: Down-regulated in Transcription
  misc_feature: MA Experiment 108579 PARAMETER Experiment Name: At_4deg_Cold_cDNA_P Parameter: Temperature (deg C) Value: 4 vs. 22
  misc_feature: MA Experiment 108579 PARAMETER Experiment Name: At_4deg_Cold_cDNA_P Parameter: Timepoint (hr) Value: 6
  misc_feature: MA Experiment 108579 PARAMETER Experiment Name: At_4deg_Cold_cDNA_P Parameter: Tissue Value: Aerial
  misc_feature: MA Experiment ID: 108585 Result: Down-regulated in Transcription
  misc_feature: MA Experiment 108585 PARAMETER Experiment Name: At_5mM_NaNP_cDNA_P Parameter: Timepoint (hr) Value: 6
  misc_feature: MA Experiment 108585 PARAMETER Experiment Name: At_5mM_NaNP_cDNA_P Parameter: Tissue Value: Aerial
  misc_feature: MA Experiment 108585 PARAMETER Experiment Name: At_5mM_NaNP_cDNA_P Parameter: Treatment Value: null
  misc_feature: MA Experiment ID: 108595 Result: Down-regulated in Transcription
  misc_feature: MA Experiment 108595 PARAMETER Experiment Name: At_Ler-pi_Ovule_cDNA_P Parameter: Plant Line Value: null
  misc_feature: MA Experiment ID: 108605 Result: Down-regulated in Transcription
  misc_feature: MA Experiment 108605 PARAMETER Experiment Name: At_100uM_ABA_cDNA_P Parameter: Timepoint (hr) Value: 6
  misc_feature: MA Experiment 108605 PARAMETER Experiment Name: At_100uM_ABA_cDNA_P Parameter: Tissue Value: Aerial
  misc_feature: MA Experiment 108605 PARAMETER Experiment Name: At_100uM_ABA_cDNA_P Parameter: Treatment Value: 100uM ABA vs. No Treatment
  misc_feature: MA Experiment ID: 108607 Result: Down-regulated in Transcription
  misc_feature: MA Experiment 108607 PARAMETER Experiment Name: At_100uM_ABA_cDNA_P Parameter: Timepoint (hr) Value: 4
  misc_feature: MA Experiment 108607 PARAMETER Experiment Name: At_100uM_ABA_cDNA_P Parameter: Tissue Value: Aerial
  misc_feature: MA Experiment 108607 PARAMETER Experiment Name: At_100uM_ABA_cDNA_P Parameter: Treatment Value: 100uM ABA vs. No Treatment
  misc_feature: MA Experiment ID: 108608 Result: Down-regulated in Transcription
  misc_feature: MA Experiment 108608 PARAMETER Experiment Name: At_100uM_ABA_cDNA_P Parameter: Timepoint (hr) Value: 1
  misc_feature: MA Experiment 108608 PARAMETER Experiment Name: At_100uM_ABA_cDNA_P Parameter: Tissue Value: Aerial
  misc_feature: MA Experiment 108608 PARAMETER Experiment Name: At_100uM_ABA_cDNA_P Parameter: Treatment Value: 100uM ABA vs. No Treatment
  misc_feature: MA Experiment ID: 20000069 Result: Down-regulated in Transcription
  misc_feature: MA Experiment 20000069 PARAMETER Experiment Name: At_100uM_ABA_Mutants_cDNA_P Parameter: Plant Line Value: CS23
  misc_feature: MA Experiment 20000069 PARAMETER Experiment Name: At_100uM_ABA_Mutants_cDNA_P Parameter: Timepoint (hr) Value: 6
  misc_feature: MA Experiment 20000069 PARAMETER Experiment Name: At_100uM_ABA_Mutants_cDNA_P Parameter: Tissue Value: Aerial
  misc_feature: MA Experiment 20000069 PARAMETER Experiment Name: At_100uM_ABA_Mutants_cDNA_P Parameter: Treatment Value: 100uM ABA vs. No Treatment
  misc_feature: MA Experiment ID: 20000070 Result: Down-regulated in Transcription
  misc_feature: MA Experiment 20000070 PARAMETER Experiment Name: At_100uM_ABA_Mutants_cDNA_P Parameter: Plant Line Value: CS24
  misc_feature: MA Experiment 20000070 PARAMETER Experiment Name: At_100uM_ABA_Mutants_cDNA_P Parameter: Timepoint (hr) Value: 6
  misc_feature: MA Experiment 20000070 PARAMETER Experiment Name: At_100uM_ABA_Mutants_cDNA_P Parameter: Tissue Value: Aerial
  misc_feature: MA Experiment 20000070 PARAMETER Experiment Name: At_100uM_ABA_Mutants_cDNA_P Parameter: Treatment Value: 100uM ABA vs. No Treatment
  misc_feature: MA Experiment ID: 20000071 Result: Down-regulated in Transcription
  misc_feature: MA Experiment 20000071 PARAMETER Experiment Name: At_100uM_ABA_Mutants_cDNA_P Parameter: Plant Line Value: CS8104
  misc_feature: MA Experiment 20000071 PARAMETER Experiment Name: At_100uM_ABA_Mutants_cDNA_P Parameter: Timepoint (hr) Value: 6
  misc_feature: MA Experiment 20000071 PARAMETER Experiment Name: At_100uM_ABA_Mutants_cDNA_P Parameter: Tissue Value: Aerial
  misc_feature: MA Experiment 20000071 PARAMETER Experiment Name: At_100uM_ABA_Mutants_cDNA_P Parameter: Treatment Value: 100uM ABA vs. No Treatment
  misc_feature: MA Experiment ID: 20000072 Result: Down-regulated in Transcription
  misc_feature: MA Experiment 20000072 PARAMETER Experiment Name: At_100uM_ABA_Mutants_cDNA_P Parameter: Plant Line Value: CS8105
  misc_feature: MA Experiment 20000072 PARAMETER Experiment Name: At_100uM_ABA_Mutants_cDNA_P Parameter: Timepoint (hr) Value: 6
  misc_feature: MA Experiment 20000072 PARAMETER Experiment Name: At_100uM_ABA_Mutants_cDNA_P Parameter: Tissue Value: Aerial
  misc_feature: MA Experiment 20000072 PARAMETER Experiment Name: At_100uM_ABA_Mutants_cDNA_P Parameter: Treatment Value: 100uM ABA vs. No Treatment
  misc_feature: MA Experiment ID: 20000086 Result: Down-regulated in Transcription
  misc_feature: MA Experiment 20000086 PARAMETER Experiment Name: At_100uM_ABA_Mutants_cDNA_P Parameter: Plant Line Value: CS22
  misc_feature: MA Experiment 20000086 PARAMETER Experiment Name: At_100uM_ABA_Mutants_cDNA_P Parameter: Timepoint (hr) Value: 6
  misc_feature: MA Experiment 20000086 PARAMETER Experiment Name: At_100uM_ABA_Mutants_cDNA_P Parameter: Tissue Value: Aerial
  misc_feature: MA Experiment 20000086 PARAMETER Experiment Name: At_100uM_ABA_Mutants_cDNA_P Parameter: Treatment Value: 100uM ABA vs. No Treatment
  misc_feature: MA Experiment ID: 20000087 Result: Down-regulated in Transcription
  misc_feature: MA Experiment 20000087 PARAMETER Experiment Name: At_100uM_ABA_Mutants_cDNA_P Parameter: Plant Line Value: WS
  misc_feature: MA Experiment 20000087 PARAMETER Experiment Name: At_100uM_ABA_Mutants_cDNA_P Parameter: Timepoint (hr) Value: 6
  misc_feature: MA Experiment 20000087 PARAMETER Experiment Name: At_100uM_ABA_Mutants_cDNA_P Parameter: Tissue Value: Aerial
  misc_feature: MA Experiment 20000087 PARAMETER Experiment Name: At_100uM_ABA_Mutants_cDNA_P Parameter: Treatment Value: 100uM ABA vs. No Treatment
  misc_feature: MA Experiment ID: 20000088 Result: Down-regulated in Transcription
  misc_feature: MA Experiment 20000088 PARAMETER Experiment Name: At_100uM_ABA_Mutants_cDNA_P Parameter: Plant Line Value: Landsberg
  misc_feature: MA Experiment 20000088 PARAMETER Experiment Name: At_100uM_ABA_Mutants_cDNA_P Parameter: Timepoint (hr) Value: 6
  misc_feature: MA Experiment 20000088 PARAMETER Experiment Name: At_100uM_ABA_Mutants_cDNA_P Parameter: Tissue Value: Aerial
  misc_feature: MA Experiment 20000088 PARAMETER Experiment Name: At_100uM_ABA_Mutants_cDNA_P Parameter: Treatment Value: 100uM ABA vs. No Treatment
  misc_feature: MA Experiment ID: 20000112 Result: Down-regulated in Transcription
  misc_feature: MA Experiment 20000112 PARAMETER Experiment Name: At_42deg_Heat_cDNA_P Parameter: Temperature (deg C) Value: 42 vs. 22
  misc_feature: MA Experiment 20000112 PARAMETER Experiment Name: At_42deg_Heat_cDNA_P Parameter: Timepoint (hr) Value: 2
  misc_feature: MA Experiment 20000112 PARAMETER Experiment Name: At_42deg_Heat_cDNA_P Parameter: Tissue Value: Aerial
  misc_feature: MA Experiment ID: 20000113 Result: Down-regulated in Transcription
  misc_feature: MA Experiment 20000113 PARAMETER Experiment Name: At_42deg_Heat_cDNA_P Parameter: Temperature (deg C) Value: 42 vs. 22
  misc_feature: MA Experiment 20000113 PARAMETER Experiment Name: At_42deg_Heat_cDNA_P Parameter: Timepoint (hr) Value: 8
  misc_feature: MA Experiment 20000113 PARAMETER Experiment Name: At_42deg_Heat_cDNA_P Parameter: Tissue Value: Aerial
  misc_feature: MA Experiment ID: 20000117 Result: Down-regulated in Transcription
  misc_feature: MA Experiment 20000117 PARAMETER Experiment Name: At_100uM_ABA_Mutants_cDNA_P Parameter: Plant Line Value: Columbia
  misc_feature: MA Experiment 20000117 PARAMETER Experiment Name: At_100uM_ABA_Mutants_cDNA_P Parameter: Timepoint (hr) Value: 6
  misc_feature: MA Experiment 20000117 PARAMETER Experiment Name: At_100uM_ABA_Mutants_cDNA_P Parameter: Tissue Value: Aerial
  misc_feature: MA Experiment 20000117 PARAMETER Experiment Name: At_100uM_ABA_Mutants_cDNA_P Parameter: Treatment Value: 100uM ABA vs. No Treatment
  misc_feature: MA Experiment ID: 20000144 Result: Down-regulated in Transcription
  misc_feature: MA Experiment 20000144 PARAMETER Experiment Name: At_42deg_Heat_cDNA_P Parameter: Temperature (deg C) Value: 42 vs. 22
  misc_feature: MA Experiment 20000144 PARAMETER Experiment Name: At_42deg_Heat_cDNA_P Parameter: Timepoint (hr) Value: 1
  misc_feature: MA Experiment 20000144 PARAMETER Experiment Name: At_42deg_Heat_cDNA_P Parameter: Tissue Value: Aerial
  misc_feature: MA Experiment ID: 20000169 Result: Down-regulated in Transcription
  misc_feature: MA Experiment 20000169 PARAMETER Experiment Name: At_100uM_ABA_P Parameter: Age (day) Value: 14
  misc_feature: MA Experiment 20000169 PARAMETER Experiment Name: At_100uM_ABA_P Parameter: Organism Value: A. thaliana
  misc_feature: MA Experiment 20000169 PARAMETER Experiment Name: At_100uM_ABA_P Parameter: Plant Line Value: WS
  misc_feature: MA Experiment 20000169 PARAMETER Experiment Name: At_100uM_ABA_P Parameter: Timepoint (hr) Value: 6
  misc_feature: MA Experiment 20000169 PARAMETER Experiment Name: At_100uM_ABA_P Parameter: Tissue Value: Aerial
  misc_feature: MA Experiment 20000169 PARAMETER Experiment Name: At_100uM_ABA_P Parameter: Treatment Value: 100uM ABA vs. No Treatment
  misc_feature: MA Experiment ID: 20000171 Result: Down-regulated in Transcription
  misc_feature: MA Experiment 20000171 PARAMETER Experiment Name: At_42deg_Heat_P Parameter: Age (day) Value: 14
  misc_feature: MA Experiment 20000171 PARAMETER Experiment Name: At_42deg_Heat_P Parameter: Organism Value: A. thaliana
  misc_feature: MA Experiment 20000171 PARAMETER Experiment Name: At_42deg_Heat_P Parameter: Plant Line Value: WS
  misc_feature: MA Experiment 20000171 PARAMETER Experiment Name: At_42deg_Heat_P Parameter: Temperature (deg C) Value: 42 vs. 22
  misc_feature: MA Experiment 20000171 PARAMETER Experiment Name: At_42deg_Heat_P Parameter: Timepoint (hr) Value: 1
  misc_feature: MA Experiment 20000171 PARAMETER Experiment Name: At_42deg_Heat_P Parameter: Tissue Value: Aerial
  misc_feature: MA Experiment ID: 20000173 Result: Down-regulated in Transcription
  misc_feature: MA Experiment 20000173 PARAMETER Experiment Name: At_42deg_Heat_P Parameter: Age (day) Value: 14
  misc_feature: MA Experiment 20000173 PARAMETER Experiment Name: At_42deg_Heat_P Parameter: Organism Value: A. thaliana
  misc_feature: MA Experiment 20000173 PARAMETER Experiment Name: At_42deg_Heat_P Parameter: Plant Line Value: WS
  misc_feature: MA Experiment 20000173 PARAMETER Experiment Name: At_42deg_Heat_P Parameter: Temperature (deg C) Value: 42 vs. 22
  misc_feature: MA Experiment 20000173 PARAMETER Experiment Name: At_42deg_Heat_P Parameter: Timepoint (hr) Value: 6
  misc_feature: MA Experiment 20000173 PARAMETER Experiment Name: At_42deg_Heat_P Parameter: Tissue Value: Aerial
  misc_feature: MA Experiment ID: 20000179 Result: Up-regulated in Transcription
  misc_feature: MA Experiment 20000179 PARAMETER Experiment Name: At_Germinating_Seeds_P Parameter: Age (hr) Value: 6 vs. 0
  misc_feature: MA Experiment 20000179 PARAMETER Experiment Name: At_Germinating_Seeds_P Parameter: Tissue Value: Germinating Seeds
  misc_feature: MA Experiment ID: 20000182 Result: Down-regulated in Transcription
  misc_feature: MA Experiment 20000182 PARAMETER Experiment Name: At_2mM_SA_P Parameter: Age (day) Value: 14
  misc_feature: MA Experiment 20000182 PARAMETER Experiment Name: At_2mM_SA_P Parameter: Organism Value: A. thaliana
  misc_feature: MA Experiment 20000182 PARAMETER Experiment Name: At_2mM_SA_P Parameter: Plant Line Value: WS
  misc_feature: MA Experiment 20000182 PARAMETER Experiment Name: At_2mM_SA_P Parameter: Timepoint (hr) Value: 6
  misc_feature: MA Experiment 20000182 PARAMETER Experiment Name: At_2mM_SA_P Parameter: Tissue Value: Aerial
  misc_feature: MA Experiment 20000182 PARAMETER Experiment Name: At_2mM_SA_P Parameter: Treatment Value: 2mM SA vs. No Treatment
  misc_feature: MA Experiment ID: 20000185 Result: Down-regulated in Transcription
  misc_feature: MA Experiment 20000185 PARAMETER Experiment Name: At_Roots__P Parameter: Age (day) Value: 7 vs. 21
  misc_feature: MA Experiment 20000185 PARAMETER Experiment Name: At_Roots__P Parameter: Organism Value: A. thaliana
  misc_feature: MA Experiment 20000185 PARAMETER Experiment Name: At_Roots__P Parameter: Tissue Value: Roots vs. Whole Plant
  misc_feature: MA Experiment ID: 20000267 Result: Down-regulated in Transcription
  misc_feature: MA Experiment 20000267 PARAMETER Experiment Name: At_Drought_P Parameter: Age (day) Value: 7
  misc_feature: MA Experiment 20000267 PARAMETER Experiment Name: At_Drought_P Parameter: Organism Value: A. thaliana
  misc_feature: MA Experiment 20000267 PARAMETER Experiment Name: At_Drought_P Parameter: Plant Line Value: WS
  misc_feature: MA Experiment 20000267 PARAMETER Experiment Name: At_Drought_P Parameter: Timepoint (hr) Value: 6
  misc_feature: MA Experiment 20000267 PARAMETER Experiment Name: At_Drought_P Parameter: Tissue Value: Whole Plant
  misc_feature: MA Experiment 20000267 PARAMETER Experiment Name: At_Drought_P Parameter: Treatment Value: Drought vs. No Drought
  misc_feature: MA Experiment ID: 20000436 Result: Down-regulated in Transcription
  misc_feature: MA Experiment 20000436 PARAMETER Experiment Name: At_Drought_P Parameter: Age (day) Value: 7
  misc_feature: MA Experiment 20000436 PARAMETER Experiment Name: At_Drought_P Parameter: Organism Value: A. thaliana
  misc_feature: MA Experiment 20000436 PARAMETER Experiment Name: At_Drought_P Parameter: Plant Line Value: WS
  misc_feature: MA Experiment 20000436 PARAMETER Experiment Name: At_Drought_P Parameter: Timepoint (hr) Value: 12
  misc_feature: MA Experiment 20000436 PARAMETER Experiment Name: At_Drought_P Parameter: Tissue Value: Whole Plant
  misc_feature: MA Experiment 20000436 PARAMETER Experiment Name: At_Drought_P Parameter: Treatment Value: Drought vs. No Drought
  misc_feature: MA Experiment ID: 20000437 Result: Down-regulated in Transcription
  misc_feature: MA Experiment 20000437 PARAMETER Experiment Name: At_Drought_P Parameter: Age (day) Value: 8
  misc_feature: MA Experiment 20000437 PARAMETER Experiment Name: At_Drought_P Parameter: Organism Value: A. thaliana
  misc_feature: MA Experiment 20000437 PARAMETER Experiment Name: At_Drought_P Parameter: Plant Line Value: WS
  misc_feature: MA Experiment 20000437 PARAMETER Experiment Name: At_Drought_P Parameter: Timepoint (hr) Value: 24
  misc_feature: MA Experiment 20000437 PARAMETER Experiment Name: At_Drought_P Parameter: Tissue Value: Whole Plant
  misc_feature: MA Experiment 20000437 PARAMETER Experiment Name: At_Drought_P Parameter: Treatment Value: Drought vs. No Drought
  misc_feature: MA Experiment ID: 20000439 Result: Down-regulated in Transcription
  misc_feature: MA Experiment 20000439 PARAMETER Experiment Name: At_Roots__P Parameter: Age (day) Value: 14 vs. 21
  misc_feature: MA Experiment 20000439 PARAMETER Experiment Name: At_Roots__P Parameter: Organism Value: A. thaliana
  misc_feature: MA Experiment 20000439 PARAMETER Experiment Name: At_Roots__P Parameter: Tissue Value: Roots vs. Whole Plant
  misc_feature: MA Experiment ID: 20000573 Result: Down-regulated in Transcription
  misc_feature: MA Experiment 20000573 PARAMETER Experiment Name: At_100uM_ABA_Mutants__P Parameter: Organism Value: A. thaliana
  misc_feature: MA Experiment 20000573 PARAMETER Experiment Name: At_100uM_ABA_Mutants__P Parameter: Plant Line Value: CS22 vs. Ler wt
  misc_feature: MA Experiment 20000573 PARAMETER Experiment Name: At_100uM_ABA_Mutants__P Parameter: Timepoint (hr) Value: N/A
  misc_feature: MA Experiment 20000573 PARAMETER Experiment Name: At_100uM_ABA_Mutants__P Parameter: Tissue Value: Whole Plant
  misc_feature: MA Experiment 20000573 PARAMETER Experiment Name: At_100uM_ABA_Mutants__P Parameter: Treatment Value: None
  misc_feature: MA Experiment ID: 20000709 Result: Up-regulated in Transcription
  misc_feature: MA Experiment 20000709 PARAMETER Experiment Name: At_15mM_NH4NO3_L-to-H_P Parameter: Age (hr) Value: 14
  misc_feature: MA Experiment 20000709 PARAMETER Experiment Name: At_15mM_NH4NO3_L-to-H_P Parameter: Organism Value: A. thaliana
  misc_feature: MA Experiment 20000709 PARAMETER Experiment Name: At_15mM_NH4NO3_L-to-H_P Parameter: Plant Line Value: WS
  misc_feature: MA Experiment 20000709 PARAMETER Experiment Name: At_15mM_NH4NO3_L-to-H_P Parameter: Timepoint (hr) Value: 4
  misc_feature: MA Experiment 20000709 PARAMETER Experiment Name: At_15mM_NH4NO3_L-to-H_P Parameter: Tissue Value: Aerial
  misc_feature: MA Experiment 20000709 PARAMETER Experiment Name: At_15mM_NH4NO3_L-to-H_P Parameter: Treatment Value: 15mM NH4NO3 vs. 30mM Mannitol
  misc_feature: MA Experiment ID: 20001458 Result: Up-regulated in Transcription
  misc_feature: MA Experiment 20001458 PARAMETER Experiment Name: At_50mM_NH4NO3_L-to-H_P Parameter: Age (day) Value: Undefined
  misc_feature: MA Experiment 20001458 PARAMETER Experiment Name: At_50mM_NH4NO3_L-to-H_P Parameter: Organism Value: Undefined
  misc_feature: MA Experiment 20001458 PARAMETER Experiment Name: At_50mM_NH4NO3_L-to-H_P Parameter: Plant Line Value: Undefined
  misc_feature: MA Experiment 20001458 PARAMETER Experiment Name: At_50mM_NH4NO3_L-to-H_P Parameter: Timepoint (hr) Value: 2
  misc_feature: MA Experiment 20001458 PARAMETER Experiment Name: At_50mM_NH4NO3_L-to-H_P Parameter: Tissue Value: Siliques
  misc_feature: MA Experiment 20001458 PARAMETER Experiment Name: At_50mM_NH4NO3_L-to-H_P Parameter: Treatment Value: 50mM NH4NO3 vs. 100mM Manitol
  misc_feature: MA Experiment ID: 20001554 Result: Down-regulated in Transcription
  misc_feature: MA Experiment 20001554 PARAMETER Experiment Name: At_Drought_Soil_Dry_P Parameter: Age (day) Value: 21
  misc_feature: MA Experiment 20001554 PARAMETER Experiment Name: At_Drought_Soil_Dry_P Parameter: Organism Value: A. thaliana
  misc_feature: MA Experiment 20001554 PARAMETER Experiment Name: At_Drought_Soil_Dry_P Parameter: Plant Line Value: WS
  misc_feature: MA Experiment 20001554 PARAMETER Experiment Name: At_Drought_Soil_Dry_P Parameter: Post Timepoint (hr) Value: None
  misc_feature: MA Experiment 20001554 PARAMETER Experiment Name: At_Drought_Soil_Dry_P Parameter: Post-Treatment Value: None
  misc_feature: MA Experiment 20001554 PARAMETER Experiment Name: At_Drought_Soil_Dry_P Parameter: Timepoint (day) Value: 7
  misc_feature: MA Experiment 20001554 PARAMETER Experiment Name: At_Drought_Soil_Dry_P Parameter: Treatment Value: Drought vs. No Drought
  misc_feature: MA Experiment ID: 20001555 Result: Down-regulated in Transcription
  misc_feature: MA Experiment 20001555 PARAMETER Experiment Name: At_Drought_Soil_Dry_P Parameter: Age (day) Value: 24
  misc_feature: MA Experiment 20001555 PARAMETER Experiment Name: At_Drought_Soil_Dry_P Parameter: Organism Value: A. thaliana
  misc_feature: MA Experiment 20001555 PARAMETER Experiment Name: At_Drought_Soil_Dry_P Parameter: Plant Line Value: WS
  misc_feature: MA Experiment 20001555 PARAMETER Experiment Name: At_Drought_Soil_Dry_P Parameter: Post Timepoint (hr) Value: None
  misc_feature: MA Experiment 20001555 PARAMETER Experiment Name: At_Drought_Soil_Dry_P Parameter: Post-Treatment Value: None
  misc_feature: MA Experiment 20001555 PARAMETER Experiment Name: At_Drought_Soil_Dry_P Parameter: Timepoint (day) Value: 10
  misc_feature: MA Experiment 20001555 PARAMETER Experiment Name: At_Drought_Soil_Dry_P Parameter: Treatment Value: Drought vs. No Drought
  misc_feature: MA Experiment ID: 20001556 Result: Down-regulated in Transcription
  misc_feature: MA Experiment 20001556 PARAMETER Experiment Name: At_Drought_Soil_Dry_P Parameter: Age (day) Value: 26
  misc_feature: MA Experiment 20001556 PARAMETER Experiment Name: At_Drought_Soil_Dry_P Parameter: Organism Value: A. thaliana
  misc_feature: MA Experiment 20001556 PARAMETER Experiment Name: At_Drought_Soil_Dry_P Parameter: Plant Line Value: WS
  misc_feature: MA Experiment 20001556 PARAMETER Experiment Name: At_Drought_Soil_Dry_P Parameter: Post Timepoint (hr) Value: None
  misc_feature: MA Experiment 20001556 PARAMETER Experiment Name: At_Drought_Soil_Dry_P Parameter: Post-Treatment Value: None
  misc_feature: MA Experiment 20001556 PARAMETER Experiment Name: At_Drought_Soil_Dry_P Parameter: Timepoint (day) Value: 12
  misc_feature: MA Experiment 20001556 PARAMETER Experiment Name: At_Drought_Soil_Dry_P Parameter: Treatment Value: Drought vs. No Drought
  misc_feature: MA Experiment ID: 20001757 Result: Up-regulated in Transcription
  misc_feature: MA Experiment 20001757 PARAMETER Experiment Name: At_50mM_NH4NO3_L-to-H_P Parameter: Timepoint (hr) Value: 6
  misc_feature: MA Experiment 20001757 PARAMETER Experiment Name: At_50mM_NH4NO3_L-to-H_P Parameter: Tissue Value: Leaf
  misc_feature: MA Experiment 20001757 PARAMETER Experiment Name: At_50mM_NH4NO3_L-to-H_P Parameter: Treatment Value: 50mM NH4NO3 vs 100mM Mannitol
  misc_feature: MA Experiment ID: 20001904 Result: Down-regulated in Transcription
  misc_feature: MA Experiment 20001904 PARAMETER Experiment Name: At_Drought_Reproduction_P Parameter: Age (day) Value: 37
  misc_feature: MA Experiment 20001904 PARAMETER Experiment Name: At_Drought_Reproduction_P Parameter: Organism Value: A. thaliana
  misc_feature: MA Experiment 20001904 PARAMETER Experiment Name: At_Drought_Reproduction_P Parameter: Plant Line Value: WS
  misc_feature: MA Experiment 20001904 PARAMETER Experiment Name: At_Drought_Reproduction_P Parameter: Timepoint (day) Value: 7
  misc_feature: MA Experiment 20001904 PARAMETER Experiment Name: At_Drought_Reproduction_P Parameter: Tissue Value: Rosettes
  misc_feature: MA Experiment 20001904 PARAMETER Experiment Name: At_Drought_Reproduction_P Parameter: Treatment Value: Drought vs. No Drought
  misc_feature: MA Experiment ID: 20001906 Result: Down-regulated in Transcription
  misc_feature: MA Experiment 20001906 PARAMETER Experiment Name: At_Drought_Reproduction_P Parameter: Age (day) Value: 35
  misc_feature: MA Experiment 20001906 PARAMETER Experiment Name: At_Drought_Reproduction_P Parameter: Organism Value: A. thaliana
  misc_feature: MA Experiment 20001906 PARAMETER Experiment Name: At_Drought_Reproduction_P Parameter: Plant Line Value: WS
  misc_feature: MA Experiment 20001906 PARAMETER Experiment Name: At_Drought_Reproduction_P Parameter: Timepoint (day) Value: 5
  misc_feature: MA Experiment 20001906 PARAMETER Experiment Name: At_Drought_Reproduction_P Parameter: Tissue Value: Siliques
  misc_feature: MA Experiment 20001906 PARAMETER Experiment Name: At_Drought_Reproduction_P Parameter: Treatment Value: Drought vs. No Drought
aatggattacttttcttccacacatatataacttaactctctctttttctcttttgctttaaccccctcaaagaaaagataagagccttttaaagttttttttttaccttctcttcatggacttgtctgtacttgataggcttaagtggctgcaacagcaacaaatggtttcacctgagtttcttcagatacttggctcagatgggagagaagagctcaaaagagttgagagttacttgggaaacaacaatgatgagctgcagagtttcagacattttcccgaattcggaccggattatgatactactgatggctgcatttctaggacaagtagcttccatatggagccagtgaagaataatggacacagcagagccattaccttgcagaacaagagaaaaccagagggtaagacagaaaagagagagaagaagaagatcaaagcagaggatgaaacagagccaagcatgaaagggaaatcaaacatgagtaacacagagacatcttcagaaattcagaaaccagattacattcatgttagggctagacgaggtgaagccaccgacagacatagcttagcagagagggcaagaagagaaaagataagcaagaagatgaaatgtctacaagatattgttcctggatgcaacaaagttactggaaaagctggtatgcttgatgagatcatcaactatgtccaatctctgcaacaacaagtcgagttcttgtcgatgaaactctctgtcataaatccagaacttgagtgtcatatcgatgatttatccgcaaaacagtttcaggcttacttcacaggtcctccagaaggtgactcgaagcagtcaatcatggcggattttcggtcttttccattacatcagcaaggatctttagattactcagtcataaactcagaccacaccacatctctcggcgctaaagatcatacatcatcaagctgggaaactcactcacagtgtctttacaacagcttgagaaccgattctgtttccagtttcttcagcctcaagtaaaaaaattagggatagcctcattaaaaaaatcgcggttttttgttgttgtcttatccatttatctatcttatctgaaatttgaaccagaaagacagaggaaaccaatccaaagatctttctcaatctattatcttcatacaaatatagtgatttacatatattccaggggatatgtatatgtgtagaagaaagagaaaaaactcttgtggtcatagcaattcctttttttgt

SEQ ID NO: 41801 - protein, 304 aa, Arabidopsis thaliana
  peptide (1)..(304): Ceres Seq. ID no. 12395473
  misc_feature (148)..(198): Pfam Name: Helix-loop-helix DNA-binding domain Pfam Description: Helix-loop-helix DNA-binding domain
  misc_feature (57)..(291): Homolog of NCBI NO: 18398703 NR Description: expressed protein
  misc_feature (57)..(291): Homolog of NCBI NO: 20127068 NR Description: putative bHLH transcription factor [Arabidopsis
  misc_feature (57)..(291): Homolog of NCBI NO: 30680338 NR Description: bHLH064 putative bHLH transcription factor
  misc_feature (17)..(304): Homolog of NCBI NO: 21537215 NR Description: unknown [Arabidopsis thaliana]
  misc_feature (17)..(304): Homolog of NCBI NO: 34391435 NR Description: putative bHLH transcription factor [Arabidopsis
  misc_feature (9)..(304): Homolog of NCBI NO: 25407737 NR Description: hypothetical protein AT4g36540 [imported] -
  misc_feature (1)..(304): Homolog of NCBI NO: 30690689 NR Description: expressed protein [Arabidopsis thaliana]
  misc_feature (1)..(304): Homolog of NCBI NO: 20127056 NR Description: putative bHLH transcription factor [Arabidopsis
  misc_feature (1)..(304): Homolog of NCBI NO: 15234436 NR Description: putative protein
  misc_feature (1)..(304): Homolog of NCBI NO: 15451016 NR Description: Unknown protein [Arabidopsis thaliana]
MDLSVLDRLKWLQQQQMVSPEFLQILGSDGREELKRVESYLGNNNDELQSFRHFPEFGPDYDTTDGCISRTSSFHMEPVKNNGHSRAITLQNKRKPEGKTEKREKKKIKAEDETEPSMKGKSNMSNTETSSEIQKPDYIHVRARRGEATDRHSLAERARREKISKKMKCLQDIVPGCNKVTGKAGMLDEIINYVQSLQQQVEFLSMKLSVINPELECHIDDLSAKQFQAYFTGPPEGDSKQSIMADFRSFPLHQQGSLDYSVINSDHTTSLGAKDHTSSSWETHSQCLYNSLRTDSVSSFFSLK

SEQ ID NO: 41802 - protein, 288 aa, Arabidopsis thaliana
  peptide (1)..(288): Ceres Seq. ID no. 12395474
  misc_feature (132)..(182): Pfam Name: Helix-loop-helix DNA-binding domain Pfam Description: Helix-loop-helix DNA-binding domain
  misc_feature (41)..(275): Homolog of NCBI NO: 18398703 NR Description: expressed protein
  misc_feature (41)..(275): Homolog of NCBI NO: 20127068 NR Description: putative bHLH transcription factor [Arabidopsis
  misc_feature (41)..(275): Homolog of NCBI NO: 30680338 NR Description: bHLH064 putative bHLH transcription factor
  misc_feature (1)..(288): Homolog of NCBI NO: 21537215 NR Description: unknown [Arabidopsis thaliana]
  misc_feature (1)..(288): Homolog of NCBI NO: 34391435 NR Description: putative bHLH transcription factor [Arabidopsis
  misc_feature (1)..(288): Homolog of NCBI NO: 25407737 NR Description: hypothetical protein AT4g36540 [imported] -
  misc_feature (1)..(288): Homolog of NCBI NO: 30690689 NR Description: expressed protein [Arabidopsis thaliana]
  misc_feature (1)..(288): Homolog of NCBI NO: 20127056 NR Description: putative bHLH transcription factor [Arabidopsis
  misc_feature (1)..(288): Homolog of NCBI NO: 15234436 NR Description: putative protein
  misc_feature (1)..(288): Homolog of NCBI NO: 15451016 NR Description: Unknown protein [Arabidopsis thaliana]
MVSPEFLQILGSDGREELKRVESYLGNNNDELQSFRHFPEFGPDYDTTDGCISRTSSFHMEPVKNNGHSRAITLQNKRKPEGKTEKREKKKIKAEDETEPSMKGKSNMSNTETSSEIQKPDYIHVRARRGEATDRHSLAERARREKISKKMKCLQDIVPGCNKVTGKAGMLDEIINYVQSLQQQVEFLSMKLSVINPELECHIDDLSAKQFQAYFTGPPEGDSKQSIMADFRSFPLHQQGSLDYSVINSDHTTSLGAKDHTSSSWETHSQCLYNSLRTDSVSSFFSLK

SEQ ID NO: 41803 - protein, 229 aa, Arabidopsis thaliana
  peptide (1)..(229): Ceres Seq. ID no. 12395475
  misc_feature (73)..(123): Pfam Name: Helix-loop-helix DNA-binding domain Pfam Description: Helix-loop-helix DNA-binding domain
  misc_feature (1)..(216): Homolog of NCBI NO: 18398703 NR Description: expressed protein
  misc_feature (1)..(216): Homolog of NCBI NO: 20127068 NR Description: putative bHLH transcription factor [Arabidopsis
  misc_feature (1)..(216): Homolog of NCBI NO: 30680338 NR Description: bHLH064 putative bHLH transcription factor
  misc_feature (1)..(229): Homolog of NCBI NO: 21537215 NR Description: unknown [Arabidopsis thaliana]
  misc_feature (1)..(229): Homolog of NCBI NO: 34391435 NR Description: putative bHLH transcription factor [Arabidopsis
  misc_feature (1)..(229): Homolog of NCBI NO: 25407737 NR Description: hypothetical protein AT4g36540 [imported] -
  misc_feature (1)..(229): Homolog of NCBI NO: 30690689 NR Description: expressed protein [Arabidopsis thaliana]
  misc_feature (1)..(229): Homolog of NCBI NO: 20127056 NR Description: putative bHLH transcription factor [Arabidopsis
  misc_feature (1)..(229): Homolog of NCBI NO: 15234436 NR Description: putative protein
  misc_feature (1)..(229): Homolog of NCBI NO: 15451016 NR Description: Unknown protein [Arabidopsis thaliana]
MEPVKNNGHSRAITLQNKRKPEGKTEKREKKKIKAEDETEPSMKGKSNMSNTETSSEIQKPDYIHVRARRGEATDRHSLAERARREKISKKMKCLQDIVPGCNKVTGKAGMLDEIINYVQSLQQQVEFLSMKLSVINPELECHIDDLSAKQFQAYFTGPPEGDSKQSIMADFRSFPLHQQGSLDYSVINSDHTTSLGAKDHTSSSWETHSQCLYNSLRTDSVSSFFSLK

SEQ ID NO: 41804 - DNA, 1141 bp, Arabidopsis thaliana
  misc_feature (1)..(1141): Ceres Seq. ID no. 12738927
  misc_feature: MA Experiment ID: 108434 Result: Down-regulated in Transcription
  misc_feature: MA Experiment 108434 PARAMETER Experiment Name: At_Root_Tips_cDNA_P Parameter: Tissue Value: Root Tips
  misc_feature: MA Experiment ID: 108464 Result: Up-regulated in Transcription
  misc_feature: MA Experiment 108464 PARAMETER Experiment Name: At_Germinating_Seeds_cDNA_P Parameter: Age (day) Value: 4 vs. 0
  misc_feature: MA Experiment 108464 PARAMETER Experiment Name: At_Germinating_Seeds_cDNA_P Parameter: Tissue Value: Germinating Seeds
  misc_feature: MA Experiment ID: 108488 Result: Down-regulated in Transcription
  misc_feature: MA Experiment ID: 108569 Result: Up-regulated in Transcription
  misc_feature: MA Experiment 108569 PARAMETER Experiment Name: At_0.001%_MeJA__cDNA_P Parameter: Timepoint (hr) Value: 6
  misc_feature: MA Experiment 108569 PARAMETER Experiment Name: At_0.001%_MeJA__cDNA_P Parameter: Tissue Value: Aerial
  misc_feature: MA Experiment 108569 PARAMETER Experiment Name: At_0.001%_MeJA__cDNA_P Parameter: Treatment Value: 0.001% MeJA vs. No Treatment
  misc_feature: MA Experiment ID: 108573 Result: Up-regulated in Transcription
  misc_feature: MA Experiment 108573 PARAMETER Experiment Name: At_Drought_cDNA_P Parameter: Timepoint (hr) Value: 6
  misc_feature: MA Experiment 108573 PARAMETER Experiment Name: At_Drought_cDNA_P Parameter: Tissue Value: Aerial
  misc_feature: MA Experiment 108573 PARAMETER Experiment Name: At_Drought_cDNA_P Parameter: Treatment Value: Drought vs. No Drought
  misc_feature: MA Experiment ID: 108585 Result: Up-regulated in Transcription
  misc_feature: MA Experiment 108585 PARAMETER Experiment Name: At_5mM_NaNP_cDNA_P Parameter: Timepoint (hr) Value: 6
  misc_feature: MA Experiment 108585 PARAMETER Experiment Name: At_5mM_NaNP_cDNA_P Parameter: Tissue Value: Aerial
  misc_feature: MA Experiment 108585 PARAMETER Experiment Name: At_5mM_NaNP_cDNA_P Parameter: Treatment Value: null
  misc_feature: MA Experiment ID: 108595 Result: Down-regulated in Transcription
  misc_feature: MA Experiment 108595 PARAMETER Experiment Name: At_Ler-pi_Ovule_cDNA_P Parameter: Plant Line Value: null
  misc_feature: MA Experiment ID: 20000087 Result: Down-regulated in Transcription
  misc_feature: MA Experiment 20000087 PARAMETER Experiment Name: At_100uM_ABA_Mutants_cDNA_P Parameter: Plant Line Value: WS
  misc_feature: MA Experiment 20000087 PARAMETER Experiment Name: At_100uM_ABA_Mutants_cDNA_P Parameter: Timepoint (hr) Value: 6
  misc_feature: MA Experiment 20000087 PARAMETER Experiment Name: At_100uM_ABA_Mutants_cDNA_P Parameter: Tissue Value: Aerial
  misc_feature: MA Experiment 20000087 PARAMETER Experiment Name: At_100uM_ABA_Mutants_cDNA_P Parameter: Treatment Value: 100uM ABA vs. No Treatment
  misc_feature: MA Experiment ID: 20000111 Result: Up-regulated in Transcription
  misc_feature: MA Experiment 20000111 PARAMETER Experiment Name: At_42deg_Heat_cDNA_P Parameter: Temperature (deg C) Value: 42 vs. 22
  misc_feature: MA Experiment 20000111 PARAMETER Experiment Name: At_42deg_Heat_cDNA_P Parameter: Timepoint (hr) Value: 6
  misc_feature: MA Experiment 20000111 PARAMETER Experiment Name: At_42deg_Heat_cDNA_P Parameter: Tissue Value: Aerial
  misc_feature: MA Experiment ID: 20000112 Result: Up-regulated in Transcription
  misc_feature: MA Experiment 20000112 PARAMETER Experiment Name: At_42deg_Heat_cDNA_P Parameter: Temperature (deg C) Value: 42 vs. 22
  misc_feature: MA Experiment 20000112 PARAMETER Experiment Name: At_42deg_Heat_cDNA_P Parameter: Timepoint (hr) Value: 2
  misc_feature: MA Experiment 20000112 PARAMETER Experiment Name: At_42deg_Heat_cDNA_P Parameter: Tissue Value: Aerial
  misc_feature: MA Experiment ID: 20000173 Result: Up-regulated in Transcription
  misc_feature: MA Experiment 20000173 PARAMETER Experiment Name: At_42deg_Heat_P Parameter: Age (day) Value: 14
  misc_feature: MA Experiment 20000173 PARAMETER Experiment Name: At_42deg_Heat_P Parameter: Organism Value: A. thaliana
  misc_feature: MA Experiment 20000173 PARAMETER Experiment Name: At_42deg_Heat_P Parameter: Plant Line Value: WS
  misc_feature: MA Experiment 20000173 PARAMETER Experiment Name: At_42deg_Heat_P Parameter: Temperature (deg C) Value: 42 vs. 22
  misc_feature: MA Experiment 20000173 PARAMETER Experiment Name: At_42deg_Heat_P Parameter: Timepoint (hr) Value: 6
  misc_feature: MA Experiment 20000173 PARAMETER Experiment Name: At_42deg_Heat_P Parameter: Tissue Value: Aerial
  misc_feature: MA Experiment ID: 20000234 Result: Down-regulated in Transcription
  misc_feature: MA Experiment 20000234 PARAMETER Experiment Name: At_Siliques_P Parameter: Age (day) Value: 21
  misc_feature: MA Experiment 20000234 PARAMETER Experiment Name: At_Siliques_P Parameter: Organism Value: A. thaliana
  misc_feature: MA Experiment 20000234 PARAMETER Experiment Name: At_Siliques_P Parameter: Plant Line Value: WS
  misc_feature: MA Experiment 20000234 PARAMETER Experiment Name: At_Siliques_P Parameter: Tissue Value: Less Than 5mm Siliques vs. Whole Plant
  misc_feature: MA Experiment ID: 20000265 Result: Down-regulated in Transcription
  misc_feature: MA Experiment 20000265 PARAMETER Experiment Name: At_Open_Flower_P Parameter: Age (day) Value: 21
  misc_feature: MA Experiment 20000265 PARAMETER Experiment Name: At_Open_Flower_P Parameter: Plant Line Value: WS
  misc_feature: MA Experiment 20000265 PARAMETER Experiment Name: At_Open_Flower_P Parameter: Tissue Value: Closed Flower vs. Whole Plant
  misc_feature: MA Experiment ID: 20001560 Result: Down-regulated in Transcription
  misc_feature: MA Experiment 20001560 PARAMETER Experiment Name: At_Drought_Soil_Dry_P Parameter: Age (day) Value: 28
  misc_feature: MA Experiment 20001560 PARAMETER Experiment Name: At_Drought_Soil_Dry_P Parameter: Organism Value: A. thaliana
  misc_feature: MA Experiment 20001560 PARAMETER Experiment Name: At_Drought_Soil_Dry_P Parameter: Plant Line Value: WS
  misc_feature: MA Experiment 20001560 PARAMETER Experiment Name: At_Drought_Soil_Dry_P Parameter: Post Timepoint (hr) Value: None
  misc_feature: MA Experiment 20001560 PARAMETER Experiment Name: At_Drought_Soil_Dry_P Parameter: Post-Treatment Value: None
  misc_feature: MA Experiment 20001560 PARAMETER Experiment Name: At_Drought_Soil_Dry_P Parameter: Timepoint (day) Value: 14
  misc_feature: MA Experiment 20001560 PARAMETER Experiment Name: At_Drought_Soil_Dry_P Parameter: Treatment Value: Drought vs. No Drought
  misc_feature: MA Experiment ID: 20001905 Result: Up-regulated in Transcription
  misc_feature: MA Experiment 20001905 PARAMETER Experiment Name: At_Drought_Reproduction_P Parameter: Age (day) Value: 40
  misc_feature: MA Experiment 20001905 PARAMETER Experiment Name: At_Drought_Reproduction_P Parameter: Organism Value: A. thaliana
  misc_feature: MA Experiment 20001905 PARAMETER Experiment Name: At_Drought_Reproduction_P Parameter: Plant Line Value: WS
  misc_feature: MA Experiment 20001905 PARAMETER Experiment Name: At_Drought_Reproduction_P Parameter: Timepoint (day) Value: 10
  misc_feature: MA Experiment 20001905 PARAMETER Experiment Name: At_Drought_Reproduction_P Parameter: Tissue Value: Rosettes
  misc_feature: MA Experiment 20001905 PARAMETER Experiment Name: At_Drought_Reproduction_P Parameter: Treatment Value: Drought vs. No Drought
aacaaaggcagacagacaaaaggctaattcggagctctcctccacatcttcttccaaaacacaaacaaacccccaaatttccagaaaaatcagatcattctttcatcaatctcgtcttctttaatcataggtgggaattcatcagctcaaaaacgctgtacccgatcgttttacgactcaaatcagagaagctgattcttttccaatcattccaatttccatttcttccttgggaggttttacaccaaattagccgtcgaaaggggtgcttctttgatctaatttcgatggcgggattagagaaaaacgctgatttctcagggaagacgacgaaatcggctacaacgacgtcgtttttcaacaggtcgcttacaattcacggaagaacagtggtggattcgggccccaaatcccacaatctcaatccttctctcaatcgtaccacctccattaccaaattctacacccccgtagaatcgatgggaacttctcttaaaggcaaagtcaaaaacctttgtagattattcgagacttccaaacccgtcaaacctgccttagctgagattcctcagaagcagaaatccggtaaatcccttttacccgaatcgcggatatcgcctttttcgagcttaaacaactcggtcatccgtcttcccgggacagaggacaggattgtggtgtattttactagcttgagagggattagacggacgtatgaggattgctatgctgtcagaatgatatttagagggtttcgggtttggatcgatgagcgcgacgtctccatggatatcgcttataggaaagagttgcagattgcaatgggagagaagtctgtgtctttgcctcaagttttcattatgggcaagtatgttggtggtgctgatgtgatcaagagtttgtttgagattggtgagcttgctaagattcttaaagagtttccaatgagacaaccagggtttgtttgccattgctgtggggacattagatttgttccgtgttccaattgtagtggcagcaagaaactgtttgatgaggatgaagatagggtcaagagatgtcctgaatgcaatgagaatggattgatacgttgtcctgattgctcttcttgagatatatcatcaatgaacctgaaaaaacc

SEQ ID NO: 41805 - protein, 369 aa, Arabidopsis thaliana
  peptide (1)..(369): Ceres Seq. ID no. 12738928
  misc_feature (223)..(310): Pfam Name: Glutaredoxin Pfam Description: Glutaredoxin
  misc_feature (344)..(367): Homolog of NCBI NO: 15228503 NR Description: hypothetical protein; protein id: At3g28850.1
  misc_feature (221)..(348): Homolog of NCBI NO: 15228503 NR Description: hypothetical protein; protein id: At3g28850.1
  misc_feature (110)..(368): Homolog of NCBI NO: 15237686 NR Description: putative protein; protein id: At5g58530.1
  misc_feature (215)..(365): Homolog of NCBI NO: 10241626 NR Description: Contains similarity to F1N 19.7
  misc_feature (215)..(367): Homolog of NCBI NO: 32490043 NR Description: OSJNBa0063C18.3 [Oryza sativa (japonica
  misc_feature (224)..(369): Homolog of NCBI NO: 34899098 NR Description: hypothetical protein~similar to Arabidopsis
  misc_feature (221)..(367): Homolog of NCBI NO: 15227326 NR Description: unknown protein
  misc_feature (157)..(367): Homolog of NCBI NO: 30694571 NR Description: expressed protein [Arabidopsis thaliana]
  misc_feature (157)..(367): Homolog of NCBI NO: 15451042 NR Description: putative protein [Arabidopsis thaliana]
  misc_feature (96)..(369): Homolog of NCBI NO: 15240723 NR Description: putative protein
QRQTDKRLIRSSPPHLLPKHKQTPKFPEKSDHSFINLVFFNHRWEFISSKTLYPIVLRLKSEKLILFQSFQFPFLPWEVLHQISRRKGCFFDLISMAGLEKNADFSGKTTKSATTTSFFNRSLTIHGRTVVDSGPKSHNLNPSLNRTTSITKFYTPVESMGTSLKGKVKNLCRLFETSKPVKPALAEIPQKQKSGKSLLPESRISPFSSLNNSVIRLPGTEDRIVVYFTSLRGIRRTYEDCYAVRMIFRGFRVWIDERDVSMDIAYRKELQIAMGEKSVSLPQVFIMGKYVGGADVIKSLFEIGELAKILKEFPMRQPGFVCHCCGDIRFVPCSNCSGSKKLFDEDEDRVKRCPECNENGLIRCPDCSS

SEQ ID NO: 41806 - protein, 274 aa, Arabidopsis thaliana; identical to SEQ ID NO: 40766
  peptide (1)..(274): Ceres Seq. ID no. 12738929
  misc_feature (128)..(215): Pfam Name: Glutaredoxin Pfam Description: Glutaredoxin
  misc_feature (249)..(272): Homolog of NCBI NO: 15228503 NR Description: hypothetical protein; protein id: At3g28850.1
  misc_feature (126)..(253): Homolog of NCBI NO: 15228503 NR Description: hypothetical protein; protein id: At3g28850.1
  misc_feature (15)..(273): Homolog of NCBI NO: 15237686 NR Description: putative protein; protein id: At5g58530.1
  misc_feature (120)..(270): Homolog of NCBI NO: 10241626 NR Description: Contains similarity to F1N 19.7
  misc_feature (120)..(272): Homolog of NCBI NO: 32490043 NR Description: OSJNBa0063C18.3 [Oryza sativa (japonica
  misc_feature (129)..(274): Homolog of NCBI NO: 34899098 NR Description: hypothetical protein~similar to Arabidopsis
  misc_feature (126)..(272): Homolog of NCBI NO: 15227326 NR Description: unknown protein
  misc_feature (62)..(272): Homolog of NCBI NO: 30694571 NR Description: expressed protein [Arabidopsis thaliana]
  misc_feature (62)..(272): Homolog of NCBI NO: 15451042 NR Description: putative protein [Arabidopsis thaliana]
  misc_feature (1)..(274): Homolog of NCBI NO: 15240723 NR Description: putative protein

SEQ ID NO: 41807 - protein, 210 aa, Arabidopsis thaliana; identical to SEQ ID NO: 40767
  peptide (1)..(210): Ceres Seq. ID no. 12738930
  misc_feature (64)..(151): Pfam Name: Glutaredoxin Pfam Description: Glutaredoxin
  misc_feature (185)..(208): Homolog of NCBI NO: 15228503 NR Description: hypothetical protein; protein id: At3g28850.1
  misc_feature (62)..(189): Homolog of NCBI NO: 15228503 NR Description: hypothetical protein; protein id: At3g28850.1
  misc_feature (1)..(209): Homolog of NCBI NO: 15237686 NR Description: putative protein; protein id: At5g58530.1
  misc_feature (56)..(206): Homolog of NCBI NO: 10241626 NR Description: Contains similarity to F1N 19.7
  misc_feature (56)..(208): Homolog of NCBI NO: 32490043 NR Description: OSJNBa0063C18.3 [Oryza sativa (japonica
  misc_feature (65)..(210): Homolog of NCBI NO: 34899098 NR Description: hypothetical protein~similar to Arabidopsis
  misc_feature (62)..(208): Homolog of NCBI NO: 15227326 NR Description: unknown protein
  misc_feature (1)..(208): Homolog of NCBI NO: 30694571 NR Description: expressed protein [Arabidopsis thaliana]
  misc_feature (1)..(208): Homolog of NCBI NO: 15451042 NR Description: putative protein [Arabidopsis thaliana]
  misc_feature (1)..(210): Homolog of NCBI NO: 15240723 NR Description: putative protein

SEQ ID NO: 41808 - DNA, 1801 bp, Arabidopsis thaliana
  misc_feature (1)..(1801): Ceres Seq. ID no. 12328410
  misc_feature: MA Experiment ID: 108464 Result: Down-regulated in Transcription
  misc_feature: MA Experiment 108464 PARAMETER Experiment Name: At_Germinating_Seeds_cDNA_P Parameter: Age (day) Value: 4 vs. 0
  misc_feature: MA Experiment 108464 PARAMETER Experiment Name: At_Germinating_Seeds_cDNA_P Parameter: Tissue Value: Germinating Seeds
  misc_feature: MA Experiment ID: 108488 Result: Down-regulated in Transcription
  misc_feature: MA Experiment ID: 108561 Result: Up-regulated in Transcription
  misc_feature: MA Experiment 108561 PARAMETER Experiment Name: At_100uM_ABA_cDNA_P Parameter: Timepoint (hr) Value: 6
  misc_feature: MA Experiment 108561 PARAMETER Experiment Name: At_100uM_ABA_cDNA_P Parameter: Tissue Value: Aerial
  misc_feature: MA Experiment 108561 PARAMETER Experiment Name: At_100uM_ABA_cDNA_P Parameter: Treatment Value: 100uM ABA vs. No Treatment
  misc_feature: MA Experiment ID: 108569 Result: Up-regulated in Transcription
  misc_feature: MA Experiment 108569 PARAMETER Experiment Name: At_0.001%_MeJA__cDNA_P Parameter: Timepoint (hr) Value: 6
  misc_feature: MA Experiment 108569 PARAMETER Experiment Name: At_0.001%_MeJA__cDNA_P Parameter: Tissue Value: Aerial
  misc_feature: MA Experiment 108569 PARAMETER Experiment Name: At_0.001%_MeJA__cDNA_P Parameter: Treatment Value: 0.001% MeJA vs. No Treatment
  misc_feature: MA Experiment ID: 108572 Result: Up-regulated in Transcription
  misc_feature: MA Experiment 108572 PARAMETER Experiment Name: At_Drought_cDNA_P Parameter: Timepoint (hr) Value: 1
  misc_feature: MA Experiment 108572 PARAMETER Experiment Name: At_Drought_cDNA_P Parameter: Tissue Value: Aerial
  misc_feature: MA Experiment 108572 PARAMETER Experiment Name: At_Drought_cDNA_P Parameter: Treatment Value: Drought vs. No Drought
  misc_feature: MA Experiment ID: 108573 Result: Up-regulated in Transcription
  misc_feature: MA Experiment 108573 PARAMETER Experiment Name: At_Drought_cDNA_P Parameter: Timepoint (hr) Value: 6
  misc_feature: MA Experiment 108573 PARAMETER Experiment Name: At_Drought_cDNA_P Parameter: Tissue Value: Aerial
  misc_feature: MA Experiment 108573 PARAMETER Experiment Name: At_Drought_cDNA_P Parameter: Treatment Value: Drought vs. No Drought
  misc_feature: MA Experiment ID: 108585 Result: Up-regulated in Transcription
  misc_feature: MA Experiment 108585 PARAMETER Experiment Name: At_5mM_NaNP_cDNA_P Parameter: Timepoint (hr) Value: 6
  misc_feature: MA Experiment 108585 PARAMETER Experiment Name: At_5mM_NaNP_cDNA_P Parameter: Tissue Value: Aerial
  misc_feature: MA Experiment 108585 PARAMETER Experiment Name: At_5mM_NaNP_cDNA_P Parameter: Treatment Value: null
  misc_feature: MA Experiment ID: 108595 Result: Up-regulated in Transcription
  misc_feature: MA Experiment 108595 PARAMETER Experiment Name: At_Ler-pi_Ovule_cDNA_P Parameter: Plant Line Value: null
  misc_feature: MA Experiment ID: 108605 Result: Up-regulated in Transcription
  misc_feature: MA Experiment 108605 PARAMETER Experiment Name: At_100uM_ABA_cDNA_P Parameter: Timepoint (hr) Value: 6
  misc_feature: MA Experiment 108605 PARAMETER Experiment Name: At_100uM_ABA_cDNA_P Parameter: Tissue Value: Aerial
  misc_feature: MA Experiment 108605 PARAMETER Experiment Name: At_100uM_ABA_cDNA_P Parameter: Treatment Value: 100uM ABA vs. No Treatment
  misc_feature: MA Experiment ID: 108607 Result: Up-regulated in Transcription
  misc_feature: MA Experiment 108607 PARAMETER Experiment Name: At_100uM_ABA_cDNA_P Parameter: Timepoint (hr) Value: 4
  misc_feature: MA Experiment 108607 PARAMETER Experiment Name: At_100uM_ABA_cDNA_P Parameter: Tissue Value: Aerial
  misc_feature: MA Experiment 108607 PARAMETER Experiment Name: At_100uM_ABA_cDNA_P Parameter: Treatment Value: 100uM ABA vs. No Treatment
  misc_feature: MA Experiment ID: 108609 Result: Up-regulated in Transcription
  misc_feature: MA Experiment 108609 PARAMETER Experiment Name: At_100uM_ABA_cDNA_P Parameter: Timepoint (hr) Value: 24
  misc_feature: MA Experiment 108609 PARAMETER Experiment Name: At_100uM_ABA_cDNA_P Parameter: Tissue Value: Aerial
  misc_feature: MA Experiment 108609 PARAMETER Experiment Name: At_100uM_ABA_cDNA_P Parameter: Treatment Value: 100uM ABA vs. No Treatment
  misc_feature: MA Experiment ID: 108668 Result: Up-regulated in Transcription
  misc_feature: MA Experiment 108668 PARAMETER Experiment Name: At_2mM_SA_cDNA_P Parameter: Plant Line Value: WS
  misc_feature: MA Experiment 108668 PARAMETER Experiment Name: At_2mM_SA_cDNA_P Parameter: Timepoint (hr) Value: 6
  misc_feature: MA Experiment 108668 PARAMETER Experiment Name: At_2mM_SA_cDNA_P Parameter: Treatment Value: 2mM SA vs. No Treatment
  misc_feature: MA Experiment ID: 20000069 Result: Up-regulated in Transcription
  misc_feature: MA Experiment 20000069 PARAMETER Experiment Name: At_100uM_ABA_Mutants_cDNA_P Parameter: Plant Line Value: CS23
  misc_feature: MA Experiment 20000069 PARAMETER Experiment Name: At_100uM_ABA_Mutants_cDNA_P Parameter: Timepoint (hr) Value: 6
  misc_feature: MA Experiment 20000069 PARAMETER Experiment Name: At_100uM_ABA_Mutants_cDNA_P Parameter: Tissue Value: Aerial
  misc_feature: MA Experiment 20000069 PARAMETER Experiment Name: At_100uM_ABA_Mutants_cDNA_P Parameter: Treatment Value: 100uM ABA vs. No Treatment
  misc_feature: MA Experiment ID: 20000070 Result: Up-regulated in Transcription
  misc_feature: MA Experiment 20000070 PARAMETER Experiment Name: At_100uM_ABA_Mutants_cDNA_P Parameter: Plant Line Value: CS24
  misc_feature: MA Experiment 20000070 PARAMETER Experiment Name: At_100uM_ABA_Mutants_cDNA_P Parameter: Timepoint (hr) Value: 6
  misc_feature: MA Experiment 20000070 PARAMETER Experiment Name: At_100uM_ABA_Mutants_cDNA_P Parameter: Tissue Value: Aerial
  misc_feature: MA Experiment 20000070 PARAMETER Experiment Name: At_100uM_ABA_Mutants_cDNA_P Parameter: Treatment Value: 100uM ABA vs. No Treatment
  misc_feature: MA Experiment ID: 20000071 Result: Up-regulated in Transcription
  misc_feature: MA Experiment 20000071 PARAMETER Experiment Name: At_100uM_ABA_Mutants_cDNA_P Parameter: Plant Line Value: CS8104
  misc_feature: MA Experiment 20000071 PARAMETER Experiment Name: At_100uM_ABA_Mutants_cDNA_P Parameter: Timepoint (hr) Value: 6
  misc_feature: MA Experiment 20000071 PARAMETER Experiment Name: At_100uM_ABA_Mutants_cDNA_P Parameter: Tissue Value: Aerial
  misc_feature: MA Experiment 20000071 PARAMETER Experiment Name: At_100uM_ABA_Mutants_cDNA_P Parameter: Treatment Value: 100uM ABA vs. No Treatment
  misc_feature: MA Experiment ID: 20000072 Result: Up-regulated in Transcription
  misc_feature: MA Experiment 20000072 PARAMETER Experiment Name: At_100uM_ABA_Mutants_cDNA_P Parameter: Plant Line Value: CS8105
  misc_feature: MA Experiment 20000072 PARAMETER Experiment Name: At_100uM_ABA_Mutants_cDNA_P Parameter: Timepoint (hr) Value: 6
  misc_feature: MA Experiment 20000072 PARAMETER Experiment Name: At_100uM_ABA_Mutants_cDNA_P Parameter: Tissue Value: Aerial
  misc_feature: MA Experiment 20000072 PARAMETER Experiment Name: At_100uM_ABA_Mutants_cDNA_P Parameter: Treatment Value: 100uM ABA vs. No Treatment
  misc_feature: MA Experiment ID: 20000087 Result: Up-regulated in Transcription
  misc_feature: MA Experiment 20000087 PARAMETER Experiment Name: At_100uM_ABA_Mutants_cDNA_P Parameter: Plant Line Value: WS
  misc_feature: MA Experiment 20000087 PARAMETER Experiment Name: At_100uM_ABA_Mutants_cDNA_P Parameter: Timepoint (hr) Value: 6
  misc_feature: MA Experiment 20000087 PARAMETER Experiment Name: At_100uM_ABA_Mutants_cDNA_P Parameter: Tissue Value: Aerial
  misc_feature: MA Experiment 20000087 PARAMETER Experiment Name: At_100uM_ABA_Mutants_cDNA_P Parameter: Treatment Value: 100uM ABA vs. No Treatment
  misc_feature: MA Experiment ID: 20000088 Result: Up-regulated in Transcription
  misc_feature: MA Experiment 20000088 PARAMETER Experiment Name: At_100uM_ABA_Mutants_cDNA_P Parameter: Plant Line Value: Landsberg
  misc_feature: MA Experiment 20000088 PARAMETER Experiment Name: At_100uM_ABA_Mutants_cDNA_P Parameter: Timepoint (hr) Value: 6
  misc_feature: MA Experiment 20000088 PARAMETER Experiment Name: At_100uM_ABA_Mutants_cDNA_P Parameter: Tissue Value: Aerial
  misc_feature: MA Experiment 20000088 PARAMETER Experiment Name: At_100uM_ABA_Mutants_cDNA_P Parameter: Treatment Value: 100uM ABA vs. No Treatment
  misc_feature: MA Experiment ID: 20000089 Result: Up-regulated in Transcription
  misc_feature: MA Experiment ID: 20000117 Result: Up-regulated in Transcription
  misc_feature: MA Experiment 20000117 PARAMETER Experiment Name: At_100uM_ABA_Mutants_cDNA_P Parameter: Plant Line Value: Columbia
  misc_feature: MA Experiment 20000117 PARAMETER Experiment Name: At_100uM_ABA_Mutants_cDNA_P Parameter: Timepoint (hr) Value: 6
  misc_feature: MA Experiment 20000117 PARAMETER Experiment Name: At_100uM_ABA_Mutants_cDNA_P Parameter: Tissue Value: Aerial
  misc_feature: MA Experiment 20000117 PARAMETER Experiment Name: At_100uM_ABA_Mutants_cDNA_P Parameter: Treatment Value: 100uM ABA vs. No Treatment
  misc_feature: MA Experiment ID: 20000169 Result: Up-regulated in Transcription
  misc_feature: MA Experiment 20000169 PARAMETER Experiment Name: At_100uM_ABA_P Parameter: Age (day) Value: 14
  misc_feature: MA Experiment 20000169 PARAMETER Experiment Name: At_100uM_ABA_P Parameter: Organism Value: A. thaliana
  misc_feature: MA Experiment 20000169 PARAMETER Experiment Name: At_100uM_ABA_P Parameter: Plant Line Value: WS
  misc_feature: MA Experiment 20000169 PARAMETER Experiment Name: At_100uM_ABA_P Parameter: Timepoint (hr) Value: 6
  misc_feature: MA Experiment 20000169 PARAMETER Experiment Name: At_100uM_ABA_P Parameter: Tissue Value: Aerial
  misc_feature: MA Experiment 20000169 PARAMETER Experiment Name: At_100uM_ABA_P Parameter: Treatment Value: 100uM ABA vs. No Treatment
  misc_feature: MA Experiment ID: 20000182 Result: Up-regulated in Transcription
  misc_feature: MA Experiment 20000182 PARAMETER Experiment Name: At_2mM_SA_P Parameter: Age (day) Value: 14
  misc_feature: MA Experiment 20000182 PARAMETER Experiment Name: At_2mM_SA_P Parameter: Organism Value: A. thaliana
  misc_feature: MA Experiment 20000182 PARAMETER Experiment Name: At_2mM_SA_P Parameter: Plant Line Value: WS
  misc_feature: MA Experiment 20000182 PARAMETER Experiment Name: At_2mM_SA_P Parameter: Timepoint (hr) Value: 6
  misc_feature: MA Experiment 20000182 PARAMETER Experiment Name: At_2mM_SA_P Parameter: Tissue Value: Aerial
  misc_feature: MA Experiment 20000182 PARAMETER Experiment Name: At_2mM_SA_P Parameter: Treatment Value: 2mM SA vs. No Treatment
  misc_feature: MA Experiment ID: 20000184 Result: Down-regulated in Transcription
  misc_feature: MA Experiment 20000184 PARAMETER Experiment Name: At_Shoots__P Parameter: Age (day) Value: 7
  misc_feature: MA Experiment 20000184 PARAMETER Experiment Name: At_Shoots__P Parameter: Tissue Value: Shoots vs. Whole Plant
  misc_feature: MA Experiment ID: 20000234 Result: Down-regulated in Transcription
  misc_feature: MA Experiment 20000234 PARAMETER Experiment Name: At_Siliques_P Parameter: Age (day) Value: 21
  misc_feature: MA Experiment 20000234 PARAMETER Experiment Name: At_Siliques_P Parameter: Organism Value: A. thaliana
  misc_feature: MA Experiment 20000234 PARAMETER Experiment Name: At_Siliques_P Parameter: Plant Line Value: WS
  misc_feature: MA Experiment 20000234 PARAMETER Experiment Name: At_Siliques_P Parameter: Tissue Value: Less Than 5mm Siliques vs. Whole Plant
  misc_feature: MA Experiment ID: 20000235 Result: Down-regulated in Transcription
  misc_feature: MA Experiment 20000235 PARAMETER Experiment Name: At_Siliques_P Parameter: Age (day) Value: 21
  misc_feature: MA Experiment 20000235 PARAMETER Experiment Name: At_Siliques_P Parameter: Organism Value: A. thaliana
  misc_feature: MA Experiment 20000235 PARAMETER Experiment Name: At_Siliques_P Parameter: Plant Line Value: WS
  misc_feature: MA Experiment 20000235 PARAMETER Experiment Name: At_Siliques_P Parameter: Tissue Value: 5-10mm Siliques vs. Whole Plant
  misc_feature: MA Experiment ID: 20000265 Result: Down-regulated in Transcription
  misc_feature: MA Experiment 20000265 PARAMETER Experiment Name: At_Open_Flower_P Parameter: Age (day) Value: 21
  misc_feature: MA Experiment 20000265 PARAMETER Experiment Name: At_Open_Flower_P Parameter: Plant Line Value: WS
  misc_feature: MA Experiment 20000265 PARAMETER Experiment Name: At_Open_Flower_P Parameter: Tissue Value: Closed Flower vs. Whole Plant
  misc_feature: MA Experiment ID: 20000267 Result: Up-regulated in Transcription
  misc_feature: MA Experiment 20000267 PARAMETER Experiment Name: At_Drought_P Parameter: Age (day) Value: 7
  misc_feature: MA Experiment 20000267 PARAMETER Experiment Name: At_Drought_P Parameter: Organism Value: A. thaliana
  misc_feature: MA Experiment 20000267 PARAMETER Experiment Name: At_Drought_P Parameter: Plant Line Value: WS
  misc_feature: MA Experiment 20000267 PARAMETER Experiment Name: At_Drought_P Parameter: Timepoint (hr) Value: 6
  misc_feature: MA Experiment 20000267 PARAMETER Experiment Name: At_Drought_P Parameter: Tissue Value: Whole Plant
  misc_feature: MA Experiment 20000267 PARAMETER Experiment Name: At_Drought_P Parameter: Treatment Value: Drought vs. No Drought
  misc_feature: MA Experiment ID: 20000268 Result: Up-regulated in Transcription
  misc_feature: MA Experiment 20000268 PARAMETER Experiment Name: At_100mM_NaCl__P Parameter: Age (day) Value: 14
  misc_feature: MA Experiment 20000268 PARAMETER Experiment Name: At_100mM_NaCl__P Parameter: Organism Value: A. thaliana
  misc_feature: MA Experiment 20000268 PARAMETER Experiment Name: At_100mM_NaCl__P Parameter: Plant Line Value: WS
  misc_feature: MA Experiment 20000268 PARAMETER Experiment Name: At_100mM_NaCl__P Parameter: Timepoint (hr) Value: 6
  misc_feature: MA Experiment 20000268 PARAMETER Experiment Name: At_100mM_NaCl__P Parameter: Tissue Value: Whole Plant
  misc_feature: MA Experiment 20000268 PARAMETER Experiment Name: At_100mM_NaCl__P Parameter: Treatment Value: 100mM NaCl vs. No Treatment
  misc_feature: MA Experiment ID: 20000436 Result: Up-regulated in Transcription
  misc_feature: MA Experiment 20000436 PARAMETER Experiment Name: At_Drought_P Parameter: Age (day) Value: 7
  misc_feature: MA Experiment 20000436 PARAMETER Experiment Name: At_Drought_P Parameter: Organism Value: A. thaliana
  misc_feature: MA Experiment 20000436 PARAMETER Experiment Name: At_Drought_P Parameter: Plant Line Value: WS
  misc_feature: MA Experiment 20000436 PARAMETER Experiment Name: At_Drought_P Parameter: Timepoint (hr) Value: 12
  misc_feature: MA Experiment 20000436 PARAMETER Experiment Name: At_Drought_P Parameter: Tissue Value: Whole Plant
  misc_feature: MA Experiment 20000436 PARAMETER Experiment Name: At_Drought_P Parameter: Treatment Value: Drought vs. No Drought
  misc_feature: MA Experiment ID: 20000437 Result: Up-regulated in Transcription
  misc_feature: MA Experiment 20000437 PARAMETER Experiment Name: At_Drought_P Parameter: Age (day) Value: 8
  misc_feature: MA Experiment 20000437 PARAMETER Experiment Name: At_Drought_P Parameter: Organism Value: A. thaliana
  misc_feature: MA Experiment 20000437 PARAMETER Experiment Name: At_Drought_P Parameter: Plant Line Value: WS
  misc_feature: MA Experiment 20000437 PARAMETER Experiment Name: At_Drought_P Parameter: Timepoint (hr) Value: 24
  misc_feature: MA Experiment 20000437 PARAMETER Experiment Name: At_Drought_P Parameter: Tissue Value: Whole Plant
  misc_feature: MA Experiment 20000437 PARAMETER Experiment Name: At_Drought_P Parameter: Treatment Value: Drought vs. No Drought
  misc_feature: MA Experiment ID: 20000438 Result: Down-regulated in Transcription
  misc_feature: MA Experiment 20000438 PARAMETER Experiment Name: At_Shoots__P Parameter: Age (day) Value: 14
  misc_feature: MA Experiment 20000438 PARAMETER Experiment Name: At_Shoots__P Parameter: Tissue Value: Shoots vs. Whole Plant
  misc_feature: MA Experiment ID: 20000439 Result: Down-regulated in Transcription
  misc_feature: MA Experiment 20000439 PARAMETER Experiment Name: At_Roots__P Parameter: Age (day) Value: 14 vs. 21
  misc_feature: MA Experiment 20000439 PARAMETER Experiment Name: At_Roots__P Parameter: Organism Value: A. thaliana
  misc_feature: MA Experiment 20000439 PARAMETER Experiment Name: At_Roots__P Parameter: Tissue Value: Roots vs. Whole Plant
  misc_feature: MA Experiment ID: 20000451 Result: Down-regulated in Transcription
  misc_feature: MA Experiment 20000451 PARAMETER Experiment Name: At_CS6879_Shoots-Roots_P Parameter: Age (day) Value: 14
  misc_feature: MA Experiment 20000451 PARAMETER Experiment Name: At_CS6879_Shoots-Roots_P Parameter: Organism Value: A. thaliana
  misc_feature: MA Experiment 20000451 PARAMETER Experiment Name: At_CS6879_Shoots-Roots_P Parameter: Plant Line Value: CS6879 vs. WS
  misc_feature: MA Experiment 20000451 PARAMETER Experiment Name: At_CS6879_Shoots-Roots_P Parameter: Tissue Value: Roots
  misc_feature: MA Experiment ID: 20000453 Result: Up-regulated in Transcription
  misc_feature: MA Experiment 20000453 PARAMETER Experiment Name: At_100uM_ABA_P Parameter: Age (day) Value: 15
  misc_feature: MA Experiment 20000453 PARAMETER Experiment Name: At_100uM_ABA_P Parameter: Organism Value: A. thaliana
  misc_feature: MA Experiment 20000453 PARAMETER Experiment Name: At_100uM_ABA_P Parameter: Plant Line Value: WS
  misc_feature: MA Experiment 20000453 PARAMETER Experiment Name: At_100uM_ABA_P Parameter: Timepoint (hr) Value: 24
  misc_feature: MA Experiment 20000453 PARAMETER Experiment Name: At_100uM_ABA_P Parameter: Tissue Value: Aerial
  misc_feature: MA Experiment 20000453 PARAMETER Experiment Name: At_100uM_ABA_P Parameter: Treatment Value: 100uM ABA vs. No Treatment
  misc_feature: MA Experiment ID: 20000455 Result: Up-regulated in Transcription
  misc_feature: MA Experiment 20000455 PARAMETER Experiment Name: At_100uM_ABA_P Parameter: Age (day) Value: 16
  misc_feature: MA Experiment 20000455 PARAMETER Experiment Name: At_100uM_ABA_P Parameter: Organism Value: A. thaliana
  misc_feature: MA Experiment 20000455 PARAMETER Experiment Name: At_100uM_ABA_P Parameter: Plant Line Value: WS
  misc_feature: MA Experiment 20000455 PARAMETER Experiment Name: At_100uM_ABA_P Parameter: Timepoint (hr) Value: 48
  misc_feature: MA Experiment 20000455 PARAMETER Experiment Name: At_100uM_ABA_P Parameter: Tissue Value: Aerial
  misc_feature: MA Experiment 20000455 PARAMETER Experiment Name: At_100uM_ABA_P Parameter: Treatment Value: 100uM ABA vs. No Treatment
  misc_feature: MA Experiment ID: 20000495 Result: Down-regulated in Transcription
  misc_feature: MA Experiment 20000495 PARAMETER Experiment Name: At_Guard_Cells_P Parameter: Harvest Date Value: 8/2/2002
  misc_feature: MA Experiment 20000495 PARAMETER Experiment Name: At_Guard_Cells_P Parameter: Organism Value: A. thaliana
  misc_feature: MA Experiment 20000495 PARAMETER Experiment Name: At_Guard_Cells_P Parameter: Tissue Value: Guard Cells vs. Leaves
  misc_feature: MA Experiment ID: 20000496 Result: Down-regulated in Transcription
  misc_feature: MA Experiment 20000496 PARAMETER Experiment Name: At_Guard_Cells_P Parameter: Harvest Date Value: 7/19/2002
  misc_feature: MA Experiment 20000496 PARAMETER Experiment Name: At_Guard_Cells_P Parameter: Organism Value: Canola
  misc_feature: MA Experiment 20000496 PARAMETER Experiment Name: At_Guard_Cells_P Parameter: Tissue Value: Guard Cells vs. Leaves
  misc_feature: MA Experiment ID: 20000527 Result: Down-regulated in Transcription
  misc_feature: MA Experiment 20000527 PARAMETER Experiment Name: At_10percent_PEG_P Parameter: Age (day) Value: 20
  misc_feature: MA Experiment 20000527 PARAMETER Experiment Name: At_10percent_PEG_P Parameter: Organism Value: A. thaliana
  misc_feature: MA Experiment 20000527 PARAMETER Experiment Name: At_10percent_PEG_P Parameter: Plant Line Value: WS
  misc_feature: MA Experiment 20000527 PARAMETER Experiment Name: At_10percent_PEG_P Parameter: Timepoint (day) Value: 20
  misc_feature: MA Experiment 20000527 PARAMETER Experiment Name: At_10percent_PEG_P Parameter: Tissue Value: Whole Plant
  misc_feature: MA Experiment 20000527 PARAMETER Experiment Name: At_10percent_PEG_P Parameter: Treatment Value: 10percent PEG vs. No Treatment
  misc_feature: MA Experiment ID: 20000709 Result: Down-regulated in Transcription
  misc_feature: MA Experiment 20000709 PARAMETER Experiment Name: At_15mM_NH4NO3_L-to-H_P Parameter: Age (hr) Value: 14
  misc_feature: MA Experiment 20000709 PARAMETER Experiment Name: At_15mM_NH4NO3_L-to-H_P Parameter: Organism Value: A. thaliana
  misc_feature: MA Experiment 20000709 PARAMETER Experiment Name: At_15mM_NH4NO3_L-to-H_P Parameter: Plant Line Value: WS
  misc_feature: MA Experiment 20000709 PARAMETER Experiment Name: At_15mM_NH4NO3_L-to-H_P Parameter: Timepoint (hr) Value: 4
  misc_feature: MA Experiment 20000709 PARAMETER Experiment Name: At_15mM_NH4NO3_L-to-H_P Parameter: Tissue Value: Aerial
  misc_feature: MA Experiment 20000709 PARAMETER Experiment Name: At_15mM_NH4NO3_L-to-H_P Parameter: Treatment Value: 15mM NH4NO3 vs. 30mM Mannitol
  misc_feature: MA Experiment ID: 20001450 Result: Up-regulated in Transcription
  misc_feature: MA Experiment 20001450 PARAMETER Experiment Name: At_Far-red-induction_P Parameter: Age (day) Value: 7
  misc_feature: MA Experiment 20001450 PARAMETER Experiment Name: At_Far-red-induction_P Parameter: Light Value: Far-red vs. White
  misc_feature: MA Experiment 20001450 PARAMETER Experiment Name: At_Far-red-induction_P Parameter: Organism Value: A. thaliana
  misc_feature: MA Experiment 20001450 PARAMETER Experiment Name: At_Far-red-induction_P Parameter: Plant Line Value: Columbia
  misc_feature: MA Experiment 20001450 PARAMETER Experiment Name: At_Far-red-induction_P Parameter: Timepoint (hr) Value: 8
  misc_feature: MA Experiment 20001450 PARAMETER Experiment Name: At_Far-red-induction_P Parameter: Tissue Value: Whole Plant
  misc_feature: MA Experiment ID: 20001504 Result: Up-regulated in Transcription
  misc_feature: MA Experiment 20001504 PARAMETER Experiment Name: At_Far-red-enriched_P Parameter: Age (day) Value: 10
  misc_feature: MA Experiment 20001504 PARAMETER Experiment Name: At_Far-red-enriched_P Parameter: Light Value: Far-red enriched vs. White
  misc_feature: MA Experiment 20001504 PARAMETER Experiment Name: At_Far-red-enriched_P Parameter: Organism Value: A. thaliana
  misc_feature: MA Experiment 20001504 PARAMETER Experiment Name: At_Far-red-enriched_P Parameter: Plant Line Value: Columbia
  misc_feature: MA Experiment 20001504 PARAMETER Experiment Name: At_Far-red-enriched_P Parameter: Timepoint (day) Value: 6
  misc_feature: MA Experiment 20001504 PARAMETER Experiment Name: At_Far-red-enriched_P Parameter: Tissue Value: Whole Plant
  misc_feature: MA Experiment ID: 20001554 Result: Up-regulated in Transcription
  misc_feature: MA Experiment 20001554 PARAMETER Experiment Name: At_Drought_Soil_Dry_P Parameter: Age (day) Value: 21
  misc_feature: MA Experiment 20001554 PARAMETER Experiment Name: At_Drought_Soil_Dry_P Parameter: Organism Value: A. thaliana
  misc_feature: MA Experiment 20001554 PARAMETER Experiment Name: At_Drought_Soil_Dry_P Parameter: Plant Line Value: WS
  misc_feature: MA Experiment 20001554 PARAMETER Experiment Name: At_Drought_Soil_Dry_P Parameter: Post Timepoint (hr) Value: None
  misc_feature: MA Experiment 20001554 PARAMETER Experiment Name: At_Drought_Soil_Dry_P Parameter: Post-Treatment Value: None
  misc_feature: MA Experiment 20001554 PARAMETER Experiment Name: At_Drought_Soil_Dry_P Parameter: Timepoint (day) Value: 7
  misc_feature: MA Experiment 20001554 PARAMETER Experiment Name: At_Drought_Soil_Dry_P Parameter: Treatment Value: Drought vs. No Drought
  misc_feature: MA Experiment ID: 20001555 Result: Up-regulated in Transcription
  misc_feature: MA Experiment 20001555 PARAMETER Experiment Name: At_Drought_Soil_Dry_P Parameter: Age (day) Value: 24
  misc_feature: MA Experiment 20001555 PARAMETER Experiment Name: At_Drought_Soil_Dry_P Parameter: Organism Value: A. thaliana
  misc_feature: MA Experiment 20001555 PARAMETER Experiment Name: At_Drought_Soil_Dry_P Parameter: Plant Line Value: WS
  misc_feature: MA Experiment 20001555 PARAMETER Experiment Name: At_Drought_Soil_Dry_P Parameter: Post Timepoint (hr) Value: None
  misc_feature: MA Experiment 20001555 PARAMETER Experiment Name: At_Drought_Soil_Dry_P Parameter: Post-Treatment Value: None
  misc_feature: MA Experiment 20001555 PARAMETER Experiment Name: At_Drought_Soil_Dry_P Parameter: Timepoint (day) Value: 10
  misc_feature: MA Experiment 20001555 PARAMETER Experiment Name: At_Drought_Soil_Dry_P Parameter: Treatment Value: Drought vs. No Drought
  misc_feature: MA Experiment ID: 20001558 Result: Down-regulated in Transcription
  misc_feature: MA Experiment 20001558 PARAMETER Experiment Name: At_Drought_Soil_Dry_P Parameter: Age (day) Value: 27
  misc_feature: MA Experiment 20001558 PARAMETER Experiment Name: At_Drought_Soil_Dry_P Parameter: Organism Value: A. thaliana
  misc_feature: MA Experiment 20001558 PARAMETER Experiment Name: At_Drought_Soil_Dry_P Parameter: Plant Line Value: WS
  misc_feature: MA Experiment 20001558 PARAMETER Experiment Name: At_Drought_Soil_Dry_P Parameter: Post Timepoint (hr) Value: 6
  misc_feature: MA Experiment 20001558 PARAMETER Experiment Name: At_Drought_Soil_Dry_P Parameter: Post-Treatment Value: Re-Water vs. No Drought
  misc_feature: MA Experiment 20001558 PARAMETER Experiment Name: At_Drought_Soil_Dry_P Parameter: Timepoint (day) Value: 13
  misc_feature: MA Experiment 20001558 PARAMETER Experiment Name: At_Drought_Soil_Dry_P Parameter: Treatment Value: Drought vs. No Drought
  misc_feature: MA Experiment ID: 20001560 Result: Down-regulated in Transcription
  misc_feature: MA Experiment 20001560 PARAMETER Experiment Name: At_Drought_Soil_Dry_P Parameter: Age (day) Value: 28
  misc_feature: MA Experiment 20001560 PARAMETER Experiment Name: At_Drought_Soil_Dry_P Parameter: Organism Value: A. thaliana
  misc_feature: MA Experiment 20001560 PARAMETER Experiment Name: At_Drought_Soil_Dry_P Parameter: Plant Line Value: WS
  misc_feature: MA Experiment 20001560 PARAMETER Experiment Name: At_Drought_Soil_Dry_P Parameter: Post Timepoint (hr) Value: None
  misc_feature: MA Experiment 20001560 PARAMETER Experiment Name: At_Drought_Soil_Dry_P Parameter: Post-Treatment Value: None
  misc_feature: MA Experiment 20001560 PARAMETER Experiment Name: At_Drought_Soil_Dry_P Parameter: Timepoint (day) Value: 14
  misc_feature: MA Experiment 20001560 PARAMETER Experiment Name: At_Drought_Soil_Dry_P Parameter: Treatment Value: Drought vs. No Drought
  misc_feature: MA Experiment ID: 20001774 Result: Up-regulated in Transcription
  misc_feature: MA Experiment 20001774 PARAMETER Experiment Name: At_Far-red-enriched-adult_P Parameter: Age (day) Value: 31
  misc_feature: MA Experiment 20001774 PARAMETER Experiment Name: At_Far-red-enriched-adult_P Parameter: Light Value: Far-red enriched vs. White
  misc_feature: MA Experiment 20001774 PARAMETER Experiment Name: At_Far-red-enriched-adult_P Parameter: Organism Value: A. thaliana
  misc_feature: MA Experiment 20001774 PARAMETER Experiment Name: At_Far-red-enriched-adult_P Parameter: Plant Line Value: Columbia
  misc_feature: MA Experiment 20001774 PARAMETER Experiment Name: At_Far-red-enriched-adult_P Parameter: Timepoint (hr) Value: 72
  misc_feature: MA Experiment 20001774 PARAMETER Experiment Name: At_Far-red-enriched-adult_P Parameter: Tissue Value: Aerial
  misc_feature: MA Experiment ID: 20001906 Result: Up-regulated in Transcription
  misc_feature: MA Experiment 20001906 PARAMETER Experiment Name: At_Drought_Reproduction_P Parameter: Age (day) Value: 35
  misc_feature: MA Experiment 20001906 PARAMETER Experiment Name: At_Drought_Reproduction_P Parameter: Organism Value: A. thaliana
  misc_feature: MA Experiment 20001906 PARAMETER Experiment Name: At_Drought_Reproduction_P Parameter: Plant Line Value: WS
  misc_feature: MA Experiment 20001906 PARAMETER Experiment Name: At_Drought_Reproduction_P Parameter: Timepoint (day) Value: 5
  misc_feature: MA Experiment 20001906 PARAMETER Experiment Name: At_Drought_Reproduction_P Parameter: Tissue Value: Siliques
  misc_feature: MA Experiment 20001906 PARAMETER Experiment Name: At_Drought_Reproduction_P Parameter: Treatment Value: Drought vs. No Drought
  misc_feature: MA Experiment ID: 20001911 Result: Up-regulated in Transcription
  misc_feature: MA Experiment 20001911 PARAMETER Experiment Name: At_Drought_Reproduction_P Parameter: Age (day) Value: 40
  misc_feature: MA Experiment 20001911 PARAMETER Experiment Name: At_Drought_Reproduction_P Parameter: Organism Value: A. thaliana
  misc_feature: MA Experiment 20001911 PARAMETER Experiment Name: At_Drought_Reproduction_P Parameter: Plant Line Value: WS
  misc_feature: MA Experiment 20001911 PARAMETER Experiment Name: At_Drought_Reproduction_P Parameter: Timepoint (day) Value: 10
  misc_feature: MA Experiment 20001911 PARAMETER Experiment Name: At_Drought_Reproduction_P Parameter: Tissue Value: Flowers
  misc_feature: MA Experiment 20001911 PARAMETER Experiment Name: At_Drought_Reproduction_P Parameter: Treatment Value: Drought vs. No Drought
ttattcaaaatattttcaccaactaaaaagagatacatcgaaacaaatctctctaatcatatctaagttatacctttttctttataaacaataaacaatagctttgatttgaagcaagaggagcaacaatggagatcaccactatcatattcctcatcatatcctctctcaccttctccatcttccttaaactcatcttcttcttctcaactcacaaactcccaccgggaccacctcgttttccggtcatcggaaacatcatctggcttaagaaaaacaacttctccgatttccaaggcgttctccgtgacttagcctcccgtcacggaccaatcataacactccacgtaggctccaaaccttccatctgggtcacagacagatcactcgctcaccaagcccttgtccaaaacggtgccgttttctccgaccgttctctcgctctccctaccaccaaagtcatcaccagcaaccaacacgacatccactcctccgtctatggctctctctggagaaccctccgccgcaacctcacctccgaaatcctccagccctcgcgcgtgaaagcacacgcgccgtcgaggaaatggtctctcgagattctcgtggatctgttcgagacagagcagagagagaaaggacatatctccgacgctttagatcatttacgtcacgctatgttttatttgttggctctgatgtgtttcggagagaaactgagaaaagaagagatcagagagatcgaagaagctcagtaccaaatgctcataagctacaccaagttcagcgtcctcaacatcttcccaagcgtaaccaagttcttgctccggcgaaaatggaaagagtttttagaactaaggaaatctcaagagagcgttatacttcgatacgtgaacgcaagaagcaaagaaaccaccggagatgttctctgttacgtcgatacgctgctgaatcttgagatcccgacggaggagaaagaaggagggaagaagaggaaactgagtgactcggagatcgtgagtctgtgttcggagtttcttaacgcagctacggatccaacggcgacgtcgatgcagtggatcatggcgatcatggtgaagtatccagagatacagaggaaagtatacgaggaaatgaagactgtgttcgccggagaagaagaagaaagagaagagatcagagaagaggatttggggaagttgagttacctcaaagctgtgatcttggagtgtctaagaagacaccctcctggtcattacttgtcttaccataaggtcacacgcgacaccgttttgggtggatttctcattccgcgccaaggtactataaactttatggtaggagaaatgggccgggacccaaaaatatgggaagatcctctaacgttcaagccagaaagatttctagagaacggagaagcatgtgattttgatatgacgggaactcgcgagattaaaatgatgccgtttggagcgggacgacggatgtgtcccggctacgcgctttcgttgcttcacctggaatattatgtggccaatttggtttggaaattcgagtggaaatgtgtggaaggtgaagaagttgatctatccgagaagcaacagttcatcacaatggtcatgaaaaaccctttcaaagcaaatatttatccaaggagaaagtgatatttgcttttgtcatattatcaaaaaggcccattgggcttatttgtcgtatgtatattaaaaactttgtctcatatgtattaaaacaatttgggcctttaatgggtttcaatataaagatgtcaacacttttagtc

SEQ ID NO: 41809 - protein, 511 aa, Arabidopsis thaliana
  peptide (1)..(511): Ceres Seq. ID no. 12328411
  misc_feature (336)..(511): Homolog of NCBI NO: 15240223 NR Description: cytochrome p450 family; protein id: At5g61320.1
  misc_feature (11)..(337): Homolog of NCBI NO: 15240223 NR Description: cytochrome p450 family; protein id: At5g61320.1
  misc_feature (6)..(510): Homolog of NCBI NO: 15217771 NR Description: cytochrome p450, putative
  misc_feature (6)..(510): Homolog of NCBI NO: 15217798 NR Description: cytochrome p450, putative; protein id:
  misc_feature (6)..(510): Homolog of NCBI NO: 15217800 NR Description: cytochrome p450, putative; protein id:
  misc_feature (6)..(510): Homolog of NCBI NO: 15224379 NR Description: cytochrome p450, putative; protein id:
  misc_feature (6)..(510): Homolog of NCBI NO: 15450601 NR Description: At1g64950/F13O11_25 [Arabidopsis thaliana]
  misc_feature (6)..(510): Homolog of NCBI NO: 15217801 NR Description: cytochrome p450, putative
  misc_feature (1)..(511): Homolog of NCBI NO: 15228566 NR Description: cytochrome p450, putative
  misc_feature (1)..(511): Homolog of NCBI NO: 15983414 NR Description: AT3g03470/T21P5_11 [Arabidopsis thaliana]
MEITTIIFLIISSLTFSIFLKLIFFFSTHKLPPGPPRFPVIGNIIWLKKNNFSDFQGVLRDLASRHGPIITLHVGSKPSIWVTDRSLAHQALVQNGAVFSDRSLALPTTKVITSNQHDIHSSVYGSLWRTLRRNLTSEILQPSRVKAHAPSRKWSLEILVDLFETEQREKGHISDALDHLRHAMFYLLALMCFGEKLRKEEIREIEEAQYQMLISYTKFSVLNIFPSVTKFLLRRKWKEFLELRKSQESVILRYVNARSKETTGDVLCYVDTLLNLEIPTEEKEGGKKRKLSDSEIVSLCSEFLNAATDPTATSMQWIMAIMVKYPEIQRKVYEEMKTVFAGEEEEREEIREEDLGKLSYLKAVILECLRRHPPGHYLSYHKVTRDTVLGGFLIPRQGTINFMVGEMGRDPKIWEDPLTFKPERFLENGEACDFDMTGTREIKMMPFGAGRRMCPGYALSLLHLEYYVANLVWKFEWKCVEGEEVDLSEKQQFITMVMKNPFKANIYPRRK

SEQ ID NO: 41810 - protein, 328 aa, Arabidopsis thaliana
  peptide (1)..(328): Ceres Seq. ID no. 12328412
  misc_feature (153)..(328): Homolog of NCBI NO: 15240223 NR Description: cytochrome p450 family; protein id: At5g61320.1
  misc_feature (1)..(154): Homolog of NCBI NO: 15240223 NR Description: cytochrome p450 family; protein id: At5g61320.1
  misc_feature (1)..(327): Homolog of NCBI NO: 15217771 NR Description: cytochrome p450, putative
  misc_feature (1)..(327): Homolog of NCBI NO: 15217798 NR Description: cytochrome p450, putative; protein id:
  misc_feature (1)..(327): Homolog of NCBI NO: 15217800 NR Description: cytochrome p450, putative; protein id:
  misc_feature (1)..(327): Homolog of NCBI NO: 15224379 NR Description: cytochrome p450, putative; protein id:
  misc_feature (1)..(327): Homolog of NCBI NO: 15450601 NR Description: At1g64950/F13O11_25 [Arabidopsis thaliana]
  misc_feature (1)..(327): Homolog of NCBI NO: 15217801 NR Description: cytochrome p450, putative
  misc_feature (1)..(328): Homolog of NCBI NO: 15228566 NR Description: cytochrome p450, putative
  misc_feature (1)..(328): Homolog of NCBI NO: 15983414 NR Description: AT3g03470/T21P5_11 [Arabidopsis thaliana]
MFYLLALMCFGEKLRKEEIREIEEAQYQMLISYTKFSVLNIFPSVTKFLLRRKWKEFLELRKSQESVILRYVNARSKETTGDVLCYVDTLLNLEIPTEEKEGGKKRKLSDSEIVSLCSEFLNAATDPTATSMQWIMAIMVKYPEIQRKVYEEMKTVFAGEEEEREEIREEDLGKLSYLKAVILECLRRHPPGHYLSYHKVTRDTVLGGFLIPRQGTINFMVGEMGRDPKIWEDPLTFKPERFLENGEACDFDMTGTREIKMMPFGAGRRMCPGYALSLLHLEYYVANLVWKFEWKCVEGEEVDLSEKQQFITMVMKNPFKANIYPRRK

SEQ ID NO: 41811 - protein, 321 aa, Arabidopsis thaliana
  peptide (1)..(321): Ceres Seq. ID no. 12328413
  misc_feature (146)..(321): Homolog of NCBI NO: 15240223 NR Description: cytochrome p450 family; protein id: At5g61320.1
  misc_feature (1)..(147): Homolog of NCBI NO: 15240223 NR Description: cytochrome p450 family; protein id: At5g61320.1
  misc_feature (1)..(320): Homolog of NCBI NO: 15217771 NR Description: cytochrome p450, putative
  misc_feature (1)..(320): Homolog of NCBI NO: 15217798 NR Description: cytochrome p450, putative; protein id:
  misc_feature (1)..(320): Homolog of NCBI NO: 15217800 NR Description: cytochrome p450, putative; protein id:
  misc_feature (1)..(320): Homolog of NCBI NO: 15224379 NR Description: cytochrome p450, putative; protein id:
  misc_feature (1)..(320): Homolog of NCBI NO: 15450601 NR Description: At1g64950/F13O11_25 [Arabidopsis thaliana]
  misc_feature (1)..(320): Homolog of NCBI NO: 15217801 NR Description: cytochrome p450, putative
  misc_feature (1)..(321): Homolog of NCBI NO: 15228566 NR Description: cytochrome p450, putative
  misc_feature (1)..(321): Homolog of NCBI NO: 15983414 NR Description: AT3g03470/T21P5_11 [Arabidopsis thaliana]
MCFGEKLRKEEIREIEEAQYQMLISYTKFSVLNIFPSVTKFLLRRKWKEFLELRKSQESVILRYVNARSKETTGDVLCYVDTLLNLEIPTEEKEGGKKRKLSDSEIVSLCSEFLNAATDPTATSMQWIMAIMVKYPEIQRKVYEEMKTVFAGEEEEREEIREEDLGKLSYLKAVILECLRRHPPGHYLSYHKVTRDTVLGGFLIPRQGTINFMVGEMGRDPKIWEDPLTFKPERFLENGEACDFDMTGTREIKMMPFGAGRRMCPGYALSLLHLEYYVANLVWKFEWKCVEGEEVDLSEKQQFITMVMKNPFKANIYPRRK

SEQ ID NO: 41812 - DNA, 1285 bp, Arabidopsis thaliana
  misc_feature (1)..(1285): Ceres Seq. ID no. 12330888
  misc_feature: MA Experiment ID: 108464 Result: Down-regulated in Transcription
  misc_feature: MA Experiment 108464 PARAMETER Experiment Name: At_Germinating_Seeds_cDNA_P Parameter: Age (day) Value: 4 vs. 0
  misc_feature: MA Experiment 108464 PARAMETER Experiment Name: At_Germinating_Seeds_cDNA_P Parameter: Tissue Value: Germinating Seeds
  misc_feature: MA Experiment ID: 108489 Result: Down-regulated in Transcription
  misc_feature: MA Experiment ID: 108573 Result: Down-regulated in Transcription
  misc_feature: MA Experiment 108573 PARAMETER Experiment Name: At_Drought_cDNA_P Parameter: Timepoint (hr) Value: 6
  misc_feature: MA Experiment 108573 PARAMETER Experiment Name: At_Drought_cDNA_P Parameter: Tissue Value: Aerial
  misc_feature: MA Experiment 108573 PARAMETER Experiment Name: At_Drought_cDNA_P Parameter: Treatment Value: Drought vs. No Drought
  misc_feature: MA Experiment ID: 20000069 Result: Up-regulated in Transcription
  misc_feature: MA Experiment 20000069 PARAMETER Experiment Name: At_100uM_ABA_Mutants_cDNA_P Parameter: Plant Line Value: CS23
  misc_feature: MA Experiment 20000069 PARAMETER Experiment Name: At_100uM_ABA_Mutants_cDNA_P Parameter: Timepoint (hr) Value: 6
  misc_feature: MA Experiment 20000069 PARAMETER Experiment Name: At_100uM_ABA_Mutants_cDNA_P Parameter: Tissue Value: Aerial
  misc_feature: MA Experiment 20000069 PARAMETER Experiment Name: At_100uM_ABA_Mutants_cDNA_P Parameter: Treatment Value: 100uM ABA vs. No Treatment
  misc_feature: MA Experiment ID: 20000070 Result: Up-regulated in Transcription
  misc_feature: MA Experiment 20000070 PARAMETER Experiment Name: At_100uM_ABA_Mutants_cDNA_P Parameter: Plant Line Value: CS24
  misc_feature: MA Experiment 20000070 PARAMETER Experiment Name: At_100uM_ABA_Mutants_cDNA_P Parameter: Timepoint (hr) Value: 6
  misc_feature: MA Experiment 20000070 PARAMETER Experiment Name: At_100uM_ABA_Mutants_cDNA_P Parameter: Tissue Value: Aerial
  misc_feature: MA Experiment 20000070 PARAMETER Experiment Name: At_100uM_ABA_Mutants_cDNA_P Parameter: Treatment Value: 100uM ABA vs. No Treatment
  misc_feature: MA Experiment ID: 20000071 Result: Up-regulated in Transcription
  misc_feature: MA Experiment 20000071 PARAMETER Experiment Name: At_100uM_ABA_Mutants_cDNA_P Parameter: Plant Line Value: CS8104
  misc_feature: MA Experiment 20000071 PARAMETER Experiment Name: At_100uM_ABA_Mutants_cDNA_P Parameter: Timepoint (hr) Value: 6
  misc_feature: MA Experiment 20000071 PARAMETER Experiment Name: At_100uM_ABA_Mutants_cDNA_P Parameter: Tissue Value: Aerial
  misc_feature: MA Experiment 20000071 PARAMETER Experiment Name: At_100uM_ABA_Mutants_cDNA_P Parameter: Treatment Value: 100uM ABA vs. No Treatment
  misc_feature: MA Experiment ID: 20000086 Result: Up-regulated in Transcription
  misc_feature: MA Experiment 20000086 PARAMETER Experiment Name: At_100uM_ABA_Mutants_cDNA_P Parameter: Plant Line Value: CS22
  misc_feature: MA Experiment 20000086 PARAMETER Experiment Name: At_100uM_ABA_Mutants_cDNA_P Parameter: Timepoint (hr) Value: 6
  misc_feature: MA Experiment 20000086 PARAMETER Experiment Name: At_100uM_ABA_Mutants_cDNA_P Parameter: Tissue Value: Aerial
  misc_feature: MA Experiment 20000086 PARAMETER Experiment Name: At_100uM_ABA_Mutants_cDNA_P Parameter: Treatment Value: 100uM ABA vs. No Treatment
  misc_feature: MA Experiment ID: 20000088 Result: Up-regulated in Transcription
  misc_feature: MA Experiment 20000088 PARAMETER Experiment Name: At_100uM_ABA_Mutants_cDNA_P Parameter: Plant Line Value: Landsberg
  misc_feature: MA Experiment 20000088 PARAMETER Experiment Name: At_100uM_ABA_Mutants_cDNA_P Parameter: Timepoint (hr) Value: 6
  misc_feature: MA Experiment 20000088 PARAMETER Experiment Name: At_100uM_ABA_Mutants_cDNA_P Parameter: Tissue Value: Aerial
  misc_feature: MA Experiment 20000088 PARAMETER Experiment Name: At_100uM_ABA_Mutants_cDNA_P Parameter: Treatment Value: 100uM ABA vs. No Treatment
  misc_feature: MA Experiment ID: 20000090 Result: Up-regulated in Transcription
  misc_feature: MA Experiment ID: 20000111 Result: Down-regulated in Transcription
  misc_feature: MA Experiment 20000111 PARAMETER Experiment Name: At_42deg_Heat_cDNA_P Parameter: Temperature (deg C) Value: 42 vs. 22
  misc_feature: MA Experiment 20000111 PARAMETER Experiment Name: At_42deg_Heat_cDNA_P Parameter: Timepoint (hr) Value: 6
  misc_feature: MA Experiment 20000111 PARAMETER Experiment Name: At_42deg_Heat_cDNA_P Parameter: Tissue Value: Aerial
  misc_feature: MA Experiment ID: 20000112 Result: Down-regulated in Transcription
  misc_feature: MA Experiment 20000112 PARAMETER Experiment Name: At_42deg_Heat_cDNA_P Parameter: Temperature (deg C) Value: 42 vs. 22
  misc_feature: MA Experiment 20000112 PARAMETER Experiment Name: At_42deg_Heat_cDNA_P Parameter: Timepoint (hr) Value: 2
  misc_feature: MA Experiment 20000112 PARAMETER Experiment Name: At_42deg_Heat_cDNA_P Parameter: Tissue Value: Aerial
  misc_feature: MA Experiment ID: 20000113 Result: Down-regulated in Transcription
  misc_feature: MA Experiment 20000113 PARAMETER Experiment Name: At_42deg_Heat_cDNA_P Parameter: Temperature (deg C) Value: 42 vs. 22
  misc_feature: MA Experiment 20000113 PARAMETER Experiment Name: At_42deg_Heat_cDNA_P Parameter: Timepoint (hr) Value: 8
  misc_feature: MA Experiment 20000113 PARAMETER Experiment Name: At_42deg_Heat_cDNA_P Parameter: Tissue Value: Aerial
  misc_feature: MA Experiment ID: 20000117 Result: Up-regulated in Transcription
  misc_feature: MA Experiment 20000117 PARAMETER Experiment Name: At_100uM_ABA_Mutants_cDNA_P Parameter: Plant Line Value: Columbia
  misc_feature: MA Experiment 20000117 PARAMETER Experiment Name: At_100uM_ABA_Mutants_cDNA_P Parameter: Timepoint (hr) Value: 6
  misc_feature: MA Experiment 20000117 PARAMETER Experiment Name: At_100uM_ABA_Mutants_cDNA_P Parameter: Tissue Value: Aerial
  misc_feature: MA Experiment 20000117 PARAMETER Experiment Name: At_100uM_ABA_Mutants_cDNA_P Parameter: Treatment Value: 100uM ABA vs. No Treatment
  misc_feature: MA Experiment ID: 20000173 Result: Down-regulated in Transcription
  misc_feature: MA Experiment 20000173 PARAMETER Experiment Name: At_42deg_Heat_P Parameter: Age (day) Value: 14
  misc_feature: MA Experiment 20000173 PARAMETER Experiment Name: At_42deg_Heat_P Parameter: Organism Value: A. thaliana
  misc_feature: MA Experiment 20000173 PARAMETER Experiment Name: At_42deg_Heat_P Parameter: Plant Line Value: WS
  misc_feature: MA Experiment 20000173 PARAMETER Experiment Name: At_42deg_Heat_P Parameter: Temperature (deg C) Value: 42 vs. 22
  misc_feature: MA Experiment 20000173 PARAMETER Experiment Name: At_42deg_Heat_P Parameter: Timepoint (hr) Value: 6
  misc_feature: MA Experiment 20000173 PARAMETER Experiment Name: At_42deg_Heat_P Parameter: Tissue Value: Aerial
  misc_feature: MA Experiment ID: 20000179 Result: Up-regulated in Transcription
  misc_feature: MA Experiment 20000179 PARAMETER Experiment Name: At_Germinating_Seeds_P Parameter: Age (hr) Value: 6 vs. 0
  misc_feature: MA Experiment 20000179 PARAMETER Experiment Name: At_Germinating_Seeds_P Parameter: Tissue Value: Germinating Seeds
  misc_feature: MA Experiment ID: 20000182 Result: Down-regulated in Transcription
  misc_feature: MA Experiment 20000182 PARAMETER Experiment Name: At_2mM_SA_P Parameter: Age (day) Value: 14
  misc_feature: MA Experiment 20000182 PARAMETER Experiment Name: At_2mM_SA_P Parameter: Organism Value: A. thaliana
  misc_feature: MA Experiment 20000182 PARAMETER Experiment Name: At_2mM_SA_P Parameter: Plant Line Value: WS
  misc_feature: MA Experiment 20000182 PARAMETER Experiment Name: At_2mM_SA_P Parameter: Timepoint (hr) Value: 6
  misc_feature: MA Experiment 20000182 PARAMETER Experiment Name: At_2mM_SA_P Parameter: Tissue Value: Aerial
  misc_feature: MA Experiment 20000182 PARAMETER Experiment Name: At_2mM_SA_P Parameter: Treatment Value: 2mM SA vs. No Treatment
  misc_feature: MA Experiment ID: 20000184 Result: Down-regulated in Transcription
  misc_feature: MA Experiment 20000184 PARAMETER Experiment Name: At_Shoots__P Parameter: Age (day) Value: 7
  misc_feature: MA Experiment 20000184 PARAMETER Experiment Name: At_Shoots__P Parameter: Tissue Value: Shoots vs. Whole Plant
  misc_feature: MA Experiment ID: 20000185 Result: Down-regulated in Transcription
  misc_feature: MA Experiment 20000185 PARAMETER Experiment Name: At_Roots__P Parameter: Age (day) Value: 7 vs. 21
  misc_feature: MA Experiment 20000185 PARAMETER Experiment Name: At_Roots__P Parameter: Organism Value: A. thaliana
  misc_feature: MA Experiment 20000185 PARAMETER Experiment Name: At_Roots__P Parameter: Tissue Value: Roots vs. Whole Plant
  misc_feature: MA Experiment ID: 20000224 Result: Up-regulated in Transcription
  misc_feature: MA Experiment ID: 20000437 Result: Up-regulated in Transcription
  misc_feature: MA Experiment 20000437 PARAMETER Experiment Name: At_Drought_P Parameter: Age (day) Value: 8
  misc_feature: MA Experiment 20000437 PARAMETER Experiment Name: At_Drought_P Parameter: Organism Value: A. thaliana
  misc_feature: MA Experiment 20000437 PARAMETER Experiment Name: At_Drought_P Parameter: Plant Line Value: WS
  misc_feature: MA Experiment 20000437 PARAMETER Experiment Name: At_Drought_P Parameter: Timepoint (hr) Value: 24
  misc_feature: MA Experiment 20000437 PARAMETER Experiment Name: At_Drought_P Parameter: Tissue Value: Whole Plant
  misc_feature: MA Experiment 20000437 PARAMETER Experiment Name: At_Drought_P Parameter: Treatment Value: Drought vs. No Drought
  misc_feature: MA Experiment ID: 20000438 Result: Down-regulated in Transcription
  misc_feature: MA Experiment 20000438 PARAMETER Experiment Name: At_Shoots__P Parameter: Age (day) Value: 14
  misc_feature: MA Experiment 20000438 PARAMETER Experiment Name: At_Shoots__P Parameter: Tissue Value: Shoots vs. Whole Plant
  misc_feature: MA Experiment ID: 20000439 Result: Down-regulated in Transcription
  misc_feature: MA Experiment 20000439 PARAMETER Experiment Name: At_Roots__P Parameter: Age (day) Value: 14 vs. 21
  misc_feature: MA Experiment 20000439 PARAMETER Experiment Name: At_Roots__P Parameter: Organism Value: A. thaliana
  misc_feature: MA Experiment 20000439 PARAMETER Experiment Name: At_Roots__P Parameter: Tissue Value: Roots vs. Whole Plant
  misc_feature: MA Experiment ID: 20000443 Result: Down-regulated in Transcription
  misc_feature: MA Experiment 20000443 PARAMETER Experiment Name: At_1uM_BR-BRZ__P Parameter: Tissue Value: Shoot Apices
  misc_feature: MA Experiment 20000443 PARAMETER Experiment Name: At_1uM_BR-BRZ__P Parameter: Treatment Value: 1uM BRZ vs. No Treatment
  misc_feature: MA Experiment ID: 20000452 Result: Up-regulated in Transcription
  misc_feature: MA Experiment 20000452 PARAMETER Experiment Name: At_CS6879_Shoots-Roots_P Parameter: Age (day) Value: 14
  misc_feature: MA Experiment 20000452 PARAMETER Experiment Name: At_CS6879_Shoots-Roots_P Parameter: Organism Value: A. thaliana
  misc_feature: MA Experiment 20000452 PARAMETER Experiment Name: At_CS6879_Shoots-Roots_P Parameter: Plant Line Value: CS6879 vs. WS
  misc_feature: MA Experiment 20000452 PARAMETER Experiment Name: At_CS6879_Shoots-Roots_P Parameter: Tissue Value: Shoots
  misc_feature: MA Experiment ID: 20000709 Result: Down-regulated in Transcription
  misc_feature: MA Experiment 20000709 PARAMETER Experiment Name: At_15mM_NH4NO3_L-to-H_P Parameter: Age (hr) Value: 14
  misc_feature: MA Experiment 20000709 PARAMETER Experiment Name: At_15mM_NH4NO3_L-to-H_P Parameter: Organism Value: A. thaliana
  misc_feature: MA Experiment 20000709 PARAMETER Experiment Name: At_15mM_NH4NO3_L-to-H_P Parameter: Plant Line Value: WS
  misc_feature: MA Experiment 20000709 PARAMETER Experiment Name: At_15mM_NH4NO3_L-to-H_P Parameter: Timepoint (hr) Value: 4
  misc_feature: MA Experiment 20000709 PARAMETER Experiment Name: At_15mM_NH4NO3_L-to-H_P Parameter: Tissue Value: Aerial
  misc_feature: MA Experiment 20000709 PARAMETER Experiment Name: At_15mM_NH4NO3_L-to-H_P Parameter: Treatment Value: 15mM NH4NO3 vs. 30mM Mannitol
  misc_feature: MA Experiment ID: 20000794 Result: Down-regulated in Transcription
  misc_feature: MA Experiment 20000794 PARAMETER Experiment Name: At_Petals_P Parameter: Age (day) Value: 23-25 days
  misc_feature: MA Experiment 20000794 PARAMETER Experiment Name: At_Petals_P Parameter: Plant Line Value: WS
  misc_feature: MA Experiment 20000794 PARAMETER Experiment Name: At_Petals_P Parameter: Tissue Value: Petals vs. Whole plant
  misc_feature: MA Experiment ID: 20001247 Result: Down-regulated in Transcription
  misc_feature: MA Experiment 20001247 PARAMETER Experiment Name: At_Far-red-induction_P Parameter: Age (day) Value: 7
  misc_feature: MA Experiment 20001247 PARAMETER Experiment Name: At_Far-red-induction_P Parameter: Light Value: Far-red vs. White
  misc_feature: MA Experiment 20001247 PARAMETER Experiment Name: At_Far-red-induction_P Parameter: Organism Value: A. thaliana
  misc_feature: MA Experiment 20001247 PARAMETER Experiment Name: At_Far-red-induction_P Parameter: Plant Line Value: Columbia
  misc_feature: MA Experiment 20001247 PARAMETER Experiment Name: At_Far-red-induction_P Parameter: Timepoint (hr) Value: 1
  misc_feature: MA Experiment 20001247 PARAMETER Experiment Name: At_Far-red-induction_P Parameter: Tissue Value: Whole Plant
  misc_feature: MA Experiment ID: 20001451 Result: Down-regulated in Transcription
  misc_feature: MA Experiment 20001451 PARAMETER Experiment Name: At_Far-red-induction_P Parameter: Age (day) Value: 7
  misc_feature: MA Experiment 20001451 PARAMETER Experiment Name: At_Far-red-induction_P Parameter: Light Value: Far-red vs. White
  misc_feature: MA Experiment 20001451 PARAMETER Experiment Name: At_Far-red-induction_P Parameter: Organism Value: A. thaliana
  misc_feature: MA Experiment 20001451 PARAMETER Experiment Name: At_Far-red-induction_P Parameter: Plant Line Value: Columbia
  misc_feature: MA Experiment 20001451 PARAMETER Experiment Name: At_Far-red-induction_P Parameter: Timepoint (hr) Value: 24
  misc_feature: MA Experiment 20001451 PARAMETER Experiment Name: At_Far-red-induction_P Parameter: Tissue Value: Whole Plant
  misc_feature: MA Experiment ID: 20001556 Result: Up-regulated in Transcription
  misc_feature: MA Experiment 20001556 PARAMETER Experiment Name: At_Drought_Soil_Dry_P Parameter: Age (day) Value: 26
  misc_feature: MA Experiment 20001556 PARAMETER Experiment Name: At_Drought_Soil_Dry_P Parameter: Organism Value: A. thaliana
  misc_feature: MA Experiment 20001556 PARAMETER Experiment Name: At_Drought_Soil_Dry_P Parameter: Plant Line Value: WS
  misc_feature: MA Experiment 20001556 PARAMETER Experiment Name: At_Drought_Soil_Dry_P Parameter: Post Timepoint (hr) Value: None
  misc_feature: MA Experiment 20001556 PARAMETER Experiment Name: At_Drought_Soil_Dry_P Parameter: Post-Treatment Value: None
  misc_feature: MA Experiment 20001556 PARAMETER Experiment Name: At_Drought_Soil_Dry_P Parameter: Timepoint (day) Value: 12
  misc_feature: MA Experiment 20001556 PARAMETER Experiment Name: At_Drought_Soil_Dry_P Parameter: Treatment Value: Drought vs. No Drought
  misc_feature: MA Experiment ID: 20001558 Result: Down-regulated in Transcription
  misc_feature: MA Experiment 20001558 PARAMETER Experiment Name: At_Drought_Soil_Dry_P Parameter: Age (day) Value: 27
  misc_feature: MA Experiment 20001558 PARAMETER Experiment Name: At_Drought_Soil_Dry_P Parameter: Organism Value: A. thaliana
  misc_feature: MA Experiment 20001558 PARAMETER Experiment Name: At_Drought_Soil_Dry_P Parameter: Plant Line Value: WS
  misc_feature: MA Experiment 20001558 PARAMETER Experiment Name: At_Drought_Soil_Dry_P Parameter: Post Timepoint (hr) Value: 6
  misc_feature: MA Experiment 20001558 PARAMETER Experiment Name: At_Drought_Soil_Dry_P Parameter: Post-Treatment Value: Re-Water vs. No Drought
  misc_feature: MA Experiment 20001558 PARAMETER Experiment Name: At_Drought_Soil_Dry_P Parameter: Timepoint (day) Value: 13
  misc_feature: MA Experiment 20001558 PARAMETER Experiment Name: At_Drought_Soil_Dry_P Parameter: Treatment Value: Drought vs. No Drought
  misc_feature: MA Experiment ID: 20001559 Result: Up-regulated in Transcription
  misc_feature: MA Experiment 20001559 PARAMETER Experiment Name: At_Drought_Soil_Dry_P Parameter: Age (day) Value: 28
  misc_feature: MA Experiment 20001559 PARAMETER Experiment Name: At_Drought_Soil_Dry_P Parameter: Organism Value: A. thaliana
  misc_feature: MA Experiment 20001559 PARAMETER Experiment Name: At_Drought_Soil_Dry_P Parameter: Plant Line Value: WS
  misc_feature: MA Experiment 20001559 PARAMETER Experiment Name: At_Drought_Soil_Dry_P Parameter: Post Timepoint (hr) Value: 29
  misc_feature: MA Experiment 20001559 PARAMETER Experiment Name: At_Drought_Soil_Dry_P Parameter: Post-Treatment Value: Re-Water vs. No Drought
  misc_feature: MA Experiment 20001559 PARAMETER Experiment Name: At_Drought_Soil_Dry_P Parameter: Timepoint (day) Value: 14
  misc_feature: MA Experiment 20001559 PARAMETER Experiment Name: At_Drought_Soil_Dry_P Parameter: Treatment Value: Drought vs. No Drought
  misc_feature: MA Experiment ID: 20001757 Result: Down-regulated in Transcription
  misc_feature: MA Experiment 20001757 PARAMETER Experiment Name: At_50mM_NH4NO3_L-to-H_P Parameter: Timepoint (hr) Value: 6
  misc_feature: MA Experiment 20001757 PARAMETER Experiment Name: At_50mM_NH4NO3_L-to-H_P Parameter: Tissue Value: Leaf
  misc_feature: MA Experiment 20001757 PARAMETER Experiment Name: At_50mM_NH4NO3_L-to-H_P Parameter: Treatment Value: 50mM NH4NO3 vs 100mM Mannitol
  misc_feature: MA Experiment ID: 20001905 Result: Down-regulated in Transcription
  misc_feature: MA Experiment 20001905 PARAMETER Experiment Name: At_Drought_Reproduction_P Parameter: Age (day) Value: 40
  misc_feature: MA Experiment 20001905 PARAMETER Experiment Name: At_Drought_Reproduction_P Parameter: Organism Value: A. thaliana
  misc_feature: MA Experiment 20001905 PARAMETER Experiment Name: At_Drought_Reproduction_P Parameter: Plant Line Value: WS
  misc_feature: MA Experiment 20001905 PARAMETER Experiment Name: At_Drought_Reproduction_P Parameter: Timepoint (day) Value: 10
  misc_feature: MA Experiment 20001905 PARAMETER Experiment Name: At_Drought_Reproduction_P Parameter: Tissue Value: Rosettes
  misc_feature: MA Experiment 20001905 PARAMETER Experiment Name: At_Drought_Reproduction_P Parameter: Treatment Value: Drought vs. No Drought
gtcatttatttcagatgttcagtctcacctctgctgggattcgggtgcattcaaagagatcattcttcttcttcttcttctttgaagatgctaatatcgcctccgatcaaagccaatgatccaaaatctcgacttgttttacatgcagtatcagagtcaaaatccagctcagagatgagtggtgttgcaaaggatgaagagaaatctgatgaatatagccaagacatgactcaagctatgggtgctgttctaacttacaggcacgagttaggaatgaactacaactttattcgtccagatctaattgttggatcctgcttacagacccctgaagatgttgacaagcttcgtaaaattggagttaaaaccatattttgcttgcaacaagatccagacctggaatattttggagtagacataagcagcatccaagcctatgctaagaaatatagtgatattcagcatattcgctgtgaaattagagactttgatgcatttgatttgagaatgcgtcttccagccgtggttggtactctttacaaagctgttaagcgaaatggaggagttacatatgtgcactgcactgctggaatgggaaggcctcctgctgttgcgttgacatacatgttctgggtgcaaggctataagcttatggaagctcataaattacttatgagcaaaaggtcgtgctttccgaagctggatgctatcagaaatgcaacaattgatattcttacaggactcaagaggaagactgttactctgacactgaaagataaggggttctccagagtagaaatttctggccttgacattggatggggacagaggatacctctaacactggacaagggaacaggattctggatcctaaagagagaactgcctgaaggacagtttgaatataaatacatcatagatggtgaatggacacacaatgaggccgaaccgtttataggacctaacaaagacggccataccaacaattacgctaaagtagtggacgatccaacaagtgtggatggtacaactcgggagagactatcgagcgaagaccctgagctgttggaggaagaacgctcgaaactaatccagttcttggagacttgttctgaggcagaagtttgagagttgagagcatccgactagactatgtgaatgtacaacttactagtaacaataaaatgcttcatgttagtaatacatacagttacgcttatagcagcaaaagaaaaaaacatgaagttagtagtactatgttcaagtataatatatagtttaaaag

SEQ ID NO: 41813 - protein, 375 aa, Arabidopsis thaliana
  peptide (1)..(375): Ceres Seq. ID no. 12330889
  misc_feature (93)..(243): Pfam Name: Dual specificity phosphatase, catalytic domain Pfam Description: Dual specificity phosphatase, catalytic domain
  misc_feature (36)..(83): Homolog of NCBI NO: 34902388 NR Description: Unknown protein [Oryza sativa (japonica
  misc_feature (297)..(368): Homolog of NCBI NO: 34902388 NR Description: Unknown protein [Oryza sativa (japonica
  misc_feature (206)..(296): Homolog of NCBI NO: 34902388 NR Description: Unknown protein [Oryza sativa (japonica
  misc_feature (135)..(333): Homolog of NCBI NO: 11544661 NR Description: PTPKIS1 (truncated form) [Arabidopsis thaliana]
  misc_feature (5)..(374): Homolog of NCBI NO: 14970762 NR Description: protein tyrosine phosphatase [Lycopersicon
  misc_feature (277)..(375): Homolog of NCBI NO: 11288831 NR Description: hypothetical protein F4F15.290 - Arabidopsis
  misc_feature (5)..(261): Homolog of NCBI NO: 11288831 NR Description: hypothetical protein F4F15.290 - Arabidopsis
  misc_feature (5)..(375): Homolog of NCBI NO: 16612246 NR Description: AT3g52180/F4F15_290 [Arabidopsis thaliana]
  misc_feature (5)..(375): Homolog of NCBI NO: 21536905 NR Description: unknown [Arabidopsis thaliana]
  misc_feature (5)..(375): Homolog of NCBI NO: 18409505 NR Description: putative protein
VIYFRCSVSPLLGFGCIQRDHSSSSSSLKMLISPPIKANDPKSRLVLHAVSESKSSSEMSGVAKDEEKSDEYSQDMTQAMGAVLTYRHELGMNYNFIRPDLIVGSCLQTPEDVDKLRKIGVKTIFCLQQDPDLEYFGVDISSIQAYAKKYSDIQHIRCEIRDFDAFDLRMRLPAVVGTLYKAVKRNGGVTYVHCTAGMGRPPAVALTYMFWVQGYKLMEAHKLLMSKRSCFPKLDAIRNATIDILTGLKRKTVTLTLKDKGFSRVEISGLDIGWGQRIPLTLDKGTGFWILKRELPEGQFEYKYIIDGEWTHNEAEPFIGPNKDGHTNNYAKVVDDPTSVDGTTRERLSSEDPELLEEERSKLIQFLETCSEAEV

SEQ ID NO: 41814 - protein, 346 aa, Arabidopsis thaliana
  peptide (1)..(346): Ceres Seq. ID no. 12330890
  misc_feature (64)..(214): Pfam Name: Dual specificity phosphatase, catalytic domain Pfam Description: Dual specificity phosphatase, catalytic domain
  misc_feature (7)..(54): Homolog of NCBI NO: 34902388 NR Description: Unknown protein [Oryza sativa (japonica
  misc_feature (268)..(339): Homolog of NCBI NO: 34902388 NR Description: Unknown protein [Oryza sativa (japonica
  misc_feature (177)..(267): Homolog of NCBI NO: 34902388 NR Description: Unknown protein [Oryza sativa (japonica
  misc_feature (106)..(304): Homolog of NCBI NO: 11544661 NR Description: PTPKIS1 (truncated form) [Arabidopsis thaliana]
  misc_feature (1)..(345): Homolog of NCBI NO: 14970762 NR Description: protein tyrosine phosphatase [Lycopersicon
  misc_feature (248)..(346): Homolog of NCBI NO: 11288831 NR Description: hypothetical protein F4F15.290 - Arabidopsis
  misc_feature (1)..(232): Homolog of NCBI NO: 11288831 NR Description: hypothetical protein F4F15.290 - Arabidopsis
  misc_feature (1)..(346): Homolog of NCBI NO: 16612246 NR Description: AT3g52180/F4F15_290 [Arabidopsis thaliana]
  misc_feature (1)..(346): Homolog of NCBI NO: 21536905 NR Description: unknown [Arabidopsis thaliana]
  misc_feature (1)..(346): Homolog of NCBI NO: 18409505 NR Description: putative protein
MLISPPIKANDPKSRLVLHAVSESKSSSEMSGVAKDEEKSDEYSQDMTQAMGAVLTYRHELGMNYNFIRPDLIVGSCLQTPEDVDKLRKIGVKTIFCLQQDPDLEYFGVDISSIQAYAKKYSDIQHIRCEIRDFDAFDLRMRLPAVVGTLYKAVKRNGGVTYVHCTAGMGRPPAVALTYMFWVQGYKLMEAHKLLMSKRSCFPKLDAIRNATIDILTGLKRKTVTLTLKDKGFSRVEISGLDIGWGQRIPLTLDKGTGFWILKRELPEGQFEYKYIIDGEWTHNEAEPFIGPNKDGHTNNYAKVVDDPTSVDGTTRERLSSEDPELLEEERSKLIQFLETCSEAEV

SEQ ID NO: 41815 - protein, 317 aa, Arabidopsis thaliana
  peptide (1)..(317): Ceres Seq. ID no. 12330891
  misc_feature (35)..(185): Pfam Name: Dual specificity phosphatase, catalytic domain Pfam Description: Dual specificity phosphatase, catalytic domain
  misc_feature (1)..(25): Homolog of NCBI NO: 34902388 NR Description: Unknown protein [Oryza sativa (japonica
  misc_feature (239)..(310): Homolog of NCBI NO: 34902388 NR Description: Unknown protein [Oryza sativa (japonica
  misc_feature (148)..(238): Homolog of NCBI NO: 34902388 NR Description: Unknown protein [Oryza sativa (japonica
  misc_feature (77)..(275): Homolog of NCBI NO: 11544661 NR Description: PTPKIS1 (truncated form) [Arabidopsis thaliana]
  misc_feature (1)..(316): Homolog of NCBI NO: 14970762 NR Description: protein tyrosine phosphatase [Lycopersicon
  misc_feature (219)..(317): Homolog of NCBI NO: 11288831 NR Description: hypothetical protein F4F15.290 - Arabidopsis
  misc_feature (1)..(203): Homolog of NCBI NO: 11288831 NR Description: hypothetical protein F4F15.290 - Arabidopsis
  misc_feature (1)..(317): Homolog of NCBI NO: 16612246 NR Description: AT3g52180/F4F15_290 [Arabidopsis thaliana]
  misc_feature (1)..(317): Homolog of NCBI NO: 21536905 NR Description: unknown [Arabidopsis thaliana]
  misc_feature (1)..(317): Homolog of NCBI NO: 18409505 NR Description: putative protein
MSGVAKDEEKSDEYSQDMTQAMGAVLTYRHELGMNYNFIRPDLIVGSCLQTPEDVDKLRKIGVKTIFCLQQDPDLEYFGVDISSIQAYAKKYSDIQHIRCEIRDFDAFDLRMRLPAVVGTLYKAVKRNGGVTYVHCTAGMGRPPAVALTYMFWVQGYKLMEAHKLLMSKRSCFPKLDAIRNATIDILTGLKRKTVTLTLKDKGFSRVEISGLDIGWGQRIPLTLDKGTGFWILKRELPEGQFEYKYIIDGEWTHNEAEPFIGPNKDGHTNNYAKVVDDPTSVDGTTRERLSSEDPELLEEERSKLIQFLETCSEAEV

SEQ ID NO: 41816 - DNA, 1349 bp, Arabidopsis thaliana
  misc_feature (1)..(1349): Ceres Seq. ID no. 13492429
  misc_feature: MA Experiment ID: 108433 Result: Down-regulated in Transcription
  misc_feature: MA Experiment 108433 PARAMETER Experiment Name: At_rhl_Mutant2_cDNA_P Parameter: Age (day) Value: 7
  misc_feature: MA Experiment 108433 PARAMETER Experiment Name: At_rhl_Mutant2_cDNA_P Parameter: Organism Value: A. thaliana
  misc_feature: MA Experiment 108433 PARAMETER Experiment Name: At_rhl_Mutant2_cDNA_P Parameter: Plant Line Value: rhl Mutant vs. wt landsburg
  misc_feature: MA Experiment 108433 PARAMETER Experiment Name: At_rhl_Mutant2_cDNA_P Parameter: Tissue Value: Roots
  misc_feature: MA Experiment ID: 108435 Result: Up-regulated in Transcription
  misc_feature: MA Experiment 108435 PARAMETER Experiment Name: At_stm_Mutants_cDNA_P Parameter: Plant Line Value: wt Landsburg vs stm
  misc_feature: MA Experiment 108435 PARAMETER Experiment Name: At_stm_Mutants_cDNA_P Parameter: Tissue Value: Shoot Apical Meristem Region
  misc_feature: MA Experiment ID: 108461 Result: Down-regulated in Transcription
  misc_feature: MA Experiment 108461 PARAMETER Experiment Name: At_Germinating_Seeds_cDNA_P Parameter: Age (day) Value: 1 vs. 0
  misc_feature: MA Experiment 108461 PARAMETER Experiment Name: At_Germinating_Seeds_cDNA_P Parameter: Tissue Value: Germinating Seeds
  misc_feature: MA Experiment ID: 108462 Result: Down-regulated in Transcription
  misc_feature: MA Experiment 108462 PARAMETER Experiment Name: At_Germinating_Seeds_cDNA_P Parameter: Age (day) Value: 2 vs. 0
  misc_feature: MA Experiment 108462 PARAMETER Experiment Name: At_Germinating_Seeds_cDNA_P Parameter: Tissue Value: Germinating Seeds
  misc_feature: MA Experiment ID: 108463 Result: Down-regulated in Transcription
  misc_feature: MA Experiment 108463 PARAMETER Experiment Name: At_Germinating_Seeds_cDNA_P Parameter: Age (day) Value: 3 vs. 0
  misc_feature: MA Experiment 108463 PARAMETER Experiment Name: At_Germinating_Seeds_cDNA_P Parameter: Tissue Value: Germinating Seeds
  misc_feature: MA Experiment ID: 108464 Result: Down-regulated in Transcription
  misc_feature: MA Experiment 108464 PARAMETER Experiment Name: At_Germinating_Seeds_cDNA_P Parameter: Age (day) Value: 4 vs. 0
  misc_feature: MA Experiment 108464 PARAMETER Experiment Name: At_Germinating_Seeds_cDNA_P Parameter: Tissue Value: Germinating Seeds
  misc_feature: MA Experiment ID: 108569 Result: Up-regulated in Transcription
  misc_feature: MA Experiment 108569 PARAMETER Experiment Name: At_0.001%_MeJA__cDNA_P Parameter: Timepoint (hr) Value: 6
  misc_feature: MA Experiment 108569 PARAMETER Experiment Name: At_0.001%_MeJA__cDNA_P Parameter: Tissue Value: Aerial
  misc_feature: MA Experiment 108569 PARAMETER Experiment Name: At_0.001%_MeJA__cDNA_P Parameter: Treatment Value: 0.001% MeJA vs. No Treatment
  misc_feature: MA Experiment ID: 108572 Result: Up-regulated in Transcription
  misc_feature: MA Experiment 108572 PARAMETER Experiment Name: At_Drought_cDNA_P Parameter: Timepoint (hr) Value: 1
  misc_feature: MA Experiment 108572 PARAMETER Experiment Name: At_Drought_cDNA_P Parameter: Tissue Value: Aerial
  misc_feature: MA Experiment 108572 PARAMETER Experiment Name: At_Drought_cDNA_P Parameter: Treatment Value: Drought vs. No Drought
  misc_feature: MA Experiment ID: 108573 Result: Up-regulated in Transcription
  misc_feature: MA Experiment 108573 PARAMETER Experiment Name: At_Drought_cDNA_P Parameter: Timepoint (hr) Value: 6
  misc_feature: MA Experiment 108573 PARAMETER Experiment Name: At_Drought_cDNA_P Parameter: Tissue Value: Aerial
  misc_feature: MA Experiment 108573 PARAMETER Experiment Name: At_Drought_cDNA_P Parameter: Treatment Value: Drought vs. No Drought
  misc_feature: MA Experiment ID: 108574 Result: Up-regulated in Transcription
  misc_feature: MA Experiment 108574 PARAMETER Experiment Name: At_Wounding__cDNA_P Parameter: Timepoint (hr) Value: 1
  misc_feature: MA Experiment 108574 PARAMETER Experiment Name: At_Wounding__cDNA_P Parameter: Tissue Value: Aerial
  misc_feature: MA Experiment 108574 PARAMETER Experiment Name: At_Wounding__cDNA_P Parameter: Treatment Value: Wounding vs. No Wounding
  misc_feature: MA Experiment ID: 108594 Result: Up-regulated in Transcription
  misc_feature: MA Experiment 108594 PARAMETER Experiment Name: At_Ler-rhl_Root_cDNA_P Parameter: Plant Line Value: null
  misc_feature: MA Experiment ID: 108607 Result: Up-regulated in Transcription
  misc_feature: MA Experiment 108607 PARAMETER Experiment Name: At_100uM_ABA_cDNA_P Parameter: Timepoint (hr) Value: 4
  misc_feature: MA Experiment 108607 PARAMETER Experiment Name: At_100uM_ABA_cDNA_P Parameter: Tissue Value: Aerial
  misc_feature: MA Experiment 108607 PARAMETER Experiment Name: At_100uM_ABA_cDNA_P Parameter: Treatment Value: 100uM ABA vs. No Treatment
  misc_feature: MA Experiment ID: 108668 Result: Up-regulated in Transcription
  misc_feature: MA Experiment 108668 PARAMETER Experiment Name: At_2mM_SA_cDNA_P Parameter: Plant Line Value: WS
  misc_feature: MA Experiment 108668 PARAMETER Experiment Name: At_2mM_SA_cDNA_P Parameter: Timepoint (hr) Value: 6
  misc_feature: MA Experiment 108668 PARAMETER Experiment Name: At_2mM_SA_cDNA_P Parameter: Treatment Value: 2mM SA vs. No Treatment
  misc_feature: MA Experiment ID: 20000070 Result: Up-regulated in Transcription
  misc_feature: MA Experiment 20000070 PARAMETER Experiment Name: At_100uM_ABA_Mutants_cDNA_P Parameter: Plant Line Value: CS24
  misc_feature: MA Experiment 20000070 PARAMETER Experiment Name: At_100uM_ABA_Mutants_cDNA_P Parameter: Timepoint (hr) Value: 6
  misc_feature: MA Experiment 20000070 PARAMETER Experiment Name: At_100uM_ABA_Mutants_cDNA_P Parameter: Tissue Value: Aerial
  misc_feature: MA Experiment 20000070 PARAMETER Experiment Name: At_100uM_ABA_Mutants_cDNA_P Parameter: Treatment Value: 100uM ABA vs. No Treatment
  misc_feature: MA Experiment ID: 20000071 Result: Up-regulated in Transcription
  misc_feature: MA Experiment 20000071 PARAMETER Experiment Name: At_100uM_ABA_Mutants_cDNA_P Parameter: Plant Line Value: CS8104
  misc_feature: MA Experiment 20000071 PARAMETER Experiment Name: At_100uM_ABA_Mutants_cDNA_P Parameter: Timepoint (hr) Value: 6
  misc_feature: MA Experiment 20000071 PARAMETER Experiment Name: At_100uM_ABA_Mutants_cDNA_P Parameter: Tissue Value: Aerial
  misc_feature: MA Experiment 20000071 PARAMETER Experiment Name: At_100uM_ABA_Mutants_cDNA_P Parameter: Treatment Value: 100uM ABA vs. No Treatment
  misc_feature: MA Experiment ID: 20000072 Result: Up-regulated in Transcription
  misc_feature: MA Experiment 20000072 PARAMETER Experiment Name: At_100uM_ABA_Mutants_cDNA_P Parameter: Plant Line Value: CS8105
  misc_feature: MA Experiment 20000072 PARAMETER Experiment Name: At_100uM_ABA_Mutants_cDNA_P Parameter: Timepoint (hr) Value: 6
  misc_feature: MA Experiment 20000072 PARAMETER Experiment Name: At_100uM_ABA_Mutants_cDNA_P Parameter: Tissue Value: Aerial
  misc_feature: MA Experiment 20000072 PARAMETER Experiment Name: At_100uM_ABA_Mutants_cDNA_P Parameter: Treatment Value: 100uM ABA vs. No Treatment
  misc_feature: MA Experiment ID: 20000089 Result: Up-regulated in Transcription
  misc_feature: MA Experiment ID: 20000090 Result: Up-regulated in Transcription
  misc_feature: MA Experiment ID: 20000112 Result: Down-regulated in Transcription
  misc_feature: MA Experiment 20000112 PARAMETER Experiment Name: At_42deg_Heat_cDNA_P Parameter: Temperature (deg C) Value: 42 vs. 22
  misc_feature: MA Experiment 20000112 PARAMETER Experiment Name: At_42deg_Heat_cDNA_P Parameter: Timepoint (hr) Value: 2
  misc_feature: MA Experiment 20000112 PARAMETER Experiment Name: At_42deg_Heat_cDNA_P Parameter: Tissue Value: Aerial
  misc_feature: MA Experiment ID: 20000117 Result: Up-regulated in Transcription
  misc_feature: MA Experiment 20000117 PARAMETER Experiment Name: At_100uM_ABA_Mutants_cDNA_P Parameter: Plant Line Value: Columbia
  misc_feature: MA Experiment 20000117 PARAMETER Experiment Name: At_100uM_ABA_Mutants_cDNA_P Parameter: Timepoint (hr) Value: 6
  misc_feature: MA Experiment 20000117 PARAMETER Experiment Name: At_100uM_ABA_Mutants_cDNA_P Parameter: Tissue Value: Aerial
  misc_feature: MA Experiment 20000117 PARAMETER Experiment Name: At_100uM_ABA_Mutants_cDNA_P Parameter: Treatment Value: 100uM ABA vs. No Treatment
  misc_feature: MA Experiment ID: 20000179 Result: Down-regulated in Transcription
  misc_feature: MA Experiment 20000179 PARAMETER Experiment Name: At_Germinating_Seeds_P Parameter: Age (hr) Value: 6 vs. 0
  misc_feature: MA Experiment 20000179 PARAMETER Experiment Name: At_Germinating_Seeds_P Parameter: Tissue Value: Germinating Seeds
  misc_feature: MA Experiment ID: 20000180 Result: Down-regulated in Transcription
  misc_feature: MA Experiment 20000180 PARAMETER Experiment Name: At_Germinating_Seeds_P Parameter: Age (hr) Value: 24 vs. 0
  misc_feature: MA Experiment 20000180 PARAMETER Experiment Name: At_Germinating_Seeds_P Parameter: Tissue Value: Germinating Seeds
  misc_feature: MA Experiment ID: 20000182 Result: Up-regulated in Transcription
  misc_feature: MA Experiment 20000182 PARAMETER Experiment Name: At_2mM_SA_P Parameter: Age (day) Value: 14
  misc_feature: MA Experiment 20000182 PARAMETER Experiment Name: At_2mM_SA_P Parameter: Organism Value: A. thaliana
  misc_feature: MA Experiment 20000182 PARAMETER Experiment Name: At_2mM_SA_P Parameter: Plant Line Value: WS
  misc_feature: MA Experiment 20000182 PARAMETER Experiment Name: At_2mM_SA_P Parameter: Timepoint (hr) Value: 6
  misc_feature: MA Experiment 20000182 PARAMETER Experiment Name: At_2mM_SA_P Parameter: Tissue Value: Aerial
  misc_feature: MA Experiment 20000182 PARAMETER Experiment Name: At_2mM_SA_P Parameter: Treatment Value: 2mM SA vs. No Treatment
  misc_feature: MA Experiment ID: 20000184 Result: Up-regulated in Transcription
  misc_feature: MA Experiment 20000184 PARAMETER Experiment Name: At_Shoots__P Parameter: Age (day) Value: 7
  misc_feature: MA Experiment 20000184 PARAMETER Experiment Name: At_Shoots__P Parameter: Tissue Value: Shoots vs. Whole Plant
  misc_feature: MA Experiment ID: 20000185 Result: Up-regulated in Transcription
  misc_feature: MA Experiment 20000185 PARAMETER Experiment Name: At_Roots__P Parameter: Age (day) Value: 7 vs. 21
  misc_feature: MA Experiment 20000185 PARAMETER Experiment Name: At_Roots__P Parameter: Organism Value: A. thaliana
  misc_feature: MA Experiment 20000185 PARAMETER Experiment Name: At_Roots__P Parameter: Tissue Value: Roots vs. Whole Plant
  misc_feature: MA Experiment ID: 20000211 Result: Up-regulated in Transcription
  misc_feature: MA Experiment 20000211 PARAMETER Experiment Name: At_0.001percent_MeJA__P Parameter: Age (day) Value: 14
  misc_feature: MA Experiment 20000211 PARAMETER Experiment Name: At_0.001percent_MeJA__P Parameter: Organism Value: A. thaliana
  misc_feature: MA Experiment 20000211 PARAMETER Experiment Name: At_0.001percent_MeJA__P Parameter: Plant Line Value: WS
  misc_feature: MA Experiment 20000211 PARAMETER Experiment Name: At_0.001percent_MeJA__P Parameter: Timepoint (hr) Value: 1
  misc_feature: MA Experiment 20000211 PARAMETER Experiment Name: At_0.001percent_MeJA__P Parameter: Tissue Value: Aerial
  misc_feature: MA Experiment 20000211 PARAMETER Experiment Name: At_0.001percent_MeJA__P Parameter: Treatment Value: 0.001percent MeJA vs. No Treatment
  misc_feature: MA Experiment ID: 20000224 Result: Down-regulated in Transcription
  misc_feature: MA Experiment ID: 20000234 Result: Down-regulated in Transcription
  misc_feature: MA Experiment 20000234 PARAMETER Experiment Name: At_Siliques_P Parameter: Age (day) Value: 21
  misc_feature: MA Experiment 20000234 PARAMETER Experiment Name: At_Siliques_P Parameter: Organism Value: A. thaliana
  misc_feature: MA Experiment 20000234 PARAMETER Experiment Name: At_Siliques_P Parameter: Plant Line Value: WS
  misc_feature: MA Experiment 20000234 PARAMETER Experiment Name: At_Siliques_P Parameter: Tissue Value: Less Than 5mm Siliques vs. Whole Plant
  misc_feature: MA Experiment ID: 20000235 Result: Down-regulated in Transcription
  misc_feature: MA Experiment 20000235 PARAMETER Experiment Name: At_Siliques_P Parameter: Age (day) Value: 21
  misc_feature: MA Experiment 20000235 PARAMETER Experiment Name: At_Siliques_P Parameter: Organism Value: A. thaliana
  misc_feature: MA Experiment 20000235 PARAMETER Experiment Name: At_Siliques_P Parameter: Plant Line Value: WS
  misc_feature: MA Experiment 20000235 PARAMETER Experiment Name: At_Siliques_P Parameter: Tissue Value: 5-10mm Siliques vs. Whole Plant
  misc_feature: MA Experiment ID: 20000436 Result: Up-regulated in Transcription
  misc_feature: MA Experiment 20000436 PARAMETER Experiment Name: At_Drought_P Parameter: Age (day) Value: 7
  misc_feature: MA Experiment 20000436 PARAMETER Experiment Name: At_Drought_P Parameter: Organism Value: A. thaliana
  misc_feature: MA Experiment 20000436 PARAMETER Experiment Name: At_Drought_P Parameter: Plant Line Value: WS
  misc_feature: MA Experiment 20000436 PARAMETER Experiment Name: At_Drought_P Parameter: Timepoint (hr) Value: 12
  misc_feature: MA Experiment 20000436 PARAMETER Experiment Name: At_Drought_P Parameter: Tissue Value: Whole Plant
  misc_feature: MA Experiment 20000436 PARAMETER Experiment Name: At_Drought_P Parameter: Treatment Value: Drought vs. No Drought
  misc_feature: MA Experiment ID: 20000437 Result: Up-regulated in Transcription
  misc_feature: MA Experiment 20000437 PARAMETER Experiment Name: At_Drought_P Parameter: Age (day) Value: 8
  misc_feature: MA Experiment 20000437 PARAMETER Experiment Name: At_Drought_P Parameter: Organism Value: A. thaliana
  misc_feature: MA Experiment 20000437 PARAMETER Experiment Name: At_Drought_P Parameter: Plant Line Value: WS
  misc_feature: MA Experiment 20000437 PARAMETER Experiment Name: At_Drought_P Parameter: Timepoint (hr) Value: 24
  misc_feature: MA Experiment 20000437 PARAMETER Experiment Name: At_Drought_P Parameter: Tissue Value: Whole Plant
  misc_feature: MA Experiment 20000437 PARAMETER Experiment Name: At_Drought_P Parameter: Treatment Value: Drought vs. No Drought
  misc_feature: MA Experiment ID: 20000438 Result: Up-regulated in Transcription
  misc_feature: MA Experiment 20000438 PARAMETER Experiment Name: At_Shoots__P Parameter: Age (day) Value: 14
  misc_feature: MA Experiment 20000438 PARAMETER Experiment Name: At_Shoots__P Parameter: Tissue Value: Shoots vs. Whole Plant
  misc_feature: MA Experiment ID: 20000445 Result: Up-regulated in Transcription
  misc_feature: MA Experiment 20000445 PARAMETER Experiment Name: At_100uM_NAA__P Parameter: Age (day) Value: 14
  misc_feature: MA Experiment 20000445 PARAMETER Experiment Name: At_100uM_NAA__P Parameter: Organism Value: A. thaliana
  misc_feature: MA Experiment 20000445 PARAMETER Experiment Name: At_100uM_NAA__P Parameter: Plant Line Value: WS
  misc_feature: MA Experiment 20000445 PARAMETER Experiment Name: At_100uM_NAA__P Parameter: Timepoint (hr) Value: 6
  misc_feature: MA Experiment 20000445 PARAMETER Experiment Name: At_100uM_NAA__P Parameter: Tissue Value: Aerial
  misc_feature: MA Experiment 20000445 PARAMETER Experiment Name: At_100uM_NAA__P Parameter: Treatment Value: 100uM NAA vs. No Treatment
  misc_feature: MA Experiment ID: 20000451 Result: Up-regulated in Transcription
  misc_feature: MA Experiment 20000451 PARAMETER Experiment Name: At_CS6879_Shoots-Roots_P Parameter: Age (day) Value: 14
  misc_feature: MA Experiment 20000451 PARAMETER Experiment Name: At_CS6879_Shoots-Roots_P Parameter: Organism Value: A. thaliana
  misc_feature: MA Experiment 20000451 PARAMETER Experiment Name: At_CS6879_Shoots-Roots_P Parameter: Plant Line Value: CS6879 vs. WS
  misc_feature: MA Experiment 20000451 PARAMETER Experiment Name: At_CS6879_Shoots-Roots_P Parameter: Tissue Value: Roots
  misc_feature: MA Experiment ID: 20000453 Result: Up-regulated in Transcription
  misc_feature: MA Experiment 20000453 PARAMETER Experiment Name: At_100uM_ABA_P Parameter: Age (day) Value: 15
  misc_feature: MA Experiment 20000453 PARAMETER Experiment Name: At_100uM_ABA_P Parameter: Organism Value: A. thaliana
  misc_feature: MA Experiment 20000453 PARAMETER Experiment Name: At_100uM_ABA_P Parameter: Plant Line Value: WS
  misc_feature: MA Experiment 20000453 PARAMETER Experiment Name: At_100uM_ABA_P Parameter: Timepoint (hr) Value: 24
  misc_feature: MA Experiment 20000453 PARAMETER Experiment Name: At_100uM_ABA_P Parameter: Tissue Value: Aerial
  misc_feature: MA Experiment 20000453 PARAMETER Experiment Name: At_100uM_ABA_P Parameter: Treatment Value: 100uM ABA vs. No Treatment
  misc_feature: MA Experiment ID: 20000456 Result: Up-regulated in Transcription
  misc_feature: MA Experiment 20000456 PARAMETER Experiment Name: At_100uM_BA_P Parameter: Age (day) Value: 14
  misc_feature: MA Experiment 20000456 PARAMETER Experiment Name: At_100uM_BA_P Parameter: Organism Value: A. thaliana
  misc_feature: MA Experiment 20000456 PARAMETER Experiment Name: At_100uM_BA_P Parameter: Plant Line Value: WS
  misc_feature: MA Experiment 20000456 PARAMETER Experiment Name: At_100uM_BA_P Parameter: Timepoint (hr) Value: 6
  misc_feature: MA Experiment 20000456 PARAMETER Experiment Name: At_100uM_BA_P Parameter: Tissue Value: Aerial
  misc_feature: MA Experiment 20000456 PARAMETER Experiment Name: At_100uM_BA_P Parameter: Treatment Value: 100uM BA vs. No Treatment
  misc_feature: MA Experiment ID: 20000495 Result: Down-regulated in Transcription
  misc_feature: MA Experiment 20000495 PARAMETER Experiment Name: At_Guard_Cells_P Parameter: Harvest Date Value: 8/2/2002
  misc_feature: MA Experiment 20000495 PARAMETER Experiment Name: At_Guard_Cells_P Parameter: Organism Value: A. thaliana
  misc_feature: MA Experiment 20000495 PARAMETER Experiment Name: At_Guard_Cells_P Parameter: Tissue Value: Guard Cells vs. Leaves
  misc_feature: MA Experiment ID: 20000506 Result: Up-regulated in Transcription
  misc_feature: MA Experiment 20000506 PARAMETER Experiment Name: At_Wounding_P Parameter: Organism Value: A. thaliana
  misc_feature: MA Experiment 20000506 PARAMETER Experiment Name: At_Wounding_P Parameter: Plant Line Value: WS
  misc_feature: MA Experiment 20000506 PARAMETER Experiment Name: At_Wounding_P Parameter: Timepoint (hr) Value: 6
  misc_feature: MA Experiment 20000506 PARAMETER Experiment Name: At_Wounding_P Parameter: Tissue Value: Aerial
  misc_feature: MA Experiment 20000506 PARAMETER Experiment Name: At_Wounding_P Parameter: Treatment Value: Wounding vs. No Wounding
  misc_feature: MA Experiment ID: 20000794 Result: Up-regulated in Transcription
  misc_feature: MA Experiment 20000794 PARAMETER Experiment Name: At_Petals_P Parameter: Age (day) Value: 23-25 days
  misc_feature: MA Experiment 20000794 PARAMETER Experiment Name: At_Petals_P Parameter: Plant Line Value: WS
  misc_feature: MA Experiment 20000794 PARAMETER Experiment Name: At_Petals_P Parameter: Tissue Value: Petals vs. Whole plant
  misc_feature: MA Experiment ID: 20001247 Result: Up-regulated in Transcription
  misc_feature: MA Experiment 20001247 PARAMETER Experiment Name: At_Far-red-induction_P Parameter: Age (day) Value: 7
  misc_feature: MA Experiment 20001247 PARAMETER Experiment Name: At_Far-red-induction_P Parameter: Light Value: Far-red vs. White
  misc_feature: MA Experiment 20001247 PARAMETER Experiment Name: At_Far-red-induction_P Parameter: Organism Value: A. thaliana
  misc_feature: MA Experiment 20001247 PARAMETER Experiment Name: At_Far-red-induction_P Parameter: Plant Line Value: Columbia
  misc_feature: MA Experiment 20001247 PARAMETER Experiment Name: At_Far-red-induction_P Parameter: Timepoint (hr) Value: 1
  misc_feature: MA Experiment 20001247 PARAMETER Experiment Name: At_Far-red-induction_P Parameter: Tissue Value: Whole Plant
  misc_feature: MA Experiment ID: 20001248 Result: Up-regulated in Transcription
  misc_feature: MA Experiment 20001248 PARAMETER Experiment Name: At_Far-red-induction_P Parameter: Age (day) Value: 7
  misc_feature: MA Experiment 20001248 PARAMETER Experiment Name: At_Far-red-induction_P Parameter: Light Value: Far-red vs. White
  misc_feature: MA Experiment 20001248 PARAMETER Experiment Name: At_Far-red-induction_P Parameter: Organism Value: A. thaliana
  misc_feature: MA Experiment 20001248 PARAMETER Experiment Name: At_Far-red-induction_P Parameter: Plant Line Value: Columbia
  misc_feature: MA Experiment 20001248 PARAMETER Experiment Name: At_Far-red-induction_P Parameter: Timepoint (hr) Value: 4
  misc_feature: MA Experiment 20001248 PARAMETER Experiment Name: At_Far-red-induction_P Parameter: Tissue Value: Whole Plant
  misc_feature: MA Experiment ID: 20001450 Result: Up-regulated in Transcription
  misc_feature: MA Experiment 20001450 PARAMETER Experiment Name: At_Far-red-induction_P Parameter: Age (day) Value: 7
  misc_feature: MA Experiment 20001450 PARAMETER Experiment Name: At_Far-red-induction_P Parameter: Light Value: Far-red vs. White
  misc_feature: MA Experiment 20001450 PARAMETER Experiment Name: At_Far-red-induction_P Parameter: Organism Value: A. thaliana
  misc_feature: MA Experiment 20001450 PARAMETER Experiment Name: At_Far-red-induction_P Parameter: Plant Line Value: Columbia
  misc_feature: MA Experiment 20001450 PARAMETER Experiment Name: At_Far-red-induction_P Parameter: Timepoint (hr) Value: 8
  misc_feature: MA Experiment 20001450 PARAMETER Experiment Name: At_Far-red-induction_P Parameter: Tissue Value: Whole Plant
  misc_feature: MA Experiment ID: 20001451 Result: Up-regulated in Transcription
  misc_feature: MA Experiment 20001451 PARAMETER Experiment Name: At_Far-red-induction_P Parameter: Age (day) Value: 7
  misc_feature: MA Experiment 20001451 PARAMETER Experiment Name: At_Far-red-induction_P Parameter: Light Value: Far-red vs. White
  misc_feature: MA Experiment 20001451 PARAMETER Experiment Name: At_Far-red-induction_P Parameter: Organism Value: A. thaliana
  misc_feature: MA Experiment 20001451 PARAMETER Experiment Name: At_Far-red-induction_P Parameter: Plant Line Value: Columbia
  misc_feature: MA Experiment 20001451 PARAMETER Experiment Name: At_Far-red-induction_P Parameter: Timepoint (hr) Value: 24
  misc_feature: MA Experiment 20001451 PARAMETER Experiment Name: At_Far-red-induction_P Parameter: Tissue Value: Whole Plant
  misc_feature: MA Experiment ID: 20001503 Result: Up-regulated in Transcription
  misc_feature: MA Experiment 20001503 PARAMETER Experiment Name: At_Far-red-enriched_P Parameter: Age (day) Value: 7
  misc_feature: MA Experiment 20001503 PARAMETER Experiment Name: At_Far-red-enriched_P Parameter: Light Value: Far-red enriched vs. White
  misc_feature: MA Experiment 20001503 PARAMETER Experiment Name: At_Far-red-enriched_P Parameter: Organism Value: A. thaliana
  misc_feature: MA Experiment 20001503 PARAMETER Experiment Name: At_Far-red-enriched_P Parameter: Plant Line Value: Columbia
  misc_feature: MA Experiment 20001503 PARAMETER Experiment Name: At_Far-red-enriched_P Parameter: Timepoint (day) Value: 3
  misc_feature: MA Experiment 20001503 PARAMETER Experiment Name: At_Far-red-enriched_P Parameter: Tissue Value: Whole Plant
  misc_feature: MA Experiment ID: 20001504 Result: Up-regulated in Transcription
  misc_feature: MA Experiment 20001504 PARAMETER Experiment Name: At_Far-red-enriched_P Parameter: Age (day) Value: 10
  misc_feature: MA Experiment 20001504 PARAMETER Experiment Name: At_Far-red-enriched_P Parameter: Light Value: Far-red enriched vs. White
  misc_feature: MA Experiment 20001504 PARAMETER Experiment Name: At_Far-red-enriched_P Parameter: Organism Value: A. thaliana
  misc_feature: MA Experiment 20001504 PARAMETER Experiment Name: At_Far-red-enriched_P Parameter: Plant Line Value: Columbia
  misc_feature: MA Experiment 20001504 PARAMETER Experiment Name: At_Far-red-enriched_P Parameter: Timepoint (day) Value: 6
  misc_feature: MA Experiment 20001504 PARAMETER Experiment Name: At_Far-red-enriched_P Parameter: Tissue Value: Whole Plant
  misc_feature: MA Experiment ID: 20001554 Result: Down-regulated in Transcription
  misc_feature: MA Experiment 20001554 PARAMETER Experiment Name: At_Drought_Soil_Dry_P Parameter: Age (day) Value: 21
  misc_feature: MA Experiment 20001554 PARAMETER Experiment Name: At_Drought_Soil_Dry_P Parameter: Organism Value: A. thaliana
  misc_feature: MA Experiment 20001554 PARAMETER Experiment Name: At_Drought_Soil_Dry_P Parameter: Plant Line Value: WS
  misc_feature: MA Experiment 20001554 PARAMETER Experiment Name: At_Drought_Soil_Dry_P Parameter: Post Timepoint (hr) Value: None
  misc_feature: MA Experiment 20001554 PARAMETER Experiment Name: At_Drought_Soil_Dry_P Parameter: Post-Treatment Value: None
  misc_feature: MA Experiment 20001554 PARAMETER Experiment Name: At_Drought_Soil_Dry_P Parameter: Timepoint (day) Value: 7
  misc_feature: MA Experiment 20001554 PARAMETER Experiment Name: At_Drought_Soil_Dry_P Parameter: Treatment Value: Drought vs. No Drought
  misc_feature: MA Experiment ID: 20001555 Result: Down-regulated in Transcription
  misc_feature: MA Experiment 20001555 PARAMETER Experiment Name: At_Drought_Soil_Dry_P Parameter: Age (day) Value: 24
  misc_feature: MA Experiment 20001555 PARAMETER Experiment Name: At_Drought_Soil_Dry_P Parameter: Organism Value: A. thaliana
  misc_feature: MA Experiment 20001555 PARAMETER Experiment Name: At_Drought_Soil_Dry_P Parameter: Plant Line Value: WS
  misc_feature: MA Experiment 20001555 PARAMETER Experiment Name: At_Drought_Soil_Dry_P Parameter: Post Timepoint (hr) Value: None
  misc_feature: MA Experiment 20001555 PARAMETER Experiment Name: At_Drought_Soil_Dry_P Parameter: Post-Treatment Value: None
  misc_feature: MA Experiment 20001555 PARAMETER Experiment Name: At_Drought_Soil_Dry_P Parameter: Timepoint (day) Value: 10
  misc_feature: MA Experiment 20001555 PARAMETER Experiment Name: At_Drought_Soil_Dry_P Parameter: Treatment Value: Drought vs. No Drought
  misc_feature: MA Experiment ID: 20001556 Result: Down-regulated in Transcription
  misc_feature: MA Experiment 20001556 PARAMETER Experiment Name: At_Drought_Soil_Dry_P Parameter: Age (day) Value: 26
  misc_feature: MA Experiment 20001556 PARAMETER Experiment Name: At_Drought_Soil_Dry_P Parameter: Organism Value: A. thaliana
  misc_feature: MA Experiment 20001556 PARAMETER Experiment Name: At_Drought_Soil_Dry_P Parameter: Plant Line Value: WS
  misc_feature: MA Experiment 20001556 PARAMETER Experiment Name: At_Drought_Soil_Dry_P Parameter: Post Timepoint (hr) Value: None
  misc_feature: MA Experiment 20001556 PARAMETER Experiment Name: At_Drought_Soil_Dry_P Parameter: Post-Treatment Value: None
  misc_feature: MA Experiment 20001556 PARAMETER Experiment Name: At_Drought_Soil_Dry_P Parameter: Timepoint (day) Value: 12
  misc_feature: MA Experiment 20001556 PARAMETER Experiment Name: At_Drought_Soil_Dry_P Parameter: Treatment Value: Drought vs. No Drought
  misc_feature: MA Experiment ID: 20001558 Result: Down-regulated in Transcription
  misc_feature: MA Experiment 20001558 PARAMETER Experiment Name: At_Drought_Soil_Dry_P Parameter: Age (day) Value: 27
  misc_feature: MA Experiment 20001558 PARAMETER Experiment Name: At_Drought_Soil_Dry_P Parameter: Organism Value: A. thaliana
  misc_feature: MA Experiment 20001558 PARAMETER Experiment Name: At_Drought_Soil_Dry_P Parameter: Plant Line Value: WS
  misc_feature: MA Experiment 20001558 PARAMETER Experiment Name: At_Drought_Soil_Dry_P Parameter: Post Timepoint (hr) Value: 6
  misc_feature: MA Experiment 20001558 PARAMETER Experiment Name: At_Drought_Soil_Dry_P Parameter: Post-Treatment Value: Re-Water vs. No Drought
  misc_feature: MA Experiment 20001558 PARAMETER Experiment Name: At_Drought_Soil_Dry_P Parameter: Timepoint (day) Value: 13
  misc_feature: MA Experiment 20001558 PARAMETER Experiment Name: At_Drought_Soil_Dry_P Parameter: Treatment Value: Drought vs. No Drought
  misc_feature: MA Experiment ID: 20001769 Result: Up-regulated in Transcription
  misc_feature: MA Experiment 20001769 PARAMETER Experiment Name: At_Far-red-enriched-adult_P Parameter: Age (day) Value: 28
  misc_feature: MA Experiment 20001769 PARAMETER Experiment Name: At_Far-red-enriched-adult_P Parameter: Light Value: Far-red enriched vs. White
  misc_feature: MA Experiment 20001769 PARAMETER Experiment Name: At_Far-red-enriched-adult_P Parameter: Organism Value: A. thaliana
  misc_feature: MA Experiment 20001769 PARAMETER Experiment Name: At_Far-red-enriched-adult_P Parameter: Plant Line Value: Columbia
  misc_feature: MA Experiment 20001769 PARAMETER Experiment Name: At_Far-red-enriched-adult_P Parameter: Timepoint (hr) Value: 4
  misc_feature: MA Experiment 20001769 PARAMETER Experiment Name: At_Far-red-enriched-adult_P Parameter: Tissue Value: Aerial
  misc_feature: MA Experiment ID: 20001770 Result: Up-regulated in Transcription
  misc_feature: MA Experiment 20001770 PARAMETER Experiment Name: At_Far-red-enriched-adult_P Parameter: Age (day) Value: 28
  misc_feature: MA Experiment 20001770 PARAMETER Experiment Name: At_Far-red-enriched-adult_P Parameter: Light Value: Far-red enriched vs. White
  misc_feature: MA Experiment 20001770 PARAMETER Experiment Name: At_Far-red-enriched-adult_P Parameter: Organism Value: A. thaliana
  misc_feature: MA Experiment 20001770 PARAMETER Experiment Name: At_Far-red-enriched-adult_P Parameter: Plant Line Value: Columbia
  misc_feature: MA Experiment 20001770 PARAMETER Experiment Name: At_Far-red-enriched-adult_P Parameter: Timepoint (hr) Value: 8
  misc_feature: MA Experiment 20001770 PARAMETER Experiment Name: At_Far-red-enriched-adult_P Parameter: Tissue Value: Aerial
  misc_feature: MA Experiment ID: 20001771 Result: Up-regulated in Transcription
  misc_feature: MA Experiment 20001771 PARAMETER Experiment Name: At_Far-red-enriched-adult_P Parameter: Age (day) Value: 28
  misc_feature: MA Experiment 20001771 PARAMETER Experiment Name: At_Far-red-enriched-adult_P Parameter: Light Value: Far-red enriched vs. White
  misc_feature: MA Experiment 20001771 PARAMETER Experiment Name: At_Far-red-enriched-adult_P Parameter: Organism Value: A. thaliana
  misc_feature: MA Experiment 20001771 PARAMETER Experiment Name: At_Far-red-enriched-adult_P Parameter: Plant Line Value: Columbia
  misc_feature: MA Experiment 20001771 PARAMETER Experiment Name: At_Far-red-enriched-adult_P Parameter: Timepoint (hr) Value: 16
  misc_feature: MA Experiment 20001771 PARAMETER Experiment Name: At_Far-red-enriched-adult_P Parameter: Tissue Value: Aerial
  misc_feature: MA Experiment ID: 20001905 Result: Up-regulated in Transcription
  misc_feature: MA Experiment 20001905 PARAMETER Experiment Name: At_Drought_Reproduction_P Parameter: Age (day) Value: 40
  misc_feature: MA Experiment 20001905 PARAMETER Experiment Name: At_Drought_Reproduction_P Parameter: Organism Value: A. thaliana
  misc_feature: MA Experiment 20001905 PARAMETER Experiment Name: At_Drought_Reproduction_P Parameter: Plant Line Value: WS
  misc_feature: MA Experiment 20001905 PARAMETER Experiment Name: At_Drought_Reproduction_P Parameter: Timepoint (day) Value: 10
  misc_feature: MA Experiment 20001905 PARAMETER Experiment Name: At_Drought_Reproduction_P Parameter: Tissue Value: Rosettes
  misc_feature: MA Experiment 20001905 PARAMETER Experiment Name: At_Drought_Reproduction_P Parameter: Treatment Value: Drought vs. No Drought
acaccaacacacaaagattccattacaaataaacaattttcatatatatctataacaaaaaaaaacaatggctacctcaagcatgaagagcattccaatggcgatcccaagtttctccatgtgtcacaagctcgagctccttaaagaaggcaaaactcgcgacgtcccgaaagccgaagaagatgaagggctaagctgcgagttccaagagatgttggattctcttcctaaggagagaggatggagaactcgttacctttacctattccaagggttttggtgccaagccaaagagattcaagccatcatgtctttccaaaaacatttccaatccctcgaaaacgacgtcgttctcgccaccatacctaaatccggtacaacctggctaaaagctttaactttcaccatccttaaccgtcaccggtttgatccggttgcctcgagtaccaaccaccctcttttcacttccaaccctcatgaccttgtacctttcttcgagtacaagctttacgccaacggagatgttcccgatctctcgggtctagccagtccaagaacgttcgcaacccacttaccgttcggttccctaaaggaaacgatcgagaaacccggtgtgaaggtcgtgtacttgtgccggaacccgtttgacacattcatctcttcgtggcattacaccaacaacatcaaatccgagtcagtgagcccagtcttgctagaccaagcttttgatctgtattgccggggagtgatcgggtttggcccgttttgggaacacatgttgggatactggagagagagcttgaagagaccagagaaagtcttctttttaaggtacgaggatctcaaagacgacatcgagaccaacttgaagaggcttgcaactttcttagagcttcctttcaccgaagaagaggaacgaaagggagttgtgaaggctatcgccgagctgtgtagcttcgagaatctgaagaagttggaggtgaacaagtcaaacaagtcgatcaagaactttgagaatcgattcttgtttcggaaaggagaagtgagtgattgggttaactatttgtcaccttcacaagtggaaagattgtcagccttagtggatgacaagttaggtggatctggtctcactttcaggttgagctaaatataaggccacgtgcccccatttctactcttgttctgagggcctactatatacgttaagctaagttaaggcagttgtattgttgttacagatagacatcgaagcaacgtaacgtccataattaagttaatttgtcgtttttatttttgtcaacaccgaagtttgtcgaatttttattttattaaatatcgcttgtttttgc

SEQ ID NO: 41817 - protein, 359 aa, Arabidopsis thaliana
  peptide (1)..(359): Ceres Seq. ID no. 13492430
  misc_feature (91)..(353): Pfam Name: Sulfotransferase domain Pfam Description: Sulfotransferase domain
  misc_feature (37)..(354): Homolog of NCBI NO: 21553545 NR Description: steroid sulfotransferase, putative [Arabidopsis
  misc_feature (28)..(356): Homolog of NCBI NO: 15239947 NR Description: sulfotransferase family [Arabidopsis thaliana]
  misc_feature (33)..(356): Homolog of NCBI NO: 15227699 NR Description: steroid sulfotransferase, putative [Arabidopsis
  misc_feature (22)..(357): Homolog of NCBI NO: 25288806 NR Description: probable steroid sulfotransferase
  misc_feature (9)..(357): Homolog of NCBI NO: 18395604 NR Description: sulfotransferase family [Arabidopsis thaliana]
  misc_feature (18)..(359): Homolog of NCBI NO: 9759556 NR Description: steroid sulfotransferase-like protein
  misc_feature (11)..(359): Homolog of NCBI NO: 30681703 NR Description: sulfotransferase family [Arabidopsis thaliana]
  misc_feature (6)..(359): Homolog of NCBI NO: 9759557 NR Description: steroid sulfotransferase-like protein
  misc_feature (1)..(359): Homolog of NCBI NO: 15809903 NR Description: AT5g07010/MOJ9_18 [Arabidopsis thaliana]
  misc_feature (1)..(359): Homolog of NCBI NO: 18415376 NR Description: sulfotransferase family [Arabidopsis thaliana]
MATSSMKSIPMAIPSFSMCHKLELLKEGKTRDVPKAEEDEGLSCEFQEMLDSLPKERGWRTRYLYLFQGFWCQAKEIQAIMSFQKHFQSLENDVVLATIPKSGTTWLKALTFTILNRHRFDPVASSTNHPLFTSNPHDLVPFFEYKLYANGDVPDLSGLASPRTFATHLPFGSLKETIEKPGVKVVYLCRNPFDTFISSWHYTNNIKSESVSPVLLDQAFDLYCRGVIGFGPFWEHMLGYWRESLKRPEKVFFLRYEDLKDDIETNLKRLATFLELPFTEEEERKGVVKAIAELCSFENLKKLEVNKSNKSIKNFENRFLFRKGEVSDWVNYLSPSQVERLSALVDDKLGGSGLTFRLS

SEQ ID NO: 41818 - protein, 354 aa, Arabidopsis thaliana
  peptide (1)..(354): Ceres Seq. ID no. 13492431
  misc_feature (86)..(348): Pfam Name: Sulfotransferase domain Pfam Description: Sulfotransferase domain
  misc_feature (32)..(349): Homolog of NCBI NO: 21553545 NR Description: steroid sulfotransferase, putative [Arabidopsis
  misc_feature (23)..(351): Homolog of NCBI NO: 15239947 NR Description: sulfotransferase family [Arabidopsis thaliana]
  misc_feature (28)..(351): Homolog of NCBI NO: 15227699 NR Description: steroid sulfotransferase, putative [Arabidopsis
  misc_feature (17)..(352): Homolog of NCBI NO: 25288806 NR Description: probable steroid sulfotransferase
  misc_feature (4)..(352): Homolog of NCBI NO: 18395604 NR Description: sulfotransferase family [Arabidopsis thaliana]
  misc_feature (13)..(354): Homolog of NCBI NO: 9759556 NR Description: steroid sulfotransferase-like protein
  misc_feature (6)..(354): Homolog of NCBI NO: 30681703 NR Description: sulfotransferase family [Arabidopsis thaliana]
  misc_feature (1)..(354): Homolog of NCBI NO: 9759557 NR Description: steroid sulfotransferase-like protein
  misc_feature (1)..(354): Homolog of NCBI NO: 15809903 NR Description: AT5g07010/MOJ9_18 [Arabidopsis thaliana]
  misc_feature (1)..(354): Homolog of NCBI NO: 18415376 NR Description: sulfotransferase family [Arabidopsis thaliana]
MKSIPMAIPSFSMCHKLELLKEGKTRDVPKAEEDEGLSCEFQEMLDSLPKERGWRTRYLYLFQGFWCQAKEIQAIMSFQKHFQSLENDVVLATIPKSGTTWLKALTFTILNRHRFDPVASSTNHPLFTSNPHDLVPFFEYKLYANGDVPDLSGLASPRTFATHLPFGSLKETIEKPGVKVVYLCRNPFDTFISSWHYTNNIKSESVSPVLLDQAFDLYCRGVIGFGPFWEHMLGYWRESLKRPEKVFFLRYEDLKDDIETNLKRLATFLELPFTEEEERKGVVKAIAELCSFENLKKLEVNKSNKSIKNFENRFLFRKGEVSDWVNYLSPSQVERLSALVDDKLGGSGLTFRLS

SEQ ID NO: 41819 - protein, 349 aa, Arabidopsis thaliana
  peptide (1)..(349): Ceres Seq. ID no. 13492432
  misc_feature (81)..(343): Pfam Name: Sulfotransferase domain Pfam Description: Sulfotransferase domain
  misc_feature (27)..(344): Homolog of NCBI NO: 21553545 NR Description: steroid sulfotransferase, putative [Arabidopsis
  misc_feature (18)..(346): Homolog of NCBI NO: 15239947 NR Description: sulfotransferase family [Arabidopsis thaliana]
  misc_feature (23)..(346): Homolog of NCBI NO: 15227699 NR Description: steroid sulfotransferase, putative [Arabidopsis
  misc_feature (12)..(347): Homolog of NCBI NO: 25288806 NR Description: probable steroid sulfotransferase
  misc_feature (1)..(347): Homolog of NCBI NO: 18395604 NR Description: sulfotransferase family [Arabidopsis thaliana]
  misc_feature (8)..(349): Homolog of NCBI NO: 9759556 NR Description: steroid sulfotransferase-like protein
  misc_feature (1)..(349): Homolog of NCBI NO: 30681703 NR Description: sulfotransferase family [Arabidopsis thaliana]
  misc_feature (1)..(349): Homolog of NCBI NO: 9759557 NR Description: steroid sulfotransferase-like protein
  misc_feature (1)..(349): Homolog of NCBI NO: 15809903 NR Description: AT5g07010/MOJ9_18 [Arabidopsis thaliana]
  misc_feature (1)..(349): Homolog of NCBI NO: 18415376 NR Description: sulfotransferase family [Arabidopsis thaliana]
MAIPSFSMCHKLELLKEGKTRDVPKAEEDEGLSCEFQEMLDSLPKERGWRTRYLYLFQGFWCQAKEIQAIMSFQKHFQSLENDVVLATIPKSGTTWLKALTFTILNRHRFDPVASSTNHPLFTSNPHDLVPFFEYKLYANGDVPDLSGLASPRTFATHLPFGSLKETIEKPGVKVVYLCRNPFDTFISSWHYTNNIKSESVSPVLLDQAFDLYCRGVIGFGPFWEHMLGYWRESLKRPEKVFFLRYEDLKDDIETNLKRLATFLELPFTEEEERKGVVKAIAELCSFENLKKLEVNKSNKSIKNFENRFLFRKGEVSDWVNYLSPSQVERLSALVDDKLGGSGLTFRLS

SEQ ID NO: 41820 - DNA, 1333 bp, Arabidopsis thaliana
  misc_feature (1)..(1333): Ceres Seq. ID no. 12738345
  misc_feature: MA Experiment ID: 108434 Result: Down-regulated in Transcription
  misc_feature: MA Experiment 108434 PARAMETER Experiment Name: At_Root_Tips_cDNA_P Parameter: Tissue Value: Root Tips
  misc_feature: MA Experiment ID: 108488 Result: Down-regulated in Transcription
  misc_feature: MA Experiment ID: 108572 Result: Up-regulated in Transcription
  misc_feature: MA Experiment 108572 PARAMETER Experiment Name: At_Drought_cDNA_P Parameter: Timepoint (hr) Value: 1
  misc_feature: MA Experiment 108572 PARAMETER Experiment Name: At_Drought_cDNA_P Parameter: Tissue Value: Aerial
  misc_feature: MA Experiment 108572 PARAMETER Experiment Name: At_Drought_cDNA_P Parameter: Treatment Value: Drought vs. No Drought
  misc_feature: MA Experiment ID: 108573 Result: Up-regulated in Transcription
  misc_feature: MA Experiment 108573 PARAMETER Experiment Name: At_Drought_cDNA_P Parameter: Timepoint (hr) Value: 6
  misc_feature: MA Experiment 108573 PARAMETER Experiment Name: At_Drought_cDNA_P Parameter: Tissue Value: Aerial
  misc_feature: MA Experiment 108573 PARAMETER Experiment Name: At_Drought_cDNA_P Parameter: Treatment Value: Drought vs. No Drought
  misc_feature: MA Experiment ID: 108579 Result: Down-regulated in Transcription
  misc_feature: MA Experiment 108579 PARAMETER Experiment Name: At_4deg_Cold_cDNA_P Parameter: Temperature (deg C) Value: 4 vs. 22
  misc_feature: MA Experiment 108579 PARAMETER Experiment Name: At_4deg_Cold_cDNA_P Parameter: Timepoint (hr) Value: 6
  misc_feature: MA Experiment 108579 PARAMETER Experiment Name: At_4deg_Cold_cDNA_P Parameter: Tissue Value: Aerial
  misc_feature: MA Experiment ID: 108605 Result: Up-regulated in Transcription
  misc_feature: MA Experiment 108605 PARAMETER Experiment Name: At_100uM_ABA_cDNA_P Parameter: Timepoint (hr) Value: 6
  misc_feature: MA Experiment 108605 PARAMETER Experiment Name: At_100uM_ABA_cDNA_P Parameter: Tissue Value: Aerial
  misc_feature: MA Experiment 108605 PARAMETER Experiment Name: At_100uM_ABA_cDNA_P Parameter: Treatment Value: 100uM ABA vs. No Treatment
  misc_feature: MA Experiment ID: 20000071 Result: Up-regulated in Transcription
  misc_feature: MA Experiment 20000071 PARAMETER Experiment Name: At_100uM_ABA_Mutants_cDNA_P Parameter: Plant Line Value: CS8104
  misc_feature: MA Experiment 20000071 PARAMETER Experiment Name: At_100uM_ABA_Mutants_cDNA_P Parameter: Timepoint (hr) Value: 6
  misc_feature: MA Experiment 20000071 PARAMETER Experiment Name: At_100uM_ABA_Mutants_cDNA_P Parameter: Tissue Value: Aerial
  misc_feature: MA Experiment 20000071 PARAMETER Experiment Name: At_100uM_ABA_Mutants_cDNA_P Parameter: Treatment Value: 100uM ABA vs. No Treatment
  misc_feature: MA Experiment ID: 20000117 Result: Up-regulated in Transcription
  misc_feature: MA Experiment 20000117 PARAMETER Experiment Name: At_100uM_ABA_Mutants_cDNA_P Parameter: Plant Line Value: Columbia
  misc_feature: MA Experiment 20000117 PARAMETER Experiment Name: At_100uM_ABA_Mutants_cDNA_P Parameter: Timepoint (hr) Value: 6
  misc_feature: MA Experiment 20000117 PARAMETER Experiment Name: At_100uM_ABA_Mutants_cDNA_P Parameter: Tissue Value: Aerial
  misc_feature: MA Experiment 20000117 PARAMETER Experiment Name: At_100uM_ABA_Mutants_cDNA_P Parameter: Treatment Value: 100uM ABA vs. No Treatment
  misc_feature: MA Experiment ID: 20000169 Result: Up-regulated in Transcription
  misc_feature: MA Experiment 20000169 PARAMETER Experiment Name: At_100uM_ABA_P Parameter: Age (day) Value: 14
  misc_feature: MA Experiment 20000169 PARAMETER Experiment Name: At_100uM_ABA_P Parameter: Organism Value: A. thaliana
  misc_feature: MA Experiment 20000169 PARAMETER Experiment Name: At_100uM_ABA_P Parameter: Plant Line Value: WS
  misc_feature: MA Experiment 20000169 PARAMETER Experiment Name: At_100uM_ABA_P Parameter: Timepoint (hr) Value: 6
  misc_feature: MA Experiment 20000169 PARAMETER Experiment Name: At_100uM_ABA_P Parameter: Tissue Value: Aerial
  misc_feature: MA Experiment 20000169 PARAMETER Experiment Name: At_100uM_ABA_P Parameter: Treatment Value: 100uM ABA vs. No Treatment
  misc_feature: MA Experiment ID: 20000214 Result: Down-regulated in Transcription
  misc_feature: MA Experiment 20000214 PARAMETER Experiment Name: At_4deg_Cold_P Parameter: Timepoint (hr) Value: 6
  misc_feature: MA Experiment ID: 20000234 Result: Down-regulated in Transcription
  misc_feature: MA Experiment 20000234 PARAMETER Experiment Name: At_Siliques_P Parameter: Age (day) Value: 21
  misc_feature: MA Experiment 20000234 PARAMETER Experiment Name: At_Siliques_P Parameter: Organism Value: A. thaliana
  misc_feature: MA Experiment 20000234 PARAMETER Experiment Name: At_Siliques_P Parameter: Plant Line Value: WS
  misc_feature: MA Experiment 20000234 PARAMETER Experiment Name: At_Siliques_P Parameter: Tissue Value: Less Than 5mm Siliques vs. Whole Plant
  misc_feature: MA Experiment ID: 20000265 Result: Down-regulated in Transcription
  misc_feature: MA Experiment 20000265 PARAMETER Experiment Name: At_Open_Flower_P Parameter: Age (day) Value: 21
  misc_feature: MA Experiment 20000265 PARAMETER Experiment Name: At_Open_Flower_P Parameter: Plant Line Value: WS
  misc_feature: MA Experiment 20000265 PARAMETER Experiment Name: At_Open_Flower_P Parameter: Tissue Value: Closed Flower vs. Whole Plant
  misc_feature: MA Experiment ID: 20000573 Result: Up-regulated in Transcription
  misc_feature: MA Experiment 20000573 PARAMETER Experiment Name: At_100uM_ABA_Mutants__P Parameter: Organism Value: A. thaliana
  misc_feature: MA Experiment 20000573 PARAMETER Experiment Name: At_100uM_ABA_Mutants__P Parameter: Plant Line Value: CS22 vs. Ler wt
  misc_feature: MA Experiment 20000573 PARAMETER Experiment Name: At_100uM_ABA_Mutants__P Parameter: Timepoint (hr) Value: N/A
  misc_feature: MA Experiment 20000573 PARAMETER Experiment Name: At_100uM_ABA_Mutants__P Parameter: Tissue Value: Whole Plant
  misc_feature: MA Experiment 20000573 PARAMETER Experiment Name: At_100uM_ABA_Mutants__P Parameter: Treatment Value: None
  misc_feature: MA Experiment ID: 20000794 Result: Up-regulated in Transcription
  misc_feature: MA Experiment 20000794 PARAMETER Experiment Name: At_Petals_P Parameter: Age (day) Value: 23-25 days
  misc_feature: MA Experiment 20000794 PARAMETER Experiment Name: At_Petals_P Parameter: Plant Line Value: WS
  misc_feature: MA Experiment 20000794 PARAMETER Experiment Name: At_Petals_P Parameter: Tissue Value: Petals vs. Whole plant
  misc_feature: MA Experiment ID: 20001450 Result: Up-regulated in Transcription
  misc_feature: MA Experiment 20001450 PARAMETER Experiment Name: At_Far-red-induction_P Parameter: Age (day) Value: 7
  misc_feature: MA Experiment 20001450 PARAMETER Experiment Name: At_Far-red-induction_P Parameter: Light Value: Far-red vs. White
  misc_feature: MA Experiment 20001450 PARAMETER Experiment Name: At_Far-red-induction_P Parameter: Organism Value: A. thaliana
  misc_feature: MA Experiment 20001450 PARAMETER Experiment Name: At_Far-red-induction_P Parameter: Plant Line Value: Columbia
  misc_feature: MA Experiment 20001450 PARAMETER Experiment Name: At_Far-red-induction_P Parameter: Timepoint (hr) Value: 8
  misc_feature: MA Experiment 20001450 PARAMETER Experiment Name: At_Far-red-induction_P Parameter: Tissue Value: Whole Plant
  misc_feature: MA Experiment ID: 20001451 Result: Up-regulated in Transcription
  misc_feature: MA Experiment 20001451 PARAMETER Experiment Name: At_Far-red-induction_P Parameter: Age (day) Value: 7
  misc_feature: MA Experiment 20001451 PARAMETER Experiment Name: At_Far-red-induction_P Parameter: Light Value: Far-red vs. White
  misc_feature: MA Experiment 20001451 PARAMETER Experiment Name: At_Far-red-induction_P Parameter: Organism Value: A. thaliana
  misc_feature: MA Experiment 20001451 PARAMETER Experiment Name: At_Far-red-induction_P Parameter: Plant Line Value: Columbia
  misc_feature: MA Experiment 20001451 PARAMETER Experiment Name: At_Far-red-induction_P Parameter: Timepoint (hr) Value: 24
  misc_feature: MA Experiment 20001451 PARAMETER Experiment Name: At_Far-red-induction_P Parameter: Tissue Value: Whole Plant
  misc_feature: MA Experiment ID: 20001560 Result: Down-regulated in Transcription
  misc_feature: MA Experiment 20001560 PARAMETER Experiment Name: At_Drought_Soil_Dry_P Parameter: Age (day) Value: 28
  misc_feature: MA Experiment 20001560 PARAMETER Experiment Name: At_Drought_Soil_Dry_P Parameter: Organism Value: A. thaliana
  misc_feature: MA Experiment 20001560 PARAMETER Experiment Name: At_Drought_Soil_Dry_P Parameter: Plant Line Value: WS
  misc_feature: MA Experiment 20001560 PARAMETER Experiment Name: At_Drought_Soil_Dry_P Parameter: Post Timepoint (hr) Value: None
  misc_feature: MA Experiment 20001560 PARAMETER Experiment Name: At_Drought_Soil_Dry_P Parameter: Post-Treatment Value: None
  misc_feature: MA Experiment 20001560 PARAMETER Experiment Name: At_Drought_Soil_Dry_P Parameter: Timepoint (day) Value: 14
  misc_feature: MA Experiment 20001560 PARAMETER Experiment Name: At_Drought_Soil_Dry_P Parameter: Treatment Value: Drought vs. No Drought
  misc_feature: MA Experiment ID: 20001911 Result: Up-regulated in Transcription
  misc_feature: MA Experiment 20001911 PARAMETER Experiment Name: At_Drought_Reproduction_P Parameter: Age (day) Value: 40
  misc_feature: MA Experiment 20001911 PARAMETER Experiment Name: At_Drought_Reproduction_P Parameter: Organism Value: A. thaliana
  misc_feature: MA Experiment 20001911 PARAMETER Experiment Name: At_Drought_Reproduction_P Parameter: Plant Line Value: WS
  misc_feature: MA Experiment 20001911 PARAMETER Experiment Name: At_Drought_Reproduction_P Parameter: Timepoint (day) Value: 10
  misc_feature: MA Experiment 20001911 PARAMETER Experiment Name: At_Drought_Reproduction_P Parameter: Tissue Value: Flowers
  misc_feature: MA Experiment 20001911 PARAMETER Experiment Name: At_Drought_Reproduction_P Parameter: Treatment Value: Drought vs. No Drought
gatggaatgtttgctggttctgctacagtcttttttgcattcattgggtttgattcggttgcaagtaccgcagaggaggtgagaaatcctcaacgggatttaccgattggtattggtcttgctctcttgttatgttgttctctctacatgatggtctccatagttattgttggtttaattccttactatgcaatggatcccgacaccccgatatcctctgcattcgctagtcatgacatgcaatgggctgtatacttaataactttaggagctgtcatggcactctgctcagctttaatgggtgcccttctccctcagccacgaattctgatggcaatggctagggatggtctgctcccttctattttttcagacattaataaacgcacacaggttccggttaaagcaacagtggcaactgggttgtgtgctgcagccttagccttctttatggatgtttcacagcttgcagggatggtgagtgttgggacacttctggcatttacaatggtggcaatatcagtgttgatactcagatatgttcctccagatgagcaacctcttccgtcatctcttcaagagagaattgattctgtttcctttatatgtggtgaaacaacgtcatccggtcatgttggtacttccgatagcagtcaccagcctttaataattaataatgatgctttggtcgatgtcccgcttatcaagaatcaagaagctctagggtgtttggttctcagcgaggaaaccagaaggatagtcgctggatggagcattatgttcacatgtgttggggccttccttttaagttattcggcatcaagcctgagcttcccagggcttattagatatccgttgtgtggtgttggtggatgtctcctccttgctggtttgattgctctgagttctatagatcaggatgatgcgagacacacttttggacattctggaggttacatgtgcccgtttgttcccctcctacctatcatctgcattctcatcaacatgtaccttttggttaaccttggatctgcgacatgggctcgtgtatcggtgtggctgcttataggagtgattgtgtatgttttctatggtcggaaaaacagttcgcttgccaatgcagtttacgtaactacagctcatgcggaggagatatatcgcgaacatgaaggttctttggcatagtctgagaaagcagcatctcttttgttatatatgtaacacaattctgtattatctttatctggatgtaacagcaagagtggcactatctatttgtttgcaaaaagatctgtccacggcctttgtaaataatatatatcatcatcaattc

SEQ ID NO: 41821 - protein, 394 aa, Arabidopsis thaliana
  peptide (1)..(394): Ceres Seq. ID no. 12738346
  misc_feature (2)..(187): Homolog of NCBI NO: 6981556 NR Description: solute carrier family 7 member A1 (amino acid
  misc_feature (315)..(369): Homolog of NCBI NO: 39645063 NR Description: Unknown (protein for IMAGE:3396482) [Xenopus
  misc_feature (2)..(195): Homolog of NCBI NO: 39645063 NR Description: Unknown (protein for IMAGE:3396482) [Xenopus
  misc_feature (1)..(379): Homolog of NCBI NO: 22330822 NR Description: putative cationic amino acid transporter
  misc_feature (1)..(379): Homolog of NCBI NO: 6006869 NR Description: putative cationic amino acid transporter
  misc_feature (1)..(391): Homolog of NCBI NO: 29244640 NR Description: putative cationic amino acid transporter
  misc_feature (1)..(394): Homolog of NCBI NO: 10178213 NR Description: cationic amino acid transporter-like protein
  misc_feature (1)..(394): Homolog of NCBI NO: 30693001 NR Description: cationic amino acid transporter -related protein
  misc_feature (1)..(394): Homolog of NCBI NO: 23306414 NR Description: Unknown protein [Arabidopsis thaliana]
  misc_feature (1)..(394): Homolog of NCBI NO: 30696198 NR Description: expressed protein [Arabidopsis thaliana]
DGMFAGSATVFFAFIGFDSVASTAEEVRNPQRDLPIGIGLALLLCCSLYMMVSIVIVGLIPYYAMDPDTPISSAFASHDMQWAVYLITLGAVMALCSALMGALLPQPRILMAMARDGLLPSIFSDINKRTQVPVKATVATGLCAAALAFFMDVSQLAGMVSVGTLLAFTMVAISVLILRYVPPDEQPLPSSLQERIDSVSFICGETTSSGHVGTSDSSHQPLIINNDALVDVPLIKNQEALGCLVLSEETRRIVAGWSIMFTCVGAFLLSYSASSLSFPGLIRYPLCGVGGCLLLAGLIALSSIDQDDARHTFGHSGGYMCPFVPLLPIICILINMYLLVNLGSATWARVSVWLLIGVIVYVFYGRKNSSLANAVYVTTAHAEEIYREHEGSLA

SEQ ID NO: 41822 - protein, 392 aa, Arabidopsis thaliana
  peptide (1)..(392): Ceres Seq. ID no. 12738347
  misc_feature (1)..(185): Homolog of NCBI NO: 6981556 NR Description: solute carrier family 7 member A1 (amino acid
  misc_feature (313)..(367): Homolog of NCBI NO: 39645063 NR Description: Unknown (protein for IMAGE:3396482) [Xenopus
  misc_feature (1)..(193): Homolog of NCBI NO: 39645063 NR Description: Unknown (protein for IMAGE:3396482) [Xenopus
  misc_feature (1)..(377): Homolog of NCBI NO: 22330822 NR Description: putative cationic amino acid transporter
  misc_feature (1)..(377): Homolog of NCBI NO: 6006869 NR Description: putative cationic amino acid transporter
  misc_feature (1)..(389): Homolog of NCBI NO: 29244640 NR Description: putative cationic amino acid transporter
  misc_feature (1)..(392): Homolog of NCBI NO: 10178213 NR Description: cationic amino acid transporter-like protein
  misc_feature (1)..(392): Homolog of NCBI NO: 30693001 NR Description: cationic amino acid transporter -related protein
  misc_feature (1)..(392): Homolog of NCBI NO: 23306414 NR Description: Unknown protein [Arabidopsis thaliana]
  misc_feature (1)..(392): Homolog of NCBI NO: 30696198 NR Description: expressed protein [Arabidopsis thaliana]
MFAGSATVFFAFIGFDSVASTAEEVRNPQRDLPIGIGLALLLCCSLYMMVSIVIVGLIPYYAMDPDTPISSAFASHDMQWAVYLITLGAVMALCSALMGALLPQPRILMAMARDGLLPSIFSDINKRTQVPVKATVATGLCAAALAFFMDVSQLAGMVSVGTLLAFTMVAISVLILRYVPPDEQPLPSSLQERIDSVSFICGETTSSGHVGTSDSSHQPLIINNDALVDVPLIKNQEALGCLVLSEETRRIVAGWSIMFTCVGAFLLSYSASSLSFPGLIRYPLCGVGGCLLLAGLIALSSIDQDDARHTFGHSGGYMCPFVPLLPIICILINMYLLVNLGSATWARVSVWLLIGVIVYVFYGRKNSSLANAVYVTTAHAEEIYREHEGSLA

SEQ ID NO: 41823 - protein, 345 aa, Arabidopsis thaliana
  peptide (1)..(345): Ceres Seq. ID no. 12738348
  misc_feature (1)..(138): Homolog of NCBI NO: 6981556 NR Description: solute carrier family 7 member A1 (amino acid
  misc_feature (266)..(320): Homolog of NCBI NO: 39645063 NR Description: Unknown (protein for IMAGE:3396482) [Xenopus
  misc_feature (1)..(146): Homolog of NCBI NO: 39645063 NR Description: Unknown (protein for IMAGE:3396482) [Xenopus
  misc_feature (1)..(330): Homolog of NCBI NO: 22330822 NR Description: putative cationic amino acid transporter
  misc_feature (1)..(330): Homolog of NCBI NO: 6006869 NR Description: putative cationic amino acid transporter
  misc_feature (1)..(342): Homolog of NCBI NO: 29244640 NR Description: putative cationic amino acid transporter
  misc_feature (1)..(345): Homolog of NCBI NO: 10178213 NR Description: cationic amino acid transporter-like protein
  misc_feature (1)..(345): Homolog of NCBI NO: 30693001 NR Description: cationic amino acid transporter -related protein
  misc_feature (1)..(345): Homolog of NCBI NO: 23306414 NR Description: Unknown protein [Arabidopsis thaliana]
  misc_feature (1)..(345): Homolog of NCBI NO: 30696198 NR Description: expressed protein [Arabidopsis thaliana]
MMVSIVIVGLIPYYAMDPDTPISSAFASHDMQWAVYLITLGAVMALCSALMGALLPQPRILMAMARDGLLPSIFSDINKRTQVPVKATVATGLCAAALAFFMDVSQLAGMVSVGTLLAFTMVAISVLILRYVPPDEQPLPSSLQERIDSVSFICGETTSSGHVGTSDSSHQPLIINNDALVDVPLIKNQEALGCLVLSEETRRIVAGWSIMFTCVGAFLLSYSASSLSFPGLIRYPLCGVGGCLLLAGLIALSSIDQDDARHTFGHSGGYMCPFVPLLPIICILINMYLLVNLGSATWARVSVWLLIGVIVYVFYGRKNSSLANAVYVTTAHAEEIYREHEGSLA

SEQ ID NO: 41824 - DNA, 1344 bp, Arabidopsis thaliana
  misc_feature (1)..(1344): Ceres Seq. ID no. 13645789
  misc_feature: MA Experiment ID: 20000265 Result: Up-regulated in Transcription
  misc_feature: MA Experiment 20000265 PARAMETER Experiment Name: At_Open_Flower_P Parameter: Age (day) Value: 21
  misc_feature: MA Experiment 20000265 PARAMETER Experiment Name: At_Open_Flower_P Parameter: Plant Line Value: WS
  misc_feature: MA Experiment 20000265 PARAMETER Experiment Name: At_Open_Flower_P Parameter: Tissue Value: Closed Flower vs. Whole Plant
gttgctctgaaaccctaaaagaagctaaatctagcaatggcgagaagatccgtttcgatatttaatcgccttctggcgaatcctccttctccattcacatcactgtcccgatccatcacctacatgcctagacccggagatggagctccacgaaccgtaaccctaattcccggcgacggaatcggacctttggtgaccggtgcggtggaacaggtcatggaagcgatgcacgcgccagtgcatttcgagagatacgaggttctaggaaacatgagaaaagtccctgaagaagtgatcgagtctgtgaagaaaaacaaggtttgtctcaaaggtggattagcgactcctgttggtgggggtgtcagttctttgaatatgcaattgaggaaagaactcgatatcttcgcttctcttgtcaattgcatcaatgtccctggattagtgacgcgacacgaaaatgttgatatcgttgtgataagagagaacactgaaggagagtactcaagtctcgagcatgaggttgttcctggtgttgtcgagagccttaaggtgataacaaagttttgttctgagagaatagcgagatatgcatttgagtatgcgtatctaaacaataggaagaaagtgactgctgttcataaagctaacattatgaagcttgcggatgggctcttccttgaatcttgtagagaggttgctaaacattattcggggattacttacaatgaaataatcgtagacaattgctgtatgcagcttgtcgccaagcctgagcaatttgatgtcatggtcacacctaatttgtatggtaaccttatagcaaacacggcggctggaatagccggtggcactggagtgatgccaggagggaatgttggtgcagaacatgcgatattcgagcaaggcgcatcagcagggaatgtggggaatgataagatggtggaacagaagaaagcgaatccggtggctctacttctctcgtcggctatgatgctaagacatctccggtttcctacttttgctgatcggcttgaaacagcagtgaaacaagtgattaaagaaggaaaatatagaacaaaagatcttggaggagattgtaccacgcaggaagttgttgatgctgtcatagcagctcttgagtgaaaccatgtgagcttctctgcttctgcttgcttcttctttcgtcttttccatttcaactaagagaaaagtgttggttttctctgttttacgtcgctcttttttgtttcttgattcattttacaagttcattttttcttgtttgagcatgagctctatgatacagaataaaaacaataaagacagacatatgcaatgttgttt

SEQ ID NO: 41825 - protein, 368 aa, Arabidopsis thaliana
  peptide (1)..(368): Ceres Seq. ID no. 13645790
  misc_feature (40)..(363): Pfam Name: Isocitrate/isopropylmalate dehydrogenase Pfam Description: Isocitrate/isopropylmalate dehydrogenase
  misc_feature (1)..(368): Homolog of NCBI NO: 28974504 NR Description: NAD-dependent isocitrate dehydrogenase gamma
  misc_feature (1)..(368): Homolog of NCBI NO: 1766048 NR Description: NAD+ dependent isocitrate dehydrogenase subunit 2
  misc_feature (1)..(368): Homolog of NCBI NO: 15227370 NR Description: isocitrate dehydrogenase [NAD+] subunit 2
  misc_feature (1)..(368): Homolog of NCBI NO: 1766046 NR Description: NAD+ dependent isocitrate dehydrogenase subunit 1
  misc_feature (1)..(368): Homolog of NCBI NO: 3790188 NR Description: NAD-dependent isocitrate dehydrogenase [Nicotiana
  misc_feature (1)..(368): Homolog of NCBI NO: 21537157 NR Description: NAD+ dependent isocitrate dehydrogenase subunit 1
  misc_feature (1)..(368): Homolog of NCBI NO: 15236932 NR Description: isocitrate dehydrogenase [NAD+] subunit 1
  misc_feature (1)..(368): Homolog of NCBI NO: 28974498 NR Description: NAD-dependent isocitrate dehydrogenase beta
  misc_feature (1)..(368): Homolog of NCBI NO: 28974502 NR Description: NAD-dependent isocitrate dehydrogenase beta
  misc_feature (1)..(368): Homolog of NCBI NO: 15237075 NR Description: isocitrate dehydrogenase [NAD+], putative
MARRSVSIFNRLLANPPSPFTSLSRSITYMPRPGDGAPRTVTLIPGDGIGPLVTGAVEQVMEAMHAPVHFERYEVLGNMRKVPEEVIESVKKNKVCLKGGLATPVGGGVSSLNMQLRKELDIFASLVNCINVPGLVTRHENVDIVVIRENTEGEYSSLEHEVVPGVVESLKVITKFCSERIARYAFEYAYLNNRKKVTAVHKANIMKLADGLFLESCREVAKHYSGITYNEIIVDNCCMQLVAKPEQFDVMVTPNLYGNLIANTAAGIAGGTGVMPGGNVGAEHAIFEQGASAGNVGNDKMVEQKKANPVALLLSSAMMLRHLRFPTFADRLETAVKQVIKEGKYRTKDLGGDCTTQEVVDAVIAALE

SEQ ID NO: 41826 - protein, 339 aa, Arabidopsis thaliana
  peptide (1)..(339): Ceres Seq. ID no. 13645791
  misc_feature (11)..(334): Pfam Name: Isocitrate/isopropylmalate dehydrogenase Pfam Description: Isocitrate/isopropylmalate dehydrogenase
  misc_feature (1)..(339): Homolog of NCBI NO: 28974504 NR Description: NAD-dependent isocitrate dehydrogenase gamma
  misc_feature (1)..(339): Homolog of NCBI NO: 1766048 NR Description: NAD+ dependent isocitrate dehydrogenase subunit 2
  misc_feature (1)..(339): Homolog of NCBI NO: 15227370 NR Description: isocitrate dehydrogenase [NAD+] subunit 2
  misc_feature (1)..(339): Homolog of NCBI NO: 1766046 NR Description: NAD+ dependent isocitrate dehydrogenase subunit 1
  misc_feature (1)..(339): Homolog of NCBI NO: 3790188 NR Description: NAD-dependent isocitrate dehydrogenase [Nicotiana
  misc_feature (1)..(339): Homolog of NCBI NO: 21537157 NR Description: NAD+ dependent isocitrate dehydrogenase subunit 1
  misc_feature (1)..(339): Homolog of NCBI NO: 15236932 NR Description: isocitrate dehydrogenase [NAD+] subunit 1
  misc_feature (1)..(339): Homolog of NCBI NO: 28974498 NR Description: NAD-dependent isocitrate dehydrogenase beta
  misc_feature (1)..(339): Homolog of NCBI NO: 28974502 NR Description: NAD-dependent isocitrate dehydrogenase beta
  misc_feature (1)..(339): Homolog of NCBI NO: 15237075 NR Description: isocitrate dehydrogenase [NAD+], putative
MPRPGDGAPRTVTLIPGDGIGPLVTGAVEQVMEAMHAPVHFERYEVLGNMRKVPEEVIESVKKNKVCLKGGLATPVGGGVSSLNMQLRKELDIFASLVNCINVPGLVTRHENVDIVVIRENTEGEYSSLEHEVVPGVVESLKVITKFCSERIARYAFEYAYLNNRKKVTAVHKANIMKLADGLFLESCREVAKHYSGITYNEIIVDNCCMQLVAKPEQFDVMVTPNLYGNLIANTAAGIAGGTGVMPGGNVGAEHAIFEQGASAGNVGNDKMVEQKKANPVALLLSSAMMLRHLRFPTFADRLETAVKQVIKEGKYRTKDLGGDCTTQEVVDAVIAALE

SEQ ID NO: 41827 - protein, 308 aa, Arabidopsis thaliana
  peptide (1)..(308): Ceres Seq. ID no. 13645792
  misc_feature (1)..(303): Pfam Name: Isocitrate/isopropylmalate dehydrogenase Pfam Description: Isocitrate/isopropylmalate dehydrogenase
  misc_feature (1)..(308): Homolog of NCBI NO: 28974504 NR Description: NAD-dependent isocitrate dehydrogenase gamma
  misc_feature (1)..(308): Homolog of NCBI NO: 1766048 NR Description: NAD+ dependent isocitrate dehydrogenase subunit 2
  misc_feature (1)..(308): Homolog of NCBI NO: 15227370 NR Description: isocitrate dehydrogenase [NAD+] subunit 2
  misc_feature (1)..(308): Homolog of NCBI NO: 1766046 NR Description: NAD+ dependent isocitrate dehydrogenase subunit 1
  misc_feature (1)..(308): Homolog of NCBI NO: 3790188 NR Description: NAD-dependent isocitrate dehydrogenase [Nicotiana
  misc_feature (1)..(308): Homolog of NCBI NO: 21537157 NR Description: NAD+ dependent isocitrate dehydrogenase subunit 1
  misc_feature (1)..(308): Homolog of NCBI NO: 15236932 NR Description: isocitrate dehydrogenase [NAD+] subunit 1
  misc_feature (1)..(308): Homolog of NCBI NO: 28974498 NR Description: NAD-dependent isocitrate dehydrogenase beta
  misc_feature (1)..(308): Homolog of NCBI NO: 28974502 NR Description: NAD-dependent isocitrate dehydrogenase beta
  misc_feature (1)..(308): Homolog of NCBI NO: 15237075 NR Description: isocitrate dehydrogenase [NAD+], putative
MEAMHAPVHFERYEVLGNMRKVPEEVIESVKKNKVCLKGGLATPVGGGVSSLNMQLRKELDIFASLVNCINVPGLVTRHENVDIVVIRENTEGEYSSLEHEVVPGVVESLKVITKFCSERIARYAFEYAYLNNRKKVTAVHKANIMKLADGLFLESCREVAKHYSGITYNEIIVDNCCMQLVAKPEQFDVMVTPNLYGNLIANTAAGIAGGTGVMPGGNVGAEHAIFEQGASAGNVGNDKMVEQKKANPVALLLSSAMMLRHLRFPTFADRLETAVKQVIKEGKYRTKDLGGDCTTQEVVDAVIAALE

SEQ ID NO: 41828 - DNA, 1390 bp, Arabidopsis thaliana
  misc_feature (1)..(1390): Ceres Seq. ID no. 13489498
  misc_feature: MA Experiment ID: 108576 Result: Down-regulated in Transcription
  misc_feature: MA Experiment 108576 PARAMETER Experiment Name: At_42deg_Heat_cDNA_P Parameter: Temperature (deg C) Value: 42 vs. 22
  misc_feature: MA Experiment 108576 PARAMETER Experiment Name: At_42deg_Heat_cDNA_P Parameter: Timepoint (hr) Value: 1
  misc_feature: MA Experiment 108576 PARAMETER Experiment Name: At_42deg_Heat_cDNA_P Parameter: Tissue Value: Aerial
  misc_feature: MA Experiment ID: 108577 Result: Down-regulated in Transcription
  misc_feature: MA Experiment 108577 PARAMETER Experiment Name: At_42deg_Heat_cDNA_P Parameter: Temperature (deg C) Value: 42 vs. 22
  misc_feature: MA Experiment 108577 PARAMETER Experiment Name: At_42deg_Heat_cDNA_P Parameter: Timepoint (hr) Value: 6
  misc_feature: MA Experiment 108577 PARAMETER Experiment Name: At_42deg_Heat_cDNA_P Parameter: Tissue Value: Aerial
  misc_feature: MA Experiment ID: 108595 Result: Down-regulated in Transcription
  misc_feature: MA Experiment 108595 PARAMETER Experiment Name: At_Ler-pi_Ovule_cDNA_P Parameter: Plant Line Value: null
  misc_feature: MA Experiment ID: 20000224 Result: Down-regulated in Transcription
ctactactctttttgggtatatctgtttacttgaatctcttaccatgaaagttcttcaattatttccttacttaaatctaagttgctttatgttgcgtttgattaatgggatcgtacttttctaaagttctagccttttatacgaaaaagcaacttttcgtgattttcttcaattgaatagctaaaattaggaaattttccttttcagtgttgtttttctttttctattttctttcttttctcttcttcttcttcttcaagcgatgaaccagaaaagttttgattttgattttggtgaaccaggaaagtggtactcgatctgtggtttgttgattctgaattagtatattcctggaaaattctgttcagtttcataatttaaacaagatgcagctcaaagtccctgaacatcaggttgcaggacacattgctaaagacgggaagcctggtcctctcgtagatgacaagggtcggttcttcaagccacttcagggcgattctcgtggtgaaatcgaggtaaagttctacgaatctttctcctcaaacacagaggttccagaacacatccatagatatttcccggtgtatcacggcactcaagcagttgaaggttctgatggagcagccatgatggtgttggaaaatcttcttgcagaatacacaaaaccatcagtaatggatgttaagatgggttcgagaacatggtatcctgatgcatctgaagaatacatccaaaaatgtttgaagaaagacacgggtaccacaaccgtgtcatcgggtttcaggatctctggtttcgaagtgtatgatcacaaagaatcgagtttctggaagcccgagaggaagcttcttcgcgggctcgatgtagatggagcgagattgactctgaggaagtttgtatcatctaactcactttcggacactggctcgaaacctgactctgcttttgcctcgagtgtttacggcggttcccacgggatcttaacgcagttgctggaactcaagacctggttcgagaaccaaacgctctaccatttcaactcttgttcgattttaatggtctatgagaatgaatccatcttaaagggaaatgatgatgatgctagaccacaagtcaagctggtggattttgctcatgttcttgatggtaatggtgtcattgaccataacttcttgggtggtctttgctctttcataaacttcattcgtgagattcttcagagcccagatgagtctgcagattcttagatttaagttaatttgtttgttatggctttggctgattccaatttttggatataaacttatgtttccttcacatatgtacttgattacctaaagagcagaatacattcgtactcttttctcaaagagtattccatttctaggc

SEQ ID NO: 41829 - protein, 286 aa, Arabidopsis thaliana
  peptide (1)..(286): Ceres Seq. ID no. 13489499
  misc_feature (17)..(274): Pfam Name: Inositol polyphosphate kinase Pfam Description: Inositol polyphosphate kinase
  misc_feature (5)..(236): Homolog of NCBI NO: 26331140 NR Description: unnamed protein product [Mus musculus]
  misc_feature (2)..(277): Homolog of NCBI NO: 24580674 NR Description: CG13688-PA [Drosophila melanogaster]
  misc_feature (2)..(277): Homolog of NCBI NO: 21430778 NR Description: SD14726p [Drosophila melanogaster]
  misc_feature (3)..(275): Homolog of NCBI NO: 13509210 NR Description: hypothetical protein [Linum usitatissimum]
  misc_feature (4)..(284): Homolog of NCBI NO: 13509208 NR Description: hypothetical protein [Linum usitatissimum]
  misc_feature (3)..(282): Homolog of NCBI NO: 21553994 NR Description: putative inositol hexaphosphate kinase
  misc_feature (3)..(282): Homolog of NCBI NO: 15240350 NR Description: inositol polyphosphate 6-/3-/5-kinase 2b (IPK2b)
  misc_feature (1)..(286): Homolog of NCBI NO: 8919088 NR Description: putative inositol hexaphosphate kinase
  misc_feature (1)..(286): Homolog of NCBI NO: 21592823 NR Description: putative inositol hexaphosphate kinase
  misc_feature (1)..(286): Homolog of NCBI NO: 15240776 NR Description: inositol polyphosphate 6-/3-/5-kinase 2a (IPK2a)
MQLKVPEHQVAGHIAKDGKPGPLVDDKGRFFKPLQGDSRGEIEVKFYESFSSNTEVPEHIHRYFPVYHGTQAVEGSDGAAMMVLENLLAEYTKPSVMDVKMGSRTWYPDASEEYIQKCLKKDTGTTTVSSGFRISGFEVYDHKESSFWKPERKLLRGLDVDGARLTLRKFVSSNSLSDTGSKPDSAFASSVYGGSHGILTQLLELKTWFENQTLYHFNSCSILMVYENESILKGNDDDARPQVKLVDFAHVLDGNGVIDHNFLGGLCSFINFIREILQSPDESADS

SEQ ID NO: 41830 - protein, 206 aa, Arabidopsis thaliana
  peptide (1)..(206): Ceres Seq. ID no. 13489500
  misc_feature (1)..(194): Pfam Name: Inositol polyphosphate kinase Pfam Description: Inositol polyphosphate kinase
  misc_feature (1)..(156): Homolog of NCBI NO: 26331140 NR Description: unnamed protein product [Mus musculus]
  misc_feature (1)..(197): Homolog of NCBI NO: 24580674 NR Description: CG13688-PA [Drosophila melanogaster]
  misc_feature (1)..(197): Homolog of NCBI NO: 21430778 NR Description: SD14726p [Drosophila melanogaster]
  misc_feature (1)..(195): Homolog of NCBI NO: 13509210 NR Description: hypothetical protein [Linum usitatissimum]
  misc_feature (1)..(204): Homolog of NCBI NO: 13509208 NR Description: hypothetical protein [Linum usitatissimum]
  misc_feature (1)..(202): Homolog of NCBI NO: 21553994 NR Description: putative inositol hexaphosphate kinase
  misc_feature (1)..(202): Homolog of NCBI NO: 15240350 NR Description: inositol polyphosphate 6-/3-/5-kinase 2b (IPK2b)
  misc_feature (1)..(206): Homolog of NCBI NO: 8919088 NR Description: putative inositol hexaphosphate kinase
  misc_feature (1)..(206): Homolog of NCBI NO: 21592823 NR Description: putative inositol hexaphosphate kinase
  misc_feature (1)..(206): Homolog of NCBI NO: 15240776 NR Description: inositol polyphosphate 6-/3-/5-kinase 2a (IPK2a)
MMVLENLLAEYTKPSVMDVKMGSRTWYPDASEEYIQKCLKKDTGTTTVSSGFRISGFEVYDHKESSFWKPERKLLRGLDVDGARLTLRKFVSSNSLSDTGSKPDSAFASSVYGGSHGILTQLLELKTWFENQTLYHFNSCSILMVYENESILKGNDDDARPQVKLVDFAHVLDGNGVIDHNFLGGLCSFINFIREILQSPDESADS

SEQ ID NO: 41831 - protein, 205 aa, Arabidopsis thaliana
  peptide (1)..(205): Ceres Seq. ID no. 13489501
  misc_feature (1)..(193): Pfam Name: Inositol polyphosphate kinase Pfam Description: Inositol polyphosphate kinase
  misc_feature (1)..(155): Homolog of NCBI NO: 26331140 NR Description: unnamed protein product [Mus musculus]
  misc_feature (1)..(196): Homolog of NCBI NO: 24580674 NR Description: CG13688-PA [Drosophila melanogaster]
  misc_feature (1)..(196): Homolog of NCBI NO: 21430778 NR Description: SD14726p [Drosophila melanogaster]
  misc_feature (1)..(194): Homolog of NCBI NO: 13509210 NR Description: hypothetical protein [Linum usitatissimum]
  misc_feature (1)..(203): Homolog of NCBI NO: 13509208 NR Description: hypothetical protein [Linum usitatissimum]
  misc_feature (1)..(201): Homolog of NCBI NO: 21553994 NR Description: putative inositol hexaphosphate kinase
  misc_feature (1)..(201): Homolog of NCBI NO: 15240350 NR Description: inositol polyphosphate 6-/3-/5-kinase 2b (IPK2b)
  misc_feature (1)..(205): Homolog of NCBI NO: 8919088 NR Description: putative inositol hexaphosphate kinase
  misc_feature (1)..(205): Homolog of NCBI NO: 21592823 NR Description: putative inositol hexaphosphate kinase
  misc_feature (1)..(205): Homolog of NCBI NO: 15240776 NR Description: inositol polyphosphate 6-/3-/5-kinase 2a (IPK2a)
MVLENLLAEYTKPSVMDVKMGSRTWYPDASEEYIQKCLKKDTGTTTVSSGFRISGFEVYDHKESSFWKPERKLLRGLDVDGARLTLRKFVSSNSLSDTGSKPDSAFASSVYGGSHGILTQLLELKTWFENQTLYHFNSCSILMVYENESILKGNDDDARPQVKLVDFAHVLDGNGVIDHNFLGGLCSFINFIREILQSPDESADS

SEQ ID NO: 41832 - DNA, 1375 bp, Arabidopsis thaliana
  misc_feature (1)..(1375): Ceres Seq. ID no. 12357743
  misc_feature: MA Experiment ID: 108595 Result: Up-regulated in Transcription
  misc_feature: MA Experiment 108595 PARAMETER Experiment Name: At_Ler-pi_Ovule_cDNA_P Parameter: Plant Line Value: null
  misc_feature: MA Experiment ID: 20000171 Result: Up-regulated in Transcription
  misc_feature: MA Experiment 20000171 PARAMETER Experiment Name: At_42deg_Heat_P Parameter: Age (day) Value: 14
  misc_feature: MA Experiment 20000171 PARAMETER Experiment Name: At_42deg_Heat_P Parameter: Organism Value: A. thaliana
  misc_feature: MA Experiment 20000171 PARAMETER Experiment Name: At_42deg_Heat_P Parameter: Plant Line Value: WS
  misc_feature: MA Experiment 20000171 PARAMETER Experiment Name: At_42deg_Heat_P Parameter: Temperature (deg C) Value: 42 vs. 22
  misc_feature: MA Experiment 20000171 PARAMETER Experiment Name: At_42deg_Heat_P Parameter: Timepoint (hr) Value: 1
  misc_feature: MA Experiment 20000171 PARAMETER Experiment Name: At_42deg_Heat_P Parameter: Tissue Value: Aerial
tccataaggccacaacagatcttcttgttcctctctctcaatctctctctctaaaactcttattttcttcgtaagagatggaactagcgttgtctctaggcgacaatactaagaaacagttctcttttatggagaagaactcgaagattaagaatccctctgtctcgtcgacatctatttccgagacgatcttgggttctgcatggctttagatgttgcttttggtggtcacagatcgttgtcatcctcttcgtctccgtcggtagaggatgagaagaagaaaccggcgcccagaacaaaaacttctgacgaatttagggtttcgtcttctgtagatccaccattacagcttcagcttcacttccctaattggctccctgagaacagtaaaggtcgacaaggaggaagaattcccttaggagcagctacggttgtggaggaggaagaggaggaggaggaagcggtgcctagtatgtcagtatcgccgccggatagtgtaacgtcgtcgtttcaattggactttgggattaaaagttatggttatgagagaagaagcaataagagagatattgatgatgaagtggagagatcagcttcaagagccagcaacgaagacaacgatgacgagaatggatccactaggaagaaacttagactctccaaagaccaatctgcttttcttgaagacagcttcaaagaacacagtacccttaatcctaaacagaagattgcattggcgaagcagttgaatcttcgtcctcgtcaggttgaagtctggtttcaaaacagacgagccaggacaaagctgaattgagaaccttgaagacttccacacccttttacatgcaacttccggccactactctcactatgtgcccttcttgtgaacgtgttgccacttcagcagcacagccctccacgtcagctgcccacaacctctgtttgtccacgtcatcattgattccggttaagcctcggccggccaaacaagtttcatgaaagcacctgcgaaatacagtttgagcaaacggtcgagctagagtggttttaaaagttgtcttcttgtgtatatatttattttacttttcatattttattagaaaccgctattttgaaagacgaatagattgattatccggttagtgttttgtttttcttagataggaccggataaaaaacagatggagcaaaagggttgacatgttttattgaatgatagaggaatatagaagaagacaaaaggaaaaggggaaaatatttggtttgatcttatagacttttatttgtgattaaagcaaaagggtttgtcgtgcaaaaaatcttcactagatacgtttaattatcgtgttttaaatttattaaacttatttttctc

SEQ ID NO: 41833 - protein, 203 aa, Arabidopsis thaliana
  peptide (1)..(203): Ceres Seq. ID no. 12357744
  misc_feature (148)..(202): Pfam Name: Homeobox domain Pfam Description: Homeobox domain
  misc_feature (108)..(202): Homolog of NCBI NO: 15235712 NR Description: homeobox protein HAT22
  misc_feature (75)..(202): Homolog of NCBI NO: 25487873 NR Description: homeobox-leucine zipper protein
  misc_feature (1)..(202): Homolog of NCBI NO: 25487870 NR Description: homeobox-leucine zipper protein PHZ1
  misc_feature (1)..(202): Homolog of NCBI NO: 25487872 NR Description: homeobox-leucine zipper protein PHZ2
  misc_feature (87)..(202): Homolog of NCBI NO: 27311238 NR Description: Hypothetical protein [Oryza sativa (japonica
  misc_feature (79)..(202): Homolog of NCBI NO: 25457630 NR Description: homeobox protein THOM1 [imported] - tomato
  misc_feature (130)..(202): Homolog of NCBI NO: 25386203 NR Description: homeobox protein HAT14
  misc_feature (70)..(202): Homolog of NCBI NO: 12230908 NR Description: Homeobox-leucine zipper protein HAT14 (HD-ZIP
  misc_feature (1)..(202): Homolog of NCBI NO: 29028870 NR Description: At5g06710 [Arabidopsis thaliana]
  misc_feature (1)..(202): Homolog of NCBI NO: 22326632 NR Description: homeobox-leucine zipper protein HAT14 (HD-Zip
MALDVAFGGHRSLSSSSSPSVEDEKKKPAPRTKTSDEFRVSSSVDPPLQLQLHFPNWLPENSKGRQGGRIPLGAATVVEEEEEEEEAVPSMSVSPPDSVTSSFQLDFGIKSYGYERRSNKRDIDDEVERSASRASNEDNDDENGSTRKKLRLSKDQSAFLEDSFKEHSTLNPKQKIALAKQLNLRPRQVEVWFQNRRARTKLN

SEQ ID NO: 41834 - protein, 113 aa, Arabidopsis thaliana
  peptide (1)..(113): Ceres Seq. ID no. 12357745
  misc_feature (58)..(112): Pfam Name: Homeobox domain Pfam Description: Homeobox domain
  misc_feature (18)..(112): Homolog of NCBI NO: 15235712 NR Description: homeobox protein HAT22
  misc_feature (1)..(112): Homolog of NCBI NO: 25487873 NR Description: homeobox-leucine zipper protein
  misc_feature (1)..(112): Homolog of NCBI NO: 25487870 NR Description: homeobox-leucine zipper protein PHZ1
  misc_feature (1)..(112): Homolog of NCBI NO: 25487872 NR Description: homeobox-leucine zipper protein PHZ2
  misc_feature (1)..(112): Homolog of NCBI NO: 27311238 NR Description: Hypothetical protein [Oryza sativa (japonica
  misc_feature (1)..(112): Homolog of NCBI NO: 25457630 NR Description: homeobox protein THOM1 [imported] - tomato
  misc_feature (40)..(112): Homolog of NCBI NO: 25386203 NR Description: homeobox protein HAT14
  misc_feature (1)..(112): Homolog of NCBI NO: 12230908 NR Description: Homeobox-leucine zipper protein HAT14 (HD-ZIP
  misc_feature (1)..(112): Homolog of NCBI NO: 29028870 NR Description: At5g06710 [Arabidopsis thaliana]
  misc_feature (1)..(112): Homolog of NCBI NO: 22326632 NR Description: homeobox-leucine zipper protein HAT14 (HD-Zip
MSVSPPDSVTSSFQLDFGIKSYGYERRSNKRDIDDEVERSASRASNEDNDDENGSTRKKLRLSKDQSAFLEDSFKEHSTLNPKQKIALAKQLNLRPRQVEVWFQNRRARTKLN

SEQ ID NO: 41835 - DNA, 762 bp, Arabidopsis thaliana
  misc_feature (1)..(762): Ceres Seq. ID no. 13488184
  misc_feature: MA Experiment ID: 20000451 Result: Down-regulated in Transcription
  misc_feature: MA Experiment 20000451 PARAMETER Experiment Name: At_CS6879_Shoots-Roots_P Parameter: Age (day) Value: 14
  misc_feature: MA Experiment 20000451 PARAMETER Experiment Name: At_CS6879_Shoots-Roots_P Parameter: Organism Value: A. thaliana
  misc_feature: MA Experiment 20000451 PARAMETER Experiment Name: At_CS6879_Shoots-Roots_P Parameter: Plant Line Value: CS6879 vs. WS
  misc_feature: MA Experiment 20000451 PARAMETER Experiment Name: At_CS6879_Shoots-Roots_P Parameter: Tissue Value: Roots
  misc_feature: MA Experiment ID: 20000452 Result: Down-regulated in Transcription
  misc_feature: MA Experiment 20000452 PARAMETER Experiment Name: At_CS6879_Shoots-Roots_P Parameter: Age (day) Value: 14
  misc_feature: MA Experiment 20000452 PARAMETER Experiment Name: At_CS6879_Shoots-Roots_P Parameter: Organism Value: A. thaliana
  misc_feature: MA Experiment 20000452 PARAMETER Experiment Name: At_CS6879_Shoots-Roots_P Parameter: Plant Line Value: CS6879 vs. WS
  misc_feature: MA Experiment 20000452 PARAMETER Experiment Name: At_CS6879_Shoots-Roots_P Parameter: Tissue Value: Shoots
  misc_feature: MA Experiment ID: 20000495 Result: Up-regulated in Transcription
  misc_feature: MA Experiment 20000495 PARAMETER Experiment Name: At_Guard_Cells_P Parameter: Harvest Date Value: 8/2/2002
  misc_feature: MA Experiment 20000495 PARAMETER Experiment Name: At_Guard_Cells_P Parameter: Organism Value: A. thaliana
  misc_feature: MA Experiment 20000495 PARAMETER Experiment Name: At_Guard_Cells_P Parameter: Tissue Value: Guard Cells vs. Leaves
  misc_feature: MA Experiment ID: 20001451 Result: Up-regulated in Transcription
  misc_feature: MA Experiment 20001451 PARAMETER Experiment Name: At_Far-red-induction_P Parameter: Age (day) Value: 7
  misc_feature: MA Experiment 20001451 PARAMETER Experiment Name: At_Far-red-induction_P Parameter: Light Value: Far-red vs. White
  misc_feature: MA Experiment 20001451 PARAMETER Experiment Name: At_Far-red-induction_P Parameter: Organism Value: A. thaliana
  misc_feature: MA Experiment 20001451 PARAMETER Experiment Name: At_Far-red-induction_P Parameter: Plant Line Value: Columbia
  misc_feature: MA Experiment 20001451 PARAMETER Experiment Name: At_Far-red-induction_P Parameter: Timepoint (hr) Value: 24
  misc_feature: MA Experiment 20001451 PARAMETER Experiment Name: At_Far-red-induction_P Parameter: Tissue Value: Whole Plant
agtgtagcgtcgcatcatacactccttcggttcccgacgaatcgctgcttttttctctctctctctccgtcgctgaaaaatgtcggcaagacctgaaggaagtccgccggaggttacgctcgagacctccatgggtcctttcaccgtcgagatgtattacaaacactccccgagaacttgccggaacttccttgagctatcccggagaggttactatgacaacgttctgtttcacagaatcgtcaaggatttcattgtgcaaggtggggatcctacaggaactggaagaggtggtgaatccatttatggttcgaagtttgaggatgagataaacaaagagttgaagcacacaggagccggaattttatcaatggcgaacgctggtcctaatacaaatgggagtcaatttttcatcaccttagccccacaaccgtccttggatggaaaacacacaatatttggtagagtgtgccgaggcatggaggtgatcaagaggctcggtagtgtccaaaccgataacaccgacaggccgatccatgaagtgaagattctaaggaccaaagtgatcgattgattgggtcagaggagtttttgtcaaggagaagaagaagcatttagtaaaccgtttatgacatgaagaactataactctgtgtactgatcccttgatactattgtagactggtttttgtctaagtcttgactctactttgatggaaaaaaatgattgaaatacgttaaatcactctctatttctttttgc

SEQ ID NO: 41836 - protein, 164 aa, Arabidopsis thaliana
  peptide (1)..(164): Ceres Seq. ID no. 13488185
  misc_feature (1)..(159): Homolog of NCBI NO: 39593518 NR Description: Hypothetical protein CBG05777 [Caenorhabditis
  misc_feature (12)..(159): Homolog of NCBI NO: 30172966 NR Description: Peptidyl-prolyl cis-trans isomerase cypE
  misc_feature (1)..(159): Homolog of NCBI NO: 21312784 NR Description: peptidylprolyl isomerase-like 1 [Mus musculus]
  misc_feature (1)..(159): Homolog of NCBI NO: 7706339 NR Description: peptidylprolyl isomerase-like 1
  misc_feature (11)..(164): Homolog of NCBI NO: 18042141 NR Description: cyclophilin-like peptidyl prolyl cis-trans
  misc_feature (11)..(164): Homolog of NCBI NO: 40740912 NR Description: hypothetical protein AN8680.2 [Aspergillus
  misc_feature (9)..(162): Homolog of NCBI NO: 17986117 NR Description: Cyclophilin-like CG13892-PA [Drosophila
  misc_feature (6)..(164): Homolog of NCBI NO: 15076665 NR Description: cyclophilin [Oryza sativa (japonica
  misc_feature (1)..(164): Homolog of NCBI NO: 21537220 NR Description: cyclophilin-like protein [Arabidopsis thaliana]
  misc_feature (1)..(164): Homolog of NCBI NO: 15227585 NR Description: cyclophilin-related protein [Arabidopsis
MSARPEGSPPEVTLETSMGPFTVEMYYKHSPRTCRNFLELSRRGYYDNVLFHRIVKDFIVQGGDPTGTGRGGESIYGSKFEDEINKELKHTGAGILSMANAGPNTNGSQFFITLAPQPSLDGKHTIFGRVCRGMEVIKRLGSVQTDNTDRPIHEVKILRTKVID

SEQ ID NO: 41837 - protein, 147 aa, Arabidopsis thaliana
  peptide (1)..(147): Ceres Seq. ID no. 13488186
  misc_feature (1)..(142): Homolog of NCBI NO: 39593518 NR Description: Hypothetical protein CBG05777 [Caenorhabditis
  misc_feature (1)..(142): Homolog of NCBI NO: 30172966 NR Description: Peptidyl-prolyl cis-trans isomerase cypE
  misc_feature (1)..(142): Homolog of NCBI NO: 21312784 NR Description: peptidylprolyl isomerase-like 1 [Mus musculus]
  misc_feature (1)..(142): Homolog of NCBI NO: 7706339 NR Description: peptidylprolyl isomerase-like 1
  misc_feature (1)..(147): Homolog of NCBI NO: 18042141 NR Description: cyclophilin-like peptidyl prolyl cis-trans
  misc_feature (1)..(147): Homolog of NCBI NO: 40740912 NR Description: hypothetical protein AN8680.2 [Aspergillus
  misc_feature (1)..(145): Homolog of NCBI NO: 17986117 NR Description: Cyclophilin-like CG13892-PA [Drosophila
  misc_feature (1)..(147): Homolog of NCBI NO: 15076665 NR Description: cyclophilin [Oryza sativa (japonica
  misc_feature (1)..(147): Homolog of NCBI NO: 21537220 NR Description: cyclophilin-like protein [Arabidopsis thaliana]
  misc_feature (1)..(147): Homolog of NCBI NO: 15227585 NR Description: cyclophilin-related protein [Arabidopsis
MGPFTVEMYYKHSPRTCRNFLELSRRGYYDNVLFHRIVKDFIVQGGDPTGTGRGGESIYGSKFEDEINKELKHTGAGILSMANAGPNTNGSQFFITLAPQPSLDGKHTIFGRVCRGMEVIKRLGSVQTDNTDRPIHEVKILRTKVID

SEQ ID NO: 41838 - protein, 140 aa, Arabidopsis thaliana
  peptide (1)..(140): Ceres Seq. ID no. 13488187
  misc_feature (1)..(135): Homolog of NCBI NO: 39593518 NR Description: Hypothetical protein CBG05777 [Caenorhabditis
  misc_feature (1)..(135): Homolog of NCBI NO: 30172966 NR Description: Peptidyl-prolyl cis-trans isomerase cypE
  misc_feature (1)..(135): Homolog of NCBI NO: 21312784 NR Description: peptidylprolyl isomerase-like 1 [Mus musculus]
  misc_feature (1)..(135): Homolog of NCBI NO: 7706339 NR Description: peptidylprolyl isomerase-like 1
  misc_feature (1)..(140): Homolog of NCBI NO: 18042141 NR Description: cyclophilin-like peptidyl prolyl cis-trans
  misc_feature (1)..(140): Homolog of NCBI NO: 40740912 NR Description: hypothetical protein AN8680.2 [Aspergillus
  misc_feature (1)..(138): Homolog of NCBI NO: 17986117 NR Description: Cyclophilin-like CG13892-PA [Drosophila
  misc_feature (1)..(140): Homolog of NCBI NO: 15076665 NR Description: cyclophilin [Oryza sativa (japonica
  misc_feature (1)..(140): Homolog of NCBI NO: 21537220 NR Description: cyclophilin-like protein [Arabidopsis thaliana]
  misc_feature (1)..(140): Homolog of NCBI NO: 15227585 NR Description: cyclophilin-related protein [Arabidopsis
MYYKHSPRTCRNFLELSRRGYYDNVLFHRIVKDFIVQGGDPTGTGRGGESIYGSKFEDEINKELKHTGAGILSMANAGPNTNGSQFFITLAPQPSLDGKHTIFGRVCRGMEVIKRLGSVQTDNTDRPIHEVKILRTKVID

SEQ ID NO: 41839 - DNA, 2861 bp, Arabidopsis thaliana
  misc_feature (1)..(2861): Ceres Seq. ID no. 13499928
  misc_feature: MA Experiment ID: 20000436 Result: Up-regulated in Transcription
  misc_feature: MA Experiment 20000436 PARAMETER Experiment Name: At_Drought_P Parameter: Age (day) Value: 7
  misc_feature: MA Experiment 20000436 PARAMETER Experiment Name: At_Drought_P Parameter: Organism Value: A. thaliana
  misc_feature: MA Experiment 20000436 PARAMETER Experiment Name: At_Drought_P Parameter: Plant Line Value: WS
  misc_feature: MA Experiment 20000436 PARAMETER Experiment Name: At_Drought_P Parameter: Timepoint (hr) Value: 12
  misc_feature: MA Experiment 20000436 PARAMETER Experiment Name: At_Drought_P Parameter: Tissue Value: Whole Plant
  misc_feature: MA Experiment 20000436 PARAMETER Experiment Name: At_Drought_P Parameter: Treatment Value: Drought vs. No Drought
  misc_feature: MA Experiment ID: 20000437 Result: Up-regulated in Transcription
  misc_feature: MA Experiment 20000437 PARAMETER Experiment Name: At_Drought_P Parameter: Age (day) Value: 8
  misc_feature: MA Experiment 20000437 PARAMETER Experiment Name: At_Drought_P Parameter: Organism Value: A. thaliana
  misc_feature: MA Experiment 20000437 PARAMETER Experiment Name: At_Drought_P Parameter: Plant Line Value: WS
  misc_feature: MA Experiment 20000437 PARAMETER Experiment Name: At_Drought_P Parameter: Timepoint (hr) Value: 24
  misc_feature: MA Experiment 20000437 PARAMETER Experiment Name: At_Drought_P Parameter: Tissue Value: Whole Plant
  misc_feature: MA Experiment 20000437 PARAMETER Experiment Name: At_Drought_P Parameter: Treatment Value: Drought vs. No Drought
  misc_feature: MA Experiment ID: 20001248 Result: Down-regulated in Transcription
  misc_feature: MA Experiment 20001248 PARAMETER Experiment Name: At_Far-red-induction_P Parameter: Age (day) Value: 7
  misc_feature: MA Experiment 20001248 PARAMETER Experiment Name: At_Far-red-induction_P Parameter: Light Value: Far-red vs. White
  misc_feature: MA Experiment 20001248 PARAMETER Experiment Name: At_Far-red-induction_P Parameter: Organism Value: A. thaliana
  misc_feature: MA Experiment 20001248 PARAMETER Experiment Name: At_Far-red-induction_P Parameter: Plant Line Value: Columbia
  misc_feature: MA Experiment 20001248 PARAMETER Experiment Name: At_Far-red-induction_P Parameter: Timepoint (hr) Value: 4
  misc_feature: MA Experiment 20001248 PARAMETER Experiment Name: At_Far-red-induction_P Parameter: Tissue Value: Whole Plant
  misc_feature: MA Experiment ID: 20001458 Result: Up-regulated in Transcription
  misc_feature: MA Experiment 20001458 PARAMETER Experiment Name: At_50mM_NH4NO3_L-to-H_P Parameter: Age (day) Value: Undefined
  misc_feature: MA Experiment 20001458 PARAMETER Experiment Name: At_50mM_NH4NO3_L-to-H_P Parameter: Organism Value: Undefined
  misc_feature: MA Experiment 20001458 PARAMETER Experiment Name: At_50mM_NH4NO3_L-to-H_P Parameter: Plant Line Value: Undefined
  misc_feature: MA Experiment 20001458 PARAMETER Experiment Name: At_50mM_NH4NO3_L-to-H_P Parameter: Timepoint (hr) Value: 2
  misc_feature: MA Experiment 20001458 PARAMETER Experiment Name: At_50mM_NH4NO3_L-to-H_P Parameter: Tissue Value: Siliques
  misc_feature: MA Experiment 20001458 PARAMETER Experiment Name: At_50mM_NH4NO3_L-to-H_P Parameter: Treatment Value: 50mM NH4NO3 vs. 100mM Manitol
  misc_feature: MA Experiment ID: 20001555 Result: Up-regulated in Transcription
  misc_feature: MA Experiment 20001555 PARAMETER Experiment Name: At_Drought_Soil_Dry_P Parameter: Age (day) Value: 24
  misc_feature: MA Experiment 20001555 PARAMETER Experiment Name: At_Drought_Soil_Dry_P Parameter: Organism Value: A. thaliana
  misc_feature: MA Experiment 20001555 PARAMETER Experiment Name: At_Drought_Soil_Dry_P Parameter: Plant Line Value: WS
  misc_feature: MA Experiment 20001555 PARAMETER Experiment Name: At_Drought_Soil_Dry_P Parameter: Post Timepoint (hr) Value: None
  misc_feature: MA Experiment 20001555 PARAMETER Experiment Name: At_Drought_Soil_Dry_P Parameter: Post-Treatment Value: None
  misc_feature: MA Experiment 20001555 PARAMETER Experiment Name: At_Drought_Soil_Dry_P Parameter: Timepoint (day) Value: 10
  misc_feature: MA Experiment 20001555 PARAMETER Experiment Name: At_Drought_Soil_Dry_P Parameter: Treatment Value: Drought vs. No Drought
  misc_feature: MA Experiment ID: 20001556 Result: Up-regulated in Transcription
  misc_feature: MA Experiment 20001556 PARAMETER Experiment Name: At_Drought_Soil_Dry_P Parameter: Age (day) Value: 26
  misc_feature: MA Experiment 20001556 PARAMETER Experiment Name: At_Drought_Soil_Dry_P Parameter: Organism Value: A. thaliana
  misc_feature: MA Experiment 20001556 PARAMETER Experiment Name: At_Drought_Soil_Dry_P Parameter: Plant Line Value: WS
  misc_feature: MA Experiment 20001556 PARAMETER Experiment Name: At_Drought_Soil_Dry_P Parameter: Post Timepoint (hr) Value: None
  misc_feature: MA Experiment 20001556 PARAMETER Experiment Name: At_Drought_Soil_Dry_P Parameter: Post-Treatment Value: None
  misc_feature: MA Experiment 20001556 PARAMETER Experiment Name: At_Drought_Soil_Dry_P Parameter: Timepoint (day) Value: 12
  misc_feature: MA Experiment 20001556 PARAMETER Experiment Name: At_Drought_Soil_Dry_P Parameter: Treatment Value: Drought vs. No Drought
  misc_feature: MA Experiment ID: 20001557 Result: Up-regulated in Transcription
  misc_feature: MA Experiment 20001557 PARAMETER Experiment Name: At_Drought_Soil_Dry_P Parameter: Age (day) Value: 27
  misc_feature: MA Experiment 20001557 PARAMETER Experiment Name: At_Drought_Soil_Dry_P Parameter: Organism Value: A. thaliana
  misc_feature: MA Experiment 20001557 PARAMETER Experiment Name: At_Drought_Soil_Dry_P Parameter: Plant Line Value: WS
  misc_feature: MA Experiment 20001557 PARAMETER Experiment Name: At_Drought_Soil_Dry_P Parameter: Post Timepoint (hr) Value: 3
  misc_feature: MA Experiment 20001557 PARAMETER Experiment Name: At_Drought_Soil_Dry_P Parameter: Post-Treatment Value: Re-Water vs. No Drought
  misc_feature: MA Experiment 20001557 PARAMETER Experiment Name: At_Drought_Soil_Dry_P Parameter: Timepoint (day) Value: 13
  misc_feature: MA Experiment 20001557 PARAMETER Experiment Name: At_Drought_Soil_Dry_P Parameter: Treatment Value: Drought vs. No Drought
  misc_feature: MA Experiment ID: 20001558 Result: Up-regulated in Transcription
  misc_feature: MA Experiment 20001558 PARAMETER Experiment Name: At_Drought_Soil_Dry_P Parameter: Age (day) Value: 27
  misc_feature: MA Experiment 20001558 PARAMETER Experiment Name: At_Drought_Soil_Dry_P Parameter: Organism Value: A. thaliana
  misc_feature: MA Experiment 20001558 PARAMETER Experiment Name: At_Drought_Soil_Dry_P Parameter: Plant Line Value: WS
  misc_feature: MA Experiment 20001558 PARAMETER Experiment Name: At_Drought_Soil_Dry_P Parameter: Post Timepoint (hr) Value: 6
  misc_feature: MA Experiment 20001558 PARAMETER Experiment Name: At_Drought_Soil_Dry_P Parameter: Post-Treatment Value: Re-Water vs. No Drought
  misc_feature: MA Experiment 20001558 PARAMETER Experiment Name: At_Drought_Soil_Dry_P Parameter: Timepoint (day) Value: 13
  misc_feature: MA Experiment 20001558 PARAMETER Experiment Name: At_Drought_Soil_Dry_P Parameter: Treatment Value: Drought vs. No Drought
  misc_feature: MA Experiment ID: 20001560 Result: Up-regulated in Transcription
  misc_feature: MA Experiment 20001560 PARAMETER Experiment Name: At_Drought_Soil_Dry_P Parameter: Age (day) Value: 28
  misc_feature: MA Experiment 20001560 PARAMETER Experiment Name: At_Drought_Soil_Dry_P Parameter: Organism Value: A. thaliana
  misc_feature: MA Experiment 20001560 PARAMETER Experiment Name: At_Drought_Soil_Dry_P Parameter: Plant Line Value: WS
  misc_feature: MA Experiment 20001560 PARAMETER Experiment Name: At_Drought_Soil_Dry_P Parameter: Post Timepoint (hr) Value: None
  misc_feature: MA Experiment 20001560 PARAMETER Experiment Name: At_Drought_Soil_Dry_P Parameter: Post-Treatment Value: None
  misc_feature: MA Experiment 20001560 PARAMETER Experiment Name: At_Drought_Soil_Dry_P Parameter: Timepoint (day) Value: 14
  misc_feature: MA Experiment 20001560 PARAMETER Experiment Name: At_Drought_Soil_Dry_P Parameter: Treatment Value: Drought vs. No Drought
  misc_feature: MA Experiment ID: 20001904 Result: Up-regulated in Transcription
  misc_feature: MA Experiment 20001904 PARAMETER Experiment Name: At_Drought_Reproduction_P Parameter: Age (day) Value: 37
  misc_feature: MA Experiment 20001904 PARAMETER Experiment Name: At_Drought_Reproduction_P Parameter: Organism Value: A. thaliana
  misc_feature: MA Experiment 20001904 PARAMETER Experiment Name: At_Drought_Reproduction_P Parameter: Plant Line Value: WS
  misc_feature: MA Experiment 20001904 PARAMETER Experiment Name: At_Drought_Reproduction_P Parameter: Timepoint (day) Value: 7
  misc_feature: MA Experiment 20001904 PARAMETER Experiment Name: At_Drought_Reproduction_P Parameter: Tissue Value: Rosettes
  misc_feature: MA Experiment 20001904 PARAMETER Experiment Name: At_Drought_Reproduction_P Parameter: Treatment Value: Drought vs. No Drought
  misc_feature: MA Experiment ID: 20001905 Result: Up-regulated in Transcription
  misc_feature: MA Experiment 20001905 PARAMETER Experiment Name: At_Drought_Reproduction_P Parameter: Age (day) Value: 40
  misc_feature: MA Experiment 20001905 PARAMETER Experiment Name: At_Drought_Reproduction_P Parameter: Organism Value: A. thaliana
  misc_feature: MA Experiment 20001905 PARAMETER Experiment Name: At_Drought_Reproduction_P Parameter: Plant Line Value: WS
  misc_feature: MA Experiment 20001905 PARAMETER Experiment Name: At_Drought_Reproduction_P Parameter: Timepoint (day) Value: 10
  misc_feature: MA Experiment 20001905 PARAMETER Experiment Name: At_Drought_Reproduction_P Parameter: Tissue Value: Rosettes
  misc_feature: MA Experiment 20001905 PARAMETER Experiment Name: At_Drought_Reproduction_P Parameter: Treatment Value: Drought vs. No Drought
  misc_feature: MA Experiment ID: 20001910 Result: Up-regulated in Transcription
  misc_feature: MA Experiment 20001910 PARAMETER Experiment Name: At_Drought_Reproduction_P Parameter: Age (day) Value: 37
  misc_feature: MA Experiment 20001910 PARAMETER Experiment Name: At_Drought_Reproduction_P Parameter: Organism Value: A. thaliana
  misc_feature: MA Experiment 20001910 PARAMETER Experiment Name: At_Drought_Reproduction_P Parameter: Plant Line Value: WS
  misc_feature: MA Experiment 20001910 PARAMETER Experiment Name: At_Drought_Reproduction_P Parameter: Timepoint (day) Value: 7
  misc_feature: MA Experiment 20001910 PARAMETER Experiment Name: At_Drought_Reproduction_P Parameter: Tissue Value: Flowers
  misc_feature: MA Experiment 20001910 PARAMETER Experiment Name: At_Drought_Reproduction_P Parameter: Treatment Value: Drought vs. No Drought
  misc_feature: MA Experiment ID: 20001911 Result: Up-regulated in Transcription
  misc_feature: MA Experiment 20001911 PARAMETER Experiment Name: At_Drought_Reproduction_P Parameter: Age (day) Value: 40
  misc_feature: MA Experiment 20001911 PARAMETER Experiment Name: At_Drought_Reproduction_P Parameter: Organism Value: A. thaliana
  misc_feature: MA Experiment 20001911 PARAMETER Experiment Name: At_Drought_Reproduction_P Parameter: Plant Line Value: WS
  misc_feature: MA Experiment 20001911 PARAMETER Experiment Name: At_Drought_Reproduction_P Parameter: Timepoint (day) Value: 10
  misc_feature: MA Experiment 20001911 PARAMETER Experiment Name: At_Drought_Reproduction_P Parameter: Tissue Value: Flowers
  misc_feature: MA Experiment 20001911 PARAMETER Experiment Name: At_Drought_Reproduction_P Parameter: Treatment Value: Drought vs. No Drought
gattctgtcttctccttcttccaaccgcgtcatcaatttatatttagacaacaaaaaaaaaaaaagccagagcctctccggtaatttctcattttcccgagcgatcgtccatggcggacatcgacatcggaaccgcagcaacaacaggaggaaacgaaggaagaggaggcacacgagaacgtctaataaaccgagaaaacaagttcacacgtagcgtatctcacgcacaagacgagctccacagtttccggaaatatctccgatggatgtgcgtagatcagtcgagtccttggacggcggttctatcatggtctatgttcgttgttttcacgctcgttgttcctgccacgtctcacttcatgctcgcttgctctgactgcgatagccatcactctaggccgtacgattccgttgttcagctttctcttagcagtttcgctgctctttcgtttctttgtctctccagattcgttagcaagtatggtctccgacggttcctattctttgataagctttgggatgagagcgagaccgttcgtctaggctacaccaatcagctcaatagatcgcttaagattctctcctacttcgtgtctccttgtttcttagcgatgagctcttataagatatggtggtatgcttcaggagcttctcagattcctttccttggtaatgttatcttgagtgatacagttgcttgtttgatggagctctgctcgtggttgtaccgtactaccgtgatctttctggtttgtgtcctcttccgtctcatctgccatctccagattcttaggctgcaagactttgcccaggttttccagatggattcagatgttggttctatcttgtctgaacatctccgtatcagacgtcatctgagaatcatcagccaccgataccgaacctttatattgttgtccttgatattagtcactggaagtcagttttactctctgcttattaccactaaggcctacgctgaattgaatatctacagagctggagaactagcactatgttcaatgacgctggtcactgcactgctcattttactacgaagtgcatcaaagatcacacacaaggctcaggcggtgacttgtcttgcagccaagtggcatgtatgtgcgacgatagaatcctttgagactgtggatggagagactccaaggttagttgatagagcaagcggacacggatactatccaacagatgatgataatggagaatcagatagtgaagattatggagacgaagaagatgatttcgataacaacaatctcattcctgcttatgcttatagcaccatatcattccaaaaacggcaagctctagtgaattactttgagaacaatagatcaggaatcacggtgtttgggtttacacttgatagaagcactctccatacaatcttcggtatcgaaatgtcgcttgttctctggttacttggtaagaccattggaatttcttgaatcattctttggatcattaaagttctcaaagttttggctcccttgttggatgatgttggtatatgcatgtatgtatacacagaggctctatgtaaaataacgttttctcgtttttttatcactgtaaatcatcttattttttctttaacatgtcgatttgtaatagaattcatgtgttcaacaaaaaaaaaaaaaaaaaaaaaaaaaaaaaaaaaaaaaaaaaaaaaaaaaaaaaaaaaaaaaaaaaaaaaaaaaaaaaaaaaaaaaaaataaaaaaaaaaaaaaaagagctcttggatccatgagaacaaagatgagattgaatatttcaggcttagtgatctttgggactgttttgatgagccaagcgcgtatggacttggatcaaaggtcgacttaaacaatggtgaatccgttatgcagtactatgtcccgtatctatccgccattcaaatctatactaacaaatctacagccatttctaggattcatagtgatgtggttgattgtgagagtgaatgttggagtgatgatagtgagattgagaagttgtctaggtcaatgagcagtggttctagcaaaatatgggattctgtttctgatgattcgggttatgagatcgatggtacttcttcattgatgcgagataagctcggttctattgattttcagtactttgagtccgttaaaccgcacttgcgtgttcctcttaccgctaaggtaaatgaattggctgagaagtatccgggactttcgactctaaggagtgttgatttgtctccagcaagttggttggccattgcttggtatccaatttaccacattccctctcggaagaccgataaagatttatcgacatgtttcttgagttatcatactttatcttcggctttccaaggtaacttgatagagggagacgatgagattaacgaaaccatgaaagaagaaacattgtgttttgatgaaggaccggtgaccaagagtatacctttggctccttttggtttagttagttacaaattgcaaggagatttgtggaggaatcaagaatgtggtgaccaaggacgtatagtttatcttcgcagtgcagctgattcgtggctgaaacagcttaatgttcaagatcaccatgaccatagcttcttctccatgaacatgagcttgtagatccaaaaaaagagagccaagactctgtttttttgctctgtttttagttgttttcttagccaagactctgtttttttgctctgtttttagttgttttaagaatcttaggtatatagcaactcgaaatgtagaggtttcgtttccttctgcttgaacccgtggaaaataaagagaattaggcttgtttttggctttatgagaaggaagttttttttgttttgtgag

SEQ ID NO: 41840 - protein, 452 aa, Arabidopsis thaliana
  peptide (1)..(452): Ceres Seq. ID no. 13499929
  misc_feature (102)..(449): Pfam Name: 7tm Odorant receptor Pfam Description: 7tm Odorant receptor
  misc_feature (25)..(452): Homolog of NCBI NO: 38344826 NR Description: OSJNBa0064H22.7 [Oryza sativa (japonica
  misc_feature (45)..(449): Homolog of NCBI NO: 26449461 NR Description: unknown protein [Arabidopsis thaliana]
  misc_feature (45)..(449): Homolog of NCBI NO: 30679575 NR Description: expressed protein [Arabidopsis thaliana]
  misc_feature (20)..(449): Homolog of NCBI NO: 18415890 NR Description: expressed protein [Arabidopsis thaliana]
  misc_feature (22)..(452): Homolog of NCBI NO: 25405388 NR Description: unknown protein [imported] - Arabidopsis thaliana
  misc_feature (22)..(452): Homolog of NCBI NO: 15215760 NR Description: At1g50630/F17J6_15 [Arabidopsis thaliana]
  misc_feature (22)..(452): Homolog of NCBI NO: 18403151 NR Description: expressed protein [Arabidopsis thaliana]
  misc_feature (1)..(100): Homolog of NCBI NO: 9294547 NR Description: emb|CAA16777.1~gene_id:MQC12.4~similar to unknown
  misc_feature (120)..(452): Homolog of NCBI NO: 9294547 NR Description: emb|CAA16777.1~gene_id:MQC12.4~similar to unknown
  misc_feature (1)..(452): Homolog of NCBI NO: 18402564 NR Description: expressed protein [Arabidopsis thaliana]
MADIDIGTAATTGGNEGRGGTRERLINRENKFTRSVSHAQDELHSFRKYLRWMCVDQSSPWTAVLSWSMFVVFTLVVPATSHFMLACSDCDSHHSRPYDSVVQLSLSSFAALSFLCLSRFVSKYGLRRFLFFDKLWDESETVRLGYTNQLNRSLKILSYFVSPCFLAMSSYKIWWYASGASQIPFLGNVILSDTVACLMELCSWLYRTTVIFLVCVLFRLICHLQILRLQDFAQVFQMDSDVGSILSEHLRIRRHLRIISHRYRTFILLSLILVTGSQFYSLLITTKAYAELNIYRAGELALCSMTLVTALLILLRSASKITHKAQAVTCLAAKWHVCATIESFETVDGETPRLVDRASGHGYYPTDDDNGESDSEDYGDEEDDFDNNNLIPAYAYSTISFQKRQALVNYFENNRSGITVFGFTLDRSTLHTIFGIEMSLVLWLLGKTIGIS

SEQ ID NO: 41841 - protein, 400 aa, Arabidopsis thaliana
  peptide (1)..(400): Ceres Seq. ID no. 13499930
  misc_feature (50)..(397): Pfam Name: 7tm Odorant receptor Pfam Description: 7tm Odorant receptor
  misc_feature (1)..(400): Homolog of NCBI NO: 38344826 NR Description: OSJNBa0064H22.7 [Oryza sativa (japonica
  misc_feature (1)..(397): Homolog of NCBI NO: 26449461 NR Description: unknown protein [Arabidopsis thaliana]
  misc_feature (1)..(397): Homolog of NCBI NO: 30679575 NR Description: expressed protein [Arabidopsis thaliana]
  misc_feature (1)..(397): Homolog of NCBI NO: 18415890 NR Description: expressed protein [Arabidopsis thaliana]
  misc_feature (1)..(400): Homolog of NCBI NO: 25405388 NR Description: unknown protein [imported] - Arabidopsis thaliana
  misc_feature (1)..(400): Homolog of NCBI NO: 15215760 NR Description: At1g50630/F17J6_15 [Arabidopsis thaliana]
  misc_feature (1)..(400): Homolog of NCBI NO: 18403151 NR Description: expressed protein [Arabidopsis thaliana]
  misc_feature (1)..(48): Homolog of NCBI NO: 9294547 NR Description: emb|CAA16777.1~gene_id:MQC12.4~similar to unknown
  misc_feature (68)..(400): Homolog of NCBI NO: 9294547 NR Description: emb|CAA16777.1~gene_id:MQC12.4~similar to unknown
  misc_feature (1)..(400): Homolog of NCBI NO: 18402564 NR Description: expressed protein [Arabidopsis thaliana]
MCVDQSSPWTAVLSWSMFVVFTLVVPATSHFMLACSDCDSHHSRPYDSVVQLSLSSFAALSFLCLSRFVSKYGLRRFLFFDKLWDESETVRLGYTNQLNRSLKILSYFVSPCFLAMSSYKIWWYASGASQIPFLGNVILSDTVACLMELCSWLYRTTVIFLVCVLFRLICHLQILRLQDFAQVFQMDSDVGSILSEHLRIRRHLRIISHRYRTFILLSLILVTGSQFYSLLITTKAYAELNIYRAGELALCSMTLVTALLILLRSASKITHKAQAVTCLAAKWHVCATIESFETVDGETPRLVDRASGHGYYPTDDDNGESDSEDYGDEEDDFDNNNLIPAYAYSTISFQKRQALVNYFENNRSGITVFGFTLDRSTLHTIFGIEMSLVLWLLGKTIGIS

SEQ ID NO: 41842 - protein, 384 aa, Arabidopsis thaliana
  peptide (1)..(384): Ceres Seq. ID no. 13499931
  misc_feature (34)..(381): Pfam Name: 7tm Odorant receptor Pfam Description: 7tm Odorant receptor
  misc_feature (1)..(384): Homolog of NCBI NO: 38344826 NR Description: OSJNBa0064H22.7 [Oryza sativa (japonica
  misc_feature (1)..(381): Homolog of NCBI NO: 26449461 NR Description: unknown protein [Arabidopsis thaliana]
  misc_feature (1)..(381): Homolog of NCBI NO: 30679575 NR Description: expressed protein [Arabidopsis thaliana]
  misc_feature (1)..(381): Homolog of NCBI NO: 18415890 NR Description: expressed protein [Arabidopsis thaliana]
  misc_feature (1)..(384): Homolog of NCBI NO: 25405388 NR Description: unknown protein [imported] - Arabidopsis thaliana
  misc_feature (1)..(384): Homolog of NCBI NO: 15215760 NR Description: At1g50630/F17J6_15 [Arabidopsis thaliana]
  misc_feature (1)..(384): Homolog of NCBI NO: 18403151 NR Description: expressed protein [Arabidopsis thaliana]
  misc_feature (1)..(32): Homolog of NCBI NO: 9294547 NR Description: emb|CAA16777.1~gene_id:MQC12.4~similar to unknown
  misc_feature (52)..(384): Homolog of NCBI NO: 9294547 NR Description: emb|CAA16777.1~gene_id:MQC12.4~similar to unknown
  misc_feature (1)..(384): Homolog of NCBI NO: 18402564 NR Description: expressed protein [Arabidopsis thaliana]
MFVVFTLVVPATSHFMLACSDCDSHHSRPYDSVVQLSLSSFAALSFLCLSRFVSKYGLRRFLFFDKLWDESETVRLGYTNQLNRSLKILSYFVSPCFLAMSSYKIWWYASGASQIPFLGNVILSDTVACLMELCSWLYRTTVIFLVCVLFRLICHLQILRLQDFAQVFQMDSDVGSILSEHLRIRRHLRIISHRYRTFILLSLILVTGSQFYSLLITTKAYAELNIYRAGELALCSMTLVTALLILLRSASKITHKAQAVTCLAAKWHVCATIESFETVDGETPRLVDRASGHGYYPTDDDNGESDSEDYGDEEDDFDNNNLIPAYAYSTISFQKRQALVNYFENNRSGITVFGFTLDRSTLHTIFGIEMSLVLWLLGKTIGIS

SEQ ID NO: 41843 - DNA, 1489 bp, Arabidopsis thaliana
  misc_feature (1)..(1489): Ceres Seq. ID no. 12337654
  misc_feature: MA Experiment ID: 20000794 Result: Up-regulated in Transcription
  misc_feature: MA Experiment 20000794 PARAMETER Experiment Name: At_Petals_P Parameter: Age (day) Value: 23-25 days
  misc_feature: MA Experiment 20000794 PARAMETER Experiment Name: At_Petals_P Parameter: Plant Line Value: WS
  misc_feature: MA Experiment 20000794 PARAMETER Experiment Name: At_Petals_P Parameter: Tissue Value: Petals vs. Whole plant
aatccgctatgtccgtcagatcataagaagagcaaaatcgatgcttttcagtcaaaatatggtcgctgattccgccgagatcagtgttatcgatgtcaagtctcatctctccgttgcgaaagatcctagtaactttcagattgccgaaattcgaattcatgattcaatttgtattgatattccgagctctgaagaaacgcctcttttagaatcgatcaagagttgttctgcaactactattgaagagcatgttactgagtttgtaccaaatataagctcagggagttatgcagataagggtgactaccgggagtacatggaagatgaacacatatgcatagacgacctttcagatcatcttgggtcttccttttacagatttccggtgcctatggctttctacggtgtgtttgatggccatggtggatctgacgcatcacagtatataaaagagaatgctatgagcttgttctttgaagatgctgtttttcgacaatcgccctctgttgtggactctcttttcttgaaagaactggagacatctcaccgggaagcttataggcttgctgatcttgcaatggaggacgaaagaatagttagtagttcgtgcggaacaaccgcattgactgctcttgtaatcggaagacatttaatggtcgctaatgttggtgattgtcgtgcggtgctctgcagaaaaggaaaagctgttgatatgtcatttgatcacaaatctacatttgagccagaacggagacgagtagaggatttaggagggtactttgaaggcgagtatctctatggtgaccttgctgttacaagagctcttggagactggtcaataaagaggttttcaccccttggtgaatctttgtcacctctgatctcagacccggacattcaacagatgattctaactgaggaagacgagttcttgattatgggatgtgacggtgtttgggacgtgatgacaagccagtatgctgttactttcgtcaggcaaggacttaggagacacggtgatcctagaaggtgcgctatggaacttggaagggaagcgttaaggctagactcatcagataacgttacagtggtggtcatctgcttctcatcatccccagctcctcagagaagaaggatacggttctgtgtttccgatgaagctcgagcccggttacagacaatgctagaaggctaactgatgaaggttttttagcggtcttgaggagggcacaatgtatatattatagcaacaaagatggggttttgagataacaaccctcccaaggccaaattatttgatgacattattacatctctctgatattggatgaaataaaaggaaggcaaaaagagaagatgaaggacttcttctttatgttgttaaaatgttcacaagtgttagccattttttatctatttattctgtaggattattgagcacttatgtacaaaaactgattaagattaaggaattcaggtgattaagttt

SEQ ID NO: 41844 - protein, 397 aa, Arabidopsis thaliana
  peptide (1)..(397): Ceres Seq. ID no. 12337655
  misc_feature (92)..(361): Pfam Name: Protein phosphatase 2C Pfam Description: Protein phosphatase 2C
  misc_feature (21)..(397): Homolog of NCBI NO: 21693562 NR Description: DNA-binding protein phosphatase 2C [Nicotiana
  misc_feature (85)..(397): Homolog of NCBI NO: 15226152 NR Description: protein phosphatase 2C (PP2C)
  misc_feature (87)..(396): Homolog of NCBI NO: 37536524 NR Description: putative protein phosphatase-2C
  misc_feature (87)..(396): Homolog of NCBI NO: 10140768 NR Description: putative protein phosphatase-2C [Oryza sativa]
  misc_feature (84)..(397): Homolog of NCBI NO: 30695577 NR Description: protein phosphatase 2C (PP2C), putative
  misc_feature (84)..(397): Homolog of NCBI NO: 15228717 NR Description: protein phosphatase 2C (PP2C)
  misc_feature (86)..(396): Homolog of NCBI NO: 34894410 NR Description: putative protein phosphatase
  misc_feature (76)..(397): Homolog of NCBI NO: 25352221 NR Description: phosphoprotein phosphatase (EC 3.1.3.16) 2C
  misc_feature (20)..(397): Homolog of NCBI NO: 15221047 NR Description: protein phosphatase-2C, putative; protein id:
  misc_feature (1)..(397): Homolog of NCBI NO: 30684431 NR Description: protein phosphatase 2C (PP2C) -related
IRYVRQIIRRAKSMLFSQNMVADSAEISVIDVKSHLSVAKDPSNFQIAEIRIHDSICIDIPSSEETPLLESIKSCSATTIEEHVTEFVPNISSGSYADKGDYREYMEDEHICIDDLSDHLGSSFYRFPVPMAFYGVFDGHGGSDASQYIKENAMSLFFEDAVFRQSPSVVDSLFLKELETSHREAYRLADLAMEDERIVSSSCGTTALTALVIGRHLMVANVGDCRAVLCRKGKAVDMSFDHKSTFEPERRRVEDLGGYFEGEYLYGDLAVTRALGDWSIKRFSPLGESLSPLISDPDIQQMILTEEDEFLIMGCDGVWDVMTSQYAVTFVRQGLRRHGDPRRCAMELGREALRLDSSDNVTVVVICFSSSPAPQRRRIRFCVSDEARARLQTMLEG

SEQ ID NO: 41845 - protein, 384 aa, Arabidopsis thaliana
  peptide (1)..(384): Ceres Seq. ID no. 12337656
  misc_feature (79)..(348): Pfam Name: Protein phosphatase 2C Pfam Description: Protein phosphatase 2C
  misc_feature (8)..(384): Homolog of NCBI NO: 21693562 NR Description: DNA-binding protein phosphatase 2C [Nicotiana
  misc_feature (72)..(384): Homolog of NCBI NO: 15226152 NR Description: protein phosphatase 2C (PP2C)
  misc_feature (74)..(383): Homolog of NCBI NO: 37536524 NR Description: putative protein phosphatase-2C
  misc_feature (74)..(383): Homolog of NCBI NO: 10140768 NR Description: putative protein phosphatase-2C [Oryza sativa]
  misc_feature (71)..(384): Homolog of NCBI NO: 30695577 NR Description: protein phosphatase 2C (PP2C), putative
  misc_feature (71)..(384): Homolog of NCBI NO: 15228717 NR Description: protein phosphatase 2C (PP2C)
  misc_feature (73)..(383): Homolog of NCBI NO: 34894410 NR Description: putative protein phosphatase
  misc_feature (63)..(384): Homolog of NCBI NO: 25352221 NR Description: phosphoprotein phosphatase (EC 3.1.3.16) 2C
  misc_feature (7)..(384): Homolog of NCBI NO: 15221047 NR Description: protein phosphatase-2C, putative; protein id:
  misc_feature (1)..(384): Homolog of NCBI NO: 30684431 NR Description: protein phosphatase 2C (PP2C) -related
MLFSQNMVADSAEISVIDVKSHLSVAKDPSNFQIAEIRIHDSICIDIPSSEETPLLESIKSCSATTIEEHVTEFVPNISSGSYADKGDYREYMEDEHICIDDLSDHLGSSFYRFPVPMAFYGVFDGHGGSDASQYIKENAMSLFFEDAVFRQSPSVVDSLFLKELETSHREAYRLADLAMEDERIVSSSCGTTALTALVIGRHLMVANVGDCRAVLCRKGKAVDMSFDHKSTFEPERRRVEDLGGYFEGEYLYGDLAVTRALGDWSIKRFSPLGESLSPLISDPDIQQMILTEEDEFLIMGCDGVWDVMTSQYAVTFVRQGLRRHGDPRRCAMELGREALRLDSSDNVTVVVICFSSSPAPQRRRIRFCVSDEARARLQTMLEG

SEQ ID NO: 41846 - protein, 378 aa, Arabidopsis thaliana
  peptide (1)..(378): Ceres Seq. ID no. 12337657
  misc_feature (73)..(342): Pfam Name: Protein phosphatase 2C Pfam Description: Protein phosphatase 2C
  misc_feature (2)..(378): Homolog of NCBI NO: 21693562 NR Description: DNA-binding protein phosphatase 2C [Nicotiana
  misc_feature (66)..(378): Homolog of NCBI NO: 15226152 NR Description: protein phosphatase 2C (PP2C)
  misc_feature (68)..(377): Homolog of NCBI NO: 37536524 NR Description: putative protein phosphatase-2C
  misc_feature (68)..(377): Homolog of NCBI NO: 10140768 NR Description: putative protein phosphatase-2C [Oryza sativa]
  misc_feature (65)..(378): Homolog of NCBI NO: 30695577 NR Description: protein phosphatase 2C (PP2C), putative
  misc_feature (65)..(378): Homolog of NCBI NO: 15228717 NR Description: protein phosphatase 2C (PP2C)
  misc_feature (67)..(377): Homolog of NCBI NO: 34894410 NR Description: putative protein phosphatase
  misc_feature (57)..(378): Homolog of NCBI NO: 25352221 NR Description: phosphoprotein phosphatase (EC 3.1.3.16) 2C
  misc_feature (1)..(378): Homolog of NCBI NO: 15221047 NR Description: protein phosphatase-2C, putative; protein id:
  misc_feature (1)..(378): Homolog of NCBI NO: 30684431 NR Description: protein phosphatase 2C (PP2C) -related
MVADSAEISVIDVKSHLSVAKDPSNFQIAEIRIHDSICIDIPSSEETPLLESIKSCSATTIEEHVTEFVPNISSGSYADKGDYREYMEDEHICIDDLSDHLGSSFYRFPVPMAFYGVFDGHGGSDASQYIKENAMSLFFEDAVFRQSPSVVDSLFLKELETSHREAYRLADLAMEDERIVSSSCGTTALTALVIGRHLMVANVGDCRAVLCRKGKAVDMSFDHKSTFEPERRRVEDLGGYFEGEYLYGDLAVTRALGDWSIKRFSPLGESLSPLISDPDIQQMILTEEDEFLIMGCDGVWDVMTSQYAVTFVRQGLRRHGDPRRCAMELGREALRLDSSDNVTVVVICFSSSPAPQRRRIRFCVSDEARARLQTMLEG

SEQ ID NO: 41847 - DNA, 923 bp, Arabidopsis thaliana
  misc_feature (1)..(923): Ceres Seq. ID no. 12439752
  misc_feature: MA Experiment ID: 108573 Result: Up-regulated in Transcription
  misc_feature: MA Experiment 108573 PARAMETER Experiment Name: At_Drought_cDNA_P Parameter: Timepoint (hr) Value: 6
  misc_feature: MA Experiment 108573 PARAMETER Experiment Name: At_Drought_cDNA_P Parameter: Tissue Value: Aerial
  misc_feature: MA Experiment 108573 PARAMETER Experiment Name: At_Drought_cDNA_P Parameter: Treatment Value: Drought vs. No Drought
  misc_feature: MA Experiment ID: 20000171 Result: Up-regulated in Transcription
  misc_feature: MA Experiment 20000171 PARAMETER Experiment Name: At_42deg_Heat_P Parameter: Age (day) Value: 14
  misc_feature: MA Experiment 20000171 PARAMETER Experiment Name: At_42deg_Heat_P Parameter: Organism Value: A. thaliana
  misc_feature: MA Experiment 20000171 PARAMETER Experiment Name: At_42deg_Heat_P Parameter: Plant Line Value: WS
  misc_feature: MA Experiment 20000171 PARAMETER Experiment Name: At_42deg_Heat_P Parameter: Temperature (deg C) Value: 42 vs. 22
  misc_feature: MA Experiment 20000171 PARAMETER Experiment Name: At_42deg_Heat_P Parameter: Timepoint (hr) Value: 1
  misc_feature: MA Experiment 20000171 PARAMETER Experiment Name: At_42deg_Heat_P Parameter: Tissue Value: Aerial
gataaagtagaaaccctagtttgaattttcacggccgacctctctctcatcctccgagtattgttggcttcagaccaaatcttctccggcgctgcggcgtttcccccgcaaaaggtagaagtagctgattacaggaacaatgatgtcctttgaaatgaatgaccggaaaaaaatcgggttaggcctgacaggatttggcgtattcttctcgtttttgggaatagtcttcgtctttgataagggattacttgccatgggaaatattcttttcatctcgggggttagtctaaccattggcttcaagtctaccatgcagttcttcatgaagcgtcaaaattataagggaaccatctcttttggcgtcggtttcttctttgttatcatcgggtggcctatcttgggaatgatgttggagacctatggctttttcgtactcttcagtggcttctggcctaccttggcagtctttgctcagaagatacccgttctgggttggattattcagcaaccatatattagatcgttctttgacaagtaccggggcaagcgagtgccggtctagtcttccatcccgagcagagagacgattcactgagctagatgcagctgaacaggcgattaaagtttttggaagaagaagtttcgtgatcctgtagaaaactaaaaccataggagaaagaaaataggaaggaaaagaacgtacaatttgaagctgtgtgtctatgtttcaggtgaagtagatgaatcttcgtccaggttgcaaattgcaacagaatgttaaaaatgtaatgttttatttttgggttagttataggttacacctcaattttggaaactaattaaagagaaacaattgtttctattcacaaaaactttttgtaaccattacgcattacataattttaatcatattgttattaact

SEQ ID NO: 41848 - protein, 140 aa, Arabidopsis thaliana; identical to SEQ ID NO: 25588
  peptide (1)..(140): Ceres Seq. ID no. 12439753
  misc_feature (30)..(130): Pfam Name: Got1-like family Pfam Description: Got1-like family
  misc_feature (5)..(127): Homolog of NCBI NO: 24642432 NR Description: CG32576-PA [Drosophila melanogaster]
  misc_feature (6)..(132): Homolog of NCBI NO: 7705636 NR Description: CGI-141 protein [Homo sapiens]
  misc_feature (1)..(132): Homolog of NCBI NO: 7634779 NR Description: HDCMA39P [Homo sapiens]
  misc_feature (6)..(132): Homolog of NCBI NO: 13385354 NR Description: RIKEN cDNA 2310061A22 [Mus musculus]
  misc_feature (1)..(132): Homolog of NCBI NO: 26384022 NR Description: unnamed protein product [Mus musculus]
  misc_feature (1)..(100): Homolog of NCBI NO: 6714435 NR Description: unknown protein [Arabidopsis thaliana]
  misc_feature (11)..(128): Homolog of NCBI NO: 33146513 NR Description: NFkB activating protein-like
  misc_feature (1)..(140): Homolog of NCBI NO: 30678779 NR Description: expressed protein [Arabidopsis thaliana]
  misc_feature (1)..(128): Homolog of NCBI NO: 12324443 NR Description: unknown protein; 50647-51606 [Arabidopsis
  misc_feature (1)..(140): Homolog of NCBI NO: 15229139 NR Description: putative protein

SEQ ID NO: 41849 - protein, 139 aa, Arabidopsis thaliana; identical to SEQ ID NO: 25589
  peptide (1)..(139): Ceres Seq. ID no. 12439754
  misc_feature (29)..(129): Pfam Name: Got1-like family Pfam Description: Got1-like family
  misc_feature (4)..(126): Homolog of NCBI NO: 24642432 NR Description: CG32576-PA [Drosophila melanogaster]
  misc_feature (5)..(131): Homolog of NCBI NO: 7705636 NR Description: CGI-141 protein [Homo sapiens]
  misc_feature (1)..(131): Homolog of NCBI NO: 7634779 NR Description: HDCMA39P [Homo sapiens]
  misc_feature (5)..(131): Homolog of NCBI NO: 13385354 NR Description: RIKEN cDNA 2310061A22 [Mus musculus]
  misc_feature (1)..(131): Homolog of NCBI NO: 26384022 NR Description: unnamed protein product [Mus musculus]
  misc_feature (1)..(99): Homolog of NCBI NO: 6714435 NR Description: unknown protein [Arabidopsis thaliana]
  misc_feature (10)..(127): Homolog of NCBI NO: 33146513 NR Description: NFkB activating protein-like
  misc_feature (1)..(139): Homolog of NCBI NO: 30678779 NR Description: expressed protein [Arabidopsis thaliana]
  misc_feature (1)..(127): Homolog of NCBI NO: 12324443 NR Description: unknown protein; 50647-51606 [Arabidopsis
  misc_feature (1)..(139): Homolog of NCBI NO: 15229139 NR Description: putative protein

SEQ ID NO: 41850 - protein, 135 aa, Arabidopsis thaliana; identical to SEQ ID NO: 25590
  peptide (1)..(135): Ceres Seq. ID no. 12439755
  misc_feature (25)..(125): Pfam Name: Got1-like family Pfam Description: Got1-like family
  misc_feature (1)..(122): Homolog of NCBI NO: 24642432 NR Description: CG32576-PA [Drosophila melanogaster]
  misc_feature (1)..(127): Homolog of NCBI NO: 7705636 NR Description: CGI-141 protein [Homo sapiens]
  misc_feature (1)..(127): Homolog of NCBI NO: 7634779 NR Description: HDCMA39P [Homo sapiens]
  misc_feature (1)..(127): Homolog of NCBI NO: 13385354 NR Description: RIKEN cDNA 2310061A22 [Mus musculus]
  misc_feature (1)..(127): Homolog of NCBI NO: 26384022 NR Description: unnamed protein product [Mus musculus]
  misc_feature (1)..(95): Homolog of NCBI NO: 6714435 NR Description: unknown protein [Arabidopsis thaliana]
  misc_feature (6)..(123): Homolog of NCBI NO: 33146513 NR Description: NFkB activating protein-like
  misc_feature (1)..(135): Homolog of NCBI NO: 30678779 NR Description: expressed protein [Arabidopsis thaliana]
  misc_feature (1)..(123): Homolog of NCBI NO: 12324443 NR Description: unknown protein; 50647-51606 [Arabidopsis
  misc_feature (1)..(135): Homolog of NCBI NO: 15229139 NR Description: putative protein

SEQ ID NO: 41851 - DNA, 1353 bp, Arabidopsis thaliana
  misc_feature (1)..(1353): Ceres Seq. ID no. 13488887
  misc_feature: MA Experiment ID: 108461 Result: Down-regulated in Transcription
  misc_feature: MA Experiment 108461 PARAMETER Experiment Name: At_Germinating_Seeds_cDNA_P Parameter: Age (day) Value: 1 vs. 0
  misc_feature: MA Experiment 108461 PARAMETER Experiment Name: At_Germinating_Seeds_cDNA_P Parameter: Tissue Value: Germinating Seeds
  misc_feature: MA Experiment ID: 108464 Result: Up-regulated in Transcription
  misc_feature: MA Experiment 108464 PARAMETER Experiment Name: At_Germinating_Seeds_cDNA_P Parameter: Age (day) Value: 4 vs. 0
  misc_feature: MA Experiment 108464 PARAMETER Experiment Name: At_Germinating_Seeds_cDNA_P Parameter: Tissue Value: Germinating Seeds
  misc_feature: MA Experiment ID: 108488 Result: Down-regulated in Transcription
  misc_feature: MA Experiment ID: 108501 Result: Up-regulated in Transcription
  misc_feature: MA Experiment 108501 PARAMETER Experiment Name: At_ap2_floral_buds_cDNA_P Parameter: Plant Line Value: ap2 (Ler.)
  misc_feature: MA Experiment 108501 PARAMETER Experiment Name: At_ap2_floral_buds_cDNA_P Parameter: Tissue Value: Closed Flower
  misc_feature: MA Experiment ID: 108569 Result: Up-regulated in Transcription
  misc_feature: MA Experiment 108569 PARAMETER Experiment Name: At_0.001%_MeJA__cDNA_P Parameter: Timepoint (hr) Value: 6
  misc_feature: MA Experiment 108569 PARAMETER Experiment Name: At_0.001%_MeJA__cDNA_P Parameter: Tissue Value: Aerial
  misc_feature: MA Experiment 108569 PARAMETER Experiment Name: At_0.001%_MeJA__cDNA_P Parameter: Treatment Value: 0.001% MeJA vs. No Treatment
  misc_feature: MA Experiment ID: 108572 Result: Up-regulated in Transcription
  misc_feature: MA Experiment 108572 PARAMETER Experiment Name: At_Drought_cDNA_P Parameter: Timepoint (hr) Value: 1
  misc_feature: MA Experiment 108572 PARAMETER Experiment Name: At_Drought_cDNA_P Parameter: Tissue Value: Aerial
  misc_feature: MA Experiment 108572 PARAMETER Experiment Name: At_Drought_cDNA_P Parameter: Treatment Value: Drought vs. No Drought
  misc_feature: MA Experiment ID: 108574 Result: Up-regulated in Transcription
  misc_feature: MA Experiment 108574 PARAMETER Experiment Name: At_Wounding__cDNA_P Parameter: Timepoint (hr) Value: 1
  misc_feature: MA Experiment 108574 PARAMETER Experiment Name: At_Wounding__cDNA_P Parameter: Tissue Value: Aerial
  misc_feature: MA Experiment 108574 PARAMETER Experiment Name: At_Wounding__cDNA_P Parameter: Treatment Value: Wounding vs. No Wounding
  misc_feature: MA Experiment ID: 108576 Result: Up-regulated in Transcription
  misc_feature: MA Experiment 108576 PARAMETER Experiment Name: At_42deg_Heat_cDNA_P Parameter: Temperature (deg C) Value: 42 vs. 22
  misc_feature: MA Experiment 108576 PARAMETER Experiment Name: At_42deg_Heat_cDNA_P Parameter: Timepoint (hr) Value: 1
  misc_feature: MA Experiment 108576 PARAMETER Experiment Name: At_42deg_Heat_cDNA_P Parameter: Tissue Value: Aerial
  misc_feature: MA Experiment ID: 108577 Result: Up-regulated in Transcription
  misc_feature: MA Experiment 108577 PARAMETER Experiment Name: At_42deg_Heat_cDNA_P Parameter: Temperature (deg C) Value: 42 vs. 22
  misc_feature: MA Experiment 108577 PARAMETER Experiment Name: At_42deg_Heat_cDNA_P Parameter: Timepoint (hr) Value: 6
  misc_feature: MA Experiment 108577 PARAMETER Experiment Name: At_42deg_Heat_cDNA_P Parameter: Tissue Value: Aerial
  misc_feature: MA Experiment ID: 108594 Result: Down-regulated in Transcription
  misc_feature: MA Experiment 108594 PARAMETER Experiment Name: At_Ler-rhl_Root_cDNA_P Parameter: Plant Line Value: null
  misc_feature: MA Experiment ID: 108595 Result: Up-regulated in Transcription
  misc_feature: MA Experiment 108595 PARAMETER Experiment Name: At_Ler-pi_Ovule_cDNA_P Parameter: Plant Line Value: null
  misc_feature: MA Experiment ID: 108608 Result: Up-regulated in Transcription
  misc_feature: MA Experiment 108608 PARAMETER Experiment Name: At_100uM_ABA_cDNA_P Parameter: Timepoint (hr) Value: 1
  misc_feature: MA Experiment 108608 PARAMETER Experiment Name: At_100uM_ABA_cDNA_P Parameter: Tissue Value: Aerial
  misc_feature: MA Experiment 108608 PARAMETER Experiment Name: At_100uM_ABA_cDNA_P Parameter: Treatment Value: 100uM ABA vs. No Treatment
  misc_feature: MA Experiment ID: 108609 Result: Up-regulated in Transcription
  misc_feature: MA Experiment 108609 PARAMETER Experiment Name: At_100uM_ABA_cDNA_P Parameter: Timepoint (hr) Value: 24
  misc_feature: MA Experiment 108609 PARAMETER Experiment Name: At_100uM_ABA_cDNA_P Parameter: Tissue Value: Aerial
  misc_feature: MA Experiment 108609 PARAMETER Experiment Name: At_100uM_ABA_cDNA_P Parameter: Treatment Value: 100uM ABA vs. No Treatment
  misc_feature: MA Experiment ID: 108668 Result: Up-regulated in Transcription
  misc_feature: MA Experiment 108668 PARAMETER Experiment Name: At_2mM_SA_cDNA_P Parameter: Plant Line Value: WS
  misc_feature: MA Experiment 108668 PARAMETER Experiment Name: At_2mM_SA_cDNA_P Parameter: Timepoint (hr) Value: 6
  misc_feature: MA Experiment 108668 PARAMETER Experiment Name: At_2mM_SA_cDNA_P Parameter: Treatment Value: 2mM SA vs. No Treatment
  misc_feature: MA Experiment ID: 20000069 Result: Down-regulated in Transcription
  misc_feature: MA Experiment 20000069 PARAMETER Experiment Name: At_100uM_ABA_Mutants_cDNA_P Parameter: Plant Line Value: CS23
  misc_feature: MA Experiment 20000069 PARAMETER Experiment Name: At_100uM_ABA_Mutants_cDNA_P Parameter: Timepoint (hr) Value: 6
  misc_feature: MA Experiment 20000069 PARAMETER Experiment Name: At_100uM_ABA_Mutants_cDNA_P Parameter: Tissue Value: Aerial
  misc_feature: MA Experiment 20000069 PARAMETER Experiment Name: At_100uM_ABA_Mutants_cDNA_P Parameter: Treatment Value: 100uM ABA vs. No Treatment
  misc_feature: MA Experiment ID: 20000070 Result: Down-regulated in Transcription
  misc_feature: MA Experiment 20000070 PARAMETER Experiment Name: At_100uM_ABA_Mutants_cDNA_P Parameter: Plant Line Value: CS24
  misc_feature: MA Experiment 20000070 PARAMETER Experiment Name: At_100uM_ABA_Mutants_cDNA_P Parameter: Timepoint (hr) Value: 6
  misc_feature: MA Experiment 20000070 PARAMETER Experiment Name: At_100uM_ABA_Mutants_cDNA_P Parameter: Tissue Value: Aerial
  misc_feature: MA Experiment 20000070 PARAMETER Experiment Name: At_100uM_ABA_Mutants_cDNA_P Parameter: Treatment Value: 100uM ABA vs. No Treatment
  misc_feature: MA Experiment ID: 20000071 Result: Down-regulated in Transcription
  misc_feature: MA Experiment 20000071 PARAMETER Experiment Name: At_100uM_ABA_Mutants_cDNA_P Parameter: Plant Line Value: CS8104
  misc_feature: MA Experiment 20000071 PARAMETER Experiment Name: At_100uM_ABA_Mutants_cDNA_P Parameter: Timepoint (hr) Value: 6
  misc_feature: MA Experiment 20000071 PARAMETER Experiment Name: At_100uM_ABA_Mutants_cDNA_P Parameter: Tissue Value: Aerial
  misc_feature: MA Experiment 20000071 PARAMETER Experiment Name: At_100uM_ABA_Mutants_cDNA_P Parameter: Treatment Value: 100uM ABA vs. No Treatment
  misc_feature: MA Experiment ID: 20000072 Result: Down-regulated in Transcription
  misc_feature: MA Experiment 20000072 PARAMETER Experiment Name: At_100uM_ABA_Mutants_cDNA_P Parameter: Plant Line Value: CS8105
  misc_feature: MA Experiment 20000072 PARAMETER Experiment Name: At_100uM_ABA_Mutants_cDNA_P Parameter: Timepoint (hr) Value: 6
  misc_feature: MA Experiment 20000072 PARAMETER Experiment Name: At_100uM_ABA_Mutants_cDNA_P Parameter: Tissue Value: Aerial
  misc_feature: MA Experiment 20000072 PARAMETER Experiment Name: At_100uM_ABA_Mutants_cDNA_P Parameter: Treatment Value: 100uM ABA vs. No Treatment
  misc_feature: MA Experiment ID: 20000090 Result: Down-regulated in Transcription
  misc_feature: MA Experiment ID: 20000093 Result: Up-regulated in Transcription
  misc_feature: MA Experiment 20000093 PARAMETER Experiment Name: At_42deg_Heat_cDNA_P Parameter: Temperature (deg C) Value: 42 vs. 22
  misc_feature: MA Experiment 20000093 PARAMETER Experiment Name: At_42deg_Heat_cDNA_P Parameter: Timepoint (hr) Value: 0.5
  misc_feature: MA Experiment 20000093 PARAMETER Experiment Name: At_42deg_Heat_cDNA_P Parameter: Tissue Value: Aerial
  misc_feature: MA Experiment ID: 20000111 Result: Up-regulated in Transcription
  misc_feature: MA Experiment 20000111 PARAMETER Experiment Name: At_42deg_Heat_cDNA_P Parameter: Temperature (deg C) Value: 42 vs. 22
  misc_feature: MA Experiment 20000111 PARAMETER Experiment Name: At_42deg_Heat_cDNA_P Parameter: Timepoint (hr) Value: 6
  misc_feature: MA Experiment 20000111 PARAMETER Experiment Name: At_42deg_Heat_cDNA_P Parameter: Tissue Value: Aerial
  misc_feature: MA Experiment ID: 20000112 Result: Up-regulated in Transcription
  misc_feature: MA Experiment 20000112 PARAMETER Experiment Name: At_42deg_Heat_cDNA_P Parameter: Temperature (deg C) Value: 42 vs. 22
  misc_feature: MA Experiment 20000112 PARAMETER Experiment Name: At_42deg_Heat_cDNA_P Parameter: Timepoint (hr) Value: 2
  misc_feature: MA Experiment 20000112 PARAMETER Experiment Name: At_42deg_Heat_cDNA_P Parameter: Tissue Value: Aerial
  misc_feature: MA Experiment ID: 20000117 Result: Down-regulated in Transcription
  misc_feature: MA Experiment 20000117 PARAMETER Experiment Name: At_100uM_ABA_Mutants_cDNA_P Parameter: Plant Line Value: Columbia
  misc_feature: MA Experiment 20000117 PARAMETER Experiment Name: At_100uM_ABA_Mutants_cDNA_P Parameter: Timepoint (hr) Value: 6
  misc_feature: MA Experiment 20000117 PARAMETER Experiment Name: At_100uM_ABA_Mutants_cDNA_P Parameter: Tissue Value: Aerial
  misc_feature: MA Experiment 20000117 PARAMETER Experiment Name: At_100uM_ABA_Mutants_cDNA_P Parameter: Treatment Value: 100uM ABA vs. No Treatment
  misc_feature: MA Experiment ID: 20000166 Result: Up-regulated in Transcription
  misc_feature: MA Experiment 20000166 PARAMETER Experiment Name: At_100uM_ABA_P Parameter: Age (day) Value: 14
  misc_feature: MA Experiment 20000166 PARAMETER Experiment Name: At_100uM_ABA_P Parameter: Organism Value: A. thaliana
  misc_feature: MA Experiment 20000166 PARAMETER Experiment Name: At_100uM_ABA_P Parameter: Plant Line Value: WS
  misc_feature: MA Experiment 20000166 PARAMETER Experiment Name: At_100uM_ABA_P Parameter: Timepoint (hr) Value: 1
  misc_feature: MA Experiment 20000166 PARAMETER Experiment Name: At_100uM_ABA_P Parameter: Tissue Value: Aerial
  misc_feature: MA Experiment 20000166 PARAMETER Experiment Name: At_100uM_ABA_P Parameter: Treatment Value: 100uM ABA vs. No Treatment
  misc_feature: MA Experiment ID: 20000171 Result: Up-regulated in Transcription
  misc_feature: MA Experiment 20000171 PARAMETER Experiment Name: At_42deg_Heat_P Parameter: Age (day) Value: 14
  misc_feature: MA Experiment 20000171 PARAMETER Experiment Name: At_42deg_Heat_P Parameter: Organism Value: A. thaliana
  misc_feature: MA Experiment 20000171 PARAMETER Experiment Name: At_42deg_Heat_P Parameter: Plant Line Value: WS
  misc_feature: MA Experiment 20000171 PARAMETER Experiment Name: At_42deg_Heat_P Parameter: Temperature (deg C) Value: 42 vs. 22
  misc_feature: MA Experiment 20000171 PARAMETER Experiment Name: At_42deg_Heat_P Parameter: Timepoint (hr) Value: 1
  misc_feature: MA Experiment 20000171 PARAMETER Experiment Name: At_42deg_Heat_P Parameter: Tissue Value: Aerial
  misc_feature: MA Experiment ID: 20000173 Result: Up-regulated in Transcription
  misc_feature: MA Experiment 20000173 PARAMETER Experiment Name: At_42deg_Heat_P Parameter: Age (day) Value: 14
  misc_feature: MA Experiment 20000173 PARAMETER Experiment Name: At_42deg_Heat_P Parameter: Organism Value: A. thaliana
  misc_feature: MA Experiment 20000173 PARAMETER Experiment Name: At_42deg_Heat_P Parameter: Plant Line Value: WS
  misc_feature: MA Experiment 20000173 PARAMETER Experiment Name: At_42deg_Heat_P Parameter: Temperature (deg C) Value: 42 vs. 22
  misc_feature: MA Experiment 20000173 PARAMETER Experiment Name: At_42deg_Heat_P Parameter: Timepoint (hr) Value: 6
  misc_feature: MA Experiment 20000173 PARAMETER Experiment Name: At_42deg_Heat_P Parameter: Tissue Value: Aerial
  misc_feature: MA Experiment ID: 20000182 Result: Up-regulated in Transcription
  misc_feature: MA Experiment 20000182 PARAMETER Experiment Name: At_2mM_SA_P Parameter: Age (day) Value: 14
  misc_feature: MA Experiment 20000182 PARAMETER Experiment Name: At_2mM_SA_P Parameter: Organism Value: A. thaliana
  misc_feature: MA Experiment 20000182 PARAMETER Experiment Name: At_2mM_SA_P Parameter: Plant Line Value: WS
  misc_feature: MA Experiment 20000182 PARAMETER Experiment Name: At_2mM_SA_P Parameter: Timepoint (hr) Value: 6
  misc_feature: MA Experiment 20000182 PARAMETER Experiment Name: At_2mM_SA_P Parameter: Tissue Value: Aerial
  misc_feature: MA Experiment 20000182 PARAMETER Experiment Name: At_2mM_SA_P Parameter: Treatment Value: 2mM SA vs. No Treatment
  misc_feature: MA Experiment ID: 20000211 Result: Up-regulated in Transcription
  misc_feature: MA Experiment 20000211 PARAMETER Experiment Name: At_0.001percent_MeJA__P Parameter: Age (day) Value: 14
  misc_feature: MA Experiment 20000211 PARAMETER Experiment Name: At_0.001percent_MeJA__P Parameter: Organism Value: A. thaliana
  misc_feature: MA Experiment 20000211 PARAMETER Experiment Name: At_0.001percent_MeJA__P Parameter: Plant Line Value: WS
  misc_feature: MA Experiment 20000211 PARAMETER Experiment Name: At_0.001percent_MeJA__P Parameter: Timepoint (hr) Value: 1
  misc_feature: MA Experiment 20000211 PARAMETER Experiment Name: At_0.001percent_MeJA__P Parameter: Tissue Value: Aerial
  misc_feature: MA Experiment 20000211 PARAMETER Experiment Name: At_0.001percent_MeJA__P Parameter: Treatment Value: 0.001percent MeJA vs. No Treatment
  misc_feature: MA Experiment ID: 20000227 Result: Down-regulated in Transcription
  misc_feature: MA Experiment 20000227 PARAMETER Experiment Name: At_Root-Tips-vs-Tops_P Parameter: Tissue Value: Root Tips vs. Root Tops
  misc_feature: MA Experiment ID: 20000234 Result: Down-regulated in Transcription
  misc_feature: MA Experiment 20000234 PARAMETER Experiment Name: At_Siliques_P Parameter: Age (day) Value: 21
  misc_feature: MA Experiment 20000234 PARAMETER Experiment Name: At_Siliques_P Parameter: Organism Value: A. thaliana
  misc_feature: MA Experiment 20000234 PARAMETER Experiment Name: At_Siliques_P Parameter: Plant Line Value: WS
  misc_feature: MA Experiment 20000234 PARAMETER Experiment Name: At_Siliques_P Parameter: Tissue Value: Less Than 5mm Siliques vs. Whole Plant
  misc_feature: MA Experiment ID: 20000235 Result: Down-regulated in Transcription
  misc_feature: MA Experiment 20000235 PARAMETER Experiment Name: At_Siliques_P Parameter: Age (day) Value: 21
  misc_feature: MA Experiment 20000235 PARAMETER Experiment Name: At_Siliques_P Parameter: Organism Value: A. thaliana
  misc_feature: MA Experiment 20000235 PARAMETER Experiment Name: At_Siliques_P Parameter: Plant Line Value: WS
  misc_feature: MA Experiment 20000235 PARAMETER Experiment Name: At_Siliques_P Parameter: Tissue Value: 5-10mm Siliques vs. Whole Plant
  misc_feature: MA Experiment ID: 20000264 Result: Down-regulated in Transcription
  misc_feature: MA Experiment 20000264 PARAMETER Experiment Name: At_Open_Flower_P Parameter: Age (day) Value: 21
  misc_feature: MA Experiment 20000264 PARAMETER Experiment Name: At_Open_Flower_P Parameter: Plant Line Value: WS
  misc_feature: MA Experiment 20000264 PARAMETER Experiment Name: At_Open_Flower_P Parameter: Tissue Value: Open Flower vs. Whole Plant
  misc_feature: MA Experiment ID: 20000286 Result: Down-regulated in Transcription
  misc_feature: MA Experiment 20000286 PARAMETER Experiment Name: At_Open_Flower_P Parameter: Age (day) Value: 21
  misc_feature: MA Experiment 20000286 PARAMETER Experiment Name: At_Open_Flower_P Parameter: Plant Line Value: WS
  misc_feature: MA Experiment 20000286 PARAMETER Experiment Name: At_Open_Flower_P Parameter: Tissue Value: Half Open vs. Whole Plant
  misc_feature: MA Experiment ID: 20000439 Result: Up-regulated in Transcription
  misc_feature: MA Experiment 20000439 PARAMETER Experiment Name: At_Roots__P Parameter: Age (day) Value: 14 vs. 21
  misc_feature: MA Experiment 20000439 PARAMETER Experiment Name: At_Roots__P Parameter: Organism Value: A. thaliana
  misc_feature: MA Experiment 20000439 PARAMETER Experiment Name: At_Roots__P Parameter: Tissue Value: Roots vs. Whole Plant
  misc_feature: MA Experiment ID: 20000441 Result: Up-regulated in Transcription
  misc_feature: MA Experiment 20000441 PARAMETER Experiment Name: At_1uM_BR-BRZ__P Parameter: Tissue Value: Shoot Apices
  misc_feature: MA Experiment 20000441 PARAMETER Experiment Name: At_1uM_BR-BRZ__P Parameter: Treatment Value: 1uM BR vs. No Treatment
  misc_feature: MA Experiment ID: 20000443 Result: Up-regulated in Transcription
  misc_feature: MA Experiment 20000443 PARAMETER Experiment Name: At_1uM_BR-BRZ__P Parameter: Tissue Value: Shoot Apices
  misc_feature: MA Experiment 20000443 PARAMETER Experiment Name: At_1uM_BR-BRZ__P Parameter: Treatment Value: 1uM BRZ vs. No Treatment
  misc_feature: MA Experiment ID: 20000453 Result: Up-regulated in Transcription
  misc_feature: MA Experiment 20000453 PARAMETER Experiment Name: At_100uM_ABA_P Parameter: Age (day) Value: 15
  misc_feature: MA Experiment 20000453 PARAMETER Experiment Name: At_100uM_ABA_P Parameter: Organism Value: A. thaliana
  misc_feature: MA Experiment 20000453 PARAMETER Experiment Name: At_100uM_ABA_P Parameter: Plant Line Value: WS
  misc_feature: MA Experiment 20000453 PARAMETER Experiment Name: At_100uM_ABA_P Parameter: Timepoint (hr) Value: 24
  misc_feature: MA Experiment 20000453 PARAMETER Experiment Name: At_100uM_ABA_P Parameter: Tissue Value: Aerial
  misc_feature: MA Experiment 20000453 PARAMETER Experiment Name: At_100uM_ABA_P Parameter: Treatment Value: 100uM ABA vs. No Treatment
  misc_feature: MA Experiment ID: 20000495 Result: Up-regulated in Transcription
  misc_feature: MA Experiment 20000495 PARAMETER Experiment Name: At_Guard_Cells_P Parameter: Harvest Date Value: 8/2/2002
  misc_feature: MA Experiment 20000495 PARAMETER Experiment Name: At_Guard_Cells_P Parameter: Organism Value: A. thaliana
  misc_feature: MA Experiment 20000495 PARAMETER Experiment Name: At_Guard_Cells_P Parameter: Tissue Value: Guard Cells vs. Leaves
  misc_feature: MA Experiment ID: 20000794 Result: Down-regulated in Transcription
  misc_feature: MA Experiment 20000794 PARAMETER Experiment Name: At_Petals_P Parameter: Age (day) Value: 23-25 days
  misc_feature: MA Experiment 20000794 PARAMETER Experiment Name: At_Petals_P Parameter: Plant Line Value: WS
  misc_feature: MA Experiment 20000794 PARAMETER Experiment Name: At_Petals_P Parameter: Tissue Value: Petals vs. Whole plant
  misc_feature: MA Experiment ID: 20001248 Result: Down-regulated in Transcription
  misc_feature: MA Experiment 20001248 PARAMETER Experiment Name: At_Far-red-induction_P Parameter: Age (day) Value: 7
  misc_feature: MA Experiment 20001248 PARAMETER Experiment Name: At_Far-red-induction_P Parameter: Light Value: Far-red vs. White
  misc_feature: MA Experiment 20001248 PARAMETER Experiment Name: At_Far-red-induction_P Parameter: Organism Value: A. thaliana
  misc_feature: MA Experiment 20001248 PARAMETER Experiment Name: At_Far-red-induction_P Parameter: Plant Line Value: Columbia
  misc_feature: MA Experiment 20001248 PARAMETER Experiment Name: At_Far-red-induction_P Parameter: Timepoint (hr) Value: 4
  misc_feature: MA Experiment 20001248 PARAMETER Experiment Name: At_Far-red-induction_P Parameter: Tissue Value: Whole Plant
  misc_feature: MA Experiment ID: 20001451 Result: Up-regulated in Transcription
  misc_feature: MA Experiment 20001451 PARAMETER Experiment Name: At_Far-red-induction_P Parameter: Age (day) Value: 7
  misc_feature: MA Experiment 20001451 PARAMETER Experiment Name: At_Far-red-induction_P Parameter: Light Value: Far-red vs. White
  misc_feature: MA Experiment 20001451 PARAMETER Experiment Name: At_Far-red-induction_P Parameter: Organism Value: A. thaliana
  misc_feature: MA Experiment 20001451 PARAMETER Experiment Name: At_Far-red-induction_P Parameter: Plant Line Value: Columbia
  misc_feature: MA Experiment 20001451 PARAMETER Experiment Name: At_Far-red-induction_P Parameter: Timepoint (hr) Value: 24
  misc_feature: MA Experiment 20001451 PARAMETER Experiment Name: At_Far-red-induction_P Parameter: Tissue Value: Whole Plant
  misc_feature: MA Experiment ID: 20001554 Result: Up-regulated in Transcription
  misc_feature: MA Experiment 20001554 PARAMETER Experiment Name: At_Drought_Soil_Dry_P Parameter: Age (day) Value: 21
  misc_feature: MA Experiment 20001554 PARAMETER Experiment Name: At_Drought_Soil_Dry_P Parameter: Organism Value: A. thaliana
  misc_feature: MA Experiment 20001554 PARAMETER Experiment Name: At_Drought_Soil_Dry_P Parameter: Plant Line Value: WS
  misc_feature: MA Experiment 20001554 PARAMETER Experiment Name: At_Drought_Soil_Dry_P Parameter: Post Timepoint (hr) Value: None
  misc_feature: MA Experiment 20001554 PARAMETER Experiment Name: At_Drought_Soil_Dry_P Parameter: Post-Treatment Value: None
  misc_feature: MA Experiment 20001554 PARAMETER Experiment Name: At_Drought_Soil_Dry_P Parameter: Timepoint (day) Value: 7
  misc_feature: MA Experiment 20001554 PARAMETER Experiment Name: At_Drought_Soil_Dry_P Parameter: Treatment Value: Drought vs. No Drought
  misc_feature: MA Experiment ID: 20001555 Result: Up-regulated in Transcription
  misc_feature: MA Experiment 20001555 PARAMETER Experiment Name: At_Drought_Soil_Dry_P Parameter: Age (day) Value: 24
  misc_feature: MA Experiment 20001555 PARAMETER Experiment Name: At_Drought_Soil_Dry_P Parameter: Organism Value: A. thaliana
  misc_feature: MA Experiment 20001555 PARAMETER Experiment Name: At_Drought_Soil_Dry_P Parameter: Plant Line Value: WS
  misc_feature: MA Experiment 20001555 PARAMETER Experiment Name: At_Drought_Soil_Dry_P Parameter: Post Timepoint (hr) Value: None
  misc_feature: MA Experiment 20001555 PARAMETER Experiment Name: At_Drought_Soil_Dry_P Parameter: Post-Treatment Value: None
  misc_feature: MA Experiment 20001555 PARAMETER Experiment Name: At_Drought_Soil_Dry_P Parameter: Timepoint (day) Value: 10
  misc_feature: MA Experiment 20001555 PARAMETER Experiment Name: At_Drought_Soil_Dry_P Parameter: Treatment Value: Drought vs. No Drought
  misc_feature: MA Experiment ID: 20001558 Result: Down-regulated in Transcription
  misc_feature: MA Experiment 20001558 PARAMETER Experiment Name: At_Drought_Soil_Dry_P Parameter: Age (day) Value: 27
  misc_feature: MA Experiment 20001558 PARAMETER Experiment Name: At_Drought_Soil_Dry_P Parameter: Organism Value: A. thaliana
  misc_feature: MA Experiment 20001558 PARAMETER Experiment Name: At_Drought_Soil_Dry_P Parameter: Plant Line Value: WS
  misc_feature: MA Experiment 20001558 PARAMETER Experiment Name: At_Drought_Soil_Dry_P Parameter: Post Timepoint (hr) Value: 6
  misc_feature: MA Experiment 20001558 PARAMETER Experiment Name: At_Drought_Soil_Dry_P Parameter: Post-Treatment Value: Re-Water vs. No Drought
  misc_feature: MA Experiment 20001558 PARAMETER Experiment Name: At_Drought_Soil_Dry_P Parameter: Timepoint (day) Value: 13
  misc_feature: MA Experiment 20001558 PARAMETER Experiment Name: At_Drought_Soil_Dry_P Parameter: Treatment Value: Drought vs. No Drought
  misc_feature: MA Experiment ID: 20001907 Result: Down-regulated in Transcription
  misc_feature: MA Experiment 20001907 PARAMETER Experiment Name: At_Drought_Reproduction_P Parameter: Age (day) Value: 37
  misc_feature: MA Experiment 20001907 PARAMETER Experiment Name: At_Drought_Reproduction_P Parameter: Organism Value: A. thaliana
  misc_feature: MA Experiment 20001907 PARAMETER Experiment Name: At_Drought_Reproduction_P Parameter: Plant Line Value: WS
  misc_feature: MA Experiment 20001907 PARAMETER Experiment Name: At_Drought_Reproduction_P Parameter: Timepoint (day) Value: 7
  misc_feature: MA Experiment 20001907 PARAMETER Experiment Name: At_Drought_Reproduction_P Parameter: Tissue Value: Siliques
  misc_feature: MA Experiment 20001907 PARAMETER Experiment Name: At_Drought_Reproduction_P Parameter: Treatment Value: Drought vs. No Drought
ctcatcagcaaacacaaacacacgactagataaactctaaatcctcacagcagatcacgtgctaatcacatggctccggggcttactcaaaccgctgatgctatgtccaccgtgacgataacaaaaccgtcactgccatcagtccaagacagcgatcgagcttacgtgacgtttcttgctggaaacggtgattacgtgaaaggagtcgttggtttagccaaagggttaaggaaagtcaaatcggcttatccactcgtagtagcgatgttacccgacgtcccggaggaacaccgtcgtatacttgtggatcaaggatgcatcgtccgtgaaatcgaacccgtttacccacccgagaaccaaactcagttcgccatggcttattacgtcatcaactactctaaactccgtatctggaagtttgtggagtatagtaaaatgatatatttagatggagacattcaagtttacgaaaacatcgatcacttgtttgacctaccagatggctatttgtacgcggtgatggattgtttctgtgagaaaacatggagtcacacgccgcaatacaagatcagatattgccaacaatgccccgacaaagtccagtggccaaaagcggagcttggagagccaccggctctttacttcaacgccggaatgttcttgtacgagcctaacctcgagacttacgaggatctactacgaacacttaaaatcactcctccgactcctttcgctgaacaggattttttgaacatgtactttaagaaaatctacaagccgattcctttagtgtacaatctcgtccttgcgatgttatggcgtcacccagaaaatgtagagcttggaaaagtcaaggtggttcactactgtgcagcgggttcgaagccgtggagatacacagggaaagaagcgaacatggagagggaagatataaaaatgttagtgaaaaaatggtgggacatttacgacgacgaatccttggattacaagaaacctgttaccgttgtggacacagaggtcgatctcgtgaatctgaagccgttcatcaccgctcttactgaagctggccggctcaactacgtgaccgcaccgtccgctgcttgaatgttgccaggagttaaaattgtcggtggatcaggtagttatttttctttccggtcagtaagaggttggggattatgtgtcgggtcgacaaccacacatactgtctctggttccaatgctttggacgttgacatgtgatttgctttacttttttgtctataatgtgtgttatcctcaattttagcgtctatcttcgaatatcaaacttgagtgacaaaataaatattccaaataacaggtcttcttcac

SEQ ID NO: 41852 - protein, 344 aa, Arabidopsis thaliana
  peptide (1)..(344): Ceres Seq. ID no. 13488888
  misc_feature (12)..(344): Homolog of NCBI NO: 18874402 NR Description: galactinol synthase [Cucumis melo]
  misc_feature (12)..(344): Homolog of NCBI NO: 29569824 NR Description: galactinol synthase [Cucumis sativus]
  misc_feature (17)..(344): Homolog of NCBI NO: 20340247 NR Description: galactinol synthase-like protein [Thellungiella
  misc_feature (17)..(344): Homolog of NCBI NO: 15223567 NR Description: galactinol synthase, putative [Arabidopsis
  misc_feature (1)..(344): Homolog of NCBI NO: 5541885 NR Description: putative galactinol synthase [Pisum sativum]
  misc_feature (2)..(344): Homolog of NCBI NO: 4588376 NR Description: galactinol synthase [Brassica napus]
  misc_feature (1)..(344): Homolog of NCBI NO: 15226522 NR Description: galactinol synthase, putative [Arabidopsis
MAPGLTQTADAMSTVTITKPSLPSVQDSDRAYVTFLAGNGDYVKGVVGLAKGLRKVKSAYPLVVAMLPDVPEEHRRILVDQGCIVREIEPVYPPENQTQFAMAYYVINYSKLRIWKFVEYSKMIYLDGDIQVYENIDHLFDLPDGYLYAVMDCFCEKTWSHTPQYKIRYCQQCPDKVQWPKAELGEPPALYFNAGMFLYEPNLETYEDLLRTLKITPPTPFAEQDFLNMYFKKIYKPIPLVYNLVLAMLWRHPENVELGKVKVVHYCAAGSKPWRYTGKEANMEREDIKMLVKKWWDIYDDESLDYKKPVTVVDTEVDLVNLKPFITALTEAGRLNYVTAPSAA

SEQ ID NO: 41853 - protein, 333 aa, Arabidopsis thaliana
  peptide (1)..(333): Ceres Seq. ID no. 13488889
  misc_feature (1)..(333): Homolog of NCBI NO: 18874402 NR Description: galactinol synthase [Cucumis melo]
  misc_feature (1)..(333): Homolog of NCBI NO: 29569824 NR Description: galactinol synthase [Cucumis sativus]
  misc_feature (6)..(333): Homolog of NCBI NO: 20340247 NR Description: galactinol synthase-like protein [Thellungiella
  misc_feature (6)..(333): Homolog of NCBI NO: 15223567 NR Description: galactinol synthase, putative [Arabidopsis
  misc_feature (1)..(333): Homolog of NCBI NO: 5541885 NR Description: putative galactinol synthase [Pisum sativum]
  misc_feature (1)..(333): Homolog of NCBI NO: 4588376 NR Description: galactinol synthase [Brassica napus]
  misc_feature (1)..(333): Homolog of NCBI NO: 15226522 NR Description: galactinol synthase, putative [Arabidopsis
MSTVTITKPSLPSVQDSDRAYVTFLAGNGDYVKGVVGLAKGLRKVKSAYPLVVAMLPDVPEEHRRILVDQGCIVREIEPVYPPENQTQFAMAYYVINYSKLRIWKFVEYSKMIYLDGDIQVYENIDHLFDLPDGYLYAVMDCFCEKTWSHTPQYKIRYCQQCPDKVQWPKAELGEPPALYFNAGMFLYEPNLETYEDLLRTLKITPPTPFAEQDFLNMYFKKIYKPIPLVYNLVLAMLWRHPENVELGKVKVVHYCAAGSKPWRYTGKEANMEREDIKMLVKKWWDIYDDESLDYKKPVTVVDTEVDLVNLKPFITALTEAGRLNYVTAPSAA

SEQ ID NO: 41854 - protein, 279 aa, Arabidopsis thaliana
  peptide (1)..(279): Ceres Seq. ID no. 13488890
  misc_feature (1)..(279): Homolog of NCBI NO: 18874402 NR Description: galactinol synthase [Cucumis melo]
  misc_feature (1)..(279): Homolog of NCBI NO: 29569824 NR Description: galactinol synthase [Cucumis sativus]
  misc_feature (1)..(279): Homolog of NCBI NO: 20340247 NR Description: galactinol synthase-like protein [Thellungiella
  misc_feature (1)..(279): Homolog of NCBI NO: 15223567 NR Description: galactinol synthase, putative [Arabidopsis
  misc_feature (1)..(279): Homolog of NCBI NO: 5541885 NR Description: putative galactinol synthase [Pisum sativum]
  misc_feature (1)..(279): Homolog of NCBI NO: 4588376 NR Description: galactinol synthase [Brassica napus]
  misc_feature (1)..(279): Homolog of NCBI NO: 15226522 NR Description: galactinol synthase, putative [Arabidopsis
MLPDVPEEHRRILVDQGCIVREIEPVYPPENQTQFAMAYYVINYSKLRIWKFVEYSKMIYLDGDIQVYENIDHLFDLPDGYLYAVMDCFCEKTWSHTPQYKIRYCQQCPDKVQWPKAELGEPPALYFNAGMFLYEPNLETYEDLLRTLKITPPTPFAEQDFLNMYFKKIYKPIPLVYNLVLAMLWRHPENVELGKVKVVHYCAAGSKPWRYTGKEANMEREDIKMLVKKWWDIYDDESLDYKKPVTVVDTEVDLVNLKPFITALTEAGRLNYVTAPSAA

SEQ ID NO: 41855 - DNA, 1423 bp, Arabidopsis thaliana
  misc_feature (1)..(1423): Ceres Seq. ID no. 13495814
  misc_feature: MA Experiment ID: 108433 Result: Down-regulated in Transcription
  misc_feature: MA Experiment 108433 PARAMETER Experiment Name: At_rhl_Mutant2_cDNA_P Parameter: Age (day) Value: 7
  misc_feature: MA Experiment 108433 PARAMETER Experiment Name: At_rhl_Mutant2_cDNA_P Parameter: Organism Value: A. thaliana
  misc_feature: MA Experiment 108433 PARAMETER Experiment Name: At_rhl_Mutant2_cDNA_P Parameter: Plant Line Value: rhl Mutant vs. wt landsburg
  misc_feature: MA Experiment 108433 PARAMETER Experiment Name: At_rhl_Mutant2_cDNA_P Parameter: Tissue Value: Roots
  misc_feature: MA Experiment ID: 108462 Result: Down-regulated in Transcription
  misc_feature: MA Experiment 108462 PARAMETER Experiment Name: At_Germinating_Seeds_cDNA_P Parameter: Age (day) Value: 2 vs. 0
  misc_feature: MA Experiment 108462 PARAMETER Experiment Name: At_Germinating_Seeds_cDNA_P Parameter: Tissue Value: Germinating Seeds
  misc_feature: MA Experiment ID: 108463 Result: Down-regulated in Transcription
  misc_feature: MA Experiment 108463 PARAMETER Experiment Name: At_Germinating_Seeds_cDNA_P Parameter: Age (day) Value: 3 vs. 0
  misc_feature: MA Experiment 108463 PARAMETER Experiment Name: At_Germinating_Seeds_cDNA_P Parameter: Tissue Value: Germinating Seeds
  misc_feature: MA Experiment ID: 108464 Result: Down-regulated in Transcription
  misc_feature: MA Experiment 108464 PARAMETER Experiment Name: At_Germinating_Seeds_cDNA_P Parameter: Age (day) Value: 4 vs. 0
  misc_feature: MA Experiment 108464 PARAMETER Experiment Name: At_Germinating_Seeds_cDNA_P Parameter: Tissue Value: Germinating Seeds
  misc_feature: MA Experiment ID: 108488 Result: Down-regulated in Transcription
  misc_feature: MA Experiment ID: 108572 Result: Down-regulated in Transcription
  misc_feature: MA Experiment 108572 PARAMETER Experiment Name: At_Drought_cDNA_P Parameter: Timepoint (hr) Value: 1
  misc_feature: MA Experiment 108572 PARAMETER Experiment Name: At_Drought_cDNA_P Parameter: Tissue Value: Aerial
  misc_feature: MA Experiment 108572 PARAMETER Experiment Name: At_Drought_cDNA_P Parameter: Treatment Value: Drought vs. No Drought
  misc_feature: MA Experiment ID: 20000113 Result: Down-regulated in Transcription
  misc_feature: MA Experiment 20000113 PARAMETER Experiment Name: At_42deg_Heat_cDNA_P Parameter: Temperature (deg C) Value: 42 vs. 22
  misc_feature: MA Experiment 20000113 PARAMETER Experiment Name: At_42deg_Heat_cDNA_P Parameter: Timepoint (hr) Value: 8
  misc_feature: MA Experiment 20000113 PARAMETER Experiment Name: At_42deg_Heat_cDNA_P Parameter: Tissue Value: Aerial
  misc_feature: MA Experiment ID: 20000173 Result: Down-regulated in Transcription
  misc_feature: MA Experiment 20000173 PARAMETER Experiment Name: At_42deg_Heat_P Parameter: Age (day) Value: 14
  misc_feature: MA Experiment 20000173 PARAMETER Experiment Name: At_42deg_Heat_P Parameter: Organism Value: A. thaliana
  misc_feature: MA Experiment 20000173 PARAMETER Experiment Name: At_42deg_Heat_P Parameter: Plant Line Value: WS
  misc_feature: MA Experiment 20000173 PARAMETER Experiment Name: At_42deg_Heat_P Parameter: Temperature (deg C) Value: 42 vs. 22
  misc_feature: MA Experiment 20000173 PARAMETER Experiment Name: At_42deg_Heat_P Parameter: Timepoint (hr) Value: 6
  misc_feature: MA Experiment 20000173 PARAMETER Experiment Name: At_42deg_Heat_P Parameter: Tissue Value: Aerial
  misc_feature: MA Experiment ID: 20000180 Result: Down-regulated in Transcription
  misc_feature: MA Experiment 20000180 PARAMETER Experiment Name: At_Germinating_Seeds_P Parameter: Age (hr) Value: 24 vs. 0
  misc_feature: MA Experiment 20000180 PARAMETER Experiment Name: At_Germinating_Seeds_P Parameter: Tissue Value: Germinating Seeds
  misc_feature: MA Experiment ID: 20000439 Result: Up-regulated in Transcription
  misc_feature: MA Experiment 20000439 PARAMETER Experiment Name: At_Roots__P Parameter: Age (day) Value: 14 vs. 21
  misc_feature: MA Experiment 20000439 PARAMETER Experiment Name: At_Roots__P Parameter: Organism Value: A. thaliana
  misc_feature: MA Experiment 20000439 PARAMETER Experiment Name: At_Roots__P Parameter: Tissue Value: Roots vs. Whole Plant
  misc_feature: MA Experiment ID: 20000527 Result: Down-regulated in Transcription
  misc_feature: MA Experiment 20000527 PARAMETER Experiment Name: At_10percent_PEG_P Parameter: Age (day) Value: 20
  misc_feature: MA Experiment 20000527 PARAMETER Experiment Name: At_10percent_PEG_P Parameter: Organism Value: A. thaliana
  misc_feature: MA Experiment 20000527 PARAMETER Experiment Name: At_10percent_PEG_P Parameter: Plant Line Value: WS
  misc_feature: MA Experiment 20000527 PARAMETER Experiment Name: At_10percent_PEG_P Parameter: Timepoint (day) Value: 20
  misc_feature: MA Experiment 20000527 PARAMETER Experiment Name: At_10percent_PEG_P Parameter: Tissue Value: Whole Plant
  misc_feature: MA Experiment 20000527 PARAMETER Experiment Name: At_10percent_PEG_P Parameter: Treatment Value: 10percent PEG vs. No Treatment
aattttctgtctatatatatattaaggatccaaattagggagagaccaaagaggaaattaataaccatcaatccaacaacgaatggagattgaagaagcgagtcgtgaaagtggacatgttgtgtgcggatcatggattcgtcgcccgaagaaagtaaactgggttcttatcgctaaagcttccaaacgccgtggctcatctgtttcttctcctgctctcctcaacatcttctcttttgaccccattactgcttctctttcctcctctcctttggcaacacacacgcttaaggatagtgatggtgatcctgtggctgtttcagtgcaccctggtggggattactttgtttgctcaacctccaaaggtggttgcaagttatttgagcttgtcggaggagcaacaggtattacgatcttagccaaagaactccttcctctccaaaatgctggactacaaaagtgtatggccttcagctttgatgggtctaaattagctgttgggggagtggatggatgtcttagaattatggagtggccaaacctaagtgtaattttggatgagccaaaggcacacaaatccatccgggacatggattttagtcttgactcagagttcttagctacaacatcaactgatggatcagctagaatatggaaagcagaagatggttttcctttgtctactttggaacgtagtggggatgaaaatattgaactgtgccgtttctctaaagacggaacaaaaccttttttgttttgtgctgctcaaagaggtgatacgcctatggtcaatgtttatgacattagtacatggaagaagcttgggttcaagaagctgtcaaggaagactgcatcgacaatggcagtgagcttggacgggaaatatattgctttgggtgggaaagatggagatgtatctgttgctgaagttaagacaatggaaatctaccactacagtaagaggctgcatcttggtcaatccattgcttcacttgagttctgccccagtgaaagggttatgctgacaacttctagcgaatggggagagatggtgaccaaactcactgtaccaaaggagtggaaagagtggcagatatatgcactgctgttttgcttgttcatggcatcagtgatagctgcatacgtattcttcgagaactcagattcgttttggaagttaccaatgggaaaagatcaaaaaagaccaaagattagtctatttggaggttcctcctccacgccttctgaggatcatagtaggtggaacttggacctatagaaagattatgtaactttcctctgctttttcttctttcttccttatcttgttgcagcgtttttttttgtttttttcctttcttctgattttgctctgacaaatacctgttgattaattgatttatttacagacaattactgttgc

SEQ ID NO: 41856 - protein, 398 aa, Arabidopsis thaliana
  peptide (1)..(398): Ceres Seq. ID no. 13495815
  misc_feature (38)..(231): Homolog of NCBI NO: 17473926 NR Description: putative protein transport protein SEC12p
  misc_feature (38)..(317): Homolog of NCBI NO: 322598 NR Description: St12p protein - Arabidopsis thaliana
  misc_feature (44)..(345): Homolog of NCBI NO: 18423177 NR Description: St12p protein [Arabidopsis thaliana]
  misc_feature (38)..(354): Homolog of NCBI NO: 15226281 NR Description: SEC12p protein / St12p protein [Arabidopsis
  misc_feature (38)..(354): Homolog of NCBI NO: 11358859 NR Description: St12p protein [imported] - Arabidopsis thaliana
  misc_feature (44)..(348): Homolog of NCBI NO: 8777388 NR Description: protein transport protein SEC12p-like
  misc_feature (11)..(359): Homolog of NCBI NO: 34897162 NR Description: putative membrane protein
  misc_feature (11)..(394): Homolog of NCBI NO: 34394605 NR Description: transducin / WD-40 repeat protein-like
  misc_feature (128)..(398): Homolog of NCBI NO: 26450470 NR Description: unknown protein [Arabidopsis thaliana]
  misc_feature (1)..(398): Homolog of NCBI NO: 18409509 NR Description: transducin / WD-40 repeat protein family
MEIEEASRESGHVVCGSWIRRPKKVNWVLIAKASKRRGSSVSSPALLNIFSFDPITASLSSSPLATHTLKDSDGDPVAVSVHPGGDYFVCSTSKGGCKLFELVGGATGITILAKELLPLQNAGLQKCMAFSFDGSKLAVGGVDGCLRIMEWPNLSVILDEPKAHKSIRDMDFSLDSEFLATTSTDGSARIWKAEDGFPLSTLERSGDENIELCRFSKDGTKPFLFCAAQRGDTPMVNVYDISTWKKLGFKKLSRKTASTMAVSLDGKYIALGGKDGDVSVAEVKTMEIYHYSKRLHLGQSIASLEFCPSERVMLTTSSEWGEMVTKLTVPKEWKEWQIYALLFCLFMASVIAAYVFFENSDSFWKLPMGKDQKRPKISLFGGSSSTPSEDHSRWNLDL

SEQ ID NO: 41857 - protein, 271 aa, Arabidopsis thaliana
  peptide (1)..(271): Ceres Seq. ID no. 13495816
  misc_feature (1)..(104): Homolog of NCBI NO: 17473926 NR Description: putative protein transport protein SEC12p
  misc_feature (1)..(190): Homolog of NCBI NO: 322598 NR Description: St12p protein - Arabidopsis thaliana
  misc_feature (1)..(218): Homolog of NCBI NO: 18423177 NR Description: St12p protein [Arabidopsis thaliana]
  misc_feature (1)..(227): Homolog of NCBI NO: 15226281 NR Description: SEC12p protein / St12p protein [Arabidopsis
  misc_feature (1)..(227): Homolog of NCBI NO: 11358859 NR Description: St12p protein [imported] - Arabidopsis thaliana
  misc_feature (1)..(221): Homolog of NCBI NO: 8777388 NR Description: protein transport protein SEC12p-like
  misc_feature (1)..(232): Homolog of NCBI NO: 34897162 NR Description: putative membrane protein
  misc_feature (1)..(267): Homolog of NCBI NO: 34394605 NR Description: transducin / WD-40 repeat protein-like
  misc_feature (1)..(271): Homolog of NCBI NO: 26450470 NR Description: unknown protein [Arabidopsis thaliana]
  misc_feature (1)..(271): Homolog of NCBI NO: 18409509 NR Description: transducin / WD-40 repeat protein family
MAFSFDGSKLAVGGVDGCLRIMEWPNLSVILDEPKAHKSIRDMDFSLDSEFLATTSTDGSARIWKAEDGFPLSTLERSGDENIELCRFSKDGTKPFLFCAAQRGDTPMVNVYDISTWKKLGFKKLSRKTASTMAVSLDGKYIALGGKDGDVSVAEVKTMEIYHYSKRLHLGQSIASLEFCPSERVMLTTSSEWGEMVTKLTVPKEWKEWQIYALLFCLFMASVIAAYVFFENSDSFWKLPMGKDQKRPKISLFGGSSSTPSEDHSRWNLDL

SEQ ID NO: 41858 - protein, 250 aa, Arabidopsis thaliana
  peptide (1)..(250): Ceres Seq. ID no. 13495817
  misc_feature (1)..(83): Homolog of NCBI NO: 17473926 NR Description: putative protein transport protein SEC12p
  misc_feature (1)..(169): Homolog of NCBI NO: 322598 NR Description: St12p protein - Arabidopsis thaliana
  misc_feature (1)..(197): Homolog of NCBI NO: 18423177 NR Description: St12p protein [Arabidopsis thaliana]
  misc_feature (1)..(206): Homolog of NCBI NO: 15226281 NR Description: SEC12p protein / St12p protein [Arabidopsis
  misc_feature (1)..(206): Homolog of NCBI NO: 11358859 NR Description: St12p protein [imported] - Arabidopsis thaliana
  misc_feature (1)..(200): Homolog of NCBI NO: 8777388 NR Description: protein transport protein SEC12p-like
  misc_feature (1)..(211): Homolog of NCBI NO: 34897162 NR Description: putative membrane protein
  misc_feature (1)..(246): Homolog of NCBI NO: 34394605 NR Description: transducin / WD-40 repeat protein-like
  misc_feature (1)..(250): Homolog of NCBI NO: 26450470 NR Description: unknown protein [Arabidopsis thaliana]
  misc_feature (1)..(250): Homolog of NCBI NO: 18409509 NR Description: transducin / WD-40 repeat protein family
MEWPNLSVILDEPKAHKSIRDMDFSLDSEFLATTSTDGSARIWKAEDGFPLSTLERSGDENIELCRFSKDGTKPFLFCAAQRGDTPMVNVYDISTWKKLGFKKLSRKTASTMAVSLDGKYIALGGKDGDVSVAEVKTMEIYHYSKRLHLGQSIASLEFCPSERVMLTTSSEWGEMVTKLTVPKEWKEWQIYALLFCLFMASVIAAYVFFENSDSFWKLPMGKDQKRPKISLFGGSSSTPSEDHSRWNLDL

SEQ ID NO: 41859 - DNA, 1089 bp, Arabidopsis thaliana
  misc_feature (1)..(1089): Ceres Seq. ID no. 12422180
  misc_feature: MA Experiment ID: 108434 Result: Up-regulated in Transcription
  misc_feature: MA Experiment 108434 PARAMETER Experiment Name: At_Root_Tips_cDNA_P Parameter: Tissue Value: Root Tips
  misc_feature: MA Experiment ID: 108473 Result: Up-regulated in Transcription
  misc_feature: MA Experiment 108473 PARAMETER Experiment Name: At_Drought_Flowers_cDNA_P Parameter: Timepoint (hr) Value: 7 d
  misc_feature: MA Experiment 108473 PARAMETER Experiment Name: At_Drought_Flowers_cDNA_P Parameter: Tissue Value: Flower
  misc_feature: MA Experiment 108473 PARAMETER Experiment Name: At_Drought_Flowers_cDNA_P Parameter: Treatment Value: Drought vs. No Drought
  misc_feature: MA Experiment ID: 108501 Result: Up-regulated in Transcription
  misc_feature: MA Experiment 108501 PARAMETER Experiment Name: At_ap2_floral_buds_cDNA_P Parameter: Plant Line Value: ap2 (Ler.)
  misc_feature: MA Experiment 108501 PARAMETER Experiment Name: At_ap2_floral_buds_cDNA_P Parameter: Tissue Value: Closed Flower
  misc_feature: MA Experiment ID: 108573 Result: Up-regulated in Transcription
  misc_feature: MA Experiment 108573 PARAMETER Experiment Name: At_Drought_cDNA_P Parameter: Timepoint (hr) Value: 6
  misc_feature: MA Experiment 108573 PARAMETER Experiment Name: At_Drought_cDNA_P Parameter: Tissue Value: Aerial
  misc_feature: MA Experiment 108573 PARAMETER Experiment Name: At_Drought_cDNA_P Parameter: Treatment Value: Drought vs. No Drought
  misc_feature: MA Experiment ID: 108607 Result: Up-regulated in Transcription
  misc_feature: MA Experiment 108607 PARAMETER Experiment Name: At_100uM_ABA_cDNA_P Parameter: Timepoint (hr) Value: 4
  misc_feature: MA Experiment 108607 PARAMETER Experiment Name: At_100uM_ABA_cDNA_P Parameter: Tissue Value: Aerial
  misc_feature: MA Experiment 108607 PARAMETER Experiment Name: At_100uM_ABA_cDNA_P Parameter: Treatment Value: 100uM ABA vs. No Treatment
  misc_feature: MA Experiment ID: 108608 Result: Up-regulated in Transcription
  misc_feature: MA Experiment 108608 PARAMETER Experiment Name: At_100uM_ABA_cDNA_P Parameter: Timepoint (hr) Value: 1
  misc_feature: MA Experiment 108608 PARAMETER Experiment Name: At_100uM_ABA_cDNA_P Parameter: Tissue Value: Aerial
  misc_feature: MA Experiment 108608 PARAMETER Experiment Name: At_100uM_ABA_cDNA_P Parameter: Treatment Value: 100uM ABA vs. No Treatment
  misc_feature: MA Experiment ID: 20000267 Result: Up-regulated in Transcription
  misc_feature: MA Experiment 20000267 PARAMETER Experiment Name: At_Drought_P Parameter: Age (day) Value: 7
  misc_feature: MA Experiment 20000267 PARAMETER Experiment Name: At_Drought_P Parameter: Organism Value: A. thaliana
  misc_feature: MA Experiment 20000267 PARAMETER Experiment Name: At_Drought_P Parameter: Plant Line Value: WS
  misc_feature: MA Experiment 20000267 PARAMETER Experiment Name: At_Drought_P Parameter: Timepoint (hr) Value: 6
  misc_feature: MA Experiment 20000267 PARAMETER Experiment Name: At_Drought_P Parameter: Tissue Value: Whole Plant
  misc_feature: MA Experiment 20000267 PARAMETER Experiment Name: At_Drought_P Parameter: Treatment Value: Drought vs. No Drought
  misc_feature: MA Experiment ID: 20000436 Result: Up-regulated in Transcription
  misc_feature: MA Experiment 20000436 PARAMETER Experiment Name: At_Drought_P Parameter: Age (day) Value: 7
  misc_feature: MA Experiment 20000436 PARAMETER Experiment Name: At_Drought_P Parameter: Organism Value: A. thaliana
  misc_feature: MA Experiment 20000436 PARAMETER Experiment Name: At_Drought_P Parameter: Plant Line Value: WS
  misc_feature: MA Experiment 20000436 PARAMETER Experiment Name: At_Drought_P Parameter: Timepoint (hr) Value: 12
  misc_feature: MA Experiment 20000436 PARAMETER Experiment Name: At_Drought_P Parameter: Tissue Value: Whole Plant
  misc_feature: MA Experiment 20000436 PARAMETER Experiment Name: At_Drought_P Parameter: Treatment Value: Drought vs. No Drought
  misc_feature: MA Experiment ID: 20000437 Result: Up-regulated in Transcription
  misc_feature: MA Experiment 20000437 PARAMETER Experiment Name: At_Drought_P Parameter: Age (day) Value: 8
  misc_feature: MA Experiment 20000437 PARAMETER Experiment Name: At_Drought_P Parameter: Organism Value: A. thaliana
  misc_feature: MA Experiment 20000437 PARAMETER Experiment Name: At_Drought_P Parameter: Plant Line Value: WS
  misc_feature: MA Experiment 20000437 PARAMETER Experiment Name: At_Drought_P Parameter: Timepoint (hr) Value: 24
  misc_feature: MA Experiment 20000437 PARAMETER Experiment Name: At_Drought_P Parameter: Tissue Value: Whole Plant
  misc_feature: MA Experiment 20000437 PARAMETER Experiment Name: At_Drought_P Parameter: Treatment Value: Drought vs. No Drought
  misc_feature: MA Experiment ID: 20000451 Result: Up-regulated in Transcription
  misc_feature: MA Experiment 20000451 PARAMETER Experiment Name: At_CS6879_Shoots-Roots_P Parameter: Age (day) Value: 14
  misc_feature: MA Experiment 20000451 PARAMETER Experiment Name: At_CS6879_Shoots-Roots_P Parameter: Organism Value: A. thaliana
  misc_feature: MA Experiment 20000451 PARAMETER Experiment Name: At_CS6879_Shoots-Roots_P Parameter: Plant Line Value: CS6879 vs. WS
  misc_feature: MA Experiment 20000451 PARAMETER Experiment Name: At_CS6879_Shoots-Roots_P Parameter: Tissue Value: Roots
  misc_feature: MA Experiment ID: 20001556 Result: Up-regulated in Transcription
  misc_feature: MA Experiment 20001556 PARAMETER Experiment Name: At_Drought_Soil_Dry_P Parameter: Age (day) Value: 26
  misc_feature: MA Experiment 20001556 PARAMETER Experiment Name: At_Drought_Soil_Dry_P Parameter: Organism Value: A. thaliana
  misc_feature: MA Experiment 20001556 PARAMETER Experiment Name: At_Drought_Soil_Dry_P Parameter: Plant Line Value: WS
  misc_feature: MA Experiment 20001556 PARAMETER Experiment Name: At_Drought_Soil_Dry_P Parameter: Post Timepoint (hr) Value: None
  misc_feature: MA Experiment 20001556 PARAMETER Experiment Name: At_Drought_Soil_Dry_P Parameter: Post-Treatment Value: None
  misc_feature: MA Experiment 20001556 PARAMETER Experiment Name: At_Drought_Soil_Dry_P Parameter: Timepoint (day) Value: 12
  misc_feature: MA Experiment 20001556 PARAMETER Experiment Name: At_Drought_Soil_Dry_P Parameter: Treatment Value: Drought vs. No Drought
  misc_feature: MA Experiment ID: 20001910 Result: Up-regulated in Transcription
  misc_feature: MA Experiment 20001910 PARAMETER Experiment Name: At_Drought_Reproduction_P Parameter: Age (day) Value: 37
  misc_feature: MA Experiment 20001910 PARAMETER Experiment Name: At_Drought_Reproduction_P Parameter: Organism Value: A. thaliana
  misc_feature: MA Experiment 20001910 PARAMETER Experiment Name: At_Drought_Reproduction_P Parameter: Plant Line Value: WS
  misc_feature: MA Experiment 20001910 PARAMETER Experiment Name: At_Drought_Reproduction_P Parameter: Timepoint (day) Value: 7
  misc_feature: MA Experiment 20001910 PARAMETER Experiment Name: At_Drought_Reproduction_P Parameter: Tissue Value: Flowers
  misc_feature: MA Experiment 20001910 PARAMETER Experiment Name: At_Drought_Reproduction_P Parameter: Treatment Value: Drought vs. No Drought
aagtaaagcttttacctaattctcaaacattctttacacaaaaatatcaagagtgatatagatagcgagaaaaaatggacggtaggggagggtgttgcatagctaggtacgccattggctctggaccgtacgatctttccaaagcagatcgcatcatgcttcgatttcgtcccattgctcctaaaccggccagccccgtcggagtaaatcccgtatccagcggagatagcggcggcggaggctccgacgtttcctttagatcagctagtagaagaaagaggaaatgtcatcagctgaaggagaatggtggtaacgccaagaggtgcacccggcggaagacgtcggataaacccgtcgttcacggcagtgctaatgcggtgactctttctctattaccggagaaacctatagatcttaaggcggcggtggagaagcagaagcggcagggtccgttatggttgagtttcaaagacggcggagggatgctcacaccggcttatcagacaccggagattgtgcagaggacggtggtgatttcgtcgtgtatgacggtggagcgtgtaacggacgcttggattgacggttacggtttagggaggtcagatgaagaaaggaagatgaatcttgtgagagacacgtgtcctggtttcatatccgacggttcagggagagtcacgtggactaatgacgcgtatcggaagatggctagggatattattcccgtggaagaaggtgcaccggagataactagcggcgatagttttcacgtgatcgtacggttggtgatgagggagaggccgatgctaacgtcccctggattcacatgcagaatgaaactccagtacacgtgtcaaaatcgtgagagaggctcagtcacggtgccttgcgacgtgtggagaatggacgtcggtggtggttttgcttggaggctcgacgttaaggccgctttgtgcctttgacaccgttagatcaactttagtcactatgggcacgaacattacacatgatatgtcctccaatgataaaatatggattcagaactaattagatttctaatggtttaacatatatttatgtcgtttttgntct

SEQ ID NO: 41860 - protein, 294 aa, Arabidopsis thaliana
  peptide (1)..(294): Ceres Seq. ID no. 12422181
  misc_feature (18)..(101): Homolog of NCBI NO: 34901112 NR Description: hypothetical protein~predicted by FGENESH etc.
  misc_feature (137)..(294): Homolog of NCBI NO: 34901112 NR Description: hypothetical protein~predicted by FGENESH etc.
  misc_feature (20)..(294): Homolog of NCBI NO: 15237495 NR Description: putative protein; protein id: At5g40800.1
  misc_feature (1)..(294): Homolog of NCBI NO: 15237494 NR Description: putative protein; protein id: At5g40790.1
  misc_feature (11)..(294): Homolog of NCBI NO: 15232126 NR Description: hypothetical protein; protein id: At3g27250.1
  misc_feature (1)..(294): Homolog of NCBI NO: 15240662 NR Description: putative protein
  misc_feature (1)..(294): Homolog of NCBI NO: 15242729 NR Description: putative protein; protein id: At5g63350.1
  misc_feature (1)..(294): Homolog of NCBI NO: 18408645 NR Description: expressed protein
  misc_feature (1)..(294): Homolog of NCBI NO: 21537225 NR Description: unknown [Arabidopsis thaliana]
MDGRGGCCIARYAIGSGPYDLSKADRIMLRFRPIAPKPASPVGVNPVSSGDSGGGGSDVSFRSASRRKRKCHQLKENGGNAKRCTRRKTSDKPVVHGSANAVTLSLLPEKPIDLKAAVEKQKRQGPLWLSFKDGGGMLTPAYQTPEIVQRTVVISSCMTVERVTDAWIDGYGLGRSDEERKMNLVRDTCPGFISDGSGRVTWTNDAYRKMARDIIPVEEGAPEITSGDSFHVIVRLVMRERPMLTSPGFTCRMKLQYTCQNRERGSVTVPCDVWRMDVGGGFAWRLDVKAALCL

SEQ ID NO: 41861 - protein, 267 aa, Arabidopsis thaliana
  peptide (1)..(267): Ceres Seq. ID no. 12422182
  misc_feature (1)..(74): Homolog of NCBI NO: 34901112 NR Description: hypothetical protein~predicted by FGENESH etc.
  misc_feature (110)..(267): Homolog of NCBI NO: 34901112 NR Description: hypothetical protein~predicted by FGENESH etc.
  misc_feature (1)..(267): Homolog of NCBI NO: 15237495 NR Description: putative protein; protein id: At5g40800.1
  misc_feature (1)..(267): Homolog of NCBI NO: 15237494 NR Description: putative protein; protein id: At5g40790.1
  misc_feature (1)..(267): Homolog of NCBI NO: 15232126 NR Description: hypothetical protein; protein id: At3g27250.1
  misc_feature (1)..(267): Homolog of NCBI NO: 15240662 NR Description: putative protein
  misc_feature (1)..(267): Homolog of NCBI NO: 15242729 NR Description: putative protein; protein id: At5g63350.1
  misc_feature (1)..(267): Homolog of NCBI NO: 18408645 NR Description: expressed protein
  misc_feature (1)..(267): Homolog of NCBI NO: 21537225 NR Description: unknown [Arabidopsis thaliana]
MLRFRPIAPKPASPVGVNPVSSGDSGGGGSDVSFRSASRRKRKCHQLKENGGNAKRCTRRKTSDKPVVHGSANAVTLSLLPEKPIDLKAAVEKQKRQGPLWLSFKDGGGMLTPAYQTPEIVQRTVVISSCMTVERVTDAWIDGYGLGRSDEERKMNLVRDTCPGFISDGSGRVTWTNDAYRKMARDIIPVEEGAPEITSGDSFHVIVRLVMRERPMLTSPGFTCRMKLQYTCQNRERGSVTVPCDVWRMDVGGGFAWRLDVKAALCL

SEQ ID NO: 41862 - protein, 158 aa, Arabidopsis thaliana
  peptide (1)..(158): Ceres Seq. ID no. 12422183
  misc_feature (1)..(158): Homolog of NCBI NO: 34901112 NR Description: hypothetical protein~predicted by FGENESH etc.
  misc_feature (1)..(158): Homolog of NCBI NO: 15237495 NR Description: putative protein; protein id: At5g40800.1
  misc_feature (1)..(158): Homolog of NCBI NO: 15237494 NR Description: putative protein; protein id: At5g40790.1
  misc_feature (1)..(158): Homolog of NCBI NO: 15232126 NR Description: hypothetical protein; protein id: At3g27250.1
  misc_feature (1)..(158): Homolog of NCBI NO: 15240662 NR Description: putative protein
  misc_feature (1)..(158): Homolog of NCBI NO: 15242729 NR Description: putative protein; protein id: At5g63350.1
  misc_feature (1)..(158): Homolog of NCBI NO: 18408645 NR Description: expressed protein
  misc_feature (1)..(158): Homolog of NCBI NO: 21537225 NR Description: unknown [Arabidopsis thaliana]
MLTPAYQTPEIVQRTVVISSCMTVERVTDAWIDGYGLGRSDEERKMNLVRDTCPGFISDGSGRVTWTNDAYRKMARDIIPVEEGAPEITSGDSFHVIVRLVMRERPMLTSPGFTCRMKLQYTCQNRERGSVTVPCDVWRMDVGGGFAWRLDVKAALCL

SEQ ID NO: 41863 - DNA, 1633 bp, Arabidopsis thaliana
  misc_feature (1)..(1633): Ceres Seq. ID no. 13645815
  misc_feature: MA Experiment ID: 20001905 Result: Up-regulated in Transcription
  misc_feature: MA Experiment 20001905 PARAMETER Experiment Name: At_Drought_Reproduction_P Parameter: Age (day) Value: 40
  misc_feature: MA Experiment 20001905 PARAMETER Experiment Name: At_Drought_Reproduction_P Parameter: Organism Value: A. thaliana
  misc_feature: MA Experiment 20001905 PARAMETER Experiment Name: At_Drought_Reproduction_P Parameter: Plant Line Value: WS
  misc_feature: MA Experiment 20001905 PARAMETER Experiment Name: At_Drought_Reproduction_P Parameter: Timepoint (day) Value: 10
  misc_feature: MA Experiment 20001905 PARAMETER Experiment Name: At_Drought_Reproduction_P Parameter: Tissue Value: Rosettes
  misc_feature: MA Experiment 20001905 PARAMETER Experiment Name: At_Drought_Reproduction_P Parameter: Treatment Value: Drought vs. No Drought
ttttttcacactttttctgtctgttacgattcttgcttgatttctttctaaacaaagcaaaagttgtctttttggagttgtgagcaactaattctctgaaattgaggaagagaaagcgagaaggtttttttggagtcagagacagaagaagaatttaacagattcttgtcggaaacatggatacgagtgaagcaaggaaccgtaaagttgttgcagttgaacaattcgatctcgaagtccctgagactgctcatcagattagcagcgattcatggtttcaggtagcttttgttctaacgaccggtataaacagtgcctatgtgttgggatattccgggacagtcatggttcctttgggttggattggtggtgtggttggtctcattcttgctaccgcaatctctctttacgcaaacactcttatcgccaaacttcatgagtttggtggcaaaagacacattcgttatagagatcttgcaggcttcatctatggtaaaaagatgtatcgtgttacatggggattgcaatatgtcaatcttttcatgattaattgtggcttcatcatacttgctggttcggccttaaaggctgtttatgtactttttagagatgatagtctcatgaaactgcctcacttcatcgccatcgcgggtgttgtatgcgcgattttcgcaatcggtattcctcatttatcagctcttggaatctggctaggagtttcaacaatcctcagcataatctacattattgttgcaatagttctatcagctaaagatggagtaaacaagcctgaaagagattacaacatacaaggatcatcaataaacaaactctttaccataacaggagcagctgcaaatctagttttcgcattcaacacgggaatgctcccggaaatacaggcgacggtgaagcaaccggtcgttaaaaacatgatgaaggctctgtattttcaattcactgttggtgttttacctatgtacgcggttacattcatcggatattgggcttacgggtcctcgacatcgacttatctcttaaacagcgtcagtggacctgtttgggtcaaagcactcgctaacatttcagcttttctccaatctgttatctctttacatatttttgcaagtccgacttatgagtatatggacacaaagtatggagtcaaaggaagtccattggcaatgaagaatctgttgtttagaacagtagcaagaggaagctacattgcggtgagcactcttctctctgcgcttttaccgtttctcggagatttcatgagccttaccggagcgataagcacgttccctctcacattcatattagcgaatcacatgtatcttgttgctatgaatgatgagcttagtcttgtgcaaaagctatggcattggctcaatgtttgcttctttggattaatgtctcttgctgctgctattgctgctgttagactcatctctgttgactccaagaacttccatgtttttgctgatgtttgattaaaatgtcttcgacatttttaacgatgtaatctttataccaattagaaaaaattgtaatccttttgttgttacttttattatttcaaatgaaagaaattttttataacataatatatatatttatttttcggttc

SEQ ID NO: 41864 - protein, 439 aa, Arabidopsis thaliana
  peptide (1)..(439): Ceres Seq. ID no. 13645816
  misc_feature (11)..(439): Homolog of NCBI NO: 11358949 NR Description: proline transport protein 2 [imported] - tomato
  misc_feature (15)..(439): Homolog of NCBI NO: 11358950 NR Description: proline transport protein 3 [imported] - tomato
  misc_feature (21)..(439): Homolog of NCBI NO: 8571474 NR Description: proline/glycine betaine transporter [Atriplex
  misc_feature (8)..(439): Homolog of NCBI NO: 21069020 NR Description: betaine/proline transporter [Avicennia marina]
  misc_feature (18)..(439): Homolog of NCBI NO: 21069018 NR Description: betaine/proline transporter [Avicennia marina]
  misc_feature (6)..(439): Homolog of NCBI NO: 15228000 NR Description: proline transporter, putative [Arabidopsis
  misc_feature (6)..(439): Homolog of NCBI NO: 21554196 NR Description: putative proline transporter [Arabidopsis
  misc_feature (1)..(439): Homolog of NCBI NO: 21593453 NR Description: proline transporter 1 [Arabidopsis thaliana]
  misc_feature (1)..(439): Homolog of NCBI NO: 15225591 NR Description: proline transporter 1 (ProT1) [Arabidopsis
  misc_feature (1)..(439): Homolog of NCBI NO: 15228183 NR Description: proline transporter 2 (ProT2) [Arabidopsis
MDTSEARNRKVVAVEQFDLEVPETAHQISSDSWFQVAFVLTTGINSAYVLGYSGTVMVPLGWIGGVVGLILATAISLYANTLIAKLHEFGGKRHIRYRDLAGFIYGKKMYRVTWGLQYVNLFMINCGFIILAGSALKAVYVLFRDDSLMKLPHFIAIAGVVCAIFAIGIPHLSALGIWLGVSTILSIIYIIVAIVLSAKDGVNKPERDYNIQGSSINKLFTITGAAANLVFAFNTGMLPEIQATVKQPVVKNMMKALYFQFTVGVLPMYAVTFIGYWAYGSSTSTYLLNSVSGPVWVKALANISAFLQSVISLHIFASPTYEYMDTKYGVKGSPLAMKNLLFRTVARGSYIAVSTLLSALLPFLGDFMSLTGAISTFPLTFILANHMYLVAMNDELSLVQKLWHWLNVCFFGLMSLAAAIAAVRLISVDSKNFHVFADV

SEQ ID NO: 41865 - protein, 383 aa, Arabidopsis thaliana
  peptide (1)..(383): Ceres Seq. ID no. 13645817
  misc_feature (1)..(383): Homolog of NCBI NO: 11358949 NR Description: proline transport protein 2 [imported] - tomato
  misc_feature (1)..(383): Homolog of NCBI NO: 11358950 NR Description: proline transport protein 3 [imported] - tomato
  misc_feature (1)..(383): Homolog of NCBI NO: 8571474 NR Description: proline/glycine betaine transporter [Atriplex
  misc_feature (1)..(383): Homolog of NCBI NO: 21069020 NR Description: betaine/proline transporter [Avicennia marina]
  misc_feature (1)..(383): Homolog of NCBI NO: 21069018 NR Description: betaine/proline transporter [Avicennia marina]
  misc_feature (1)..(383): Homolog of NCBI NO: 15228000 NR Description: proline transporter, putative [Arabidopsis
  misc_feature (1)..(383): Homolog of NCBI NO: 21554196 NR Description: putative proline transporter [Arabidopsis
  misc_feature (1)..(383): Homolog of NCBI NO: 21593453 NR Description: proline transporter 1 [Arabidopsis thaliana]
  misc_feature (1)..(383): Homolog of NCBI NO: 15225591 NR Description: proline transporter 1 (ProT1) [Arabidopsis
  misc_feature (1)..(383): Homolog of NCBI NO: 15228183 NR Description: proline transporter 2 (ProT2) [Arabidopsis
MVPLGWIGGVVGLILATAISLYANTLIAKLHEFGGKRHIRYRDLAGFIYGKKMYRVTWGLQYVNLFMINCGFIILAGSALKAVYVLFRDDSLMKLPHFIAIAGVVCAIFAIGIPHLSALGIWLGVSTILSIIYIIVAIVLSAKDGVNKPERDYNIQGSSINKLFTITGAAANLVFAFNTGMLPEIQATVKQPVVKNMMKALYFQFTVGVLPMYAVTFIGYWAYGSSTSTYLLNSVSGPVWVKALANISAFLQSVISLHIFASPTYEYMDTKYGVKGSPLAMKNLLFRTVARGSYIAVSTLLSALLPFLGDFMSLTGAISTFPLTFILANHMYLVAMNDELSLVQKLWHWLNVCFFGLMSLAAAIAAVRLISVDSKNFHVFADV

SEQ ID NO: 41866 - protein, 331 aa, Arabidopsis thaliana
  peptide (1)..(331): Ceres Seq. ID no. 13645818
  misc_feature (1)..(331): Homolog of NCBI NO: 11358949 NR Description: proline transport protein 2 [imported] - tomato
  misc_feature (1)..(331): Homolog of NCBI NO: 11358950 NR Description: proline transport protein 3 [imported] - tomato
  misc_feature (1)..(331): Homolog of NCBI NO: 8571474 NR Description: proline/glycine betaine transporter [Atriplex
  misc_feature (1)..(331): Homolog of NCBI NO: 21069020 NR Description: betaine/proline transporter [Avicennia marina]
  misc_feature (1)..(331): Homolog of NCBI NO: 21069018 NR Description: betaine/proline transporter [Avicennia marina]
  misc_feature (1)..(331): Homolog of NCBI NO: 15228000 NR Description: proline transporter, putative [Arabidopsis
  misc_feature (1)..(331): Homolog of NCBI NO: 21554196 NR Description: putative proline transporter [Arabidopsis
  misc_feature (1)..(331): Homolog of NCBI NO: 21593453 NR Description: proline transporter 1 [Arabidopsis thaliana]
  misc_feature (1)..(331): Homolog of NCBI NO: 15225591 NR Description: proline transporter 1 (ProT1) [Arabidopsis
  misc_feature (1)..(331): Homolog of NCBI NO: 15228183 NR Description: proline transporter 2 (ProT2) [Arabidopsis
MYRVTWGLQYVNLFMINCGFIILAGSALKAVYVLFRDDSLMKLPHFIAIAGVVCAIFAIGIPHLSALGIWLGVSTILSIIYIIVAIVLSAKDGVNKPERDYNIQGSSINKLFTITGAAANLVFAFNTGMLPEIQATVKQPVVKNMMKALYFQFTVGVLPMYAVTFIGYWAYGSSTSTYLLNSVSGPVWVKALANISAFLQSVISLHIFASPTYEYMDTKYGVKGSPLAMKNLLFRTVARGSYIAVSTLLSALLPFLGDFMSLTGAISTFPLTFILANHMYLVAMNDELSLVQKLWHWLNVCFFGLMSLAAAIAAVRLISVDSKNFHVFADV

SEQ ID NO: 41867 - DNA, 848 bp, Arabidopsis thaliana
  misc_feature (1)..(848): Ceres Seq. ID no. 13488188
  misc_feature: MA Experiment ID: 20000069 Result: Up-regulated in Transcription
  misc_feature: MA Experiment 20000069 PARAMETER Experiment Name: At_100uM_ABA_Mutants_cDNA_P Parameter: Plant Line Value: CS23
  misc_feature: MA Experiment 20000069 PARAMETER Experiment Name: At_100uM_ABA_Mutants_cDNA_P Parameter: Timepoint (hr) Value: 6
  misc_feature: MA Experiment 20000069 PARAMETER Experiment Name: At_100uM_ABA_Mutants_cDNA_P Parameter: Tissue Value: Aerial
  misc_feature: MA Experiment 20000069 PARAMETER Experiment Name: At_100uM_ABA_Mutants_cDNA_P Parameter: Treatment Value: 100uM ABA vs. No Treatment
  misc_feature: MA Experiment ID: 20000071 Result: Up-regulated in Transcription
  misc_feature: MA Experiment 20000071 PARAMETER Experiment Name: At_100uM_ABA_Mutants_cDNA_P Parameter: Plant Line Value: CS8104
  misc_feature: MA Experiment 20000071 PARAMETER Experiment Name: At_100uM_ABA_Mutants_cDNA_P Parameter: Timepoint (hr) Value: 6
  misc_feature: MA Experiment 20000071 PARAMETER Experiment Name: At_100uM_ABA_Mutants_cDNA_P Parameter: Tissue Value: Aerial
  misc_feature: MA Experiment 20000071 PARAMETER Experiment Name: At_100uM_ABA_Mutants_cDNA_P Parameter: Treatment Value: 100uM ABA vs. No Treatment
  misc_feature: MA Experiment ID: 20000234 Result: Down-regulated in Transcription
  misc_feature: MA Experiment 20000234 PARAMETER Experiment Name: At_Siliques_P Parameter: Age (day) Value: 21
  misc_feature: MA Experiment 20000234 PARAMETER Experiment Name: At_Siliques_P Parameter: Organism Value: A. thaliana
  misc_feature: MA Experiment 20000234 PARAMETER Experiment Name: At_Siliques_P Parameter: Plant Line Value: WS
  misc_feature: MA Experiment 20000234 PARAMETER Experiment Name: At_Siliques_P Parameter: Tissue Value: Less Than 5mm Siliques vs. Whole Plant
  misc_feature: MA Experiment ID: 20001558 Result: Down-regulated in Transcription
  misc_feature: MA Experiment 20001558 PARAMETER Experiment Name: At_Drought_Soil_Dry_P Parameter: Age (day) Value: 27
  misc_feature: MA Experiment 20001558 PARAMETER Experiment Name: At_Drought_Soil_Dry_P Parameter: Organism Value: A. thaliana
  misc_feature: MA Experiment 20001558 PARAMETER Experiment Name: At_Drought_Soil_Dry_P Parameter: Plant Line Value: WS
  misc_feature: MA Experiment 20001558 PARAMETER Experiment Name: At_Drought_Soil_Dry_P Parameter: Post Timepoint (hr) Value: 6
  misc_feature: MA Experiment 20001558 PARAMETER Experiment Name: At_Drought_Soil_Dry_P Parameter: Post-Treatment Value: Re-Water vs. No Drought
  misc_feature: MA Experiment 20001558 PARAMETER Experiment Name: At_Drought_Soil_Dry_P Parameter: Timepoint (day) Value: 13
  misc_feature: MA Experiment 20001558 PARAMETER Experiment Name: At_Drought_Soil_Dry_P Parameter: Treatment Value: Drought vs. No Drought
aattcggatagcttgcaaataacgctgacaaaaaaagaaacagtgaagaagaaaaaaaagaaggtcattttcattttctccatttgatttttgccgaccggagaaaatatcttcttgccgtcttcttcttcatttcaccaggaacttttatttgaaatcggtttgatttagccatggcaaacgcggcatcgggaatggctgtgcatgatgattgcaagctgaaatttatggaactgaaggcgaaaagaacattccgtaccatagtctacaagattgaggataagcaagtgattgtagagaaactcggtgaacctgaacaatcatatgatgactttgcagctagtcttccagctgatgattgccgatattgcatttacgatttcgactttgtcactgcggagaactgccagaagagcaagatcttcttcattgcatggtctccggacactgccaaagtgagagacaagatgatttacgcgagctctaaagataggttcaagagagaactagatggaattcaagtggaacttcaagctactgatccaacagaaatgggtcttgatgttttcaaaagccgcaccaactaagtaaaacaaaaccctgtaagggcatttgaataagtttggtttctggagtgaatatgtttcctctgactgttatgaaaactttttaacaccttcaacttcattctacttggtattattgtatgtctttgatgtgttatgtgtgccttgtgatggttttcaattagttttacatgtacaatacttgaaatcagattgttgctaggcttcaagccttgtctcagttatctatctgataatttattcgtatatgtttggagtcct

SEQ ID NO: 41868 - protein, 137 aa, Arabidopsis thaliana
  peptide (1)..(137): Ceres Seq. ID no. 13488189
  misc_feature (12)..(137): Pfam Name: Cofilin/tropomyosin-type actin-binding protein Pfam Description: Cofilin/tropomyosin-type actin-binding protein
  misc_feature (8)..(137): Homolog of NCBI NO: 30697303 NR Description: actin depolymerizing factor 4 - like protein
  misc_feature (1)..(135): Homolog of NCBI NO: 22857914 NR Description: pollen specific actin-depolymerizing factor 2
  misc_feature (1)..(137): Homolog of NCBI NO: 30697295 NR Description: actin depolymerizing factor 3 - like protein
  misc_feature (1)..(137): Homolog of NCBI NO: 17366768 NR Description: Actin-depolymerizing factor 1 (ADF 1)
  misc_feature (1)..(137): Homolog of NCBI NO: 4185511 NR Description: actin depolymerizing factor 4 [Arabidopsis
  misc_feature (1)..(135): Homolog of NCBI NO: 17366765 NR Description: Actin-depolymerizing factor 2 (ADF 2)
  misc_feature (1)..(137): Homolog of NCBI NO: 15231309 NR Description: actin depolymerizing factor 1 (ADF1) [Arabidopsis
  misc_feature (1)..(137): Homolog of NCBI NO: 30697300 NR Description: actin depolymerizing factor 4 - like protein
  misc_feature (8)..(137): Homolog of NCBI NO: 11276987 NR Description: actin depolymerizing factor 2 - Arabidopsis
  misc_feature (1)..(137): Homolog of NCBI NO: 18408116 NR Description: actin depolymerizing factor 2 (ADF2) [Arabidopsis
MANAASGMAVHDDCKLKFMELKAKRTFRTIVYKIEDKQVIVEKLGEPEQSYDDFAASLPADDCRYCIYDFDFVTAENCQKSKIFFIAWSPDTAKVRDKMIYASSKDRFKRELDGIQVELQATDPTEMGLDVFKSRTN

SEQ ID NO: 41869 - protein, 130 aa, Arabidopsis thaliana; identical to SEQ ID NO: 25156
  peptide (1)..(130): Ceres Seq. ID no. 13488190
  misc_feature (5)..(130): Pfam Name: Cofilin/tropomyosin-type actin-binding protein Pfam Description: Cofilin/tropomyosin-type actin-binding protein
  misc_feature (1)..(130): Homolog of NCBI NO: 30697303 NR Description: actin depolymerizing factor 4 - like protein
  misc_feature (1)..(128): Homolog of NCBI NO: 22857914 NR Description: pollen specific actin-depolymerizing factor 2
  misc_feature (1)..(130): Homolog of NCBI NO: 30697295 NR Description: actin depolymerizing factor 3 - like protein
  misc_feature (1)..(130): Homolog of NCBI NO: 17366768 NR Description: Actin-depolymerizing factor 1 (ADF 1)
  misc_feature (1)..(130): Homolog of NCBI NO: 4185511 NR Description: actin depolymerizing factor 4 [Arabidopsis
  misc_feature (1)..(128): Homolog of NCBI NO: 17366765 NR Description: Actin-depolymerizing factor 2 (ADF 2)
  misc_feature (1)..(130): Homolog of NCBI NO: 15231309 NR Description: actin depolymerizing factor 1 (ADF1) [Arabidopsis
  misc_feature (1)..(130): Homolog of NCBI NO: 30697300 NR Description: actin depolymerizing factor 4 - like protein
  misc_feature (1)..(130): Homolog of NCBI NO: 11276987 NR Description: actin depolymerizing factor 2 - Arabidopsis
  misc_feature (1)..(130): Homolog of NCBI NO: 18408116 NR Description: actin depolymerizing factor 2 (ADF2) [Arabidopsis

SEQ ID NO: 41870 - protein, 119 aa, Arabidopsis thaliana; identical to SEQ ID NO: 25157
  peptide (1)..(119): Ceres Seq. ID no. 13488191
  misc_feature (1)..(119): Pfam Name: Cofilin/tropomyosin-type actin-binding protein Pfam Description: Cofilin/tropomyosin-type actin-binding protein
  misc_feature (1)..(119): Homolog of NCBI NO: 30697303 NR Description: actin depolymerizing factor 4 - like protein
  misc_feature (1)..(117): Homolog of NCBI NO: 22857914 NR Description: pollen specific actin-depolymerizing factor 2
  misc_feature (1)..(119): Homolog of NCBI NO: 30697295 NR Description: actin depolymerizing factor 3 - like protein
  misc_feature (1)..(119): Homolog of NCBI NO: 17366768 NR Description: Actin-depolymerizing factor 1 (ADF 1)
  misc_feature (1)..(119): Homolog of NCBI NO: 4185511 NR Description: actin depolymerizing factor 4 [Arabidopsis
  misc_feature (1)..(117): Homolog of NCBI NO: 17366765 NR Description: Actin-depolymerizing factor 2 (ADF 2)
  misc_feature (1)..(119): Homolog of NCBI NO: 15231309 NR Description: actin depolymerizing factor 1 (ADF1) [Arabidopsis
  misc_feature (1)..(119): Homolog of NCBI NO: 30697300 NR Description: actin depolymerizing factor 4 - like protein
  misc_feature (1)..(119): Homolog of NCBI NO: 11276987 NR Description: actin depolymerizing factor 2 - Arabidopsis
  misc_feature (1)..(119): Homolog of NCBI NO: 18408116 NR Description: actin depolymerizing factor 2 (ADF2) [Arabidopsis

SEQ ID NO: 41871 - DNA, 1495 bp, Arabidopsis thaliana
  misc_feature (1)..(1495): Ceres Seq. ID no. 12328705
  misc_feature: MA Experiment ID: 108434 Result: Down-regulated in Transcription
  misc_feature: MA Experiment 108434 PARAMETER Experiment Name: At_Root_Tips_cDNA_P Parameter: Tissue Value: Root Tips
  misc_feature: MA Experiment ID: 108469 Result: Up-regulated in Transcription
  misc_feature: MA Experiment ID: 108585 Result: Up-regulated in Transcription
  misc_feature: MA Experiment 108585 PARAMETER Experiment Name: At_5mM_NaNP_cDNA_P Parameter: Timepoint (hr) Value: 6
  misc_feature: MA Experiment 108585 PARAMETER Experiment Name: At_5mM_NaNP_cDNA_P Parameter: Tissue Value: Aerial
  misc_feature: MA Experiment 108585 PARAMETER Experiment Name: At_5mM_NaNP_cDNA_P Parameter: Treatment Value: null
  misc_feature: MA Experiment ID: 108667 Result: Up-regulated in Transcription
  misc_feature: MA Experiment 108667 PARAMETER Experiment Name: At_2mM_SA_cDNA_P Parameter: Plant Line Value: WS
  misc_feature: MA Experiment 108667 PARAMETER Experiment Name: At_2mM_SA_cDNA_P Parameter: Timepoint (hr) Value: 1
  misc_feature: MA Experiment 108667 PARAMETER Experiment Name: At_2mM_SA_cDNA_P Parameter: Treatment Value: 2mM SA vs. No Treatment
  misc_feature: MA Experiment ID: 108668 Result: Up-regulated in Transcription
  misc_feature: MA Experiment 108668 PARAMETER Experiment Name: At_2mM_SA_cDNA_P Parameter: Plant Line Value: WS
  misc_feature: MA Experiment 108668 PARAMETER Experiment Name: At_2mM_SA_cDNA_P Parameter: Timepoint (hr) Value: 6
  misc_feature: MA Experiment 108668 PARAMETER Experiment Name: At_2mM_SA_cDNA_P Parameter: Treatment Value: 2mM SA vs. No Treatment
  misc_feature: MA Experiment ID: 20000090 Result: Up-regulated in Transcription
  misc_feature: MA Experiment ID: 20000173 Result: Down-regulated in Transcription
  misc_feature: MA Experiment 20000173 PARAMETER Experiment Name: At_42deg_Heat_P Parameter: Age (day) Value: 14
  misc_feature: MA Experiment 20000173 PARAMETER Experiment Name: At_42deg_Heat_P Parameter: Organism Value: A. thaliana
  misc_feature: MA Experiment 20000173 PARAMETER Experiment Name: At_42deg_Heat_P Parameter: Plant Line Value: WS
  misc_feature: MA Experiment 20000173 PARAMETER Experiment Name: At_42deg_Heat_P Parameter: Temperature (deg C) Value: 42 vs. 22
  misc_feature: MA Experiment 20000173 PARAMETER Experiment Name: At_42deg_Heat_P Parameter: Timepoint (hr) Value: 6
  misc_feature: MA Experiment 20000173 PARAMETER Experiment Name: At_42deg_Heat_P Parameter: Tissue Value: Aerial
  misc_feature: MA Experiment ID: 20000182 Result: Up-regulated in Transcription
  misc_feature: MA Experiment 20000182 PARAMETER Experiment Name: At_2mM_SA_P Parameter: Age (day) Value: 14
  misc_feature: MA Experiment 20000182 PARAMETER Experiment Name: At_2mM_SA_P Parameter: Organism Value: A. thaliana
  misc_feature: MA Experiment 20000182 PARAMETER Experiment Name: At_2mM_SA_P Parameter: Plant Line Value: WS
  misc_feature: MA Experiment 20000182 PARAMETER Experiment Name: At_2mM_SA_P Parameter: Timepoint (hr) Value: 6
  misc_feature: MA Experiment 20000182 PARAMETER Experiment Name: At_2mM_SA_P Parameter: Tissue Value: Aerial
  misc_feature: MA Experiment 20000182 PARAMETER Experiment Name: At_2mM_SA_P Parameter: Treatment Value: 2mM SA vs. No Treatment
  misc_feature: MA Experiment ID: 20000227 Result: Down-regulated in Transcription
  misc_feature: MA Experiment 20000227 PARAMETER Experiment Name: At_Root-Tips-vs-Tops_P Parameter: Tissue Value: Root Tips vs. Root Tops
  misc_feature: MA Experiment ID: 20000234 Result: Down-regulated in Transcription
  misc_feature: MA Experiment 20000234 PARAMETER Experiment Name: At_Siliques_P Parameter: Age (day) Value: 21
  misc_feature: MA Experiment 20000234 PARAMETER Experiment Name: At_Siliques_P Parameter: Organism Value: A. thaliana
  misc_feature: MA Experiment 20000234 PARAMETER Experiment Name: At_Siliques_P Parameter: Plant Line Value: WS
  misc_feature: MA Experiment 20000234 PARAMETER Experiment Name: At_Siliques_P Parameter: Tissue Value: Less Than 5mm Siliques vs. Whole Plant
  misc_feature: MA Experiment ID: 20000264 Result: Down-regulated in Transcription
  misc_feature: MA Experiment 20000264 PARAMETER Experiment Name: At_Open_Flower_P Parameter: Age (day) Value: 21
  misc_feature: MA Experiment 20000264 PARAMETER Experiment Name: At_Open_Flower_P Parameter: Plant Line Value: WS
  misc_feature: MA Experiment 20000264 PARAMETER Experiment Name: At_Open_Flower_P Parameter: Tissue Value: Open Flower vs. Whole Plant
  misc_feature: MA Experiment ID: 20000265 Result: Down-regulated in Transcription
  misc_feature: MA Experiment 20000265 PARAMETER Experiment Name: At_Open_Flower_P Parameter: Age (day) Value: 21
  misc_feature: MA Experiment 20000265 PARAMETER Experiment Name: At_Open_Flower_P Parameter: Plant Line Value: WS
  misc_feature: MA Experiment 20000265 PARAMETER Experiment Name: At_Open_Flower_P Parameter: Tissue Value: Closed Flower vs. Whole Plant
  misc_feature: MA Experiment ID: 20000286 Result: Down-regulated in Transcription
  misc_feature: MA Experiment 20000286 PARAMETER Experiment Name: At_Open_Flower_P Parameter: Age (day) Value: 21
  misc_feature: MA Experiment 20000286 PARAMETER Experiment Name: At_Open_Flower_P Parameter: Plant Line Value: WS
  misc_feature: MA Experiment 20000286 PARAMETER Experiment Name: At_Open_Flower_P Parameter: Tissue Value: Half Open vs. Whole Plant
  misc_feature: MA Experiment ID: 20000438 Result: Down-regulated in Transcription
  misc_feature: MA Experiment 20000438 PARAMETER Experiment Name: At_Shoots__P Parameter: Age (day) Value: 14
  misc_feature: MA Experiment 20000438 PARAMETER Experiment Name: At_Shoots__P Parameter: Tissue Value: Shoots vs. Whole Plant
  misc_feature: MA Experiment ID: 20000527 Result: Down-regulated in Transcription
  misc_feature: MA Experiment 20000527 PARAMETER Experiment Name: At_10percent_PEG_P Parameter: Age (day) Value: 20
  misc_feature: MA Experiment 20000527 PARAMETER Experiment Name: At_10percent_PEG_P Parameter: Organism Value: A. thaliana
  misc_feature: MA Experiment 20000527 PARAMETER Experiment Name: At_10percent_PEG_P Parameter: Plant Line Value: WS
  misc_feature: MA Experiment 20000527 PARAMETER Experiment Name: At_10percent_PEG_P Parameter: Timepoint (day) Value: 20
  misc_feature: MA Experiment 20000527 PARAMETER Experiment Name: At_10percent_PEG_P Parameter: Tissue Value: Whole Plant
  misc_feature: MA Experiment 20000527 PARAMETER Experiment Name: At_10percent_PEG_P Parameter: Treatment Value: 10percent PEG vs. No Treatment
cttttaaagaaaagttccatttcatatctctatcaaacccttttctgaatattattttgcttgtgaatttgaatttgagcttttttcctctgttcttgggaggaatttttgtctgtgtttgtgatgcgttataattgcttcggacttcttgatatgtgcaacggaagtgatcgtcttggacaaagagaagctgaagagatttgcaccaacaatgtgagggtcttttcatataattcattaagatcagccactgatagtttccatccaacgaacagaatcggaggtggtggctatggcgttgtctttaagggagttttgagagatggcacacaagtagctgtgaaatcactatcagcagaatctaaacaagggacacgcgagttcttgaccgagattaacttgatatcaaacattcatcatcctaaccttgttaaactcatcggttgctgcatcgaagggaacaatcggattcttgtctatgagtaccttgagaacaacagtcttgctagtgttttgcttggttcaaggagtagatatgtaccgcttgattggtccaaaagagctgcgatttgcgttgggacagcttcgggtttagctttccttcacgaggaagtcgaacctcatgttgttcaccgtgacatcaaggcgagtaatatcttactagactcaaacttttctcccaaaattggtgatttcgggttggctaagctttttccagacaatgtcactcatgtcagtacccgagtcgctggaacagtgggatacttggctccagaatatgcacttcttggtcaactgacaaaaaaagcagacgtttacagcttcgggatacttgtgcttgaggtcattagtggtaatagtagcaccagagccgcctttggagacgagtacatggttcttgttgaatgggtgtggaagctgagagaagaaaggaggctactagagtgtgtagatccagaactaaccaagttccccgcagatgaagtgacccgtttcatcaaggtggctcttttctgcactcaagccgcggcgcaaaagagaccaaacatgaagcaagtgatggagatgcttcgcaggaaagagcttaacctcaacgaggatgccttaacggaacctggcgtctacagaggtgtcaacaggggacgcaaccaccgtggaatcggtcttagggtcggccaaggaggcagctcacaggagagctcgtcaacgcaacgtgacaaagggaaaagctcagccgttcctcaagggtcgacgtccaactctaatatttccttccagagcatcacagagttggctcctagatgatttttttctgttaatagagcacaattttattcttgagtatattaattagtttatgatgtgttaatatcttatacatagggtatatatgaataaaccaaagatgctatctgataaaatgtaatgtagttgtctgacatttccctttgtgtcagaagccagcagtttaaaattatgattggcatgattttgc

SEQ ID NO: 41872 - protein, 393 aa, Arabidopsis thaliana
  peptide (1)..(393): Ceres Seq. ID no. 12328706
  misc_feature (17)..(375): Homolog of NCBI NO: 18405703 NR Description: receptor protein kinase, putative; protein id:
  misc_feature (17)..(375): Homolog of NCBI NO: 6056375 NR Description: Similar to serine/threonine kinases [Arabidopsis
  misc_feature (29)..(333): Homolog of NCBI NO: 38344329 NR Description: OSJNBa0058K23.11 [Oryza sativa (japonica
  misc_feature (22)..(386): Homolog of NCBI NO: 25287648 NR Description: hypothetical protein F19K19.4 [imported] -
  misc_feature (20)..(386): Homolog of NCBI NO: 18394385 NR Description: receptor-like serine/threonine kinase, putative
  misc_feature (30)..(338): Homolog of NCBI NO: 38344039 NR Description: OSJNBb0017I01.6 [Oryza sativa (japonica
  misc_feature (13)..(393): Homolog of NCBI NO: 34901978 NR Description: putative receptor ser/thr protein
  misc_feature (11)..(393): Homolog of NCBI NO: 6403501 NR Description: putative protein kinase [Arabidopsis thaliana]
  misc_feature (11)..(393): Homolog of NCBI NO: 5923666 NR Description: putative receptor ser/thr protein kinase
  misc_feature (1)..(393): Homolog of NCBI NO: 18398327 NR Description: putative receptor ser/thr protein kinase
MRYNCFGLLDMCNGSDRLGQREAEEICTNNVRVFSYNSLRSATDSFHPTNRIGGGGYGVVFKGVLRDGTQVAVKSLSAESKQGTREFLTEINLISNIHHPNLVKLIGCCIEGNNRILVYEYLENNSLASVLLGSRSRYVPLDWSKRAAICVGTASGLAFLHEEVEPHVVHRDIKASNILLDSNFSPKIGDFGLAKLFPDNVTHVSTRVAGTVGYLAPEYALLGQLTKKADVYSFGILVLEVISGNSSTRAAFGDEYMVLVEWVWKLREERRLLECVDPELTKFPADEVTRFIKVALFCTQAAAQKRPNMKQVMEMLRRKELNLNEDALTEPGVYRGVNRGRNHRGIGLRVGQGGSSQESSSTQRDKGKSSAVPQGSTSNSNISFQSITELAPR

SEQ ID NO: 41873 - protein, 383 aa, Arabidopsis thaliana
  peptide (1)..(383): Ceres Seq. ID no. 12328707
  misc_feature (7)..(365): Homolog of NCBI NO: 18405703 NR Description: receptor protein kinase, putative; protein id:
  misc_feature (7)..(365): Homolog of NCBI NO: 6056375 NR Description: Similar to serine/threonine kinases [Arabidopsis
  misc_feature (19)..(323): Homolog of NCBI NO: 38344329 NR Description: OSJNBa0058K23.11 [Oryza sativa (japonica
  misc_feature (12)..(376): Homolog of NCBI NO: 25287648 NR Description: hypothetical protein F19K19.4 [imported] -
  misc_feature (10)..(376): Homolog of NCBI NO: 18394385 NR Description: receptor-like serine/threonine kinase, putative
  misc_feature (20)..(328): Homolog of NCBI NO: 38344039 NR Description: OSJNBb0017I01.6 [Oryza sativa (japonica
  misc_feature (3)..(383): Homolog of NCBI NO: 34901978 NR Description: putative receptor ser/thr protein
  misc_feature (1)..(383): Homolog of NCBI NO: 6403501 NR Description: putative protein kinase [Arabidopsis thaliana]
  misc_feature (1)..(383): Homolog of NCBI NO: 5923666 NR Description: putative receptor ser/thr protein kinase
  misc_feature (1)..(383): Homolog of NCBI NO: 18398327 NR Description: putative receptor ser/thr protein kinase
MCNGSDRLGQREAEEICTNNVRVFSYNSLRSATDSFHPTNRIGGGGYGVVFKGVLRDGTQVAVKSLSAESKQGTREFLTEINLISNIHHPNLVKLIGCCIEGNNRILVYEYLENNSLASVLLGSRSRYVPLDWSKRAAICVGTASGLAFLHEEVEPHVVHRDIKASNILLDSNFSPKIGDFGLAKLFPDNVTHVSTRVAGTVGYLAPEYALLGQLTKKADVYSFGILVLEVISGNSSTRAAFGDEYMVLVEWVWKLREERRLLECVDPELTKFPADEVTRFIKVALFCTQAAAQKRPNMKQVMEMLRRKELNLNEDALTEPGVYRGVNRGRNHRGIGLRVGQGGSSQESSSTQRDKGKSSAVPQGSTSNSNISFQSITELAPR

SEQ ID NO: 41874 - DNA, 1999 bp, Arabidopsis thaliana
  misc_feature (1)..(1999): Ceres Seq. ID no. 13499840
  misc_feature: MA Experiment ID: 108573 Result: Down-regulated in Transcription
  misc_feature: MA Experiment 108573 PARAMETER Experiment Name: At_Drought_cDNA_P Parameter: Timepoint (hr) Value: 6
  misc_feature: MA Experiment 108573 PARAMETER Experiment Name: At_Drought_cDNA_P Parameter: Tissue Value: Aerial
  misc_feature: MA Experiment 108573 PARAMETER Experiment Name: At_Drought_cDNA_P Parameter: Treatment Value: Drought vs. No Drought
  misc_feature: MA Experiment ID: 20000179 Result: Up-regulated in Transcription
  misc_feature: MA Experiment 20000179 PARAMETER Experiment Name: At_Germinating_Seeds_P Parameter: Age (hr) Value: 6 vs. 0
  misc_feature: MA Experiment 20000179 PARAMETER Experiment Name: At_Germinating_Seeds_P Parameter: Tissue Value: Germinating Seeds
  misc_feature: MA Experiment ID: 20000180 Result: Up-regulated in Transcription
  misc_feature: MA Experiment 20000180 PARAMETER Experiment Name: At_Germinating_Seeds_P Parameter: Age (hr) Value: 24 vs. 0
  misc_feature: MA Experiment 20000180 PARAMETER Experiment Name: At_Germinating_Seeds_P Parameter: Tissue Value: Germinating Seeds
  misc_feature: MA Experiment ID: 20000234 Result: Down-regulated in Transcription
  misc_feature: MA Experiment 20000234 PARAMETER Experiment Name: At_Siliques_P Parameter: Age (day) Value: 21
  misc_feature: MA Experiment 20000234 PARAMETER Experiment Name: At_Siliques_P Parameter: Organism Value: A. thaliana
  misc_feature: MA Experiment 20000234 PARAMETER Experiment Name: At_Siliques_P Parameter: Plant Line Value: WS
  misc_feature: MA Experiment 20000234 PARAMETER Experiment Name: At_Siliques_P Parameter: Tissue Value: Less Than 5mm Siliques vs. Whole Plant
  misc_feature: MA Experiment ID: 20000235 Result: Down-regulated in Transcription
  misc_feature: MA Experiment 20000235 PARAMETER Experiment Name: At_Siliques_P Parameter: Age (day) Value: 21
  misc_feature: MA Experiment 20000235 PARAMETER Experiment Name: At_Siliques_P Parameter: Organism Value: A. thaliana
  misc_feature: MA Experiment 20000235 PARAMETER Experiment Name: At_Siliques_P Parameter: Plant Line Value: WS
  misc_feature: MA Experiment 20000235 PARAMETER Experiment Name: At_Siliques_P Parameter: Tissue Value: 5-10mm Siliques vs. Whole Plant
  misc_feature: MA Experiment ID: 20000264 Result: Down-regulated in Transcription
  misc_feature: MA Experiment 20000264 PARAMETER Experiment Name: At_Open_Flower_P Parameter: Age (day) Value: 21
  misc_feature: MA Experiment 20000264 PARAMETER Experiment Name: At_Open_Flower_P Parameter: Plant Line Value: WS
  misc_feature: MA Experiment 20000264 PARAMETER Experiment Name: At_Open_Flower_P Parameter: Tissue Value: Open Flower vs. Whole Plant
  misc_feature: MA Experiment ID: 20000265 Result: Down-regulated in Transcription
  misc_feature: MA Experiment 20000265 PARAMETER Experiment Name: At_Open_Flower_P Parameter: Age (day) Value: 21
  misc_feature: MA Experiment 20000265 PARAMETER Experiment Name: At_Open_Flower_P Parameter: Plant Line Value: WS
  misc_feature: MA Experiment 20000265 PARAMETER Experiment Name: At_Open_Flower_P Parameter: Tissue Value: Closed Flower vs. Whole Plant
  misc_feature: MA Experiment ID: 20000286 Result: Down-regulated in Transcription
  misc_feature: MA Experiment 20000286 PARAMETER Experiment Name: At_Open_Flower_P Parameter: Age (day) Value: 21
  misc_feature: MA Experiment 20000286 PARAMETER Experiment Name: At_Open_Flower_P Parameter: Plant Line Value: WS
  misc_feature: MA Experiment 20000286 PARAMETER Experiment Name: At_Open_Flower_P Parameter: Tissue Value: Half Open vs. Whole Plant
  misc_feature: MA Experiment ID: 20000794 Result: Down-regulated in Transcription
  misc_feature: MA Experiment 20000794 PARAMETER Experiment Name: At_Petals_P Parameter: Age (day) Value: 23-25 days
  misc_feature: MA Experiment 20000794 PARAMETER Experiment Name: At_Petals_P Parameter: Plant Line Value: WS
  misc_feature: MA Experiment 20000794 PARAMETER Experiment Name: At_Petals_P Parameter: Tissue Value: Petals vs. Whole plant
  misc_feature: MA Experiment ID: 20001911 Result: Down-regulated in Transcription
  misc_feature: MA Experiment 20001911 PARAMETER Experiment Name: At_Drought_Reproduction_P Parameter: Age (day) Value: 40
  misc_feature: MA Experiment 20001911 PARAMETER Experiment Name: At_Drought_Reproduction_P Parameter: Organism Value: A. thaliana
  misc_feature: MA Experiment 20001911 PARAMETER Experiment Name: At_Drought_Reproduction_P Parameter: Plant Line Value: WS
  misc_feature: MA Experiment 20001911 PARAMETER Experiment Name: At_Drought_Reproduction_P Parameter: Timepoint (day) Value: 10
  misc_feature: MA Experiment 20001911 PARAMETER Experiment Name: At_Drought_Reproduction_P Parameter: Tissue Value: Flowers
  misc_feature: MA Experiment 20001911 PARAMETER Experiment Name: At_Drought_Reproduction_P Parameter: Treatment Value: Drought vs. No Drought
gtggatttgagatgatccctgcttcaatggaggaagctcaccagctggagtcgagatccgatgacctaagtcaacggagaagctactggagatggaggaagcaggattttttcccggaattctcttttcagagcttctctacctacaaatcagctctctccgccacttgtccacgcctcgccgatcgtcttctctctcgctcttccgatgcgtacgagctcgatgcagcccgccgcgaaagcgagaaccctatgcgtcgttgtctcacttggtgggacttgctctggcttagctttggttctgttgttggttcgggtgtgttcgtgatcacgggtcaggaggctcgagttggagctggtcctgctgttgttctctcctacgctatctctggtgtctctgcattgctctcagttctctgttatgctgagtttggagttgagattcctgtcgctggaggttctttctcttatcttagggttgaattgggggattttattgcctttattgctgctgggaatattcttcttgaggctatggttggtgctgctggattagggaggtcatggtcttcgtatctagctagtttggtcaagaatgattctgattattttcggattaaagtcgattcctttgctaaagggtttgatcttttggatccggttgctgttgcagtgcttttagttgctaatggtattgccatgactggaacaaagaggacttcttggttgaatttgattacttccatggtcactgtttgtattattgtgtttatcgtcgttgtggggtttactcattcaaaaacctcaaatttggttccttttttcccttatggagcgaaaggtgtggtgcaatctgctgcagttgtctactggtcatacactggttttgatatggtggctaacatggctgaagaaaccgagaaaccttccagagatattccaattggtttggttggttcgatgtctatgatcactgtggtttactgtttgatggctctggccttgactatgatggtgaaatacactgaaattgatgcgaatgcagcttattctgttgcttttgctcagattgggatgaaatgggcgaagtacttggttggtatatgcgctttaaagggaatgaccacaagcctgcttgttggctctctaggccaagctcggtacaccactcagattgctcggtctcatatgattcctccatggtttgctttggttcatccaaaaacaggaacccctatttatgctactctccttgtaaccatactcagttcaataatatccttcttcaccagcttagaggttttatcaagcgttttctcctttgctaccctcttcattttcatgctcgtggcagtagcattgcttgtgagacgttactacgtgaaggatgtcactcctgaggccggtttgttgaagtttcttggttttctgtttttgataattgcttcctccattggagtatcagcgctttggaactcaggcgttaaaggttggatcgcttacacagtgactggagttatttggtttataggcactttagggttggcattgcttccgaaatatcgtgttcctaaggtatggggagtcccactagttccgtggttgccatcgttttcaatcgccatgaatctattccttatcggatcactcggttatgtagcattcttgagattcattatctgcaccatggtgatgcttttgtactacctattcgttggtcttcatgcaacctatgatgtagctcatcagcctttggaggaagcaaagtttgagggagagagataaaagaatcgatcgtaacacttcactacgtttggtaaattgtataaattcccttgttttctgatgtgatttcaatattcttctattaaaatgtacaataatactatcgatcttgttttcgtgttttctcattcttttcatttttcaatgttgaaacttattaacttgttgaactctgttgtatttgtttctatcttggaaatttaaaattggagttg

SEQ ID NO: 41875 - protein, 593 aa, Arabidopsis thaliana
  peptide (1)..(593): Ceres Seq. ID no. 13499841
  misc_feature (81)..(458): Homolog of NCBI NO: 24667468 NR Description: CG13248-PA [Drosophila melanogaster]
  misc_feature (51)..(577): Homolog of NCBI NO: 38345948 NR Description: OSJNBb0103I08.20 [Oryza sativa (japonica
  misc_feature (41)..(578): Homolog of NCBI NO: 15238312 NR Description: amino acid transport - like protein [Arabidopsis
  misc_feature (30)..(578): Homolog of NCBI NO: 15228334 NR Description: amino acid transporter -related [Arabidopsis
  misc_feature (134)..(584): Homolog of NCBI NO: 19699365 NR Description: At2g34960/F19I3.19 [Arabidopsis thaliana]
  misc_feature (77)..(586): Homolog of NCBI NO: 1076291 NR Description: amino acid transport protein AAT1 - Arabidopsis
  misc_feature (20)..(586): Homolog of NCBI NO: 30685317 NR Description: amino acid transport protein AAT1 [Arabidopsis
  misc_feature (23)..(581): Homolog of NCBI NO: 34903850 NR Description: unnamed protein product [Oryza sativa (japonica
  misc_feature (24)..(584): Homolog of NCBI NO: 15226868 NR Description: amino acid transporter -related [Arabidopsis
  misc_feature (4)..(593): Homolog of NCBI NO: 15220035 NR Description: amino acid transporter -related [Arabidopsis
GFEMIPASMEEAHQLESRSDDLSQRRSYWRWRKQDFFPEFSFQSFSTYKSALSATCPRLADRLLSRSSDAYELDAARRESENPMRRCLTWWDLLWLSFGSVVGSGVFVITGQEARVGAGPAVVLSYAISGVSALLSVLCYAEFGVEIPVAGGSFSYLRVELGDFIAFIAAGNILLEAMVGAAGLGRSWSSYLASLVKNDSDYFRIKVDSFAKGFDLLDPVAVAVLLVANGIAMTGTKRTSWLNLITSMVTVCIIVFIVVVGFTHSKTSNLVPFFPYGAKGVVQSAAVVYWSYTGFDMVANMAEETEKPSRDIPIGLVGSMSMITVVYCLMALALTMMVKYTEIDANAAYSVAFAQIGMKWAKYLVGICALKGMTTSLLVGSLGQARYTTQIARSHMIPPWFALVHPKTGTPIYATLLVTILSSIISFFTSLEVLSSVFSFATLFIFMLVAVALLVRRYYVKDVTPEAGLLKFLGFLFLIIASSIGVSALWNSGVKGWIAYTVTGVIWFIGTLGLALLPKYRVPKVWGVPLVPWLPSFSIAMNLFLIGSLGYVAFLRFIICTMVMLLYYLFVGLHATYDVAHQPLEEAKFEGER

SEQ ID NO: 41876 - protein, 590 aa, Arabidopsis thaliana
  peptide (1)..(590): Ceres Seq. ID no. 13499842
  misc_feature (78)..(455): Homolog of NCBI NO: 24667468 NR Description: CG13248-PA [Drosophila melanogaster]
  misc_feature (48)..(574): Homolog of NCBI NO: 38345948 NR Description: OSJNBb0103I08.20 [Oryza sativa (japonica
  misc_feature (38)..(575): Homolog of NCBI NO: 15238312 NR Description: amino acid transport - like protein [Arabidopsis
  misc_feature (27)..(575): Homolog of NCBI NO: 15228334 NR Description: amino acid transporter -related [Arabidopsis
  misc_feature (131)..(581): Homolog of NCBI NO: 19699365 NR Description: At2g34960/F19I3.19 [Arabidopsis thaliana]
  misc_feature (74)..(583): Homolog of NCBI NO: 1076291 NR Description: amino acid transport protein AAT1 - Arabidopsis
  misc_feature (17)..(583): Homolog of NCBI NO: 30685317 NR Description: amino acid transport protein AAT1 [Arabidopsis
  misc_feature (20)..(578): Homolog of NCBI NO: 34903850 NR Description: unnamed protein product [Oryza sativa (japonica
  misc_feature (21)..(581): Homolog of NCBI NO: 15226868 NR Description: amino acid transporter -related [Arabidopsis
  misc_feature (1)..(590): Homolog of NCBI NO: 15220035 NR Description: amino acid transporter -related [Arabidopsis
MIPASMEEAHQLESRSDDLSQRRSYWRWRKQDFFPEFSFQSFSTYKSALSATCPRLADRLLSRSSDAYELDAARRESENPMRRCLTWWDLLWLSFGSVVGSGVFVITGQEARVGAGPAVVLSYAISGVSALLSVLCYAEFGVEIPVAGGSFSYLRVELGDFIAFIAAGNILLEAMVGAAGLGRSWSSYLASLVKNDSDYFRIKVDSFAKGFDLLDPVAVAVLLVANGIAMTGTKRTSWLNLITSMVTVCIIVFIVVVGFTHSKTSNLVPFFPYGAKGVVQSAAVVYWSYTGFDMVANMAEETEKPSRDIPIGLVGSMSMITVVYCLMALALTMMVKYTEIDANAAYSVAFAQIGMKWAKYLVGICALKGMTTSLLVGSLGQARYTTQIARSHMIPPWFALVHPKTGTPIYATLLVTILSSIISFFTSLEVLSSVFSFATLFIFMLVAVALLVRRYYVKDVTPEAGLLKFLGFLFLIIASSIGVSALWNSGVKGWIAYTVTGVIWFIGTLGLALLPKYRVPKVWGVPLVPWLPSFSIAMNLFLIGSLGYVAFLRFIICTMVMLLYYLFVGLHATYDVAHQPLEEAKFEGER

SEQ ID NO: 41877 - protein, 585 aa, Arabidopsis thaliana
  peptide (1)..(585): Ceres Seq. ID no. 13499843
  misc_feature (73)..(450): Homolog of NCBI NO: 24667468 NR Description: CG13248-PA [Drosophila melanogaster]
  misc_feature (43)..(569): Homolog of NCBI NO: 38345948 NR Description: OSJNBb0103I08.20 [Oryza sativa (japonica
  misc_feature (33)..(570): Homolog of NCBI NO: 15238312 NR Description: amino acid transport - like protein [Arabidopsis
  misc_feature (22)..(570): Homolog of NCBI NO: 15228334 NR Description: amino acid transporter -related [Arabidopsis
  misc_feature (126)..(576): Homolog of NCBI NO: 19699365 NR Description: At2g34960/F19I3.19 [Arabidopsis thaliana]
  misc_feature (69)..(578): Homolog of NCBI NO: 1076291 NR Description: amino acid transport protein AAT1 - Arabidopsis
  misc_feature (12)..(578): Homolog of NCBI NO: 30685317 NR Description: amino acid transport protein AAT1 [Arabidopsis
  misc_feature (15)..(573): Homolog of NCBI NO: 34903850 NR Description: unnamed protein product [Oryza sativa (japonica
  misc_feature (16)..(576): Homolog of NCBI NO: 15226868 NR Description: amino acid transporter -related [Arabidopsis
  misc_feature (1)..(585): Homolog of NCBI NO: 15220035 NR Description: amino acid transporter -related [Arabidopsis
MEEAHQLESRSDDLSQRRSYWRWRKQDFFPEFSFQSFSTYKSALSATCPRLADRLLSRSSDAYELDAARRESENPMRRCLTWWDLLWLSFGSVVGSGVFVITGQEARVGAGPAVVLSYAISGVSALLSVLCYAEFGVEIPVAGGSFSYLRVELGDFIAFIAAGNILLEAMVGAAGLGRSWSSYLASLVKNDSDYFRIKVDSFAKGFDLLDPVAVAVLLVANGIAMTGTKRTSWLNLITSMVTVCIIVFIVVVGFTHSKTSNLVPFFPYGAKGVVQSAAVVYWSYTGFDMVANMAEETEKPSRDIPIGLVGSMSMITVVYCLMALALTMMVKYTEIDANAAYSVAFAQIGMKWAKYLVGICALKGMTTSLLVGSLGQARYTTQIARSHMIPPWFALVHPKTGTPIYATLLVTILSSIISFFTSLEVLSSVFSFATLFIFMLVAVALLVRRYYVKDVTPEAGLLKFLGFLFLIIASSIGVSALWNSGVKGWIAYTVTGVIWFIGTLGLALLPKYRVPKVWGVPLVPWLPSFSIAMNLFLIGSLGYVAFLRFIICTMVMLLYYLFVGLHATYDVAHQPLEEAKFEGER

SEQ ID NO: 41878 - DNA, 1529 bp, Arabidopsis thaliana
  misc_feature (1)..(1529): Ceres Seq. ID no. 12579645
  misc_feature: MA Experiment ID: 108605 Result: Down-regulated in Transcription
  misc_feature: MA Experiment 108605 PARAMETER Experiment Name: At_100uM_ABA_cDNA_P Parameter: Timepoint (hr) Value: 6
  misc_feature: MA Experiment 108605 PARAMETER Experiment Name: At_100uM_ABA_cDNA_P Parameter: Tissue Value: Aerial
  misc_feature: MA Experiment 108605 PARAMETER Experiment Name: At_100uM_ABA_cDNA_P Parameter: Treatment Value: 100uM ABA vs. No Treatment
  misc_feature: MA Experiment ID: 108607 Result: Down-regulated in Transcription
  misc_feature: MA Experiment 108607 PARAMETER Experiment Name: At_100uM_ABA_cDNA_P Parameter: Timepoint (hr) Value: 4
  misc_feature: MA Experiment 108607 PARAMETER Experiment Name: At_100uM_ABA_cDNA_P Parameter: Tissue Value: Aerial
  misc_feature: MA Experiment 108607 PARAMETER Experiment Name: At_100uM_ABA_cDNA_P Parameter: Treatment Value: 100uM ABA vs. No Treatment
  misc_feature: MA Experiment ID: 20000227 Result: Up-regulated in Transcription
  misc_feature: MA Experiment 20000227 PARAMETER Experiment Name: At_Root-Tips-vs-Tops_P Parameter: Tissue Value: Root Tips vs. Root Tops
  misc_feature: MA Experiment ID: 20000437 Result: Down-regulated in Transcription
  misc_feature: MA Experiment 20000437 PARAMETER Experiment Name: At_Drought_P Parameter: Age (day) Value: 8
  misc_feature: MA Experiment 20000437 PARAMETER Experiment Name: At_Drought_P Parameter: Organism Value: A. thaliana
  misc_feature: MA Experiment 20000437 PARAMETER Experiment Name: At_Drought_P Parameter: Plant Line Value: WS
  misc_feature: MA Experiment 20000437 PARAMETER Experiment Name: At_Drought_P Parameter: Timepoint (hr) Value: 24
  misc_feature: MA Experiment 20000437 PARAMETER Experiment Name: At_Drought_P Parameter: Tissue Value: Whole Plant
  misc_feature: MA Experiment 20000437 PARAMETER Experiment Name: At_Drought_P Parameter: Treatment Value: Drought vs. No Drought
  misc_feature: MA Experiment ID: 20000438 Result: Up-regulated in Transcription
  misc_feature: MA Experiment 20000438 PARAMETER Experiment Name: At_Shoots__P Parameter: Age (day) Value: 14
  misc_feature: MA Experiment 20000438 PARAMETER Experiment Name: At_Shoots__P Parameter: Tissue Value: Shoots vs. Whole Plant
  misc_feature: MA Experiment ID: 20001904 Result: Down-regulated in Transcription
  misc_feature: MA Experiment 20001904 PARAMETER Experiment Name: At_Drought_Reproduction_P Parameter: Age (day) Value: 37
  misc_feature: MA Experiment 20001904 PARAMETER Experiment Name: At_Drought_Reproduction_P Parameter: Organism Value: A. thaliana
  misc_feature: MA Experiment 20001904 PARAMETER Experiment Name: At_Drought_Reproduction_P Parameter: Plant Line Value: WS
  misc_feature: MA Experiment 20001904 PARAMETER Experiment Name: At_Drought_Reproduction_P Parameter: Timepoint (day) Value: 7
  misc_feature: MA Experiment 20001904 PARAMETER Experiment Name: At_Drought_Reproduction_P Parameter: Tissue Value: Rosettes
  misc_feature: MA Experiment 20001904 PARAMETER Experiment Name: At_Drought_Reproduction_P Parameter: Treatment Value: Drought vs. No Drought
  misc_feature: MA Experiment ID: 20001905 Result: Down-regulated in Transcription
  misc_feature: MA Experiment 20001905 PARAMETER Experiment Name: At_Drought_Reproduction_P Parameter: Age (day) Value: 40
  misc_feature: MA Experiment 20001905 PARAMETER Experiment Name: At_Drought_Reproduction_P Parameter: Organism Value: A. thaliana
  misc_feature: MA Experiment 20001905 PARAMETER Experiment Name: At_Drought_Reproduction_P Parameter: Plant Line Value: WS
  misc_feature: MA Experiment 20001905 PARAMETER Experiment Name: At_Drought_Reproduction_P Parameter: Timepoint (day) Value: 10
  misc_feature: MA Experiment 20001905 PARAMETER Experiment Name: At_Drought_Reproduction_P Parameter: Tissue Value: Rosettes
  misc_feature: MA Experiment 20001905 PARAMETER Experiment Name: At_Drought_Reproduction_P Parameter: Treatment Value: Drought vs. No Drought
cctaatcgaaaaaatcttcctcttcatcttcttctgttctctctctataaatacaagtttactcttcctcttcctcaaatctctgactcttctctgcattatctcttcgatctctccaactctccaaaaccttcctcagaatgggaactaccaatggaacagactatggagcatacacatacaaggagctagaaagagagcaatattggccatctgagaatctcaagatatcaataacaggagctggaggtttcattgcatctcacattgctcgtcgtttgaagcacgaaggtcattacgtgattgcttctgactggaaaaagaatgaacacatgactgaagacatgttctgtgatgagttccatcttgttgatcttagggttatggagaattgtctcaaagttactgaaggagttgatcatgtttttaacttagctgctgatatgggtggtatgggttttatccagagtaatcactctgtgattatgtataataatactatgattagtttcaatatgattgaggctgctaggatcaatgggattaagaggttcttttatgcttcgagtgcttgtatctatccagagtttaagcagttggagactactaatgtgagcttgaaggagtcagatgcttggcctgcagagcctcaagatgcttatggtttggagaagcttgctacggaggagttgtgtaagcattacaacaaagattttggtattgagtgtcgaattggaaggttccataacatttatggtccttttggaacatggaaaggtggaagggagaaggctccagctgctttctgtaggaaggctcagacttccactgataggtttgagatgtggggagatgggcttcagacccgttcttttacctttatcgatgagtgtgttgaaggtgtactcaggttgacaaaatcagatttccgtgagccggtgaacatcggaagcgatgagatggtgagcatgaatgagatggctgagatggttctcagctttgaggaaaagaagcttccaattcaccacattcctggcccggaaggtgttcgtggtcgtaactcagacaacaatctgatcaaagaaaagcttggttgggctcctaatatgagattgaaggaggggcttagaataacctacttctggataaaggaacagatcgagaaagagaaagcaaagggaagcgatgtgtcgctttacgggtcatcaaaggtggttggaactcaagcaccggttcagctaggctcactccgcgcggctgatggaaaagagtgaagttcaccaaagtataagtcaagctcaaatatggccttttaagttcagcaaaatgtttagatatatttttaggtagcttcctattaaaaaagcaataataagtgttttggattttggttccttctattctgctaatccttgtttatgtttagttgaaaaagtttgcttgcattgttaagtctgttatcatattattgtggtcctttcaaaaaaaaaaaaaaagagctcttggatccggccataagggcctgatcc

SEQ ID NO: 41879 - protein, 377 aa, Arabidopsis thaliana; identical to SEQ ID NO: 23828
  peptide (1)..(377): Ceres Seq. ID no. 12579646
  misc_feature (30)..(340): Pfam Name: NAD dependent epimerase/dehydratase family Pfam Description: NAD dependent epimerase/dehydratase family
  misc_feature (30)..(346): Homolog of NCBI NO: 23500289 NR Description: NAD-dependent epimerase/dehydratase family
  misc_feature (26)..(338): Homolog of NCBI NO: 17232318 NR Description: dTDP-glucose dehydratase [Nostoc sp. PCC 7120]
  misc_feature (26)..(342): Homolog of NCBI NO: 37523361 NR Description: similar to GDP-fucose synthetase [Gloeobacter
  misc_feature (29)..(341): Homolog of NCBI NO: 24212751 NR Description: dTDPglucose 4,6-dehydratase
  misc_feature (29)..(338): Homolog of NCBI NO: 22298175 NR Description: GDP-fucose synthetase [Thermosynechococcus
  misc_feature (32)..(179): Homolog of NCBI NO: 23008810 NR Description: hypothetical protein [Magnetospirillum
  misc_feature (32)..(346): Homolog of NCBI NO: 9937230 NR Description: sugar epimerase BlmG [Streptomyces verticillus]
  misc_feature (11)..(342): Homolog of NCBI NO: 28170704 NR Description: Ata17 protein [Saccharothrix mutabilis subsp.
  misc_feature (1)..(377): Homolog of NCBI NO: 37534380 NR Description: putative epimerase/dehydratase
  misc_feature (1)..(377): Homolog of NCBI NO: 15241945 NR Description: epimerase/dehydratase - like protein

SEQ ID NO: 41880 - protein, 313 aa, Arabidopsis thaliana; identical to SEQ ID NO: 23829
  peptide (1)..(313): Ceres Seq. ID no. 12579647
  misc_feature (1)..(276): Pfam Name: NAD dependent epimerase/dehydratase family Pfam Description: NAD dependent epimerase/dehydratase family
  misc_feature (1)..(282): Homolog of NCBI NO: 23500289 NR Description: NAD-dependent epimerase/dehydratase family
  misc_feature (1)..(274): Homolog of NCBI NO: 17232318 NR Description: dTDP-glucose dehydratase [Nostoc sp. PCC 7120]
  misc_feature (1)..(278): Homolog of NCBI NO: 37523361 NR Description: similar to GDP-fucose synthetase [Gloeobacter
  misc_feature (1)..(277): Homolog of NCBI NO: 24212751 NR Description: dTDPglucose 4,6-dehydratase
  misc_feature (1)..(274): Homolog of NCBI NO: 22298175 NR Description: GDP-fucose synthetase [Thermosynechococcus
  misc_feature (1)..(115): Homolog of NCBI NO: 23008810 NR Description: hypothetical protein [Magnetospirillum
  misc_feature (1)..(282): Homolog of NCBI NO: 9937230 NR Description: sugar epimerase BlmG [Streptomyces verticillus]
  misc_feature (1)..(278): Homolog of NCBI NO: 28170704 NR Description: Ata17 protein [Saccharothrix mutabilis subsp.
  misc_feature (1)..(313): Homolog of NCBI NO: 37534380 NR Description: putative epimerase/dehydratase
  misc_feature (1)..(313): Homolog of NCBI NO: 15241945 NR Description: epimerase/dehydratase - like protein

SEQ ID NO: 41881 - protein, 309 aa, Arabidopsis thaliana
  peptide (1)..(309): Ceres Seq. ID no. 12579648
  misc_feature (1)..(272): Pfam Name: NAD dependent epimerase/dehydratase family Pfam Description: NAD dependent epimerase/dehydratase family
  misc_feature (1)..(278): Homolog of NCBI NO: 23500289 NR Description: NAD-dependent epimerase/dehydratase family
  misc_feature (1)..(270): Homolog of NCBI NO: 17232318 NR Description: dTDP-glucose dehydratase [Nostoc sp. PCC 7120]
  misc_feature (1)..(274): Homolog of NCBI NO: 37523361 NR Description: similar to GDP-fucose synthetase [Gloeobacter
  misc_feature (1)..(273): Homolog of NCBI NO: 24212751 NR Description: dTDPglucose 4,6-dehydratase
  misc_feature (1)..(270): Homolog of NCBI NO: 22298175 NR Description: GDP-fucose synthetase [Thermosynechococcus
  misc_feature (1)..(111): Homolog of NCBI NO: 23008810 NR Description: hypothetical protein [Magnetospirillum
  misc_feature (1)..(278): Homolog of NCBI NO: 9937230 NR Description: sugar epimerase BlmG [Streptomyces verticillus]
  misc_feature (1)..(274): Homolog of NCBI NO: 28170704 NR Description: Ata17 protein [Saccharothrix mutabilis subsp.
  misc_feature (1)..(309): Homolog of NCBI NO: 37534380 NR Description: putative epimerase/dehydratase
  misc_feature (1)..(309): Homolog of NCBI NO: 15241945 NR Description: epimerase/dehydratase - like protein
MFCDEFHLVDLRVMENCLKVTEGVDHVFNLAADMGGMGFIQSNHSVIMYNNTMISFNMIEAARINGIKRFFYASSACIYPEFKQLETTNVSLKESDAWPAEPQDAYGLEKLATEELCKHYNKDFGIECRIGRFHNIYGPFGTWKGGREKAPAAFCRKAQTSTDRFEMWGDGLQTRSFTFIDECVEGVLRLTKSDFREPVNIGSDEMVSMNEMAEMVLSFEEKKLPIHHIPGPEGVRGRNSDNNLIKEKLGWAPNMRLKEGLRITYFWIKEQIEKEKAKGSDVSLYGSSKVVGTQAPVQLGSLRAADGKE

SEQ ID NO: 41882 - DNA, 1134 bp, Arabidopsis thaliana
  misc_feature (1)..(1134): Ceres Seq. ID no. 13488637
  misc_feature: MA Experiment ID: 108501 Result: Up-regulated in Transcription
  misc_feature: MA Experiment 108501 PARAMETER Experiment Name: At_ap2_floral_buds_cDNA_P Parameter: Plant Line Value: ap2 (Ler.)
  misc_feature: MA Experiment 108501 PARAMETER Experiment Name: At_ap2_floral_buds_cDNA_P Parameter: Tissue Value: Closed Flower
  misc_feature: MA Experiment ID: 108569 Result: Up-regulated in Transcription
  misc_feature: MA Experiment 108569 PARAMETER Experiment Name: At_0.001%_MeJA__cDNA_P Parameter: Timepoint (hr) Value: 6
  misc_feature: MA Experiment 108569 PARAMETER Experiment Name: At_0.001%_MeJA__cDNA_P Parameter: Tissue Value: Aerial
  misc_feature: MA Experiment 108569 PARAMETER Experiment Name: At_0.001%_MeJA__cDNA_P Parameter: Treatment Value: 0.001% MeJA vs. No Treatment
  misc_feature: MA Experiment ID: 108585 Result: Up-regulated in Transcription
  misc_feature: MA Experiment 108585 PARAMETER Experiment Name: At_5mM_NaNP_cDNA_P Parameter: Timepoint (hr) Value: 6
  misc_feature: MA Experiment 108585 PARAMETER Experiment Name: At_5mM_NaNP_cDNA_P Parameter: Tissue Value: Aerial
  misc_feature: MA Experiment 108585 PARAMETER Experiment Name: At_5mM_NaNP_cDNA_P Parameter: Treatment Value: null
  misc_feature: MA Experiment ID: 108595 Result: Down-regulated in Transcription
  misc_feature: MA Experiment 108595 PARAMETER Experiment Name: At_Ler-pi_Ovule_cDNA_P Parameter: Plant Line Value: null
  misc_feature: MA Experiment ID: 20000087 Result: Down-regulated in Transcription
  misc_feature: MA Experiment 20000087 PARAMETER Experiment Name: At_100uM_ABA_Mutants_cDNA_P Parameter: Plant Line Value: WS
  misc_feature: MA Experiment 20000087 PARAMETER Experiment Name: At_100uM_ABA_Mutants_cDNA_P Parameter: Timepoint (hr) Value: 6
  misc_feature: MA Experiment 20000087 PARAMETER Experiment Name: At_100uM_ABA_Mutants_cDNA_P Parameter: Tissue Value: Aerial
  misc_feature: MA Experiment 20000087 PARAMETER Experiment Name: At_100uM_ABA_Mutants_cDNA_P Parameter: Treatment Value: 100uM ABA vs. No Treatment
  misc_feature: MA Experiment ID: 20000113 Result: Down-regulated in Transcription
  misc_feature: MA Experiment 20000113 PARAMETER Experiment Name: At_42deg_Heat_cDNA_P Parameter: Temperature (deg C) Value: 42 vs. 22
  misc_feature: MA Experiment 20000113 PARAMETER Experiment Name: At_42deg_Heat_cDNA_P Parameter: Timepoint (hr) Value: 8
  misc_feature: MA Experiment 20000113 PARAMETER Experiment Name: At_42deg_Heat_cDNA_P Parameter: Tissue Value: Aerial
  misc_feature: MA Experiment ID: 20000173 Result: Down-regulated in Transcription
  misc_feature: MA Experiment 20000173 PARAMETER Experiment Name: At_42deg_Heat_P Parameter: Age (day) Value: 14
  misc_feature: MA Experiment 20000173 PARAMETER Experiment Name: At_42deg_Heat_P Parameter: Organism Value: A. thaliana
  misc_feature: MA Experiment 20000173 PARAMETER Experiment Name: At_42deg_Heat_P Parameter: Plant Line Value: WS
  misc_feature: MA Experiment 20000173 PARAMETER Experiment Name: At_42deg_Heat_P Parameter: Temperature (deg C) Value: 42 vs. 22
  misc_feature: MA Experiment 20000173 PARAMETER Experiment Name: At_42deg_Heat_P Parameter: Timepoint (hr) Value: 6
  misc_feature: MA Experiment 20000173 PARAMETER Experiment Name: At_42deg_Heat_P Parameter: Tissue Value: Aerial
  misc_feature: MA Experiment ID: 20001247 Result: Down-regulated in Transcription
  misc_feature: MA Experiment 20001247 PARAMETER Experiment Name: At_Far-red-induction_P Parameter: Age (day) Value: 7
  misc_feature: MA Experiment 20001247 PARAMETER Experiment Name: At_Far-red-induction_P Parameter: Light Value: Far-red vs. White
  misc_feature: MA Experiment 20001247 PARAMETER Experiment Name: At_Far-red-induction_P Parameter: Organism Value: A. thaliana
  misc_feature: MA Experiment 20001247 PARAMETER Experiment Name: At_Far-red-induction_P Parameter: Plant Line Value: Columbia
  misc_feature: MA Experiment 20001247 PARAMETER Experiment Name: At_Far-red-induction_P Parameter: Timepoint (hr) Value: 1
  misc_feature: MA Experiment 20001247 PARAMETER Experiment Name: At_Far-red-induction_P Parameter: Tissue Value: Whole Plant
  misc_feature: MA Experiment ID: 20001554 Result: Down-regulated in Transcription
  misc_feature: MA Experiment 20001554 PARAMETER Experiment Name: At_Drought_Soil_Dry_P Parameter: Age (day) Value: 21
  misc_feature: MA Experiment 20001554 PARAMETER Experiment Name: At_Drought_Soil_Dry_P Parameter: Organism Value: A. thaliana
  misc_feature: MA Experiment 20001554 PARAMETER Experiment Name: At_Drought_Soil_Dry_P Parameter: Plant Line Value: WS
  misc_feature: MA Experiment 20001554 PARAMETER Experiment Name: At_Drought_Soil_Dry_P Parameter: Post Timepoint (hr) Value: None
  misc_feature: MA Experiment 20001554 PARAMETER Experiment Name: At_Drought_Soil_Dry_P Parameter: Post-Treatment Value: None
  misc_feature: MA Experiment 20001554 PARAMETER Experiment Name: At_Drought_Soil_Dry_P Parameter: Timepoint (day) Value: 7
  misc_feature: MA Experiment 20001554 PARAMETER Experiment Name: At_Drought_Soil_Dry_P Parameter: Treatment Value: Drought vs. No Drought
  misc_feature: MA Experiment ID: 20001560 Result: Up-regulated in Transcription
  misc_feature: MA Experiment 20001560 PARAMETER Experiment Name: At_Drought_Soil_Dry_P Parameter: Age (day) Value: 28
  misc_feature: MA Experiment 20001560 PARAMETER Experiment Name: At_Drought_Soil_Dry_P Parameter: Organism Value: A. thaliana
  misc_feature: MA Experiment 20001560 PARAMETER Experiment Name: At_Drought_Soil_Dry_P Parameter: Plant Line Value: WS
  misc_feature: MA Experiment 20001560 PARAMETER Experiment Name: At_Drought_Soil_Dry_P Parameter: Post Timepoint (hr) Value: None
  misc_feature: MA Experiment 20001560 PARAMETER Experiment Name: At_Drought_Soil_Dry_P Parameter: Post-Treatment Value: None
  misc_feature: MA Experiment 20001560 PARAMETER Experiment Name: At_Drought_Soil_Dry_P Parameter: Timepoint (day) Value: 14
  misc_feature: MA Experiment 20001560 PARAMETER Experiment Name: At_Drought_Soil_Dry_P Parameter: Treatment Value: Drought vs. No Drought
acaacaataaacactcatcgattaaatcttcttcaccggaaaaaatgccttcgatgccagaggaaccaatcctaacaccaacaccagatcgattctgtatgttcccaatccaatacccacagatttgggagatgtacaagaaagccgaagcatccttctggacagccgaagaagtcgatctctctcaagacaatcgcgactgggaaaactcactaaccaacgacgaacgtcacttcattaaacacgtcctcgccttcttcgccgcatcagacggaatcgttctcgagaatctctcaactagattcatgtccgatgttcagatctcagaagctcgtgccttctacggattccaaatcgcgattgagaatattcactccgagatgtatagtctccttctcgacacgtatatcaaagacaacaaagagagagatcatctttttcgtgcaatcgaaaccattccttgtgacgaaaaaagcagaatgggctatgaaatggatcaacggatctcaaagcttcgctgagagaatcgtagcgtttgcttgcgttgaaggtatattcttctccggtagcttttgttcgatattctggttgaagaaacgaggtttaatgcctggactcactttttcaaacgaattgatttcgagagacgaaggtcttcactgtgatttcgcttgtttgatatatagtcttcttagaactaagtttgatgaagatcgtttgaaagcgattgtttgtgatgctgttgagattgagagagagtttgtttgtgacgcgctttcttgtgccttggttgggatgaatcgtgagttgatgagtcagtacattgagttcgttgctgataggttgttggctgcgcttgggtgtggtaaggtgtatggtgtgactaatccttttgattggatggaattgatttcgcttcagggtaagaccaacttttttgagaagagagttggtgagtatcagaaagcttctgttatgtctagtgttcatggaaacgctgcgtttaatgatgatcatgtcttcaagcttgacgaggatttttagattttgcttacttgctttatttttagttttgtaattttcagtataatgaaaaacagatgaagtttaatttgataatggacatttaattcc

SEQ ID NO: 41883 - protein, 243 aa, Arabidopsis thaliana
  peptide (1)..(243): Ceres Seq. ID no. 13488638
  misc_feature (30)..(198): Pfam Name: Ribonucleotide reductase, small chain Pfam Description: Ribonucleotide reductase, small chain
  misc_feature (1)..(243): Homolog of NCBI NO: 28393533 NR Description: putative ribonucleoside-diphosphate reductase
  misc_feature (30)..(243): Homolog of NCBI NO: 34898038 NR Description: putative ribonucleoside-diphosphate reductase
  misc_feature (37)..(243): Homolog of NCBI NO: 1710401 NR Description: RIBONUCLEOSIDE-DIPHOSPHATE REDUCTASE SMALL CHAIN
  misc_feature (30)..(243): Homolog of NCBI NO: 15232077 NR Description: ribonucleotide reductase small subunit -related
MFRSQKLVPSTDSKSRLRIFTPRCIVSFSTRISKTTKREIIFFVQSKPFLVTKKAEWAMKWINGSQSFAERIVAFACVEGIFFSGSFCSIFWLKKRGLMPGLTFSNELISRDEGLHCDFACLIYSLLRTKFDEDRLKAIVCDAVEIEREFVCDALSCALVGMNRELMSQYIEFVADRLLAALGCGKVYGVTNPFDWMELISLQGKTNFFEKRVGEYQKASVMSSVHGNAAFNDDHVFKLDEDF

SEQ ID NO: 41884 - protein, 185 aa, Arabidopsis thaliana
  peptide (1)..(185): Ceres Seq. ID no. 13488639
  misc_feature (1)..(140): Pfam Name: Ribonucleotide reductase, small chain Pfam Description: Ribonucleotide reductase, small chain
  misc_feature (1)..(185): Homolog of NCBI NO: 28393533 NR Description: putative ribonucleoside-diphosphate reductase
  misc_feature (1)..(185): Homolog of NCBI NO: 34898038 NR Description: putative ribonucleoside-diphosphate reductase
  misc_feature (1)..(185): Homolog of NCBI NO: 1710401 NR Description: RIBONUCLEOSIDE-DIPHOSPHATE REDUCTASE SMALL CHAIN
  misc_feature (1)..(185): Homolog of NCBI NO: 15232077 NR Description: ribonucleotide reductase small subunit -related
MKWINGSQSFAERIVAFACVEGIFFSGSFCSIFWLKKRGLMPGLTFSNELISRDEGLHCDFACLIYSLLRTKFDEDRLKAIVCDAVEIEREFVCDALSCALVGMNRELMSQYIEFVADRLLAALGCGKVYGVTNPFDWMELISLQGKTNFFEKRVGEYQKASVMSSVHGNAAFNDDHVFKLDEDF

SEQ ID NO: 41885 - protein, 172 aa, Arabidopsis thaliana
  peptide (1)..(172): Ceres Seq. ID no. 13488640
  misc_feature (21)..(157): Pfam Name: Ribonucleotide reductase, small chain Pfam Description: Ribonucleotide reductase, small chain
  misc_feature (20)..(153): Homolog of NCBI NO: 34898038 NR Description: putative ribonucleoside-diphosphate reductase
  misc_feature (15)..(157): Homolog of NCBI NO: 1710401 NR Description: RIBONUCLEOSIDE-DIPHOSPHATE REDUCTASE SMALL CHAIN
  misc_feature (15)..(157): Homolog of NCBI NO: 15232077 NR Description: ribonucleotide reductase small subunit -related
NNKHSSIKSSSPEKMPSMPEEPILTPTPDRFCMFPIQYPQIWEMYKKAEASFWTAEEVDLSQDNRDWENSLTNDERHFIKHVLAFFAASDGIVLENLSTRFMSDVQISEARAFYGFQIAIENIHSEMYSLLLDTYIKDNKERDHLFRAIETIPCDEKSRMGYEMDQRISKLR

SEQ ID NO: 41886 - DNA, 1444 bp, Arabidopsis thaliana
  misc_feature (1)..(1444): Ceres Seq. ID no. 12339420
  misc_feature: MA Experiment ID: 108435 Result: Down-regulated in Transcription
  misc_feature: MA Experiment 108435 PARAMETER Experiment Name: At_stm_Mutants_cDNA_P Parameter: Plant Line Value: wt Landsburg vs stm
  misc_feature: MA Experiment 108435 PARAMETER Experiment Name: At_stm_Mutants_cDNA_P Parameter: Tissue Value: Shoot Apical Meristem Region
  misc_feature: MA Experiment ID: 108464 Result: Up-regulated in Transcription
  misc_feature: MA Experiment 108464 PARAMETER Experiment Name: At_Germinating_Seeds_cDNA_P Parameter: Age (day) Value: 4 vs. 0
  misc_feature: MA Experiment 108464 PARAMETER Experiment Name: At_Germinating_Seeds_cDNA_P Parameter: Tissue Value: Germinating Seeds
  misc_feature: MA Experiment ID: 108488 Result: Down-regulated in Transcription
  misc_feature: MA Experiment ID: 108572 Result: Down-regulated in Transcription
  misc_feature: MA Experiment 108572 PARAMETER Experiment Name: At_Drought_cDNA_P Parameter: Timepoint (hr) Value: 1
  misc_feature: MA Experiment 108572 PARAMETER Experiment Name: At_Drought_cDNA_P Parameter: Tissue Value: Aerial
  misc_feature: MA Experiment 108572 PARAMETER Experiment Name: At_Drought_cDNA_P Parameter: Treatment Value: Drought vs. No Drought
  misc_feature: MA Experiment ID: 108585 Result: Up-regulated in Transcription
  misc_feature: MA Experiment 108585 PARAMETER Experiment Name: At_5mM_NaNP_cDNA_P Parameter: Timepoint (hr) Value: 6
  misc_feature: MA Experiment 108585 PARAMETER Experiment Name: At_5mM_NaNP_cDNA_P Parameter: Tissue Value: Aerial
  misc_feature: MA Experiment 108585 PARAMETER Experiment Name: At_5mM_NaNP_cDNA_P Parameter: Treatment Value: null
  misc_feature: MA Experiment ID: 108594 Result: Down-regulated in Transcription
  misc_feature: MA Experiment 108594 PARAMETER Experiment Name: At_Ler-rhl_Root_cDNA_P Parameter: Plant Line Value: null
  misc_feature: MA Experiment ID: 20000072 Result: Up-regulated in Transcription
  misc_feature: MA Experiment 20000072 PARAMETER Experiment Name: At_100uM_ABA_Mutants_cDNA_P Parameter: Plant Line Value: CS8105
  misc_feature: MA Experiment 20000072 PARAMETER Experiment Name: At_100uM_ABA_Mutants_cDNA_P Parameter: Timepoint (hr) Value: 6
  misc_feature: MA Experiment 20000072 PARAMETER Experiment Name: At_100uM_ABA_Mutants_cDNA_P Parameter: Tissue Value: Aerial
  misc_feature: MA Experiment 20000072 PARAMETER Experiment Name: At_100uM_ABA_Mutants_cDNA_P Parameter: Treatment Value: 100uM ABA vs. No Treatment
  misc_feature: MA Experiment ID: 20000090 Result: Up-regulated in Transcription
  misc_feature: MA Experiment ID: 20000111 Result: Down-regulated in Transcription
  misc_feature: MA Experiment 20000111 PARAMETER Experiment Name: At_42deg_Heat_cDNA_P Parameter: Temperature (deg C) Value: 42 vs. 22
  misc_feature: MA Experiment 20000111 PARAMETER Experiment Name: At_42deg_Heat_cDNA_P Parameter: Timepoint (hr) Value: 6
  misc_feature: MA Experiment 20000111 PARAMETER Experiment Name: At_42deg_Heat_cDNA_P Parameter: Tissue Value: Aerial
  misc_feature: MA Experiment ID: 20000173 Result: Down-regulated in Transcription
  misc_feature: MA Experiment 20000173 PARAMETER Experiment Name: At_42deg_Heat_P Parameter: Age (day) Value: 14
  misc_feature: MA Experiment 20000173 PARAMETER Experiment Name: At_42deg_Heat_P Parameter: Organism Value: A. thaliana
  misc_feature: MA Experiment 20000173 PARAMETER Experiment Name: At_42deg_Heat_P Parameter: Plant Line Value: WS
  misc_feature: MA Experiment 20000173 PARAMETER Experiment Name: At_42deg_Heat_P Parameter: Temperature (deg C) Value: 42 vs. 22
  misc_feature: MA Experiment 20000173 PARAMETER Experiment Name: At_42deg_Heat_P Parameter: Timepoint (hr) Value: 6
  misc_feature: MA Experiment 20000173 PARAMETER Experiment Name: At_42deg_Heat_P Parameter: Tissue Value: Aerial
  misc_feature: MA Experiment ID: 20000182 Result: Up-regulated in Transcription
  misc_feature: MA Experiment 20000182 PARAMETER Experiment Name: At_2mM_SA_P Parameter: Age (day) Value: 14
  misc_feature: MA Experiment 20000182 PARAMETER Experiment Name: At_2mM_SA_P Parameter: Organism Value: A. thaliana
  misc_feature: MA Experiment 20000182 PARAMETER Experiment Name: At_2mM_SA_P Parameter: Plant Line Value: WS
  misc_feature: MA Experiment 20000182 PARAMETER Experiment Name: At_2mM_SA_P Parameter: Timepoint (hr) Value: 6
  misc_feature: MA Experiment 20000182 PARAMETER Experiment Name: At_2mM_SA_P Parameter: Tissue Value: Aerial
  misc_feature: MA Experiment 20000182 PARAMETER Experiment Name: At_2mM_SA_P Parameter: Treatment Value: 2mM SA vs. No Treatment
  misc_feature: MA Experiment ID: 20000184 Result: Down-regulated in Transcription
  misc_feature: MA Experiment 20000184 PARAMETER Experiment Name: At_Shoots__P Parameter: Age (day) Value: 7
  misc_feature: MA Experiment 20000184 PARAMETER Experiment Name: At_Shoots__P Parameter: Tissue Value: Shoots vs. Whole Plant
  misc_feature: MA Experiment ID: 20000227 Result: Up-regulated in Transcription
  misc_feature: MA Experiment 20000227 PARAMETER Experiment Name: At_Root-Tips-vs-Tops_P Parameter: Tissue Value: Root Tips vs. Root Tops
  misc_feature: MA Experiment ID: 20000264 Result: Up-regulated in Transcription
  misc_feature: MA Experiment 20000264 PARAMETER Experiment Name: At_Open_Flower_P Parameter: Age (day) Value: 21
  misc_feature: MA Experiment 20000264 PARAMETER Experiment Name: At_Open_Flower_P Parameter: Plant Line Value: WS
  misc_feature: MA Experiment 20000264 PARAMETER Experiment Name: At_Open_Flower_P Parameter: Tissue Value: Open Flower vs. Whole Plant
  misc_feature: MA Experiment ID: 20000438 Result: Down-regulated in Transcription
  misc_feature: MA Experiment 20000438 PARAMETER Experiment Name: At_Shoots__P Parameter: Age (day) Value: 14
  misc_feature: MA Experiment 20000438 PARAMETER Experiment Name: At_Shoots__P Parameter: Tissue Value: Shoots vs. Whole Plant
  misc_feature: MA Experiment ID: 20000456 Result: Up-regulated in Transcription
  misc_feature: MA Experiment 20000456 PARAMETER Experiment Name: At_100uM_BA_P Parameter: Age (day) Value: 14
  misc_feature: MA Experiment 20000456 PARAMETER Experiment Name: At_100uM_BA_P Parameter: Organism Value: A. thaliana
  misc_feature: MA Experiment 20000456 PARAMETER Experiment Name: At_100uM_BA_P Parameter: Plant Line Value: WS
  misc_feature: MA Experiment 20000456 PARAMETER Experiment Name: At_100uM_BA_P Parameter: Timepoint (hr) Value: 6
  misc_feature: MA Experiment 20000456 PARAMETER Experiment Name: At_100uM_BA_P Parameter: Tissue Value: Aerial
  misc_feature: MA Experiment 20000456 PARAMETER Experiment Name: At_100uM_BA_P Parameter: Treatment Value: 100uM BA vs. No Treatment
  misc_feature: MA Experiment ID: 20000527 Result: Down-regulated in Transcription
  misc_feature: MA Experiment 20000527 PARAMETER Experiment Name: At_10percent_PEG_P Parameter: Age (day) Value: 20
  misc_feature: MA Experiment 20000527 PARAMETER Experiment Name: At_10percent_PEG_P Parameter: Organism Value: A. thaliana
  misc_feature: MA Experiment 20000527 PARAMETER Experiment Name: At_10percent_PEG_P Parameter: Plant Line Value: WS
  misc_feature: MA Experiment 20000527 PARAMETER Experiment Name: At_10percent_PEG_P Parameter: Timepoint (day) Value: 20
  misc_feature: MA Experiment 20000527 PARAMETER Experiment Name: At_10percent_PEG_P Parameter: Tissue Value: Whole Plant
  misc_feature: MA Experiment 20000527 PARAMETER Experiment Name: At_10percent_PEG_P Parameter: Treatment Value: 10percent PEG vs. No Treatment
  misc_feature: MA Experiment ID: 20000709 Result: Down-regulated in Transcription
  misc_feature: MA Experiment 20000709 PARAMETER Experiment Name: At_15mM_NH4NO3_L-to-H_P Parameter: Age (hr) Value: 14
  misc_feature: MA Experiment 20000709 PARAMETER Experiment Name: At_15mM_NH4NO3_L-to-H_P Parameter: Organism Value: A. thaliana
  misc_feature: MA Experiment 20000709 PARAMETER Experiment Name: At_15mM_NH4NO3_L-to-H_P Parameter: Plant Line Value: WS
  misc_feature: MA Experiment 20000709 PARAMETER Experiment Name: At_15mM_NH4NO3_L-to-H_P Parameter: Timepoint (hr) Value: 4
  misc_feature: MA Experiment 20000709 PARAMETER Experiment Name: At_15mM_NH4NO3_L-to-H_P Parameter: Tissue Value: Aerial
  misc_feature: MA Experiment 20000709 PARAMETER Experiment Name: At_15mM_NH4NO3_L-to-H_P Parameter: Treatment Value: 15mM NH4NO3 vs. 30mM Mannitol
  misc_feature: MA Experiment ID: 20000794 Result: Up-regulated in Transcription
  misc_feature: MA Experiment 20000794 PARAMETER Experiment Name: At_Petals_P Parameter: Age (day) Value: 23-25 days
  misc_feature: MA Experiment 20000794 PARAMETER Experiment Name: At_Petals_P Parameter: Plant Line Value: WS
  misc_feature: MA Experiment 20000794 PARAMETER Experiment Name: At_Petals_P Parameter: Tissue Value: Petals vs. Whole plant
  misc_feature: MA Experiment ID: 20001555 Result: Down-regulated in Transcription
  misc_feature: MA Experiment 20001555 PARAMETER Experiment Name: At_Drought_Soil_Dry_P Parameter: Age (day) Value: 24
  misc_feature: MA Experiment 20001555 PARAMETER Experiment Name: At_Drought_Soil_Dry_P Parameter: Organism Value: A. thaliana
  misc_feature: MA Experiment 20001555 PARAMETER Experiment Name: At_Drought_Soil_Dry_P Parameter: Plant Line Value: WS
  misc_feature: MA Experiment 20001555 PARAMETER Experiment Name: At_Drought_Soil_Dry_P Parameter: Post Timepoint (hr) Value: None
  misc_feature: MA Experiment 20001555 PARAMETER Experiment Name: At_Drought_Soil_Dry_P Parameter: Post-Treatment Value: None
  misc_feature: MA Experiment 20001555 PARAMETER Experiment Name: At_Drought_Soil_Dry_P Parameter: Timepoint (day) Value: 10
  misc_feature: MA Experiment 20001555 PARAMETER Experiment Name: At_Drought_Soil_Dry_P Parameter: Treatment Value: Drought vs. No Drought
  misc_feature: MA Experiment ID: 20001556 Result: Down-regulated in Transcription
  misc_feature: MA Experiment 20001556 PARAMETER Experiment Name: At_Drought_Soil_Dry_P Parameter: Age (day) Value: 26
  misc_feature: MA Experiment 20001556 PARAMETER Experiment Name: At_Drought_Soil_Dry_P Parameter: Organism Value: A. thaliana
  misc_feature: MA Experiment 20001556 PARAMETER Experiment Name: At_Drought_Soil_Dry_P Parameter: Plant Line Value: WS
  misc_feature: MA Experiment 20001556 PARAMETER Experiment Name: At_Drought_Soil_Dry_P Parameter: Post Timepoint (hr) Value: None
  misc_feature: MA Experiment 20001556 PARAMETER Experiment Name: At_Drought_Soil_Dry_P Parameter: Post-Treatment Value: None
  misc_feature: MA Experiment 20001556 PARAMETER Experiment Name: At_Drought_Soil_Dry_P Parameter: Timepoint (day) Value: 12
  misc_feature: MA Experiment 20001556 PARAMETER Experiment Name: At_Drought_Soil_Dry_P Parameter: Treatment Value: Drought vs. No Drought
  misc_feature: MA Experiment ID: 20001560 Result: Down-regulated in Transcription
  misc_feature: MA Experiment 20001560 PARAMETER Experiment Name: At_Drought_Soil_Dry_P Parameter: Age (day) Value: 28
  misc_feature: MA Experiment 20001560 PARAMETER Experiment Name: At_Drought_Soil_Dry_P Parameter: Organism Value: A. thaliana
  misc_feature: MA Experiment 20001560 PARAMETER Experiment Name: At_Drought_Soil_Dry_P Parameter: Plant Line Value: WS
  misc_feature: MA Experiment 20001560 PARAMETER Experiment Name: At_Drought_Soil_Dry_P Parameter: Post Timepoint (hr) Value: None
  misc_feature: MA Experiment 20001560 PARAMETER Experiment Name: At_Drought_Soil_Dry_P Parameter: Post-Treatment Value: None
  misc_feature: MA Experiment 20001560 PARAMETER Experiment Name: At_Drought_Soil_Dry_P Parameter: Timepoint (day) Value: 14
  misc_feature: MA Experiment 20001560 PARAMETER Experiment Name: At_Drought_Soil_Dry_P Parameter: Treatment Value: Drought vs. No Drought
aaaatatcaaaacacgagacagatttgattccatttttattactgttactatcatccaaaaccttggtatttgtagccatgagtcttgtttcagatctcatcaaccttaacctctcagactccactgacaaaatcattgctgaatacatatgggttggtggttctggaatggacatgagaagcaaagccaggactctacctggaccagtgactgacccttcgcagctaccaaagtggaactatgatggttcaagcacaggacaagctcctggtgaagacagtgaagtcatcttatagttaataatctttctttcttgatctttaaataagtttcttctcattggtttttttttcgattcttgtttactaatcttttgtgtgtttgtatatctttgtttagccctcaagccatattcaaagatcctttccgtagaggaaacaacattcttgtcatgtgcgatgcgtacactcccgcgggtgaaccaatcccgactaacaaaagacacgctgcggctaaggtctttagcaaccctgatgttgcagctgaagtgccatggtatggtattgagcaagaatacactttactccagaaagatgtgaggtggcctgttggttggcctattggcggttatcccggccctcagggaccgtactattgcggtattggagcagacaaatcttttggcagagatgttgttgattctcactacaaggcctgtttatacgctggaatcaacattagtggcatcaatggagaagtcatgccgggtcagtgggagttccaggtcggtccagctgttggtatctcggctgctgatgaaatttgggtcgctcgttacattttggagaggatcacagagattgctggtgtagtggtatcttttgacccgaaaccgattcccggtgactggaacggtgctggtgctcactgcaactacagtaccaagtcaatgagggaagaaggcggttacgagatcatcaagaaagcaatcgataaattgggactgagacacaaagaacacattgctgcttacggtgaaggcaatgagcgtcgtctcacaggacaccacgagactgctgacatcaacactttcctttggggtgttgcgaaccgtggagcatcgatccgagtaggacgtgatacggagaaagaagggaaaggatactttgaggacaggaggccagcttcgaacatggatccttacattgtcacttccatgattgcagagactacaatcctctggaatccttgatgatcatcagatcaagaaaaaatcttgaatgtcactcaaatttgtgtttcttgcaagattcaaagtttgtgttctctatcaagcaatgtcttaggataagtcaaagatttgctctgcttattctgctttttatttacttcacatcctattgaaaacatttctgtgtattatttatgaataaacattatctt

SEQ ID NO: 41887 - protein, 266 aa, Arabidopsis thaliana
  peptide (1)..(266): Ceres Seq. ID no. 12339421
  misc_feature (13)..(265): Pfam Name: Glutamine synthetase, catalytic domain Pfam Description: Glutamine synthetase, catalytic domain
  misc_feature (1)..(266): Homolog of NCBI NO: 21554857 NR Description: glutamine synthetase, putative [Arabidopsis
  misc_feature (1)..(266): Homolog of NCBI NO: 15219598 NR Description: glutamine synthetase, putative
  misc_feature (1)..(266): Homolog of NCBI NO: 1076474 NR Description: Gln 1.2 protein - radish
  misc_feature (1)..(266): Homolog of NCBI NO: 481914 NR Description: glutamate-ammonia ligase (EC 6.3.1.2) - rape
  misc_feature (1)..(266): Homolog of NCBI NO: 1934756 NR Description: cytosolic glutamine synthetase [Brassica napus]
  misc_feature (1)..(266): Homolog of NCBI NO: 1084350 NR Description: glutamate-ammonia ligase (EC 6.3.1.2) - rape
  misc_feature (1)..(266): Homolog of NCBI NO: 1076475 NR Description: Gln 1.3 protein - radish
  misc_feature (1)..(266): Homolog of NCBI NO: 228454 NR Description: Gln synthetase
  misc_feature (1)..(266): Homolog of NCBI NO: 99699 NR Description: glutamate-ammonia ligase (EC 6.3.1.2), cytosolic
  misc_feature (1)..(266): Homolog of NCBI NO: 15240288 NR Description: glutamate--ammonia ligase
MCDAYTPAGEPIPTNKRHAAAKVFSNPDVAAEVPWYGIEQEYTLLQKDVRWPVGWPIGGYPGPQGPYYCGIGADKSFGRDVVDSHYKACLYAGINISGINGEVMPGQWEFQVGPAVGISAADEIWVARYILERITEIAGVVVSFDPKPIPGDWNGAGAHCNYSTKSMREEGGYEIIKKAIDKLGLRHKEHIAAYGEGNERRLTGHHETADINTFLWGVANRGASIRVGRDTEKEGKGYFEDRRPASNMDPYIVTSMIAETTILWNP

SEQ ID NO: 41888 - protein, 163 aa, Arabidopsis thaliana
  peptide (1)..(163): Ceres Seq. ID no. 12339422
  misc_feature (1)..(162): Pfam Name: Glutamine synthetase, catalytic domain Pfam Description: Glutamine synthetase, catalytic domain
  misc_feature (1)..(163): Homolog of NCBI NO: 21554857 NR Description: glutamine synthetase, putative [Arabidopsis
  misc_feature (1)..(163): Homolog of NCBI NO: 15219598 NR Description: glutamine synthetase, putative
  misc_feature (1)..(163): Homolog of NCBI NO: 1076474 NR Description: Gln 1.2 protein - radish
  misc_feature (1)..(163): Homolog of NCBI NO: 481914 NR Description: glutamate-ammonia ligase (EC 6.3.1.2) - rape
  misc_feature (1)..(163): Homolog of NCBI NO: 1934756 NR Description: cytosolic glutamine synthetase [Brassica napus]
  misc_feature (1)..(163): Homolog of NCBI NO: 1084350 NR Description: glutamate-ammonia ligase (EC 6.3.1.2) - rape
  misc_feature (1)..(163): Homolog of NCBI NO: 1076475 NR Description: Gln 1.3 protein - radish
  misc_feature (1)..(163): Homolog of NCBI NO: 228454 NR Description: Gln synthetase
  misc_feature (1)..(163): Homolog of NCBI NO: 99699 NR Description: glutamate-ammonia ligase (EC 6.3.1.2), cytosolic
  misc_feature (1)..(163): Homolog of NCBI NO: 15240288 NR Description: glutamate--ammonia ligase
MPGQWEFQVGPAVGISAADEIWVARYILERITEIAGVVVSFDPKPIPGDWNGAGAHCNYSTKSMREEGGYEIIKKAIDKLGLRHKEHIAAYGEGNERRLTGHHETADINTFLWGVANRGASIRVGRDTEKEGKGYFEDRRPASNMDPYIVTSMIAETTILWNP

SEQ ID NO: 41889 - DNA, 1146 bp, Arabidopsis thaliana
  misc_feature (1)..(1146): Ceres Seq. ID no. 12641954
  misc_feature: MA Experiment ID: 108573 Result: Up-regulated in Transcription
  misc_feature: MA Experiment 108573 PARAMETER Experiment Name: At_Drought_cDNA_P Parameter: Timepoint (hr) Value: 6
  misc_feature: MA Experiment 108573 PARAMETER Experiment Name: At_Drought_cDNA_P Parameter: Tissue Value: Aerial
  misc_feature: MA Experiment 108573 PARAMETER Experiment Name: At_Drought_cDNA_P Parameter: Treatment Value: Drought vs. No Drought
  misc_feature: MA Experiment ID: 20000171 Result: Up-regulated in Transcription
  misc_feature: MA Experiment 20000171 PARAMETER Experiment Name: At_42deg_Heat_P Parameter: Age (day) Value: 14
  misc_feature: MA Experiment 20000171 PARAMETER Experiment Name: At_42deg_Heat_P Parameter: Organism Value: A. thaliana
  misc_feature: MA Experiment 20000171 PARAMETER Experiment Name: At_42deg_Heat_P Parameter: Plant Line Value: WS
  misc_feature: MA Experiment 20000171 PARAMETER Experiment Name: At_42deg_Heat_P Parameter: Temperature (deg C) Value: 42 vs. 22
  misc_feature: MA Experiment 20000171 PARAMETER Experiment Name: At_42deg_Heat_P Parameter: Timepoint (hr) Value: 1
  misc_feature: MA Experiment 20000171 PARAMETER Experiment Name: At_42deg_Heat_P Parameter: Tissue Value: Aerial
aacctttgctttcttgggaaactctctgcaattcctggagaaatcgaccatcatcatcttagctttgattctctctgtgtttcttcactttcaatttctgttttggtttatcgataagagaaagtaaaattcgtctgtgggggtttaagcttttttggggtgagagatgggtcaaacttttcgcaagcttttcgataccttcttcggcaaccaggagatgagggtcgttatgctgggtctggatgcggctggcaaaacaacgatactatacaagctccacataggagaagttctgtctactgttcccacaatcggtttcaatgttgagaaagttcagtacaagaatgtcatcttcacagtttgggatgttggtggccaagagaagctgaggcccttgtggaggcattacttcaataataccgatggacttatatacgtggtagactccttggaccgagagaggattggtaaagcgaagcaagaatttcaggatatcataagggacccattcatgctcaacagtgtcattctagtgtttgcaaacaaacaagacatgagaggagccatgtctcctcgagaagtatgtgaagggcttggcttacttgatctcaagaacaggaaatggcatatacaaggcacatgtgctcttcaaggagatgggctctatgaaggcttagactggttatccgctacactcaaagaggttaaagccgctggttactcatcagttggtccctcgttttagcacccctaccatttgcaaagaaaaaaatccctgactagctaaattgacatacgaaagtaccaaatcaagctcatggtgtctcctgtctactcaccattatatactttacatccatggccacacccttcttcgtggccactgatatggtaatatcacaaaactaatgaaaatctctcaagacttttgtaatggaagtgtttttgtttttctttcgtcttcacatggctctgcttcttaaagctaatgttagtatcaattaggctcctttttgcataatatgactttggagctttattgtaaattctgatggatacaaaatgtataaatctgacaaaaattgcaaaattctcatgagattattaaagtctcccttatagctatgatagatgattgatcttttt

SEQ ID NO: 41890 - protein, 192 aa, Arabidopsis thaliana
  peptide (1)..(192): Ceres Seq. ID no. 12641955
  misc_feature (4)..(177): Pfam Name: ADP-ribosylation factor family Pfam Description: ADP-ribosylation factor family
  misc_feature (1)..(181): Homolog of NCBI NO: 26327163 NR Description: unnamed protein product [Mus musculus]
  misc_feature (1)..(181): Homolog of NCBI NO: 6671571 NR Description: ADP-ribosylation factor 2 [Mus musculus]
  misc_feature (1)..(178): Homolog of NCBI NO: 39584902 NR Description: Hypothetical protein CBG09004 [Caenorhabditis
  misc_feature (1)..(178): Homolog of NCBI NO: 17551730 NR Description: ADP-Ribosylation Factor related ARF-1 (20.5 kD)
  misc_feature (1)..(178): Homolog of NCBI NO: 17136866 NR Description: ADP ribosylation factor 79F CG8385-PB
  misc_feature (1)..(178): Homolog of NCBI NO: 3182915 NR Description: ADP-RIBOSYLATION FACTOR
  misc_feature (1)..(186): Homolog of NCBI NO: 34897926 NR Description: Similar to Drosophila melanogaster
  misc_feature (1)..(184): Homolog of NCBI NO: 37537196 NR Description: putative ADP-ribosylation factor
  misc_feature (1)..(192): Homolog of NCBI NO: 15237901 NR Description: ADP-ribosylation factor -like protein
  misc_feature (1)..(192): Homolog of NCBI NO: 15228464 NR Description: putative ADP-ribosylation factor
MGQTFRKLFDTFFGNQEMRVVMLGLDAAGKTTILYKLHIGEVLSTVPTIGFNVEKVQYKNVIFTVWDVGGQEKLRPLWRHYFNNTDGLIYVVDSLDRERIGKAKQEFQDIIRDPFMLNSVILVFANKQDMRGAMSPREVCEGLGLLDLKNRKWHIQGTCALQGDGLYEGLDWLSATLKEVKAAGYSSVGPSF

SEQ ID NO: 41891 - protein, 175 aa, Arabidopsis thaliana
  peptide (1)..(175): Ceres Seq. ID no. 12641956
  misc_feature (1)..(160): Pfam Name: ADP-ribosylation factor family Pfam Description: ADP-ribosylation factor family
  misc_feature (1)..(164): Homolog of NCBI NO: 26327163 NR Description: unnamed protein product [Mus musculus]
  misc_feature (1)..(164): Homolog of NCBI NO: 6671571 NR Description: ADP-ribosylation factor 2 [Mus musculus]
  misc_feature (1)..(161): Homolog of NCBI NO: 39584902 NR Description: Hypothetical protein CBG09004 [Caenorhabditis
  misc_feature (1)..(161): Homolog of NCBI NO: 17551730 NR Description: ADP-Ribosylation Factor related ARF-1 (20.5 kD)
  misc_feature (1)..(161): Homolog of NCBI NO: 17136866 NR Description: ADP ribosylation factor 79F CG8385-PB
  misc_feature (1)..(161): Homolog of NCBI NO: 3182915 NR Description: ADP-RIBOSYLATION FACTOR
  misc_feature (1)..(169): Homolog of NCBI NO: 34897926 NR Description: Similar to Drosophila melanogaster
  misc_feature (1)..(167): Homolog of NCBI NO: 37537196 NR Description: putative ADP-ribosylation factor
  misc_feature (1)..(175): Homolog of NCBI NO: 15237901 NR Description: ADP-ribosylation factor -like protein
  misc_feature (1)..(175): Homolog of NCBI NO: 15228464 NR Description: putative ADP-ribosylation factor
MRVVMLGLDAAGKTTILYKLHIGEVLSTVPTIGFNVEKVQYKNVIFTVWDVGGQEKLRPLWRHYFNNTDGLIYVVDSLDRERIGKAKQEFQDIIRDPFMLNSVILVFANKQDMRGAMSPREVCEGLGLLDLKNRKWHIQGTCALQGDGLYEGLDWLSATLKEVKAAGYSSVGPSF

SEQ ID NO: 41892 - protein, 171 aa, Arabidopsis thaliana
  peptide (1)..(171): Ceres Seq. ID no. 12641957
  misc_feature (1)..(156): Pfam Name: ADP-ribosylation factor family Pfam Description: ADP-ribosylation factor family
  misc_feature (1)..(160): Homolog of NCBI NO: 26327163 NR Description: unnamed protein product [Mus musculus]
  misc_feature (1)..(160): Homolog of NCBI NO: 6671571 NR Description: ADP-ribosylation factor 2 [Mus musculus]
  misc_feature (1)..(157): Homolog of NCBI NO: 39584902 NR Description: Hypothetical protein CBG09004 [Caenorhabditis
  misc_feature (1)..(157): Homolog of NCBI NO: 17551730 NR Description: ADP-Ribosylation Factor related ARF-1 (20.5 kD)
  misc_feature (1)..(157): Homolog of NCBI NO: 17136866 NR Description: ADP ribosylation factor 79F CG8385-PB
  misc_feature (1)..(157): Homolog of NCBI NO: 3182915 NR Description: ADP-RIBOSYLATION FACTOR
  misc_feature (1)..(165): Homolog of NCBI NO: 34897926 NR Description: Similar to Drosophila melanogaster
  misc_feature (1)..(163): Homolog of NCBI NO: 37537196 NR Description: putative ADP-ribosylation factor
  misc_feature (1)..(171): Homolog of NCBI NO: 15237901 NR Description: ADP-ribosylation factor -like protein
  misc_feature (1)..(171): Homolog of NCBI NO: 15228464 NR Description: putative ADP-ribosylation factor
MLGLDAAGKTTILYKLHIGEVLSTVPTIGFNVEKVQYKNVIFTVWDVGGQEKLRPLWRHYFNNTDGLIYVVDSLDRERIGKAKQEFQDIIRDPFMLNSVILVFANKQDMRGAMSPREVCEGLGLLDLKNRKWHIQGTCALQGDGLYEGLDWLSATLKEVKAAGYSSVGPSF

SEQ ID NO: 41893 - DNA, 561 bp, Arabidopsis thaliana
  misc_feature (1)..(561): Ceres Seq. ID no. 12421177
  misc_feature: MA Experiment ID: 108434 Result: Up-regulated in Transcription
  misc_feature: MA Experiment 108434 PARAMETER Experiment Name: At_Root_Tips_cDNA_P Parameter: Tissue Value: Root Tips
  misc_feature: MA Experiment ID: 108462 Result: Down-regulated in Transcription
  misc_feature: MA Experiment 108462 PARAMETER Experiment Name: At_Germinating_Seeds_cDNA_P Parameter: Age (day) Value: 2 vs. 0
  misc_feature: MA Experiment 108462 PARAMETER Experiment Name: At_Germinating_Seeds_cDNA_P Parameter: Tissue Value: Germinating Seeds
  misc_feature: MA Experiment ID: 108463 Result: Down-regulated in Transcription
  misc_feature: MA Experiment 108463 PARAMETER Experiment Name: At_Germinating_Seeds_cDNA_P Parameter: Age (day) Value: 3 vs. 0
  misc_feature: MA Experiment 108463 PARAMETER Experiment Name: At_Germinating_Seeds_cDNA_P Parameter: Tissue Value: Germinating Seeds
  misc_feature: MA Experiment ID: 108464 Result: Down-regulated in Transcription
  misc_feature: MA Experiment 108464 PARAMETER Experiment Name: At_Germinating_Seeds_cDNA_P Parameter: Age (day) Value: 4 vs. 0
  misc_feature: MA Experiment 108464 PARAMETER Experiment Name: At_Germinating_Seeds_cDNA_P Parameter: Tissue Value: Germinating Seeds
  misc_feature: MA Experiment ID: 108488 Result: Down-regulated in Transcription
  misc_feature: MA Experiment ID: 108572 Result: Down-regulated in Transcription
  misc_feature: MA Experiment 108572 PARAMETER Experiment Name: At_Drought_cDNA_P Parameter: Timepoint (hr) Value: 1
  misc_feature: MA Experiment 108572 PARAMETER Experiment Name: At_Drought_cDNA_P Parameter: Tissue Value: Aerial
  misc_feature: MA Experiment 108572 PARAMETER Experiment Name: At_Drought_cDNA_P Parameter: Treatment Value: Drought vs. No Drought
  misc_feature: MA Experiment ID: 108577 Result: Down-regulated in Transcription
  misc_feature: MA Experiment 108577 PARAMETER Experiment Name: At_42deg_Heat_cDNA_P Parameter: Temperature (deg C) Value: 42 vs. 22
  misc_feature: MA Experiment 108577 PARAMETER Experiment Name: At_42deg_Heat_cDNA_P Parameter: Timepoint (hr) Value: 6
  misc_feature: MA Experiment 108577 PARAMETER Experiment Name: At_42deg_Heat_cDNA_P Parameter: Tissue Value: Aerial
  misc_feature: MA Experiment ID: 108607 Result: Down-regulated in Transcription
  misc_feature: MA Experiment 108607 PARAMETER Experiment Name: At_100uM_ABA_cDNA_P Parameter: Timepoint (hr) Value: 4
  misc_feature: MA Experiment 108607 PARAMETER Experiment Name: At_100uM_ABA_cDNA_P Parameter: Tissue Value: Aerial
  misc_feature: MA Experiment 108607 PARAMETER Experiment Name: At_100uM_ABA_cDNA_P Parameter: Treatment Value: 100uM ABA vs. No Treatment
  misc_feature: MA Experiment ID: 20000069 Result: Up-regulated in Transcription
  misc_feature: MA Experiment 20000069 PARAMETER Experiment Name: At_100uM_ABA_Mutants_cDNA_P Parameter: Plant Line Value: CS23
  misc_feature: MA Experiment 20000069 PARAMETER Experiment Name: At_100uM_ABA_Mutants_cDNA_P Parameter: Timepoint (hr) Value: 6
  misc_feature: MA Experiment 20000069 PARAMETER Experiment Name: At_100uM_ABA_Mutants_cDNA_P Parameter: Tissue Value: Aerial
  misc_feature: MA Experiment 20000069 PARAMETER Experiment Name: At_100uM_ABA_Mutants_cDNA_P Parameter: Treatment Value: 100uM ABA vs. No Treatment
  misc_feature: MA Experiment ID: 20000070 Result: Up-regulated in Transcription
  misc_feature: MA Experiment 20000070 PARAMETER Experiment Name: At_100uM_ABA_Mutants_cDNA_P Parameter: Plant Line Value: CS24
  misc_feature: MA Experiment 20000070 PARAMETER Experiment Name: At_100uM_ABA_Mutants_cDNA_P Parameter: Timepoint (hr) Value: 6
  misc_feature: MA Experiment 20000070 PARAMETER Experiment Name: At_100uM_ABA_Mutants_cDNA_P Parameter: Tissue Value: Aerial
  misc_feature: MA Experiment 20000070 PARAMETER Experiment Name: At_100uM_ABA_Mutants_cDNA_P Parameter: Treatment Value: 100uM ABA vs. No Treatment
  misc_feature: MA Experiment ID: 20000071 Result: Up-regulated in Transcription
  misc_feature: MA Experiment 20000071 PARAMETER Experiment Name: At_100uM_ABA_Mutants_cDNA_P Parameter: Plant Line Value: CS8104
  misc_feature: MA Experiment 20000071 PARAMETER Experiment Name: At_100uM_ABA_Mutants_cDNA_P Parameter: Timepoint (hr) Value: 6
  misc_feature: MA Experiment 20000071 PARAMETER Experiment Name: At_100uM_ABA_Mutants_cDNA_P Parameter: Tissue Value: Aerial
  misc_feature: MA Experiment 20000071 PARAMETER Experiment Name: At_100uM_ABA_Mutants_cDNA_P Parameter: Treatment Value: 100uM ABA vs. No Treatment
  misc_feature: MA Experiment ID: 20000072 Result: Up-regulated in Transcription
  misc_feature: MA Experiment 20000072 PARAMETER Experiment Name: At_100uM_ABA_Mutants_cDNA_P Parameter: Plant Line Value: CS8105
  misc_feature: MA Experiment 20000072 PARAMETER Experiment Name: At_100uM_ABA_Mutants_cDNA_P Parameter: Timepoint (hr) Value: 6
  misc_feature: MA Experiment 20000072 PARAMETER Experiment Name: At_100uM_ABA_Mutants_cDNA_P Parameter: Tissue Value: Aerial
  misc_feature: MA Experiment 20000072 PARAMETER Experiment Name: At_100uM_ABA_Mutants_cDNA_P Parameter: Treatment Value: 100uM ABA vs. No Treatment
  misc_feature: MA Experiment ID: 20000086 Result: Up-regulated in Transcription
  misc_feature: MA Experiment 20000086 PARAMETER Experiment Name: At_100uM_ABA_Mutants_cDNA_P Parameter: Plant Line Value: CS22
  misc_feature: MA Experiment 20000086 PARAMETER Experiment Name: At_100uM_ABA_Mutants_cDNA_P Parameter: Timepoint (hr) Value: 6
  misc_feature: MA Experiment 20000086 PARAMETER Experiment Name: At_100uM_ABA_Mutants_cDNA_P Parameter: Tissue Value: Aerial
  misc_feature: MA Experiment 20000086 PARAMETER Experiment Name: At_100uM_ABA_Mutants_cDNA_P Parameter: Treatment Value: 100uM ABA vs. No Treatment
  misc_feature: MA Experiment ID: 20000087 Result: Up-regulated in Transcription
  misc_feature: MA Experiment 20000087 PARAMETER Experiment Name: At_100uM_ABA_Mutants_cDNA_P Parameter: Plant Line Value: WS
  misc_feature: MA Experiment 20000087 PARAMETER Experiment Name: At_100uM_ABA_Mutants_cDNA_P Parameter: Timepoint (hr) Value: 6
  misc_feature: MA Experiment 20000087 PARAMETER Experiment Name: At_100uM_ABA_Mutants_cDNA_P Parameter: Tissue Value: Aerial
  misc_feature: MA Experiment 20000087 PARAMETER Experiment Name: At_100uM_ABA_Mutants_cDNA_P Parameter: Treatment Value: 100uM ABA vs. No Treatment
  misc_feature: MA Experiment ID: 20000088 Result: Up-regulated in Transcription
  misc_feature: MA Experiment 20000088 PARAMETER Experiment Name: At_100uM_ABA_Mutants_cDNA_P Parameter: Plant Line Value: Landsberg
  misc_feature: MA Experiment 20000088 PARAMETER Experiment Name: At_100uM_ABA_Mutants_cDNA_P Parameter: Timepoint (hr) Value: 6
  misc_feature: MA Experiment 20000088 PARAMETER Experiment Name: At_100uM_ABA_Mutants_cDNA_P Parameter: Tissue Value: Aerial
  misc_feature: MA Experiment 20000088 PARAMETER Experiment Name: At_100uM_ABA_Mutants_cDNA_P Parameter: Treatment Value: 100uM ABA vs. No Treatment
  misc_feature: MA Experiment ID: 20000089 Result: Up-regulated in Transcription
  misc_feature: MA Experiment ID: 20000090 Result: Up-regulated in Transcription
  misc_feature: MA Experiment ID: 20000111 Result: Down-regulated in Transcription
  misc_feature: MA Experiment 20000111 PARAMETER Experiment Name: At_42deg_Heat_cDNA_P Parameter: Temperature (deg C) Value: 42 vs. 22
  misc_feature: MA Experiment 20000111 PARAMETER Experiment Name: At_42deg_Heat_cDNA_P Parameter: Timepoint (hr) Value: 6
  misc_feature: MA Experiment 20000111 PARAMETER Experiment Name: At_42deg_Heat_cDNA_P Parameter: Tissue Value: Aerial
  misc_feature: MA Experiment ID: 20000117 Result: Up-regulated in Transcription
  misc_feature: MA Experiment 20000117 PARAMETER Experiment Name: At_100uM_ABA_Mutants_cDNA_P Parameter: Plant Line Value: Columbia
  misc_feature: MA Experiment 20000117 PARAMETER Experiment Name: At_100uM_ABA_Mutants_cDNA_P Parameter: Timepoint (hr) Value: 6
  misc_feature: MA Experiment 20000117 PARAMETER Experiment Name: At_100uM_ABA_Mutants_cDNA_P Parameter: Tissue Value: Aerial
  misc_feature: MA Experiment 20000117 PARAMETER Experiment Name: At_100uM_ABA_Mutants_cDNA_P Parameter: Treatment Value: 100uM ABA vs. No Treatment
  misc_feature: MA Experiment ID: 20000213 Result: Up-regulated in Transcription
  misc_feature: MA Experiment 20000213 PARAMETER Experiment Name: At_4deg_Cold_P Parameter: Timepoint (hr) Value: 2
  misc_feature: MA Experiment ID: 20000224 Result: Down-regulated in Transcription
  misc_feature: MA Experiment ID: 20000437 Result: Up-regulated in Transcription
  misc_feature: MA Experiment 20000437 PARAMETER Experiment Name: At_Drought_P Parameter: Age (day) Value: 8
  misc_feature: MA Experiment 20000437 PARAMETER Experiment Name: At_Drought_P Parameter: Organism Value: A. thaliana
  misc_feature: MA Experiment 20000437 PARAMETER Experiment Name: At_Drought_P Parameter: Plant Line Value: WS
  misc_feature: MA Experiment 20000437 PARAMETER Experiment Name: At_Drought_P Parameter: Timepoint (hr) Value: 24
  misc_feature: MA Experiment 20000437 PARAMETER Experiment Name: At_Drought_P Parameter: Tissue Value: Whole Plant
  misc_feature: MA Experiment 20000437 PARAMETER Experiment Name: At_Drought_P Parameter: Treatment Value: Drought vs. No Drought
  misc_feature: MA Experiment ID: 20000438 Result: Down-regulated in Transcription
  misc_feature: MA Experiment 20000438 PARAMETER Experiment Name: At_Shoots__P Parameter: Age (day) Value: 14
  misc_feature: MA Experiment 20000438 PARAMETER Experiment Name: At_Shoots__P Parameter: Tissue Value: Shoots vs. Whole Plant
  misc_feature: MA Experiment ID: 20001451 Result: Up-regulated in Transcription
  misc_feature: MA Experiment 20001451 PARAMETER Experiment Name: At_Far-red-induction_P Parameter: Age (day) Value: 7
  misc_feature: MA Experiment 20001451 PARAMETER Experiment Name: At_Far-red-induction_P Parameter: Light Value: Far-red vs. White
  misc_feature: MA Experiment 20001451 PARAMETER Experiment Name: At_Far-red-induction_P Parameter: Organism Value: A. thaliana
  misc_feature: MA Experiment 20001451 PARAMETER Experiment Name: At_Far-red-induction_P Parameter: Plant Line Value: Columbia
  misc_feature: MA Experiment 20001451 PARAMETER Experiment Name: At_Far-red-induction_P Parameter: Timepoint (hr) Value: 24
  misc_feature: MA Experiment 20001451 PARAMETER Experiment Name: At_Far-red-induction_P Parameter: Tissue Value: Whole Plant
  misc_feature: MA Experiment ID: 20001557 Result: Up-regulated in Transcription
  misc_feature: MA Experiment 20001557 PARAMETER Experiment Name: At_Drought_Soil_Dry_P Parameter: Age (day) Value: 27
  misc_feature: MA Experiment 20001557 PARAMETER Experiment Name: At_Drought_Soil_Dry_P Parameter: Organism Value: A. thaliana
  misc_feature: MA Experiment 20001557 PARAMETER Experiment Name: At_Drought_Soil_Dry_P Parameter: Plant Line Value: WS
  misc_feature: MA Experiment 20001557 PARAMETER Experiment Name: At_Drought_Soil_Dry_P Parameter: Post Timepoint (hr) Value: 3
  misc_feature: MA Experiment 20001557 PARAMETER Experiment Name: At_Drought_Soil_Dry_P Parameter: Post-Treatment Value: Re-Water vs. No Drought
  misc_feature: MA Experiment 20001557 PARAMETER Experiment Name: At_Drought_Soil_Dry_P Parameter: Timepoint (day) Value: 13
  misc_feature: MA Experiment 20001557 PARAMETER Experiment Name: At_Drought_Soil_Dry_P Parameter: Treatment Value: Drought vs. No Drought
acacatctcactgctcactactctcactgtaatcccttagatcttcttttcaaatttcaatggcgtccggtgatgttgagtatcggtgcttcgttggaggtctagcatgggccactgatgacagagctcttgagactgccttcgctcaatacggcgacgttattgattccaagatcattaacgatcgtgagactggaagatcaaggggattcggattcgtcaccttcaaggatgagaaagccatgaaagatgcgattgagggaatgaacggacaagatctcgatggccgtagcatcactgttaacgaggctcagtcacgaggaagcggtggcggcggaggccaccgtggaggtggttggcggtggataccgcagcggcggtggtggtggaggatggtaattcctttaattaggtttgggattaccaatgaatgttctctctctcgcttgttatgcttctacttggttttgtgtgttctctattttgttctggttctgctttagatttgatgtaacagttcgtgattaggtattttggtatctggaaacgtaatgttaagtc

SEQ ID NO: 41894 - protein, 147 aa, Arabidopsis thaliana
  peptide (1)..(147): Ceres Seq. ID no. 12421178
  misc_feature (10)..(81): Pfam Name: RNA recognition motif. (a.k.a. RRM, RBD, or RNP domain) Pfam Description: RNA recognition motif. (a.k.a. RRM, RBD, or RNP
  misc_feature (1)..(100): Homolog of NCBI NO: 34851124 NR Description: putative glycine-rich RNA-binding protein [Prunus
  misc_feature (5)..(101): Homolog of NCBI NO: 2119042 NR Description: glycine-rich RNA-binding protein RGP-1a - wood
  misc_feature (1)..(106): Homolog of NCBI NO: 6911142 NR Description: putative glycine-rich RNA binding protein 1
  misc_feature (5)..(99): Homolog of NCBI NO: 544426 NR Description: Glycine-rich RNA-binding protein
  misc_feature (1)..(99): Homolog of NCBI NO: 2267567 NR Description: glycine-rich RNA binding protein 1 [Pelargonium x
  misc_feature (1)..(99): Homolog of NCBI NO: 1346181 NR Description: Glycine-rich RNA-binding protein GRP2A
  misc_feature (1)..(99): Homolog of NCBI NO: 1346180 NR Description: Glycine-rich RNA-binding protein GRP1A
  misc_feature (1)..(99): Homolog of NCBI NO: 30681492 NR Description: glycine-rich RNA-binding protein (AtGRP7)
  misc_feature (1)..(99): Homolog of NCBI NO: 21553354 NR Description: glycine-rich RNA binding protein 7 [Arabidopsis
  misc_feature (1)..(99): Homolog of NCBI NO: 15226605 NR Description: glycine-rich RNA binding protein AtGRP7
MASGDVEYRCFVGGLAWATDDRALETAFAQYGDVIDSKIINDRETGRSRGFGFVTFKDEKAMKDAIEGMNGQDLDGRSITVNEAQSRGSGGGGGHRGGGWRWIPQRRWWWRMVIPLIRFGITNECSLSRLLCFYLVLCVLYFVLVLL

SEQ ID NO: 41895 - protein, 86 aa, Arabidopsis thaliana
  peptide (1)..(86): Ceres Seq. ID no. 12421179
  misc_feature (1)..(39): Homolog of NCBI NO: 34851124 NR Description: putative glycine-rich RNA-binding protein [Prunus
  misc_feature (1)..(40): Homolog of NCBI NO: 2119042 NR Description: glycine-rich RNA-binding protein RGP-1a - wood
  misc_feature (1)..(45): Homolog of NCBI NO: 6911142 NR Description: putative glycine-rich RNA binding protein 1
  misc_feature (1)..(38): Homolog of NCBI NO: 544426 NR Description: Glycine-rich RNA-binding protein
  misc_feature (1)..(38): Homolog of NCBI NO: 2267567 NR Description: glycine-rich RNA binding protein 1 [Pelargonium x
  misc_feature (1)..(38): Homolog of NCBI NO: 1346181 NR Description: Glycine-rich RNA-binding protein GRP2A
  misc_feature (1)..(38): Homolog of NCBI NO: 1346180 NR Description: Glycine-rich RNA-binding protein GRP1A
  misc_feature (1)..(38): Homolog of NCBI NO: 30681492 NR Description: glycine-rich RNA-binding protein (AtGRP7)
  misc_feature (1)..(38): Homolog of NCBI NO: 21553354 NR Description: glycine-rich RNA binding protein 7 [Arabidopsis
  misc_feature (1)..(38): Homolog of NCBI NO: 15226605 NR Description: glycine-rich RNA binding protein AtGRP7
MKDAIEGMNGQDLDGRSITVNEAQSRGSGGGGGHRGGGWRWIPQRRWWWRMVIPLIRFGITNECSLSRLLCFYLVLCVLYFVLVLL

SEQ ID NO: 41896 - protein, 79 aa, Arabidopsis thaliana
  peptide (1)..(79): Ceres Seq. ID no. 12421180
  misc_feature (1)..(32): Homolog of NCBI NO: 34851124 NR Description: putative glycine-rich RNA-binding protein [Prunus
  misc_feature (1)..(33): Homolog of NCBI NO: 2119042 NR Description: glycine-rich RNA-binding protein RGP-1a - wood
  misc_feature (1)..(38): Homolog of NCBI NO: 6911142 NR Description: putative glycine-rich RNA binding protein 1
  misc_feature (1)..(31): Homolog of NCBI NO: 544426 NR Description: Glycine-rich RNA-binding protein
  misc_feature (1)..(31): Homolog of NCBI NO: 2267567 NR Description: glycine-rich RNA binding protein 1 [Pelargonium x
  misc_feature (1)..(31): Homolog of NCBI NO: 1346181 NR Description: Glycine-rich RNA-binding protein GRP2A
  misc_feature (1)..(31): Homolog of NCBI NO: 1346180 NR Description: Glycine-rich RNA-binding protein GRP1A
  misc_feature (1)..(31): Homolog of NCBI NO: 30681492 NR Description: glycine-rich RNA-binding protein (AtGRP7)
  misc_feature (1)..(31): Homolog of NCBI NO: 21553354 NR Description: glycine-rich RNA binding protein 7 [Arabidopsis
  misc_feature (1)..(31): Homolog of NCBI NO: 15226605 NR Description: glycine-rich RNA binding protein AtGRP7
MNGQDLDGRSITVNEAQSRGSGGGGGHRGGGWRWIPQRRWWWRMVIPLIRFGITNECSLSRLLCFYLVLCVLYFVLVLL

SEQ ID NO: 41897 - DNA, 2089 bp, Arabidopsis thaliana
  misc_feature (1)..(2089): Ceres Seq. ID no. 12323979
  misc_feature: MA Experiment ID: 108434 Result: Up-regulated in Transcription
  misc_feature: MA Experiment 108434 PARAMETER Experiment Name: At_Root_Tips_cDNA_P Parameter: Tissue Value: Root Tips
  misc_feature: MA Experiment ID: 108461 Result: Up-regulated in Transcription
  misc_feature: MA Experiment 108461 PARAMETER Experiment Name: At_Germinating_Seeds_cDNA_P Parameter: Age (day) Value: 1 vs. 0
  misc_feature: MA Experiment 108461 PARAMETER Experiment Name: At_Germinating_Seeds_cDNA_P Parameter: Tissue Value: Germinating Seeds
  misc_feature: MA Experiment ID: 108462 Result: Up-regulated in Transcription
  misc_feature: MA Experiment 108462 PARAMETER Experiment Name: At_Germinating_Seeds_cDNA_P Parameter: Age (day) Value: 2 vs. 0
  misc_feature: MA Experiment 108462 PARAMETER Experiment Name: At_Germinating_Seeds_cDNA_P Parameter: Tissue Value: Germinating Seeds
  misc_feature: MA Experiment ID: 20000437 Result: Up-regulated in Transcription
  misc_feature: MA Experiment 20000437 PARAMETER Experiment Name: At_Drought_P Parameter: Age (day) Value: 8
  misc_feature: MA Experiment 20000437 PARAMETER Experiment Name: At_Drought_P Parameter: Organism Value: A. thaliana
  misc_feature: MA Experiment 20000437 PARAMETER Experiment Name: At_Drought_P Parameter: Plant Line Value: WS
  misc_feature: MA Experiment 20000437 PARAMETER Experiment Name: At_Drought_P Parameter: Timepoint (hr) Value: 24
  misc_feature: MA Experiment 20000437 PARAMETER Experiment Name: At_Drought_P Parameter: Tissue Value: Whole Plant
  misc_feature: MA Experiment 20000437 PARAMETER Experiment Name: At_Drought_P Parameter: Treatment Value: Drought vs. No Drought
  misc_feature: MA Experiment ID: 20000439 Result: Up-regulated in Transcription
  misc_feature: MA Experiment 20000439 PARAMETER Experiment Name: At_Roots__P Parameter: Age (day) Value: 14 vs. 21
  misc_feature: MA Experiment 20000439 PARAMETER Experiment Name: At_Roots__P Parameter: Organism Value: A. thaliana
  misc_feature: MA Experiment 20000439 PARAMETER Experiment Name: At_Roots__P Parameter: Tissue Value: Roots vs. Whole Plant
  misc_feature: MA Experiment ID: 20000495 Result: Up-regulated in Transcription
  misc_feature: MA Experiment 20000495 PARAMETER Experiment Name: At_Guard_Cells_P Parameter: Harvest Date Value: 8/2/2002
  misc_feature: MA Experiment 20000495 PARAMETER Experiment Name: At_Guard_Cells_P Parameter: Organism Value: A. thaliana
  misc_feature: MA Experiment 20000495 PARAMETER Experiment Name: At_Guard_Cells_P Parameter: Tissue Value: Guard Cells vs. Leaves
  misc_feature: MA Experiment ID: 20000496 Result: Up-regulated in Transcription
  misc_feature: MA Experiment 20000496 PARAMETER Experiment Name: At_Guard_Cells_P Parameter: Harvest Date Value: 7/19/2002
  misc_feature: MA Experiment 20000496 PARAMETER Experiment Name: At_Guard_Cells_P Parameter: Organism Value: Canola
  misc_feature: MA Experiment 20000496 PARAMETER Experiment Name: At_Guard_Cells_P Parameter: Tissue Value: Guard Cells vs. Leaves
agatttctcccaaaacggaactgctgattccttgaataaaattccctaatcggagtctgtgaagcaaatgggagcatcagattcaactctgctaggctctcaggaaaatcgaggtgatgtgattacgactatatctcatcgatcagaaatagtcgatcccattctcgagaatcttaaagctctcacagtaagtaggccaatattgaagtctcctcccacggaaagtagcttaacagatatcttagtgagaaaagctctatccagttcctcttccaatacggttgatcctcaaatacttgtagagctcttctccatttaccgagaatggcaagagaacaaagctcaagaaattaccaagagacaggaagatatagaaaacaagatagaagtcgcagatgctttggcgactaaacttttacagaggtttaaccactctgtttctgcaatgaggacaactgcccagcatttatctcaagttcatggtttgcaggtggagctcggggagcttaaaggaagattgacagaggtgatcagcaactgcgatacattatgtaagagaattaattctgagggacctgaatctctgaggtccacagtggcgcctttttctcttgcatctcccgattcgtgtatggagttgaacaacttgaaacaacgaaagagaacaacaacaaatgaaacaaaattacatttcaatgaaaaagcagataatgattactcttctttgccacctccccatatcaaggttgctgctgagcgtccatgtaaccagcgtcggcgagcactttctccctcttggccagctcaaggtcttcgtccaccatcatcttcaccagcttctcgaaccctacttttggcttccaccccaacatttcctttgccttgcttgcgtctcctttcagattgtcgacctccgtgggccggaagtaccttttgtcgatctcgacatggtctttccagttgagccccacgtacccgaaagacacgtccagaaactccttgacggtgtgtgattcctcagttgcaaccacatagtcatctggtttctcctgctgcagcatcagccacattgcttccacgtagtctcctgcgaaaccccagtctcttgaagcctgtatatttcccaggaagagcttggtctgcaatccgaccttgatccttcccaaggcccgagtgattttccgagtcacgaagttctcgcctctgcgaggtgactcgtggttgaagaggattccgttgcaggcgtacagaccgtaggcctctcggtaattgactgtgtaccaatgagcagcgcatttggacgcagcgtagggagatctcggatggaagggcgtggtctctgactgcggaggaggagttgacccgaacatctccgaagagccagcctggtagtacttgatggcgcggccattgtcaatgttgtgagatctgacagcctccaggagacgaagagctccagtagcgacaacgtcagcagtgtaatcagggatctcgaaggagacggcaacgtgggactgagcagcaaggttgtagacctcgtcaggcttgatgacgtcgagccaacggcggagggaggaggcatcagagagatcaccgtagtggagcttcatgagagctttgttgacgttgtggggatcaacgtagatatggttgagtcgctgagtgttaaaattggaggatcgtcggatgaggccgtgaacttcgtagcctttctcgagcaggaactcggtcaggtaagatccatcttggccagtgattccggtgaccagtgcaatcttcctcggcttcacaatgtcggaatcgccattgagagatctggaggccattgatgggtgggtgcagagtcagatcggatcagaagaaatgattgggcacgtcgcgctttctgtttttgattttagcgtcaactgattcgatgacttatatataataaagcccaaggacgaagaagacagagagagagggttacttctgtaaactttaaaggtgaatctgtatggctacgtaaagttgtacttgtatggcaaatcgccggcaagcgttgaccgattacgaatattttactatctattgggccaagatgggcttt

SEQ ID NO: 41898 - protein, 298 aa, Arabidopsis thaliana
  peptide (1)..(298): Ceres Seq. ID no. 12323980
  misc_feature (127)..(187): Homolog of NCBI NO: 26449649 NR Description: unknown protein [Arabidopsis thaliana]
  misc_feature (1)..(187): Homolog of NCBI NO: 15239336 NR Description: unknown protein; protein id: At5g66290.1
MGASDSTLLGSQENRGDVITTISHRSEIVDPILENLKALTVSRPILKSPPTESSLTDILVRKALSSSSSNTVDPQILVELFSIYREWQENKAQEITKRQEDIENKIEVADALATKLLQRFNHSVSAMRTTAQHLSQVHGLQVELGELKGRLTEVISNCDTLCKRINSEGPESLRSTVAPFSLASPDSCMELNNLKQRKRTTTNETKLHFNEKADNDYSSLPPPHIKVAAERPCNQRRRALSPSWPAQGLRPPSSSPASRTLLLASTPTFPLPCLRLLSDCRPPWAGSTFCRSRHGLSS

SEQ ID NO: 41899 - protein, 172 aa, Arabidopsis thaliana
  peptide (1)..(172): Ceres Seq. ID no. 12323981
  misc_feature (1)..(61): Homolog of NCBI NO: 26449649 NR Description: unknown protein [Arabidopsis thaliana]
  misc_feature (1)..(61): Homolog of NCBI NO: 15239336 NR Description: unknown protein; protein id: At5g66290.1
MRTTAQHLSQVHGLQVELGELKGRLTEVISNCDTLCKRINSEGPESLRSTVAPFSLASPDSCMELNNLKQRKRTTTNETKLHFNEKADNDYSSLPPPHIKVAAERPCNQRRRALSPSWPAQGLRPPSSSPASRTLLLASTPTFPLPCLRLLSDCRPPWAGSTFCRSRHGLSS

SEQ ID NO: 41900 - DNA, 955 bp, Arabidopsis thaliana
  misc_feature (1)..(955): Ceres Seq. ID no. 12325788
  misc_feature: MA Experiment ID: 108461 Result: Up-regulated in Transcription
  misc_feature: MA Experiment 108461 PARAMETER Experiment Name: At_Germinating_Seeds_cDNA_P Parameter: Age (day) Value: 1 vs. 0
  misc_feature: MA Experiment 108461 PARAMETER Experiment Name: At_Germinating_Seeds_cDNA_P Parameter: Tissue Value: Germinating Seeds
  misc_feature: MA Experiment ID: 20000180 Result: Up-regulated in Transcription
  misc_feature: MA Experiment 20000180 PARAMETER Experiment Name: At_Germinating_Seeds_P Parameter: Age (hr) Value: 24 vs. 0
  misc_feature: MA Experiment 20000180 PARAMETER Experiment Name: At_Germinating_Seeds_P Parameter: Tissue Value: Germinating Seeds
  misc_feature: MA Experiment ID: 20000306 Result: Up-regulated in Transcription
  misc_feature: MA Experiment 20000306 PARAMETER Experiment Name: At_Germinating_Seeds_Sub_P Parameter: Age (hr) Value: 6 vs. 0
  misc_feature: MA Experiment 20000306 PARAMETER Experiment Name: At_Germinating_Seeds_Sub_P Parameter: Organism Value: A. thaliana
  misc_feature: MA Experiment 20000306 PARAMETER Experiment Name: At_Germinating_Seeds_Sub_P Parameter: Plant Line Value: WS
  misc_feature: MA Experiment 20000306 PARAMETER Experiment Name: At_Germinating_Seeds_Sub_P Parameter: Tissue Value: Germinating Seeds
  misc_feature: MA Experiment ID: 20000307 Result: Up-regulated in Transcription
  misc_feature: MA Experiment 20000307 PARAMETER Experiment Name: At_Germinating_Seeds_Sub_P Parameter: Age (hr) Value: 24 vs. 0
  misc_feature: MA Experiment 20000307 PARAMETER Experiment Name: At_Germinating_Seeds_Sub_P Parameter: Organism Value: A. thaliana
  misc_feature: MA Experiment 20000307 PARAMETER Experiment Name: At_Germinating_Seeds_Sub_P Parameter: Plant Line Value: WS
  misc_feature: MA Experiment 20000307 PARAMETER Experiment Name: At_Germinating_Seeds_Sub_P Parameter: Tissue Value: Germinating Seeds
  misc_feature: MA Experiment ID: 20000439 Result: Up-regulated in Transcription
  misc_feature: MA Experiment 20000439 PARAMETER Experiment Name: At_Roots__P Parameter: Age (day) Value: 14 vs. 21
  misc_feature: MA Experiment 20000439 PARAMETER Experiment Name: At_Roots__P Parameter: Organism Value: A. thaliana
  misc_feature: MA Experiment 20000439 PARAMETER Experiment Name: At_Roots__P Parameter: Tissue Value: Roots vs. Whole Plant
atatatacattttacaatcacttgctagaccaacgggcttcacttgtttctctcccaaagtttcttcatcatccttgcgataaagaaaacaacaatcggctgtttcgtttcgatccaaagatgagtgaagaaactaaagataaccagaggctgcagcgaccagctcctcgtcttaacgagaggattctctcatccttgtcaagaagatccgtagctgctcatccatggcatgatcttgagattggacctggagctccacagattttcaatgtggttgttgagatcactaaaggaagcaaggtcaaatacgagcttgacaaaaagacaggactcatcaaggttgatcgtattctctactcatcagttgtgtaccctcacaactatggttttgttcctcgcacattgtgtgaagacaatgaccccattgatgtcttagtcatcatgcaggaacctgtgcttccgggttgttttctgcgtgccagagccattggattaatgcctatgattgaccagggtgaaaaagatgacaagatcattgcagtgtgtgttgatgatcctgaatataagcactacactgacatcaaagaacttcctcctcaccgtctctctgaaatccgtcgtttcttcgaagactacaagaaaaacgagaacaaggaagttgcagtgaatgattttctgccatctgagtctgcggttgaagctatccagtactcaatggacctctatgctgaatacattctccacaccctgaggcgttgaagcttctcctcagaagatttctgcagcatctatgtttctgttacttttcattgataataagaagcatatgatcctaattgatattacttttatctctgcatttttcttccttatcatttggtccttctgtaatttcgttttaaagaccctttcttggcattgaaatttttggtttaatttgtttgaagagttctat

SEQ ID NO: 41901 - protein, 252 aa, Arabidopsis thaliana
  peptide (1)..(252): Ceres Seq. ID no. 12325789
  misc_feature (90)..(244): Pfam Name: Inorganic pyrophosphatase Pfam Description: Inorganic pyrophosphatase
  misc_feature (41)..(252): Homolog of NCBI NO: 38345829 NR Description: OSJNBa0070M12.12 [Oryza sativa (japonica
  misc_feature (41)..(252): Homolog of NCBI NO: 4033424 NR Description: Soluble inorganic pyrophosphatase (Pyrophosphate
  misc_feature (41)..(252): Homolog of NCBI NO: 2500047 NR Description: Soluble inorganic pyrophosphatase (Pyrophosphate
  misc_feature (43)..(252): Homolog of NCBI NO: 26451240 NR Description: putative inorganic pyrophosphatase [Arabidopsis
  misc_feature (43)..(252): Homolog of NCBI NO: 15234191 NR Description: putative inorganic phosphatase
  misc_feature (43)..(252): Homolog of NCBI NO: 15226453 NR Description: putative inorganic pyrophosphatase; protein id:
  misc_feature (41)..(252): Homolog of NCBI NO: 5669924 NR Description: soluble inorganic pyrophosphatase
  misc_feature (213)..(252): Homolog of NCBI NO: 25290346 NR Description: protein T25K16.5 [imported] - Arabidopsis
  misc_feature (41)..(211): Homolog of NCBI NO: 25290346 NR Description: protein T25K16.5 [imported] - Arabidopsis
  misc_feature (41)..(252): Homolog of NCBI NO: 15223288 NR Description: soluble inorganic pyrophosphatase, putative
IYTFYNHLLDQRASLVSLPKFLHHPCDKENNNRLFRFDPKMSEETKDNQRLQRPAPRLNERILSSLSRRSVAAHPWHDLEIGPGAPQIFNVVVEITKGSKVKYELDKKTGLIKVDRILYSSVVYPHNYGFVPRTLCEDNDPIDVLVIMQEPVLPGCFLRARAIGLMPMIDQGEKDDKIIAVCVDDPEYKHYTDIKELPPHRLSEIRRFFEDYKKNENKEVAVNDFLPSESAVEAIQYSMDLYAEYILHTLRR

SEQ ID NO: 41902 - protein, 212 aa, Arabidopsis thaliana
  peptide (1)..(212): Ceres Seq. ID no. 12325790
  misc_feature (50)..(204): Pfam Name: Inorganic pyrophosphatase Pfam Description: Inorganic pyrophosphatase
  misc_feature (1)..(212): Homolog of NCBI NO: 38345829 NR Description: OSJNBa0070M12.12 [Oryza sativa (japonica
  misc_feature (1)..(212): Homolog of NCBI NO: 4033424 NR Description: Soluble inorganic pyrophosphatase (Pyrophosphate
  misc_feature (1)..(212): Homolog of NCBI NO: 2500047 NR Description: Soluble inorganic pyrophosphatase (Pyrophosphate
  misc_feature (3)..(212): Homolog of NCBI NO: 26451240 NR Description: putative inorganic pyrophosphatase [Arabidopsis
  misc_feature (3)..(212): Homolog of NCBI NO: 15234191 NR Description: putative inorganic phosphatase
  misc_feature (3)..(212): Homolog of NCBI NO: 15226453 NR Description: putative inorganic pyrophosphatase; protein id:
  misc_feature (1)..(212): Homolog of NCBI NO: 5669924 NR Description: soluble inorganic pyrophosphatase
  misc_feature (173)..(212): Homolog of NCBI NO: 25290346 NR Description: protein T25K16.5 [imported] - Arabidopsis
  misc_feature (1)..(171): Homolog of NCBI NO: 25290346 NR Description: protein T25K16.5 [imported] - Arabidopsis
  misc_feature (1)..(212): Homolog of NCBI NO: 15223288 NR Description: soluble inorganic pyrophosphatase, putative
MSEETKDNQRLQRPAPRLNERILSSLSRRSVAAHPWHDLEIGPGAPQIFNVVVEITKGSKVKYELDKKTGLIKVDRILYSSVVYPHNYGFVPRTLCEDNDPIDVLVIMQEPVLPGCFLRARAIGLMPMIDQGEKDDKIIAVCVDDPEYKHYTDIKELPPHRLSEIRRFFEDYKKNENKEVAVNDFLPSESAVEAIQYSMDLYAEYILHTLRR

SEQ ID NO: 41903 - DNA, 2156 bp, Arabidopsis thaliana
  misc_feature (1)..(2156): Ceres Seq. ID no. 12329174
  misc_feature: MA Experiment ID: 108434 Result: Down-regulated in Transcription
  misc_feature: MA Experiment 108434 PARAMETER Experiment Name: At_Root_Tips_cDNA_P Parameter: Tissue Value: Root Tips
  misc_feature: MA Experiment ID: 108585 Result: Up-regulated in Transcription
  misc_feature: MA Experiment 108585 PARAMETER Experiment Name: At_5mM_NaNP_cDNA_P Parameter: Timepoint (hr) Value: 6
  misc_feature: MA Experiment 108585 PARAMETER Experiment Name: At_5mM_NaNP_cDNA_P Parameter: Tissue Value: Aerial
  misc_feature: MA Experiment 108585 PARAMETER Experiment Name: At_5mM_NaNP_cDNA_P Parameter: Treatment Value: null
  misc_feature: MA Experiment ID: 20000070 Result: Down-regulated in Transcription
  misc_feature: MA Experiment 20000070 PARAMETER Experiment Name: At_100uM_ABA_Mutants_cDNA_P Parameter: Plant Line Value: CS24
  misc_feature: MA Experiment 20000070 PARAMETER Experiment Name: At_100uM_ABA_Mutants_cDNA_P Parameter: Timepoint (hr) Value: 6
  misc_feature: MA Experiment 20000070 PARAMETER Experiment Name: At_100uM_ABA_Mutants_cDNA_P Parameter: Tissue Value: Aerial
  misc_feature: MA Experiment 20000070 PARAMETER Experiment Name: At_100uM_ABA_Mutants_cDNA_P Parameter: Treatment Value: 100uM ABA vs. No Treatment
  misc_feature: MA Experiment ID: 20000184 Result: Down-regulated in Transcription
  misc_feature: MA Experiment 20000184 PARAMETER Experiment Name: At_Shoots__P Parameter: Age (day) Value: 7
  misc_feature: MA Experiment 20000184 PARAMETER Experiment Name: At_Shoots__P Parameter: Tissue Value: Shoots vs. Whole Plant
  misc_feature: MA Experiment ID: 20000185 Result: Down-regulated in Transcription
  misc_feature: MA Experiment 20000185 PARAMETER Experiment Name: At_Roots__P Parameter: Age (day) Value: 7 vs. 21
  misc_feature: MA Experiment 20000185 PARAMETER Experiment Name: At_Roots__P Parameter: Organism Value: A. thaliana
  misc_feature: MA Experiment 20000185 PARAMETER Experiment Name: At_Roots__P Parameter: Tissue Value: Roots vs. Whole Plant
  misc_feature: MA Experiment ID: 20000227 Result: Down-regulated in Transcription
  misc_feature: MA Experiment 20000227 PARAMETER Experiment Name: At_Root-Tips-vs-Tops_P Parameter: Tissue Value: Root Tips vs. Root Tops
  misc_feature: MA Experiment ID: 20000234 Result: Down-regulated in Transcription
  misc_feature: MA Experiment 20000234 PARAMETER Experiment Name: At_Siliques_P Parameter: Age (day) Value: 21
  misc_feature: MA Experiment 20000234 PARAMETER Experiment Name: At_Siliques_P Parameter: Organism Value: A. thaliana
  misc_feature: MA Experiment 20000234 PARAMETER Experiment Name: At_Siliques_P Parameter: Plant Line Value: WS
  misc_feature: MA Experiment 20000234 PARAMETER Experiment Name: At_Siliques_P Parameter: Tissue Value: Less Than 5mm Siliques vs. Whole Plant
  misc_feature: MA Experiment ID: 20000235 Result: Down-regulated in Transcription
  misc_feature: MA Experiment 20000235 PARAMETER Experiment Name: At_Siliques_P Parameter: Age (day) Value: 21
  misc_feature: MA Experiment 20000235 PARAMETER Experiment Name: At_Siliques_P Parameter: Organism Value: A. thaliana
  misc_feature: MA Experiment 20000235 PARAMETER Experiment Name: At_Siliques_P Parameter: Plant Line Value: WS
  misc_feature: MA Experiment 20000235 PARAMETER Experiment Name: At_Siliques_P Parameter: Tissue Value: 5-10mm Siliques vs. Whole Plant
  misc_feature: MA Experiment ID: 20000264 Result: Down-regulated in Transcription
  misc_feature: MA Experiment 20000264 PARAMETER Experiment Name: At_Open_Flower_P Parameter: Age (day) Value: 21
  misc_feature: MA Experiment 20000264 PARAMETER Experiment Name: At_Open_Flower_P Parameter: Plant Line Value: WS
  misc_feature: MA Experiment 20000264 PARAMETER Experiment Name: At_Open_Flower_P Parameter: Tissue Value: Open Flower vs. Whole Plant
  misc_feature: MA Experiment ID: 20000265 Result: Down-regulated in Transcription
  misc_feature: MA Experiment 20000265 PARAMETER Experiment Name: At_Open_Flower_P Parameter: Age (day) Value: 21
  misc_feature: MA Experiment 20000265 PARAMETER Experiment Name: At_Open_Flower_P Parameter: Plant Line Value: WS
  misc_feature: MA Experiment 20000265 PARAMETER Experiment Name: At_Open_Flower_P Parameter: Tissue Value: Closed Flower vs. Whole Plant
  misc_feature: MA Experiment ID: 20000286 Result: Down-regulated in Transcription
  misc_feature: MA Experiment 20000286 PARAMETER Experiment Name: At_Open_Flower_P Parameter: Age (day) Value: 21
  misc_feature: MA Experiment 20000286 PARAMETER Experiment Name: At_Open_Flower_P Parameter: Plant Line Value: WS
  misc_feature: MA Experiment 20000286 PARAMETER Experiment Name: At_Open_Flower_P Parameter: Tissue Value: Half Open vs. Whole Plant
  misc_feature: MA Experiment ID: 20000438 Result: Down-regulated in Transcription
  misc_feature: MA Experiment 20000438 PARAMETER Experiment Name: At_Shoots__P Parameter: Age (day) Value: 14
  misc_feature: MA Experiment 20000438 PARAMETER Experiment Name: At_Shoots__P Parameter: Tissue Value: Shoots vs. Whole Plant
  misc_feature: MA Experiment ID: 20000441 Result: Up-regulated in Transcription
  misc_feature: MA Experiment 20000441 PARAMETER Experiment Name: At_1uM_BR-BRZ__P Parameter: Tissue Value: Shoot Apices
  misc_feature: MA Experiment 20000441 PARAMETER Experiment Name: At_1uM_BR-BRZ__P Parameter: Treatment Value: 1uM BR vs. No Treatment
  misc_feature: MA Experiment ID: 20000573 Result: Down-regulated in Transcription
  misc_feature: MA Experiment 20000573 PARAMETER Experiment Name: At_100uM_ABA_Mutants__P Parameter: Organism Value: A. thaliana
  misc_feature: MA Experiment 20000573 PARAMETER Experiment Name: At_100uM_ABA_Mutants__P Parameter: Plant Line Value: CS22 vs. Ler wt
  misc_feature: MA Experiment 20000573 PARAMETER Experiment Name: At_100uM_ABA_Mutants__P Parameter: Timepoint (hr) Value: N/A
  misc_feature: MA Experiment 20000573 PARAMETER Experiment Name: At_100uM_ABA_Mutants__P Parameter: Tissue Value: Whole Plant
  misc_feature: MA Experiment 20000573 PARAMETER Experiment Name: At_100uM_ABA_Mutants__P Parameter: Treatment Value: None
  misc_feature: MA Experiment ID: 20000574 Result: Down-regulated in Transcription
  misc_feature: MA Experiment 20000574 PARAMETER Experiment Name: At_100uM_ABA_Mutants__P Parameter: Organism Value: A. thaliana
  misc_feature: MA Experiment 20000574 PARAMETER Experiment Name: At_100uM_ABA_Mutants__P Parameter: Plant Line Value: CS23 vs. Ler wt
  misc_feature: MA Experiment 20000574 PARAMETER Experiment Name: At_100uM_ABA_Mutants__P Parameter: Timepoint (hr) Value: N/A
  misc_feature: MA Experiment 20000574 PARAMETER Experiment Name: At_100uM_ABA_Mutants__P Parameter: Tissue Value: Whole Plant
  misc_feature: MA Experiment 20000574 PARAMETER Experiment Name: At_100uM_ABA_Mutants__P Parameter: Treatment Value: None
  misc_feature: MA Experiment ID: 20001247 Result: Up-regulated in Transcription
  misc_feature: MA Experiment 20001247 PARAMETER Experiment Name: At_Far-red-induction_P Parameter: Age (day) Value: 7
  misc_feature: MA Experiment 20001247 PARAMETER Experiment Name: At_Far-red-induction_P Parameter: Light Value: Far-red vs. White
  misc_feature: MA Experiment 20001247 PARAMETER Experiment Name: At_Far-red-induction_P Parameter: Organism Value: A. thaliana
  misc_feature: MA Experiment 20001247 PARAMETER Experiment Name: At_Far-red-induction_P Parameter: Plant Line Value: Columbia
  misc_feature: MA Experiment 20001247 PARAMETER Experiment Name: At_Far-red-induction_P Parameter: Timepoint (hr) Value: 1
  misc_feature: MA Experiment 20001247 PARAMETER Experiment Name: At_Far-red-induction_P Parameter: Tissue Value: Whole Plant
aattaccacaaagaagaacttgcaaatcccttctcttttgttcaagtcgtacgacagagcctttgaaagaaagaactggtggggaagcgttaagctacatataactccaagatacgggtctttgtttgttttgaagatcagattcattttacgataattccgttactctttattgtgtatatatatctctttcccggaaatttcggttcttgttgtacaaaaactccaaaaaaacgcataaaaaatattctgtaaatggttgaaattctctggggatttcaacgggtgttgtggtatcatgtcacagaagagagagtttgaagaagggaaaggtcgaattgagggcggctcatccgaagacaagcgtagaagattcaaaagtgtggttcaggaggtaatgagattacaaaccgtcaaacattttctcgaacctgttctcgagcccttaattcgtaaagtggtcaaagaagaagttgaattagctcttggaaagcatctagcaggcatcaagtggatttgtgagaaagagactcatcctttggaatcaaggaatctacagttaaagttcttgaacaatctatcgcttcccgtgtttacttcagctcggatagaaggagatgaaggccaagctataagagttggattaatagacccttcaactggccaaattttctcttctggtcctgcatcatccgccaaactcgaagtttttgtcgttgagggtgattttaacagtgttagtgattggactgatgaggatatcaggaataacattgtaagagagagagaaggaaagaaacctctactcaatgggaatgtatttgcggttcttaatgatggcattggtgttatggatgaaatctcatttacagataactctagctggactaggagcaggaagttcagactcggggtacgaatagtggatcagtttgattatgtcaaaattagagaggcaataacagagtcctttgtcgtaagagatcatcgaggagagttgtacaaaaagcatcatcctccttctcttttcgatgaagtatggagattggaaaagatagtgaaagatggagcatttcacagactactgaatttgtcaaatataaacactgtcaaggatttcttaacacatttccatttaaactcttcaaaactccgacaagttcttggtacgggtatgtcttcaaagatgtgggaaattactttggaccatgctcgatcatgtgttctagatagtagcgtccatgtgtaccaagctcctggatttcagaagaaaacagctgttgtcttcaacgtcgtagctcaagtgcttggactgctcgtggattttcagtatattcctgctgaaaagttatcagagattgaaaaggctcaagcggaggtgatggtaattgatgcattgagtcacctaaatgaagtaatctcgtatgatgatgaggtttccatgatgaggaacgttctcaatgccccggcttctcaaggcagtgttgccgggattgattattcgggtctgagtttgaccagtttggacggatacggttttgtgtcaagtcttcacaacacagcagaatgtagtggcaagcacagtgatgatgttgacatggaagttactccacatggtttatatgaagactacgacaatctctggaactgctctcacattctaggcttagaagaaccgcaatctgagttgcagagtgcgcttgacgatttcatgtcacagaagaatgcttcggtcggtggtaaggctcacagcaaaagatggacaaagcttttcagtgtctcgagatggctctctgttttcaagtatgtcaagttaggaaaaatataaaatgagtttagtacacaaaagaacaaaacgactcgctgcgccgcgccctggacagattcgtgtatatatatactcggggaaagcttgggtttctgatgatccagaggcgttcaaaagtgttttctttcttcttcttcttctggttgtctccatctttgtgttaaagatgtgaatatatgttttaggacagcttcatttttgttgaaagcttaaaaaacagggtcttttataatctctgtgattagtaccaaattgcagatttgcagaactacgtttttcttggtttgtcaggtaatgtgaaactgaataaaatgaatattatttgaat

SEQ ID NO: 41904 - protein, 509 aa, Arabidopsis thaliana
  peptide (1)..(509): Ceres Seq. ID no. 12329175
  misc_feature (1)..(288): Homolog of NCBI NO: 18398836 NR Description: calmodulin-binding protein
  misc_feature (97)..(401): Homolog of NCBI NO: 7489107 NR Description: calmodulin-binding protein TCB60 - common tobacco
  misc_feature (20)..(376): Homolog of NCBI NO: 22329041 NR Description: calmodulin-binding protein; protein id:
  misc_feature (51)..(383): Homolog of NCBI NO: 25354646 NR Description: probable calmodulin-binding protein
  misc_feature (87)..(463): Homolog of NCBI NO: 7484830 NR Description: calmodulin-binding protein homolog F14M19.80 -
  misc_feature (2)..(377): Homolog of NCBI NO: 15242785 NR Description: calmodulin-binding protein
  misc_feature (4)..(463): Homolog of NCBI NO: 30687005 NR Description: calmodulin-binding protein [Arabidopsis thaliana]
  misc_feature (185)..(509): Homolog of NCBI NO: 20260396 NR Description: putative protein [Arabidopsis thaliana]
  misc_feature (34)..(509): Homolog of NCBI NO: 30697704 NR Description: calmodulin-binding protein [Arabidopsis thaliana]
  misc_feature (28)..(509): Homolog of NCBI NO: 10178088 NR Description: contains similarity to calmodulin-binding
MSQKREFEEGKGRIEGGSSEDKRRRFKSVVQEVMRLQTVKHFLEPVLEPLIRKVVKEEVELALGKHLAGIKWICEKETHPLESRNLQLKFLNNLSLPVFTSARIEGDEGQAIRVGLIDPSTGQIFSSGPASSAKLEVFVVEGDFNSVSDWTDEDIRNNIVREREGKKPLLNGNVFAVLNDGIGVMDEISFTDNSSWTRSRKFRLGVRIVDQFDYVKIREAITESFVVRDHRGELYKKHHPPSLFDEVWRLEKIVKDGAFHRLLNLSNINTVKDFLTHFHLNSSKLRQVLGTGMSSKMWEITLDHARSCVLDSSVHVYQAPGFQKKTAVVFNVVAQVLGLLVDFQYIPAEKLSEIEKAQAEVMVIDALSHLNEVISYDDEVSMMRNVLNAPASQGSVAGIDYSGLSLTSLDGYGFVSSLHNTAECSGKHSDDVDMEVTPHGLYEDYDNLWNCSHILGLEEPQSELQSALDDFMSQKNASVGGKAHSKRWTKLFSVSRWLSVFKYVKLGKI

SEQ ID NO: 41905 - protein, 476 aa, Arabidopsis thaliana
  peptide (1)..(476): Ceres Seq. ID no. 12329176
  misc_feature (1)..(255): Homolog of NCBI NO: 18398836 NR Description: calmodulin-binding protein
  misc_feature (64)..(368): Homolog of NCBI NO: 7489107 NR Description: calmodulin-binding protein TCB60 - common tobacco
  misc_feature (1)..(343): Homolog of NCBI NO: 22329041 NR Description: calmodulin-binding protein; protein id:
  misc_feature (18)..(350): Homolog of NCBI NO: 25354646 NR Description: probable calmodulin-binding protein
  misc_feature (54)..(430): Homolog of NCBI NO: 7484830 NR Description: calmodulin-binding protein homolog F14M19.80 -
  misc_feature (1)..(344): Homolog of NCBI NO: 15242785 NR Description: calmodulin-binding protein
  misc_feature (1)..(430): Homolog of NCBI NO: 30687005 NR Description: calmodulin-binding protein [Arabidopsis thaliana]
  misc_feature (152)..(476): Homolog of NCBI NO: 20260396 NR Description: putative protein [Arabidopsis thaliana]
  misc_feature (1)..(476): Homolog of NCBI NO: 30697704 NR Description: calmodulin-binding protein [Arabidopsis thaliana]
  misc_feature (1)..(476): Homolog of NCBI NO: 10178088 NR Description: contains similarity to calmodulin-binding
MRLQTVKHFLEPVLEPLIRKVVKEEVELALGKHLAGIKWICEKETHPLESRNLQLKFLNNLSLPVFTSARIEGDEGQAIRVGLIDPSTGQIFSSGPASSAKLEVFVVEGDFNSVSDWTDEDIRNNIVREREGKKPLLNGNVFAVLNDGIGVMDEISFTDNSSWTRSRKFRLGVRIVDQFDYVKIREAITESFVVRDHRGELYKKHHPPSLFDEVWRLEKIVKDGAFHRLLNLSNINTVKDFLTHFHLNSSKLRQVLGTGMSSKMWEITLDHARSCVLDSSVHVYQAPGFQKKTAVVFNVVAQVLGLLVDFQYIPAEKLSEIEKAQAEVMVIDALSHLNEVISYDDEVSMMRNVLNAPASQGSVAGIDYSGLSLTSLDGYGFVSSLHNTAECSGKHSDDVDMEVTPHGLYEDYDNLWNCSHILGLEEPQSELQSALDDFMSQKNASVGGKAHSKRWTKLFSVSRWLSVFKYVKLGKI

SEQ ID NO: 41906 - protein, 325 aa, Arabidopsis thaliana
  peptide (1)..(325): Ceres Seq. ID no. 12329177
  misc_feature (1)..(104): Homolog of NCBI NO: 18398836 NR Description: calmodulin-binding protein
  misc_feature (1)..(217): Homolog of NCBI NO: 7489107 NR Description: calmodulin-binding protein TCB60 - common tobacco
  misc_feature (1)..(192): Homolog of NCBI NO: 22329041 NR Description: calmodulin-binding protein; protein id:
  misc_feature (1)..(199): Homolog of NCBI NO: 25354646 NR Description: probable calmodulin-binding protein
  misc_feature (1)..(279): Homolog of NCBI NO: 7484830 NR Description: calmodulin-binding protein homolog F14M19.80 -
  misc_feature (1)..(193): Homolog of NCBI NO: 15242785 NR Description: calmodulin-binding protein
  misc_feature (1)..(279): Homolog of NCBI NO: 30687005 NR Description: calmodulin-binding protein [Arabidopsis thaliana]
  misc_feature (1)..(325): Homolog of NCBI NO: 20260396 NR Description: putative protein [Arabidopsis thaliana]
  misc_feature (1)..(325): Homolog of NCBI NO: 30697704 NR Description: calmodulin-binding protein [Arabidopsis thaliana]
  misc_feature (1)..(325): Homolog of NCBI NO: 10178088 NR Description: contains similarity to calmodulin-binding
MDEISFTDNSSWTRSRKFRLGVRIVDQFDYVKIREAITESFVVRDHRGELYKKHHPPSLFDEVWRLEKIVKDGAFHRLLNLSNINTVKDFLTHFHLNSSKLRQVLGTGMSSKMWEITLDHARSCVLDSSVHVYQAPGFQKKTAVVFNVVAQVLGLLVDFQYIPAEKLSEIEKAQAEVMVIDALSHLNEVISYDDEVSMMRNVLNAPASQGSVAGIDYSGLSLTSLDGYGFVSSLHNTAECSGKHSDDVDMEVTPHGLYEDYDNLWNCSHILGLEEPQSELQSALDDFMSQKNASVGGKAHSKRWTKLFSVSRWLSVFKYVKLGKI

SEQ ID NO: 41907 - DNA, 1149 bp, Arabidopsis thaliana
  misc_feature (1)..(1149): Ceres Seq. ID no. 12357529
  misc_feature: MA Experiment ID: 108434 Result: Down-regulated in Transcription
  misc_feature: MA Experiment 108434 PARAMETER Experiment Name: At_Root_Tips_cDNA_P Parameter: Tissue Value: Root Tips
  misc_feature: MA Experiment ID: 108488 Result: Down-regulated in Transcription
  misc_feature: MA Experiment ID: 108501 Result: Down-regulated in Transcription
  misc_feature: MA Experiment 108501 PARAMETER Experiment Name: At_ap2_floral_buds_cDNA_P Parameter: Plant Line Value: ap2 (Ler.)
  misc_feature: MA Experiment 108501 PARAMETER Experiment Name: At_ap2_floral_buds_cDNA_P Parameter: Tissue Value: Closed Flower
  misc_feature: MA Experiment ID: 108561 Result: Up-regulated in Transcription
  misc_feature: MA Experiment 108561 PARAMETER Experiment Name: At_100uM_ABA_cDNA_P Parameter: Timepoint (hr) Value: 6
  misc_feature: MA Experiment 108561 PARAMETER Experiment Name: At_100uM_ABA_cDNA_P Parameter: Tissue Value: Aerial
  misc_feature: MA Experiment 108561 PARAMETER Experiment Name: At_100uM_ABA_cDNA_P Parameter: Treatment Value: 100uM ABA vs. No Treatment
  misc_feature: MA Experiment ID: 108569 Result: Up-regulated in Transcription
  misc_feature: MA Experiment 108569 PARAMETER Experiment Name: At_0.001%_MeJA__cDNA_P Parameter: Timepoint (hr) Value: 6
  misc_feature: MA Experiment 108569 PARAMETER Experiment Name: At_0.001%_MeJA__cDNA_P Parameter: Tissue Value: Aerial
  misc_feature: MA Experiment 108569 PARAMETER Experiment Name: At_0.001%_MeJA__cDNA_P Parameter: Treatment Value: 0.001% MeJA vs. No Treatment
  misc_feature: MA Experiment ID: 108573 Result: Up-regulated in Transcription
  misc_feature: MA Experiment 108573 PARAMETER Experiment Name: At_Drought_cDNA_P Parameter: Timepoint (hr) Value: 6
  misc_feature: MA Experiment 108573 PARAMETER Experiment Name: At_Drought_cDNA_P Parameter: Tissue Value: Aerial
  misc_feature: MA Experiment 108573 PARAMETER Experiment Name: At_Drought_cDNA_P Parameter: Treatment Value: Drought vs. No Drought
  misc_feature: MA Experiment ID: 108585 Result: Up-regulated in Transcription
  misc_feature: MA Experiment 108585 PARAMETER Experiment Name: At_5mM_NaNP_cDNA_P Parameter: Timepoint (hr) Value: 6
  misc_feature: MA Experiment 108585 PARAMETER Experiment Name: At_5mM_NaNP_cDNA_P Parameter: Tissue Value: Aerial
  misc_feature: MA Experiment 108585 PARAMETER Experiment Name: At_5mM_NaNP_cDNA_P Parameter: Treatment Value: null
  misc_feature: MA Experiment ID: 108605 Result: Up-regulated in Transcription
  misc_feature: MA Experiment 108605 PARAMETER Experiment Name: At_100uM_ABA_cDNA_P Parameter: Timepoint (hr) Value: 6
  misc_feature: MA Experiment 108605 PARAMETER Experiment Name: At_100uM_ABA_cDNA_P Parameter: Tissue Value: Aerial
  misc_feature: MA Experiment 108605 PARAMETER Experiment Name: At_100uM_ABA_cDNA_P Parameter: Treatment Value: 100uM ABA vs. No Treatment
  misc_feature: MA Experiment ID: 108607 Result: Up-regulated in Transcription
  misc_feature: MA Experiment 108607 PARAMETER Experiment Name: At_100uM_ABA_cDNA_P Parameter: Timepoint (hr) Value: 4
  misc_feature: MA Experiment 108607 PARAMETER Experiment Name: At_100uM_ABA_cDNA_P Parameter: Tissue Value: Aerial
  misc_feature: MA Experiment 108607 PARAMETER Experiment Name: At_100uM_ABA_cDNA_P Parameter: Treatment Value: 100uM ABA vs. No Treatment
  misc_feature: MA Experiment ID: 108609 Result: Up-regulated in Transcription
  misc_feature: MA Experiment 108609 PARAMETER Experiment Name: At_100uM_ABA_cDNA_P Parameter: Timepoint (hr) Value: 24
  misc_feature: MA Experiment 108609 PARAMETER Experiment Name: At_100uM_ABA_cDNA_P Parameter: Tissue Value: Aerial
  misc_feature: MA Experiment 108609 PARAMETER Experiment Name: At_100uM_ABA_cDNA_P Parameter: Treatment Value: 100uM ABA vs. No Treatment
  misc_feature: MA Experiment ID: 108668 Result: Up-regulated in Transcription
  misc_feature: MA Experiment 108668 PARAMETER Experiment Name: At_2mM_SA_cDNA_P Parameter: Plant Line Value: WS
  misc_feature: MA Experiment 108668 PARAMETER Experiment Name: At_2mM_SA_cDNA_P Parameter: Timepoint (hr) Value: 6
  misc_feature: MA Experiment 108668 PARAMETER Experiment Name: At_2mM_SA_cDNA_P Parameter: Treatment Value: 2mM SA vs. No Treatment
  misc_feature: MA Experiment ID: 20000069 Result: Up-regulated in Transcription
  misc_feature: MA Experiment 20000069 PARAMETER Experiment Name: At_100uM_ABA_Mutants_cDNA_P Parameter: Plant Line Value: CS23
  misc_feature: MA Experiment 20000069 PARAMETER Experiment Name: At_100uM_ABA_Mutants_cDNA_P Parameter: Timepoint (hr) Value: 6
  misc_feature: MA Experiment 20000069 PARAMETER Experiment Name: At_100uM_ABA_Mutants_cDNA_P Parameter: Tissue Value: Aerial
  misc_feature: MA Experiment 20000069 PARAMETER Experiment Name: At_100uM_ABA_Mutants_cDNA_P Parameter: Treatment Value: 100uM ABA vs. No Treatment
  misc_feature: MA Experiment ID: 20000070 Result: Up-regulated in Transcription
  misc_feature: MA Experiment 20000070 PARAMETER Experiment Name: At_100uM_ABA_Mutants_cDNA_P Parameter: Plant Line Value: CS24
  misc_feature: MA Experiment 20000070 PARAMETER Experiment Name: At_100uM_ABA_Mutants_cDNA_P Parameter: Timepoint (hr) Value: 6
  misc_feature: MA Experiment 20000070 PARAMETER Experiment Name: At_100uM_ABA_Mutants_cDNA_P Parameter: Tissue Value: Aerial
  misc_feature: MA Experiment 20000070 PARAMETER Experiment Name: At_100uM_ABA_Mutants_cDNA_P Parameter: Treatment Value: 100uM ABA vs. No Treatment
  misc_feature: MA Experiment ID: 20000071 Result: Up-regulated in Transcription
  misc_feature: MA Experiment 20000071 PARAMETER Experiment Name: At_100uM_ABA_Mutants_cDNA_P Parameter: Plant Line Value: CS8104
  misc_feature: MA Experiment 20000071 PARAMETER Experiment Name: At_100uM_ABA_Mutants_cDNA_P Parameter: Timepoint (hr) Value: 6
  misc_feature: MA Experiment 20000071 PARAMETER Experiment Name: At_100uM_ABA_Mutants_cDNA_P Parameter: Tissue Value: Aerial
  misc_feature: MA Experiment 20000071 PARAMETER Experiment Name: At_100uM_ABA_Mutants_cDNA_P Parameter: Treatment Value: 100uM ABA vs. No Treatment
  misc_feature: MA Experiment ID: 20000072 Result: Up-regulated in Transcription
  misc_feature: MA Experiment 20000072 PARAMETER Experiment Name: At_100uM_ABA_Mutants_cDNA_P Parameter: Plant Line Value: CS8105
  misc_feature: MA Experiment 20000072 PARAMETER Experiment Name: At_100uM_ABA_Mutants_cDNA_P Parameter: Timepoint (hr) Value: 6
  misc_feature: MA Experiment 20000072 PARAMETER Experiment Name: At_100uM_ABA_Mutants_cDNA_P Parameter: Tissue Value: Aerial
  misc_feature: MA Experiment 20000072 PARAMETER Experiment Name: At_100uM_ABA_Mutants_cDNA_P Parameter: Treatment Value: 100uM ABA vs. No Treatment
  misc_feature: MA Experiment ID: 20000086 Result: Up-regulated in Transcription
  misc_feature: MA Experiment 20000086 PARAMETER Experiment Name: At_100uM_ABA_Mutants_cDNA_P Parameter: Plant Line Value: CS22
  misc_feature: MA Experiment 20000086 PARAMETER Experiment Name: At_100uM_ABA_Mutants_cDNA_P Parameter: Timepoint (hr) Value: 6
  misc_feature: MA Experiment 20000086 PARAMETER Experiment Name: At_100uM_ABA_Mutants_cDNA_P Parameter: Tissue Value: Aerial
  misc_feature: MA Experiment 20000086 PARAMETER Experiment Name: At_100uM_ABA_Mutants_cDNA_P Parameter: Treatment Value: 100uM ABA vs. No Treatment
  misc_feature: MA Experiment ID: 20000087 Result: Up-regulated in Transcription
  misc_feature: MA Experiment 20000087 PARAMETER Experiment Name: At_100uM_ABA_Mutants_cDNA_P Parameter: Plant Line Value: WS
  misc_feature: MA Experiment 20000087 PARAMETER Experiment Name: At_100uM_ABA_Mutants_cDNA_P Parameter: Timepoint (hr) Value: 6
  misc_feature: MA Experiment 20000087 PARAMETER Experiment Name: At_100uM_ABA_Mutants_cDNA_P Parameter: Tissue Value: Aerial
  misc_feature: MA Experiment 20000087 PARAMETER Experiment Name: At_100uM_ABA_Mutants_cDNA_P Parameter: Treatment Value: 100uM ABA vs. No Treatment
  misc_feature: MA Experiment ID: 20000117 Result: Up-regulated in Transcription
  misc_feature: MA Experiment 20000117 PARAMETER Experiment Name: At_100uM_ABA_Mutants_cDNA_P Parameter: Plant Line Value: Columbia
  misc_feature: MA Experiment 20000117 PARAMETER Experiment Name: At_100uM_ABA_Mutants_cDNA_P Parameter: Timepoint (hr) Value: 6
  misc_feature: MA Experiment 20000117 PARAMETER Experiment Name: At_100uM_ABA_Mutants_cDNA_P Parameter: Tissue Value: Aerial
  misc_feature: MA Experiment 20000117 PARAMETER Experiment Name: At_100uM_ABA_Mutants_cDNA_P Parameter: Treatment Value: 100uM ABA vs. No Treatment
  misc_feature: MA Experiment ID: 20000169 Result: Up-regulated in Transcription
  misc_feature: MA Experiment 20000169 PARAMETER Experiment Name: At_100uM_ABA_P Parameter: Age (day) Value: 14
  misc_feature: MA Experiment 20000169 PARAMETER Experiment Name: At_100uM_ABA_P Parameter: Organism Value: A. thaliana
  misc_feature: MA Experiment 20000169 PARAMETER Experiment Name: At_100uM_ABA_P Parameter: Plant Line Value: WS
  misc_feature: MA Experiment 20000169 PARAMETER Experiment Name: At_100uM_ABA_P Parameter: Timepoint (hr) Value: 6
  misc_feature: MA Experiment 20000169 PARAMETER Experiment Name: At_100uM_ABA_P Parameter: Tissue Value: Aerial
  misc_feature: MA Experiment 20000169 PARAMETER Experiment Name: At_100uM_ABA_P Parameter: Treatment Value: 100uM ABA vs. No Treatment
  misc_feature: MA Experiment ID: 20000179 Result: Up-regulated in Transcription
  misc_feature: MA Experiment 20000179 PARAMETER Experiment Name: At_Germinating_Seeds_P Parameter: Age (hr) Value: 6 vs. 0
  misc_feature: MA Experiment 20000179 PARAMETER Experiment Name: At_Germinating_Seeds_P Parameter: Tissue Value: Germinating Seeds
  misc_feature: MA Experiment ID: 20000180 Result: Up-regulated in Transcription
  misc_feature: MA Experiment 20000180 PARAMETER Experiment Name: At_Germinating_Seeds_P Parameter: Age (hr) Value: 24 vs. 0
  misc_feature: MA Experiment 20000180 PARAMETER Experiment Name: At_Germinating_Seeds_P Parameter: Tissue Value: Germinating Seeds
  misc_feature: MA Experiment ID: 20000182 Result: Up-regulated in Transcription
  misc_feature: MA Experiment 20000182 PARAMETER Experiment Name: At_2mM_SA_P Parameter: Age (day) Value: 14
  misc_feature: MA Experiment 20000182 PARAMETER Experiment Name: At_2mM_SA_P Parameter: Organism Value: A. thaliana
  misc_feature: MA Experiment 20000182 PARAMETER Experiment Name: At_2mM_SA_P Parameter: Plant Line Value: WS
  misc_feature: MA Experiment 20000182 PARAMETER Experiment Name: At_2mM_SA_P Parameter: Timepoint (hr) Value: 6
  misc_feature: MA Experiment 20000182 PARAMETER Experiment Name: At_2mM_SA_P Parameter: Tissue Value: Aerial
  misc_feature: MA Experiment 20000182 PARAMETER Experiment Name: At_2mM_SA_P Parameter: Treatment Value: 2mM SA vs. No Treatment
  misc_feature: MA Experiment ID: 20000185 Result: Up-regulated in Transcription
  misc_feature: MA Experiment 20000185 PARAMETER Experiment Name: At_Roots__P Parameter: Age (day) Value: 7 vs. 21
  misc_feature: MA Experiment 20000185 PARAMETER Experiment Name: At_Roots__P Parameter: Organism Value: A. thaliana
  misc_feature: MA Experiment 20000185 PARAMETER Experiment Name: At_Roots__P Parameter: Tissue Value: Roots vs. Whole Plant
  misc_feature: MA Experiment ID: 20000227 Result: Down-regulated in Transcription
  misc_feature: MA Experiment 20000227 PARAMETER Experiment Name: At_Root-Tips-vs-Tops_P Parameter: Tissue Value: Root Tips vs. Root Tops
  misc_feature: MA Experiment ID: 20000234 Result: Down-regulated in Transcription
  misc_feature: MA Experiment 20000234 PARAMETER Experiment Name: At_Siliques_P Parameter: Age (day) Value: 21
  misc_feature: MA Experiment 20000234 PARAMETER Experiment Name: At_Siliques_P Parameter: Organism Value: A. thaliana
  misc_feature: MA Experiment 20000234 PARAMETER Experiment Name: At_Siliques_P Parameter: Plant Line Value: WS
  misc_feature: MA Experiment 20000234 PARAMETER Experiment Name: At_Siliques_P Parameter: Tissue Value: Less Than 5mm Siliques vs. Whole Plant
  misc_feature: MA Experiment ID: 20000235 Result: Down-regulated in Transcription
  misc_feature: MA Experiment 20000235 PARAMETER Experiment Name: At_Siliques_P Parameter: Age (day) Value: 21
  misc_feature: MA Experiment 20000235 PARAMETER Experiment Name: At_Siliques_P Parameter: Organism Value: A. thaliana
  misc_feature: MA Experiment 20000235 PARAMETER Experiment Name: At_Siliques_P Parameter: Plant Line Value: WS
  misc_feature: MA Experiment 20000235 PARAMETER Experiment Name: At_Siliques_P Parameter: Tissue Value: 5-10mm Siliques vs. Whole Plant
  misc_feature: MA Experiment ID: 20000436 Result: Up-regulated in Transcription
  misc_feature: MA Experiment 20000436 PARAMETER Experiment Name: At_Drought_P Parameter: Age (day) Value: 7
  misc_feature: MA Experiment 20000436 PARAMETER Experiment Name: At_Drought_P Parameter: Organism Value: A. thaliana
  misc_feature: MA Experiment 20000436 PARAMETER Experiment Name: At_Drought_P Parameter: Plant Line Value: WS
  misc_feature: MA Experiment 20000436 PARAMETER Experiment Name: At_Drought_P Parameter: Timepoint (hr) Value: 12
  misc_feature: MA Experiment 20000436 PARAMETER Experiment Name: At_Drought_P Parameter: Tissue Value: Whole Plant
  misc_feature: MA Experiment 20000436 PARAMETER Experiment Name: At_Drought_P Parameter: Treatment Value: Drought vs. No Drought
  misc_feature: MA Experiment ID: 20000437 Result: Up-regulated in Transcription
  misc_feature: MA Experiment 20000437 PARAMETER Experiment Name: At_Drought_P Parameter: Age (day) Value: 8
  misc_feature: MA Experiment 20000437 PARAMETER Experiment Name: At_Drought_P Parameter: Organism Value: A. thaliana
  misc_feature: MA Experiment 20000437 PARAMETER Experiment Name: At_Drought_P Parameter: Plant Line Value: WS
  misc_feature: MA Experiment 20000437 PARAMETER Experiment Name: At_Drought_P Parameter: Timepoint (hr) Value: 24
  misc_feature: MA Experiment 20000437 PARAMETER Experiment Name: At_Drought_P Parameter: Tissue Value: Whole Plant
  misc_feature: MA Experiment 20000437 PARAMETER Experiment Name: At_Drought_P Parameter: Treatment Value: Drought vs. No Drought
  misc_feature: MA Experiment ID: 20000438 Result: Down-regulated in Transcription
  misc_feature: MA Experiment 20000438 PARAMETER Experiment Name: At_Shoots__P Parameter: Age (day) Value: 14
  misc_feature: MA Experiment 20000438 PARAMETER Experiment Name: At_Shoots__P Parameter: Tissue Value: Shoots vs. Whole Plant
  misc_feature: MA Experiment ID: 20000439 Result: Up-regulated in Transcription
  misc_feature: MA Experiment 20000439 PARAMETER Experiment Name: At_Roots__P Parameter: Age (day) Value: 14 vs. 21
  misc_feature: MA Experiment 20000439 PARAMETER Experiment Name: At_Roots__P Parameter: Organism Value: A. thaliana
  misc_feature: MA Experiment 20000439 PARAMETER Experiment Name: At_Roots__P Parameter: Tissue Value: Roots vs. Whole Plant
  misc_feature: MA Experiment ID: 20000453 Result: Up-regulated in Transcription
  misc_feature: MA Experiment 20000453 PARAMETER Experiment Name: At_100uM_ABA_P Parameter: Age (day) Value: 15
  misc_feature: MA Experiment 20000453 PARAMETER Experiment Name: At_100uM_ABA_P Parameter: Organism Value: A. thaliana
  misc_feature: MA Experiment 20000453 PARAMETER Experiment Name: At_100uM_ABA_P Parameter: Plant Line Value: WS
  misc_feature: MA Experiment 20000453 PARAMETER Experiment Name: At_100uM_ABA_P Parameter: Timepoint (hr) Value: 24
  misc_feature: MA Experiment 20000453 PARAMETER Experiment Name: At_100uM_ABA_P Parameter: Tissue Value: Aerial
  misc_feature: MA Experiment 20000453 PARAMETER Experiment Name: At_100uM_ABA_P Parameter: Treatment Value: 100uM ABA vs. No Treatment
  misc_feature: MA Experiment ID: 20000455 Result: Up-regulated in Transcription
  misc_feature: MA Experiment 20000455 PARAMETER Experiment Name: At_100uM_ABA_P Parameter: Age (day) Value: 16
  misc_feature: MA Experiment 20000455 PARAMETER Experiment Name: At_100uM_ABA_P Parameter: Organism Value: A. thaliana
  misc_feature: MA Experiment 20000455 PARAMETER Experiment Name: At_100uM_ABA_P Parameter: Plant Line Value: WS
  misc_feature: MA Experiment 20000455 PARAMETER Experiment Name: At_100uM_ABA_P Parameter: Timepoint (hr) Value: 48
  misc_feature: MA Experiment 20000455 PARAMETER Experiment Name: At_100uM_ABA_P Parameter: Tissue Value: Aerial
  misc_feature: MA Experiment 20000455 PARAMETER Experiment Name: At_100uM_ABA_P Parameter: Treatment Value: 100uM ABA vs. No Treatment
  misc_feature: MA Experiment ID: 20000527 Result: Down-regulated in Transcription
  misc_feature: MA Experiment 20000527 PARAMETER Experiment Name: At_10percent_PEG_P Parameter: Age (day) Value: 20
  misc_feature: MA Experiment 20000527 PARAMETER Experiment Name: At_10percent_PEG_P Parameter: Organism Value: A. thaliana
  misc_feature: MA Experiment 20000527 PARAMETER Experiment Name: At_10percent_PEG_P Parameter: Plant Line Value: WS
  misc_feature: MA Experiment 20000527 PARAMETER Experiment Name: At_10percent_PEG_P Parameter: Timepoint (day) Value: 20
  misc_feature: MA Experiment 20000527 PARAMETER Experiment Name: At_10percent_PEG_P Parameter: Tissue Value: Whole Plant
  misc_feature: MA Experiment 20000527 PARAMETER Experiment Name: At_10percent_PEG_P Parameter: Treatment Value: 10percent PEG vs. No Treatment
  misc_feature: MA Experiment ID: 20001556 Result: Up-regulated in Transcription
  misc_feature: MA Experiment 20001556 PARAMETER Experiment Name: At_Drought_Soil_Dry_P Parameter: Age (day) Value: 26
  misc_feature: MA Experiment 20001556 PARAMETER Experiment Name: At_Drought_Soil_Dry_P Parameter: Organism Value: A. thaliana
  misc_feature: MA Experiment 20001556 PARAMETER Experiment Name: At_Drought_Soil_Dry_P Parameter: Plant Line Value: WS
  misc_feature: MA Experiment 20001556 PARAMETER Experiment Name: At_Drought_Soil_Dry_P Parameter: Post Timepoint (hr) Value: None
  misc_feature: MA Experiment 20001556 PARAMETER Experiment Name: At_Drought_Soil_Dry_P Parameter: Post-Treatment Value: None
  misc_feature: MA Experiment 20001556 PARAMETER Experiment Name: At_Drought_Soil_Dry_P Parameter: Timepoint (day) Value: 12
  misc_feature: MA Experiment 20001556 PARAMETER Experiment Name: At_Drought_Soil_Dry_P Parameter: Treatment Value: Drought vs. No Drought
  misc_feature: MA Experiment ID: 20001557 Result: Up-regulated in Transcription
  misc_feature: MA Experiment 20001557 PARAMETER Experiment Name: At_Drought_Soil_Dry_P Parameter: Age (day) Value: 27
  misc_feature: MA Experiment 20001557 PARAMETER Experiment Name: At_Drought_Soil_Dry_P Parameter: Organism Value: A. thaliana
  misc_feature: MA Experiment 20001557 PARAMETER Experiment Name: At_Drought_Soil_Dry_P Parameter: Plant Line Value: WS
  misc_feature: MA Experiment 20001557 PARAMETER Experiment Name: At_Drought_Soil_Dry_P Parameter: Post Timepoint (hr) Value: 3
  misc_feature: MA Experiment 20001557 PARAMETER Experiment Name: At_Drought_Soil_Dry_P Parameter: Post-Treatment Value: Re-Water vs. No Drought
  misc_feature: MA Experiment 20001557 PARAMETER Experiment Name: At_Drought_Soil_Dry_P Parameter: Timepoint (day) Value: 13
  misc_feature: MA Experiment 20001557 PARAMETER Experiment Name: At_Drought_Soil_Dry_P Parameter: Treatment Value: Drought vs. No Drought
  misc_feature: MA Experiment ID: 20001559 Result: Up-regulated in Transcription
  misc_feature: MA Experiment 20001559 PARAMETER Experiment Name: At_Drought_Soil_Dry_P Parameter: Age (day) Value: 28
  misc_feature: MA Experiment 20001559 PARAMETER Experiment Name: At_Drought_Soil_Dry_P Parameter: Organism Value: A. thaliana
  misc_feature: MA Experiment 20001559 PARAMETER Experiment Name: At_Drought_Soil_Dry_P Parameter: Plant Line Value: WS
  misc_feature: MA Experiment 20001559 PARAMETER Experiment Name: At_Drought_Soil_Dry_P Parameter: Post Timepoint (hr) Value: 29
  misc_feature: MA Experiment 20001559 PARAMETER Experiment Name: At_Drought_Soil_Dry_P Parameter: Post-Treatment Value: Re-Water vs. No Drought
  misc_feature: MA Experiment 20001559 PARAMETER Experiment Name: At_Drought_Soil_Dry_P Parameter: Timepoint (day) Value: 14
  misc_feature: MA Experiment 20001559 PARAMETER Experiment Name: At_Drought_Soil_Dry_P Parameter: Treatment Value: Drought vs. No Drought
  misc_feature: MA Experiment ID: 20001904 Result: Up-regulated in Transcription
  misc_feature: MA Experiment 20001904 PARAMETER Experiment Name: At_Drought_Reproduction_P Parameter: Age (day) Value: 37
  misc_feature: MA Experiment 20001904 PARAMETER Experiment Name: At_Drought_Reproduction_P Parameter: Organism Value: A. thaliana
  misc_feature: MA Experiment 20001904 PARAMETER Experiment Name: At_Drought_Reproduction_P Parameter: Plant Line Value: WS
  misc_feature: MA Experiment 20001904 PARAMETER Experiment Name: At_Drought_Reproduction_P Parameter: Timepoint (day) Value: 7
  misc_feature: MA Experiment 20001904 PARAMETER Experiment Name: At_Drought_Reproduction_P Parameter: Tissue Value: Rosettes
  misc_feature: MA Experiment 20001904 PARAMETER Experiment Name: At_Drought_Reproduction_P Parameter: Treatment Value: Drought vs. No Drought
  misc_feature: MA Experiment ID: 20001905 Result: Up-regulated in Transcription
  misc_feature: MA Experiment 20001905 PARAMETER Experiment Name: At_Drought_Reproduction_P Parameter: Age (day) Value: 40
  misc_feature: MA Experiment 20001905 PARAMETER Experiment Name: At_Drought_Reproduction_P Parameter: Organism Value: A. thaliana
  misc_feature: MA Experiment 20001905 PARAMETER Experiment Name: At_Drought_Reproduction_P Parameter: Plant Line Value: WS
  misc_feature: MA Experiment 20001905 PARAMETER Experiment Name: At_Drought_Reproduction_P Parameter: Timepoint (day) Value: 10
  misc_feature: MA Experiment 20001905 PARAMETER Experiment Name: At_Drought_Reproduction_P Parameter: Tissue Value: Rosettes
  misc_feature: MA Experiment 20001905 PARAMETER Experiment Name: At_Drought_Reproduction_P Parameter: Treatment Value: Drought vs. No Drought
  misc_feature: MA Experiment ID: 20001911 Result: Up-regulated in Transcription
  misc_feature: MA Experiment 20001911 PARAMETER Experiment Name: At_Drought_Reproduction_P Parameter: Age (day) Value: 40
  misc_feature: MA Experiment 20001911 PARAMETER Experiment Name: At_Drought_Reproduction_P Parameter: Organism Value: A. thaliana
  misc_feature: MA Experiment 20001911 PARAMETER Experiment Name: At_Drought_Reproduction_P Parameter: Plant Line Value: WS
  misc_feature: MA Experiment 20001911 PARAMETER Experiment Name: At_Drought_Reproduction_P Parameter: Timepoint (day) Value: 10
  misc_feature: MA Experiment 20001911 PARAMETER Experiment Name: At_Drought_Reproduction_P Parameter: Tissue Value: Flowers
  misc_feature: MA Experiment 20001911 PARAMETER Experiment Name: At_Drought_Reproduction_P Parameter: Treatment Value: Drought vs. No Drought
aatttttgagaataattgagcgataaagaaaagaaacggtatgacgtcgttttgctccatgatttctcttcttcttcttcttcttcttctctctctttcatcggcggttatctccgatgacgcttctttccagaaacttccggtgccggaaactaggtcaggtcccgaagctttcgcttttgattccaccggtaaagggttctataccggtgtctccggtggtaaaatcctcaagtacctccccgagacgggttatgttgactttgcccagatcactgaatcctcgaactcttcatggtgcgatggtactattggaacggctttagccggacgctgtggtcgaccagcaggaatagcattcaacgagaaaacaggtgatctttacgtcgccgatgctccgttgggtcttcacgttatttctcccgccggtggtttggctacgaagatcaccgacagtgttgacggaaagcctttcaagtttcttgacggtcttgacgttgatcccactactggtgtcgtctacttcacttccttcagctcacgcttctccccaatccaagtgttgattgcattggggttaaaggacgcgaccggaaagctctacaaatacgacccatcgaccaaagtcgtgactgtactgatggaagggctaagtggttcagccgggtgtgcagtgagctcagatggttcgtttgtgctggttagtcagttcacaaaaagtaacatcaagaggtattggatcaagggacccaaagctggttcttctgaagacttcaccaactcagtctcaaaccctgacaatatcaaaagaattggctctactggaaacttttgggtcgcttcagtggtgaacaagatcatcgtacctacgaacccatcagcagtcaaagttaactctaatggtgaagttcttcaaaccattcctctcaaagataaatttggagacactttgctcagcgaagtcaacgaattcgagggcaatttatatataggaactctcaccggaccatttgctggaattcttaagctcgaaaagggttcttgtcctgccacttagatctcttatttgaatgcagccgatgtgttacaatcatatatatatatttgagctttttatttatttctgaataaaataaccacttatctcct

SEQ ID NO: 41908 - protein, 338 aa, Arabidopsis thaliana
  peptide (1)..(338): Ceres Seq. ID no. 12357530
  misc_feature (2)..(325): Pfam Name: Strictosidine synthase Pfam Description: Strictosidine synthase
  misc_feature (275)..(330): Homolog of NCBI NO: 30694556 NR Description: strictosidine synthase-related [Arabidopsis
  misc_feature (275)..(330): Homolog of NCBI NO: 11280567 NR Description: hypothetical protein F24I3.110 - Arabidopsis
  misc_feature (40)..(267): Homolog of NCBI NO: 30694556 NR Description: strictosidine synthase-related [Arabidopsis
  misc_feature (40)..(267): Homolog of NCBI NO: 11280567 NR Description: hypothetical protein F24I3.110 - Arabidopsis
  misc_feature (6)..(316): Homolog of NCBI NO: 1754987 NR Description: strictosidine synthase
  misc_feature (6)..(330): Homolog of NCBI NO: 30698979 NR Description: strictosidine synthase family [Arabidopsis
  misc_feature (6)..(330): Homolog of NCBI NO: 21431845 NR Description: Strictosidine synthase 3 precursor (SS-3)
  misc_feature (1)..(330): Homolog of NCBI NO: 15221105 NR Description: strictosidine synthase family
  misc_feature (1)..(338): Homolog of NCBI NO: 1754983 NR Description: strictosidine synthase
  misc_feature (1)..(338): Homolog of NCBI NO: 15221106 NR Description: strictosidine synthase family
MTSFCSMISLLLLLLLLSLSSAVISDDASFQKLPVPETRSGPEAFAFDSTGKGFYTGVSGGKILKYLPETGYVDFAQITESSNSSWCDGTIGTALAGRCGRPAGIAFNEKTGDLYVADAPLGLHVISPAGGLATKITDSVDGKPFKFLDGLDVDPTTGVVYFTSFSSRFSPIQVLIALGLKDATGKLYKYDPSTKVVTVLMEGLSGSAGCAVSSDGSFVLVSQFTKSNIKRYWIKGPKAGSSEDFTNSVSNPDNIKRIGSTGNFWVASVVNKIIVPTNPSAVKVNSNGEVLQTIPLKDKFGDTLLSEVNEFEGNLYIGTLTGPFAGILKLEKGSCPAT

SEQ ID NO: 41909 - protein, 332 aa, Arabidopsis thaliana
  peptide (1)..(332): Ceres Seq. ID no. 12357531
  misc_feature (1)..(319): Pfam Name: Strictosidine synthase Pfam Description: Strictosidine synthase
  misc_feature (269)..(324): Homolog of NCBI NO: 30694556 NR Description: strictosidine synthase-related [Arabidopsis
  misc_feature (269)..(324): Homolog of NCBI NO: 11280567 NR Description: hypothetical protein F24I3.110 - Arabidopsis
  misc_feature (34)..(261): Homolog of NCBI NO: 30694556 NR Description: strictosidine synthase-related [Arabidopsis
  misc_feature (34)..(261): Homolog of NCBI NO: 11280567 NR Description: hypothetical protein F24I3.110 - Arabidopsis
  misc_feature (1)..(310): Homolog of NCBI NO: 1754987 NR Description: strictosidine synthase
  misc_feature (1)..(324): Homolog of NCBI NO: 30698979 NR Description: strictosidine synthase family [Arabidopsis
  misc_feature (1)..(324): Homolog of NCBI NO: 21431845 NR Description: Strictosidine synthase 3 precursor (SS-3)
  misc_feature (1)..(324): Homolog of NCBI NO: 15221105 NR Description: strictosidine synthase family
  misc_feature (1)..(332): Homolog of NCBI NO: 1754983 NR Description: strictosidine synthase
  misc_feature (1)..(332): Homolog of NCBI NO: 15221106 NR Description: strictosidine synthase family
MISLLLLLLLLSLSSAVISDDASFQKLPVPETRSGPEAFAFDSTGKGFYTGVSGGKILKYLPETGYVDFAQITESSNSSWCDGTIGTALAGRCGRPAGIAFNEKTGDLYVADAPLGLHVISPAGGLATKITDSVDGKPFKFLDGLDVDPTTGVVYFTSFSSRFSPIQVLIALGLKDATGKLYKYDPSTKVVTVLMEGLSGSAGCAVSSDGSFVLVSQFTKSNIKRYWIKGPKAGSSEDFTNSVSNPDNIKRIGSTGNFWVASVVNKIIVPTNPSAVKVNSNGEVLQTIPLKDKFGDTLLSEVNEFEGNLYIGTLTGPFAGILKLEKGSCPAT

SEQ ID NO: 41910 - DNA, 2290 bp, Arabidopsis thaliana
  misc_feature (1)..(2290): Ceres Seq. ID no. 13500189
  misc_feature: MA Experiment ID: 108469 Result: Up-regulated in Transcription
  misc_feature: MA Experiment ID: 108595 Result: Up-regulated in Transcription
  misc_feature: MA Experiment 108595 PARAMETER Experiment Name: At_Ler-pi_Ovule_cDNA_P Parameter: Plant Line Value: null
  misc_feature: MA Experiment ID: 20000086 Result: Down-regulated in Transcription
  misc_feature: MA Experiment 20000086 PARAMETER Experiment Name: At_100uM_ABA_Mutants_cDNA_P Parameter: Plant Line Value: CS22
  misc_feature: MA Experiment 20000086 PARAMETER Experiment Name: At_100uM_ABA_Mutants_cDNA_P Parameter: Timepoint (hr) Value: 6
  misc_feature: MA Experiment 20000086 PARAMETER Experiment Name: At_100uM_ABA_Mutants_cDNA_P Parameter: Tissue Value: Aerial
  misc_feature: MA Experiment 20000086 PARAMETER Experiment Name: At_100uM_ABA_Mutants_cDNA_P Parameter: Treatment Value: 100uM ABA vs. No Treatment
  misc_feature: MA Experiment ID: 20000173 Result: Down-regulated in Transcription
  misc_feature: MA Experiment 20000173 PARAMETER Experiment Name: At_42deg_Heat_P Parameter: Age (day) Value: 14
  misc_feature: MA Experiment 20000173 PARAMETER Experiment Name: At_42deg_Heat_P Parameter: Organism Value: A. thaliana
  misc_feature: MA Experiment 20000173 PARAMETER Experiment Name: At_42deg_Heat_P Parameter: Plant Line Value: WS
  misc_feature: MA Experiment 20000173 PARAMETER Experiment Name: At_42deg_Heat_P Parameter: Temperature (deg C) Value: 42 vs. 22
  misc_feature: MA Experiment 20000173 PARAMETER Experiment Name: At_42deg_Heat_P Parameter: Timepoint (hr) Value: 6
  misc_feature: MA Experiment 20000173 PARAMETER Experiment Name: At_42deg_Heat_P Parameter: Tissue Value: Aerial
  misc_feature: MA Experiment ID: 20000182 Result: Up-regulated in Transcription
  misc_feature: MA Experiment 20000182 PARAMETER Experiment Name: At_2mM_SA_P Parameter: Age (day) Value: 14
  misc_feature: MA Experiment 20000182 PARAMETER Experiment Name: At_2mM_SA_P Parameter: Organism Value: A. thaliana
  misc_feature: MA Experiment 20000182 PARAMETER Experiment Name: At_2mM_SA_P Parameter: Plant Line Value: WS
  misc_feature: MA Experiment 20000182 PARAMETER Experiment Name: At_2mM_SA_P Parameter: Timepoint (hr) Value: 6
  misc_feature: MA Experiment 20000182 PARAMETER Experiment Name: At_2mM_SA_P Parameter: Tissue Value: Aerial
  misc_feature: MA Experiment 20000182 PARAMETER Experiment Name: At_2mM_SA_P Parameter: Treatment Value: 2mM SA vs. No Treatment
  misc_feature: MA Experiment ID: 20000184 Result: Down-regulated in Transcription
  misc_feature: MA Experiment 20000184 PARAMETER Experiment Name: At_Shoots__P Parameter: Age (day) Value: 7
  misc_feature: MA Experiment 20000184 PARAMETER Experiment Name: At_Shoots__P Parameter: Tissue Value: Shoots vs. Whole Plant
  misc_feature: MA Experiment ID: 20000224 Result: Down-regulated in Transcription
  misc_feature: MA Experiment ID: 20000437 Result: Up-regulated in Transcription
  misc_feature: MA Experiment 20000437 PARAMETER Experiment Name: At_Drought_P Parameter: Age (day) Value: 8
  misc_feature: MA Experiment 20000437 PARAMETER Experiment Name: At_Drought_P Parameter: Organism Value: A. thaliana
  misc_feature: MA Experiment 20000437 PARAMETER Experiment Name: At_Drought_P Parameter: Plant Line Value: WS
  misc_feature: MA Experiment 20000437 PARAMETER Experiment Name: At_Drought_P Parameter: Timepoint (hr) Value: 24
  misc_feature: MA Experiment 20000437 PARAMETER Experiment Name: At_Drought_P Parameter: Tissue Value: Whole Plant
  misc_feature: MA Experiment 20000437 PARAMETER Experiment Name: At_Drought_P Parameter: Treatment Value: Drought vs. No Drought
  misc_feature: MA Experiment ID: 20000794 Result: Up-regulated in Transcription
  misc_feature: MA Experiment 20000794 PARAMETER Experiment Name: At_Petals_P Parameter: Age (day) Value: 23-25 days
  misc_feature: MA Experiment 20000794 PARAMETER Experiment Name: At_Petals_P Parameter: Plant Line Value: WS
  misc_feature: MA Experiment 20000794 PARAMETER Experiment Name: At_Petals_P Parameter: Tissue Value: Petals vs. Whole plant
  misc_feature: MA Experiment ID: 20001451 Result: Down-regulated in Transcription
  misc_feature: MA Experiment 20001451 PARAMETER Experiment Name: At_Far-red-induction_P Parameter: Age (day) Value: 7
  misc_feature: MA Experiment 20001451 PARAMETER Experiment Name: At_Far-red-induction_P Parameter: Light Value: Far-red vs. White
  misc_feature: MA Experiment 20001451 PARAMETER Experiment Name: At_Far-red-induction_P Parameter: Organism Value: A. thaliana
  misc_feature: MA Experiment 20001451 PARAMETER Experiment Name: At_Far-red-induction_P Parameter: Plant Line Value: Columbia
  misc_feature: MA Experiment 20001451 PARAMETER Experiment Name: At_Far-red-induction_P Parameter: Timepoint (hr) Value: 24
  misc_feature: MA Experiment 20001451 PARAMETER Experiment Name: At_Far-red-induction_P Parameter: Tissue Value: Whole Plant
atctttctctctttcggatcattctctcctctgattccgaatcgggtaaattattatggattcttcttcttcgtcttcctccgccgccgcacgccgccgcatcaacgctatccactctcacctcgtcacctcttctcgctcttcccctctcctccgctccaatcccaccgccggcgagttctgtcttgataatggctatagtgttgttcttcccgagaaattgaatactggcaattggaacgtctacagatctgcaaaatctccgttcaagctcgttagtagattcccagatcatcctgacatcgctactctccatgacaattttgagcatgctgttcatgattttcgagattacaagtatttaggaactcgtgttcgtgtcgacggaactgttggagactacaaatggatgacatatggagaagctggtacagcaagaactgctttaggttctggtttggttcatcacggaatccccatgggatcttctgttggaatttacttcatcaatcgcccagagtggctcattgttgatcatgcttgttcttcttattcttatgtgtctgttcctttgtatgatactcttggtcctgatgctgtgaaatttattgtcaatcatgcaactgtgcaagccatattttgtgtggcagagactttaaactctttacttagctgtttgtctgagatgccaagtgtacgcctggtggtggttgttggagggttaaatgaatctttaccctcgcttccctcatcatcaggagtgaaagttgtatcctattcggtgttactgaatcagggtcgtagtaaccctcagcgattttttccaccaaaacccgatgatgttgcaaccatatgctatacaagcggaacaactgggacacccaagggagtcgtattaactcatgcaaacttgattgccaatgttgctggctctagctttagtgtgaagtttttctcttcagatgtttacatttcgtatcttccacttgctcacatttacgaacgagctaatcagatcctaacagtgtactttggagttgctgttggattctaccaaggggacaatatgaaactactggatgatttggctgctctgagacctactgtatttagcagtgtccctcgattatacaatagaatatatgctggtatcattaatgcagtaaaaacctctggtggtctgaaagagagactcttcaatgctgcctataatgcaaagaagcaggctctcttgaatggaaagagtgcttctcccatatgggacaggttggtatttaataaaataaaggacagacttggagggcgggttcgttttatgacgtctggtgcttcacctctctctcctgaagtgatggaatttttgaaagtatgctttggaggaagggtaacagagggatatggaatgactgaaacatcttgtgttataagtggaatggacgagggtgataacctcactggacatgttggctctcctaatccagcttgtgaagtaaagcttgtggatgtcccagaaatgaactatacatcagcggatcagccccatccccgtggcgaaatatgtgttaggggtcctatcatttttacaggctattacaaagatgaagttcaaacgaaagaggtgattgatgaagatggatggcttcacactggagatataggtctgtggctgccgggaggacgtctaaaaattattgacagaaagaagaacatcttcaaattggcgcagggggagtacatagctccagagaaaattgaaaacgtctatgccaaatgcaaatttgtgggccagtgcttcatatatggtgatagctttaattcatcattggtagctgttgtatcggttgatccagatgtgctgaaaagctgggctgcttcagaaggcattaagggaggagatctgagagaattgtgtaataatccgagagtgaaagcagcagtactatctgacatggacactgttggaagagaagctcagttgagaggctttgagtttgcaaaggctgtgacattggtgctggaaccatttactctggaaaatggcttgttgactccgacgttcaagattaagagaccacaagcaaaggaatatttcgcagaagcaataacaaacatgtacaaggagcttggtgcttctgatccctctgctaatagaggtttgtgatgatggtataatcgtgtgattaataaaaagcctacgcaaaagttgtttctcccacaaattgtattcttttttgttttcttgctacatatttattgaatagtaaaggtaataaaggtgctacattacatt

SEQ ID NO: 41911 - protein, 701 aa, Arabidopsis thaliana
  peptide (1)..(701): Ceres Seq. ID no. 13500190
  misc_feature (120)..(581): Pfam Name: AMP-binding enzyme Pfam Description: AMP-binding enzyme
  misc_feature (116)..(687): Homolog of NCBI NO: 28628069 NR Description: long-chain acyl-CoA synthetase [Mus musculus]
  misc_feature (80)..(687): Homolog of NCBI NO: 28436862 NR Description: similar to fatty acid Coenzyme A ligase [Xenopus
  misc_feature (80)..(687): Homolog of NCBI NO: 27882609 NR Description: similar to fatty acid Coenzyme A ligase [Xenopus
  misc_feature (53)..(690): Homolog of NCBI NO: 24666497 NR Description: CG3961-PA [Drosophila melanogaster]
  misc_feature (53)..(690): Homolog of NCBI NO: 16769794 NR Description: SD01152p [Drosophila melanogaster]
  misc_feature (82)..(690): Homolog of NCBI NO: 17510401 NR Description: Fatty long (79.0 kD) [Caenorhabditis elegans]
  misc_feature (80)..(690): Homolog of NCBI NO: 13431637 NR Description: Long-chain-fatty-acid--CoA ligase 1 (Long-chain
  misc_feature (65)..(695): Homolog of NCBI NO: 28565633 NR Description: fatty acyl-CoA synthetase [Dictyostelium
  misc_feature (13)..(695): Homolog of NCBI NO: 20805875 NR Description: long chain acyl-CoA synthetase 7 [Arabidopsis
  misc_feature (13)..(695): Homolog of NCBI NO: 22327099 NR Description: AMP-binding protein, putative [Arabidopsis
MDSSSSSSSAAARRRINAIHSHLVTSSRSSPLLRSNPTAGEFCLDNGYSVVLPEKLNTGNWNVYRSAKSPFKLVSRFPDHPDIATLHDNFEHAVHDFRDYKYLGTRVRVDGTVGDYKWMTYGEAGTARTALGSGLVHHGIPMGSSVGIYFINRPEWLIVDHACSSYSYVSVPLYDTLGPDAVKFIVNHATVQAIFCVAETLNSLLSCLSEMPSVRLVVVVGGLNESLPSLPSSSGVKVVSYSVLLNQGRSNPQRFFPPKPDDVATICYTSGTTGTPKGVVLTHANLIANVAGSSFSVKFFSSDVYISYLPLAHIYERANQILTVYFGVAVGFYQGDNMKLLDDLAALRPTVFSSVPRLYNRIYAGIINAVKTSGGLKERLFNAAYNAKKQALLNGKSASPIWDRLVFNKIKDRLGGRVRFMTSGASPLSPEVMEFLKVCFGGRVTEGYGMTETSCVISGMDEGDNLTGHVGSPNPACEVKLVDVPEMNYTSADQPHPRGEICVRGPIIFTGYYKDEVQTKEVIDEDGWLHTGDIGLWLPGGRLKIIDRKKNIFKLAQGEYIAPEKIENVYAKCKFVGQCFIYGDSFNSSLVAVVSVDPDVLKSWAASEGIKGGDLRELCNNPRVKAAVLSDMDTVGREAQLRGFEFAKAVTLVLEPFTLENGLLTPTFKIKRPQAKEYFAEAITNMYKELGASDPSANRGL

SEQ ID NO: 41912 - protein, 583 aa, Arabidopsis thaliana
  peptide (1)..(583): Ceres Seq. ID no. 13500191
  misc_feature (2)..(463): Pfam Name: AMP-binding enzyme Pfam Description: AMP-binding enzyme
  misc_feature (1)..(569): Homolog of NCBI NO: 28628069 NR Description: long-chain acyl-CoA synthetase [Mus musculus]
  misc_feature (1)..(569): Homolog of NCBI NO: 28436862 NR Description: similar to fatty acid Coenzyme A ligase [Xenopus
  misc_feature (1)..(569): Homolog of NCBI NO: 27882609 NR Description: similar to fatty acid Coenzyme A ligase [Xenopus
  misc_feature (1)..(572): Homolog of NCBI NO: 24666497 NR Description: CG3961-PA [Drosophila melanogaster]
  misc_feature (1)..(572): Homolog of NCBI NO: 16769794 NR Description: SD01152p [Drosophila melanogaster]
  misc_feature (1)..(572): Homolog of NCBI NO: 17510401 NR Description: Fatty long (79.0 kD) [Caenorhabditis elegans]
  misc_feature (1)..(572): Homolog of NCBI NO: 13431637 NR Description: Long-chain-fatty-acid--CoA ligase 1 (Long-chain
  misc_feature (1)..(577): Homolog of NCBI NO: 28565633 NR Description: fatty acyl-CoA synthetase [Dictyostelium
  misc_feature (1)..(577): Homolog of NCBI NO: 20805875 NR Description: long chain acyl-CoA synthetase 7 [Arabidopsis
  misc_feature (1)..(577): Homolog of NCBI NO: 22327099 NR Description: AMP-binding protein, putative [Arabidopsis
MTYGEAGTARTALGSGLVHHGIPMGSSVGIYFINRPEWLIVDHACSSYSYVSVPLYDTLGPDAVKFIVNHATVQAIFCVAETLNSLLSCLSEMPSVRLVVVVGGLNESLPSLPSSSGVKVVSYSVLLNQGRSNPQRFFPPKPDDVATICYTSGTTGTPKGVVLTHANLIANVAGSSFSVKFFSSDVYISYLPLAHIYERANQILTVYFGVAVGFYQGDNMKLLDDLAALRPTVFSSVPRLYNRIYAGIINAVKTSGGLKERLFNAAYNAKKQALLNGKSASPIWDRLVFNKIKDRLGGRVRFMTSGASPLSPEVMEFLKVCFGGRVTEGYGMTETSCVISGMDEGDNLTGHVGSPNPACEVKLVDVPEMNYTSADQPHPRGEICVRGPIIFTGYYKDEVQTKEVIDEDGWLHTGDIGLWLPGGRLKIIDRKKNIFKLAQGEYIAPEKIENVYAKCKFVGQCFIYGDSFNSSLVAVVSVDPDVLKSWAASEGIKGGDLRELCNNPRVKAAVLSDMDTVGREAQLRGFEFAKAVTLVLEPFTLENGLLTPTFKIKRPQAKEYFAEAITNMYKELGASDPSANRGL

SEQ ID NO: 41913 - protein, 560 aa, Arabidopsis thaliana
  peptide (1)..(560): Ceres Seq. ID no. 13500192
  misc_feature (1)..(440): Pfam Name: AMP-binding enzyme Pfam Description: AMP-binding enzyme
  misc_feature (1)..(546): Homolog of NCBI NO: 28628069 NR Description: long-chain acyl-CoA synthetase [Mus musculus]
  misc_feature (1)..(546): Homolog of NCBI NO: 28436862 NR Description: similar to fatty acid Coenzyme A ligase [Xenopus
  misc_feature (1)..(546): Homolog of NCBI NO: 27882609 NR Description: similar to fatty acid Coenzyme A ligase [Xenopus
  misc_feature (1)..(549): Homolog of NCBI NO: 24666497 NR Description: CG3961-PA [Drosophila melanogaster]
  misc_feature (1)..(549): Homolog of NCBI NO: 16769794 NR Description: SD01152p [Drosophila melanogaster]
  misc_feature (1)..(549): Homolog of NCBI NO: 17510401 NR Description: Fatty long (79.0 kD) [Caenorhabditis elegans]
  misc_feature (1)..(549): Homolog of NCBI NO: 13431637 NR Description: Long-chain-fatty-acid--CoA ligase 1 (Long-chain
  misc_feature (1)..(554): Homolog of NCBI NO: 28565633 NR Description: fatty acyl-CoA synthetase [Dictyostelium
  misc_feature (1)..(554): Homolog of NCBI NO: 20805875 NR Description: long chain acyl-CoA synthetase 7 [Arabidopsis
  misc_feature (1)..(554): Homolog of NCBI NO: 22327099 NR Description: AMP-binding protein, putative [Arabidopsis
MGSSVGIYFINRPEWLIVDHACSSYSYVSVPLYDTLGPDAVKFIVNHATVQAIFCVAETLNSLLSCLSEMPSVRLVVVVGGLNESLPSLPSSSGVKVVSYSVLLNQGRSNPQRFFPPKPDDVATICYTSGTTGTPKGVVLTHANLIANVAGSSFSVKFFSSDVYISYLPLAHIYERANQILTVYFGVAVGFYQGDNMKLLDDLAALRPTVFSSVPRLYNRIYAGIINAVKTSGGLKERLFNAAYNAKKQALLNGKSASPIWDRLVFNKIKDRLGGRVRFMTSGASPLSPEVMEFLKVCFGGRVTEGYGMTETSCVISGMDEGDNLTGHVGSPNPACEVKLVDVPEMNYTSADQPHPRGEICVRGPIIFTGYYKDEVQTKEVIDEDGWLHTGDIGLWLPGGRLKIIDRKKNIFKLAQGEYIAPEKIENVYAKCKFVGQCFIYGDSFNSSLVAVVSVDPDVLKSWAASEGIKGGDLRELCNNPRVKAAVLSDMDTVGREAQLRGFEFAKAVTLVLEPFTLENGLLTPTFKIKRPQAKEYFAEAITNMYKELGASDPSANRGL

SEQ ID NO: 41914 - DNA, 2001 bp, Arabidopsis thaliana
  misc_feature (1)..(2001): Ceres Seq. ID no. 13491637
  misc_feature: MA Experiment ID: 108573 Result: Up-regulated in Transcription
  misc_feature: MA Experiment 108573 PARAMETER Experiment Name: At_Drought_cDNA_P Parameter: Timepoint (hr) Value: 6
  misc_feature: MA Experiment 108573 PARAMETER Experiment Name: At_Drought_cDNA_P Parameter: Tissue Value: Aerial
  misc_feature: MA Experiment 108573 PARAMETER Experiment Name: At_Drought_cDNA_P Parameter: Treatment Value: Drought vs. No Drought
  misc_feature: MA Experiment ID: 108585 Result: Up-regulated in Transcription
  misc_feature: MA Experiment 108585 PARAMETER Experiment Name: At_5mM_NaNP_cDNA_P Parameter: Timepoint (hr) Value: 6
  misc_feature: MA Experiment 108585 PARAMETER Experiment Name: At_5mM_NaNP_cDNA_P Parameter: Tissue Value: Aerial
  misc_feature: MA Experiment 108585 PARAMETER Experiment Name: At_5mM_NaNP_cDNA_P Parameter: Treatment Value: null
  misc_feature: MA Experiment ID: 20000112 Result: Up-regulated in Transcription
  misc_feature: MA Experiment 20000112 PARAMETER Experiment Name: At_42deg_Heat_cDNA_P Parameter: Temperature (deg C) Value: 42 vs. 22
  misc_feature: MA Experiment 20000112 PARAMETER Experiment Name: At_42deg_Heat_cDNA_P Parameter: Timepoint (hr) Value: 2
  misc_feature: MA Experiment 20000112 PARAMETER Experiment Name: At_42deg_Heat_cDNA_P Parameter: Tissue Value: Aerial
  misc_feature: MA Experiment ID: 20000179 Result: Up-regulated in Transcription
  misc_feature: MA Experiment 20000179 PARAMETER Experiment Name: At_Germinating_Seeds_P Parameter: Age (hr) Value: 6 vs. 0
  misc_feature: MA Experiment 20000179 PARAMETER Experiment Name: At_Germinating_Seeds_P Parameter: Tissue Value: Germinating Seeds
  misc_feature: MA Experiment ID: 20001451 Result: Up-regulated in Transcription
  misc_feature: MA Experiment 20001451 PARAMETER Experiment Name: At_Far-red-induction_P Parameter: Age (day) Value: 7
  misc_feature: MA Experiment 20001451 PARAMETER Experiment Name: At_Far-red-induction_P Parameter: Light Value: Far-red vs. White
  misc_feature: MA Experiment 20001451 PARAMETER Experiment Name: At_Far-red-induction_P Parameter: Organism Value: A. thaliana
  misc_feature: MA Experiment 20001451 PARAMETER Experiment Name: At_Far-red-induction_P Parameter: Plant Line Value: Columbia
  misc_feature: MA Experiment 20001451 PARAMETER Experiment Name: At_Far-red-induction_P Parameter: Timepoint (hr) Value: 24
  misc_feature: MA Experiment 20001451 PARAMETER Experiment Name: At_Far-red-induction_P Parameter: Tissue Value: Whole Plant
atcttcttcctcatctttcttctctcttcaacattttcttctcttcttcacacaaacacacacagatctcttcttcatcacattacttctggctttacatcttttttcttctccatgaggaaagggagaggctcttccgtcgttggacccgcccttccagtaaccgccggtggatctgtgaaggagccgaggtatagaggcgttaggaagagaccttggggtcgattcgcagctgagatccgtgatccattaaaaaaatctcgtgtctggctcggtactttcgattccgccgtagatgctgcacgcgcttacgataccgccgcacgtaacctccgtggtccaaaggccaagaccaatttcccgatcgattgttctccttcttctcctctccaacctctcacctacctccacaatcaaaacctctgttctcctccggtgattcagaaccagatcgatccgtttatggaccatcggttatacggcggaggtaatttccaggagcagcagcagcagcagattattagtcggccggcgagtagcagcatgagcagcaccgttaaatcttgtagcggaccgagaccgatggaagccgcggcggcgtcttcgtcggtggcgaaaccgttacatgcgattaagagatatccgagaactccaccggtagctccggaggattgtcatagcgactgcgattcttcgtcgtctgttattgacgacggagatgatatcgcatcttcgtcttcccgccggaaaacgccgtttcagtttgatcttaatttcccgccgttggatggcgttgacttattcgctggcgggatagatgatctccactgtaccgatctacgtctctgatttgctgctttacaaaaaaaatccgttgattacacacaaaaaaaattctcaaattttacaaaatgataactttatgctcttttgtttttccattttcctttgatatcatattgaaagagaaaaaaaggaagaacaaaaaaaaaagattgagcgtgatgattttatcatcaacgaagatgatgacgattaaaaagagagagagattgtgttaagatctgttactgtaagaaccagatctgggtttcatttttatctgtttcttcttataaaagatccaacaaccctttgttacatatatataacattctgaagctggtgatgatttctgaatgattcaaatccattatctttagatttctacttattcatagagtgtcccctgatgtaagtaggaagctgcatttacatagtatgtaacagaaccacacagggcacaagtatttgtttgtgttttgtctcttggcttgatcttgatcaattcagggtttcttctattcaacaagtaaagcttagtggttctctgagatggaagcaataaaaagatgaaaggaagaaagacggtgaagctcctttgctatctaattgggtgattcgaagaggaagttagaatactcattgtcattgttaagcctcaagttttcattcatcagcgaggagacaagaaaggctttcccttttgtgtacccaatgaatattttggatggtgaagaacatagagattaagggcatggtcaatgggcggtgagtggttttgttgtgatcgataaagctcaatgagcacaggccaaatctttaggttaaagtttggtggctgagatgattgttttgatctttaagagctgtgggttgaggtggcagaattcgttgtgtgtttgacctttttgatttgaatttgctggtagagagttttcccaattttggtatctactttgcttctatgccacggattcagacagtgaatctttgtgtctgaagcaaaaaccgagtatttttttaccgttttggggtaggcttcttcttaacttaaagtggaagtcaaaagcaatgtcttgttattttcactgtaacgatttaagacaactgatctcaagtcgcttttcctgtttcggttcgtactcttaataatcttctattattctggagttgagattg

SEQ ID NO: 41915 - protein, 282 aa, Arabidopsis thaliana
  peptide (1)..(282): Ceres Seq. ID no. 13491638
  misc_feature (62)..(126): Pfam Name: AP2 domain Pfam Description: AP2 domain
  misc_feature (60)..(129): Homolog of NCBI NO: 7489114 NR Description: DNA binding protein EREBP-3 - common tobacco
  misc_feature (48)..(163): Homolog of NCBI NO: 15219215 NR Description: ethylene responsive element binding factor 8
  misc_feature (57)..(261): Homolog of NCBI NO: 38345793 NR Description: OSJNBa0085I10.10 [Oryza sativa (japonica
  misc_feature (50)..(140): Homolog of NCBI NO: 4099914 NR Description: ethylene-responsive element binding protein
  misc_feature (50)..(121): Homolog of NCBI NO: 4099921 NR Description: EREBP-3 homolog [Stylosanthes hamata]
  misc_feature (50)..(261): Homolog of NCBI NO: 15232526 NR Description: ethylene responsive element binding factor 4
  misc_feature (39)..(261): Homolog of NCBI NO: 4587373 NR Description: ethylene responsive element binding factor
  misc_feature (148)..(282): Homolog of NCBI NO: 15223609 NR Description: ethylene responsive element binding factor 3
  misc_feature (39)..(227): Homolog of NCBI NO: 15223609 NR Description: ethylene responsive element binding factor 3
  misc_feature (39)..(282): Homolog of NCBI NO: 15231110 NR Description: ethylene responsive element binding factor 7
IFFLIFLLSSTFSSLLHTNTHRSLLHHITSGFTSFFFSMRKGRGSSVVGPALPVTAGGSVKEPRYRGVRKRPWGRFAAEIRDPLKKSRVWLGTFDSAVDAARAYDTAARNLRGPKAKTNFPIDCSPSSPLQPLTYLHNQNLCSPPVIQNQIDPFMDHRLYGGGNFQEQQQQQIISRPASSSMSSTVKSCSGPRPMEAAAASSSVAKPLHAIKRYPRTPPVAPEDCHSDCDSSSSVIDDGDDIASSSSRRKTPFQFDLNFPPLDGVDLFAGGIDDLHCTDLRL

SEQ ID NO: 41916 - protein, 244 aa, Arabidopsis thaliana
  peptide (1)..(244): Ceres Seq. ID no. 13491639
  misc_feature (24)..(88): Pfam Name: AP2 domain Pfam Description: AP2 domain
  misc_feature (22)..(91): Homolog of NCBI NO: 7489114 NR Description: DNA binding protein EREBP-3 - common tobacco
  misc_feature (10)..(125): Homolog of NCBI NO: 15219215 NR Description: ethylene responsive element binding factor 8
  misc_feature (19)..(223): Homolog of NCBI NO: 38345793 NR Description: OSJNBa0085I10.10 [Oryza sativa (japonica
  misc_feature (12)..(102): Homolog of NCBI NO: 4099914 NR Description: ethylene-responsive element binding protein
  misc_feature (12)..(83): Homolog of NCBI NO: 4099921 NR Description: EREBP-3 homolog [Stylosanthes hamata]
  misc_feature (12)..(223): Homolog of NCBI NO: 15232526 NR Description: ethylene responsive element binding factor 4
  misc_feature (1)..(223): Homolog of NCBI NO: 4587373 NR Description: ethylene responsive element binding factor
  misc_feature (110)..(244): Homolog of NCBI NO: 15223609 NR Description: ethylene responsive element binding factor 3
  misc_feature (1)..(189): Homolog of NCBI NO: 15223609 NR Description: ethylene responsive element binding factor 3
  misc_feature (1)..(244): Homolog of NCBI NO: 15231110 NR Description: ethylene responsive element binding factor 7
MRKGRGSSVVGPALPVTAGGSVKEPRYRGVRKRPWGRFAAEIRDPLKKSRVWLGTFDSAVDAARAYDTAARNLRGPKAKTNFPIDCSPSSPLQPLTYLHNQNLCSPPVIQNQIDPFMDHRLYGGGNFQEQQQQQIISRPASSSMSSTVKSCSGPRPMEAAAASSSVAKPLHAIKRYPRTPPVAPEDCHSDCDSSSSVIDDGDDIASSSSRRKTPFQFDLNFPPLDGVDLFAGGIDDLHCTDLRL

SEQ ID NO: 41917 - DNA, 1037 bp, Arabidopsis thaliana
  misc_feature (1)..(1037): Ceres Seq. ID no. 13501430
  misc_feature: MA Experiment ID: 108607 Result: Up-regulated in Transcription
  misc_feature: MA Experiment 108607 PARAMETER Experiment Name: At_100uM_ABA_cDNA_P Parameter: Timepoint (hr) Value: 4
  misc_feature: MA Experiment 108607 PARAMETER Experiment Name: At_100uM_ABA_cDNA_P Parameter: Tissue Value: Aerial
  misc_feature: MA Experiment 108607 PARAMETER Experiment Name: At_100uM_ABA_cDNA_P Parameter: Treatment Value: 100uM ABA vs. No Treatment
  misc_feature: MA Experiment ID: 20000072 Result: Up-regulated in Transcription
  misc_feature: MA Experiment 20000072 PARAMETER Experiment Name: At_100uM_ABA_Mutants_cDNA_P Parameter: Plant Line Value: CS8105
  misc_feature: MA Experiment 20000072 PARAMETER Experiment Name: At_100uM_ABA_Mutants_cDNA_P Parameter: Timepoint (hr) Value: 6
  misc_feature: MA Experiment 20000072 PARAMETER Experiment Name: At_100uM_ABA_Mutants_cDNA_P Parameter: Tissue Value: Aerial
  misc_feature: MA Experiment 20000072 PARAMETER Experiment Name: At_100uM_ABA_Mutants_cDNA_P Parameter: Treatment Value: 100uM ABA vs. No Treatment
  misc_feature: MA Experiment ID: 20000314 Result: Down-regulated in Transcription
  misc_feature: MA Experiment 20000314 PARAMETER Experiment Name: At_14day_Shoots-Roots_Sub_P Parameter: Age (day) Value: 14
  misc_feature: MA Experiment 20000314 PARAMETER Experiment Name: At_14day_Shoots-Roots_Sub_P Parameter: Organism Value: A. thaliana
  misc_feature: MA Experiment 20000314 PARAMETER Experiment Name: At_14day_Shoots-Roots_Sub_P Parameter: Plant Line Value: WS
  misc_feature: MA Experiment 20000314 PARAMETER Experiment Name: At_14day_Shoots-Roots_Sub_P Parameter: Tissue Value: Roots vs. Whole Plant
  misc_feature: MA Experiment ID: 20000315 Result: Down-regulated in Transcription
  misc_feature: MA Experiment 20000315 PARAMETER Experiment Name: At_14day_Shoots-Roots_Sub_P Parameter: Age (day) Value: 14
  misc_feature: MA Experiment 20000315 PARAMETER Experiment Name: At_14day_Shoots-Roots_Sub_P Parameter: Organism Value: A. thaliana
  misc_feature: MA Experiment 20000315 PARAMETER Experiment Name: At_14day_Shoots-Roots_Sub_P Parameter: Plant Line Value: WS
  misc_feature: MA Experiment 20000315 PARAMETER Experiment Name: At_14day_Shoots-Roots_Sub_P Parameter: Tissue Value: Shoots vs. Whole Plant
  misc_feature: MA Experiment ID: 20000348 Result: Up-regulated in Transcription
  misc_feature: MA Experiment 20000348 PARAMETER Experiment Name: At_100uM_ABA_Sub_P Parameter: Age (day) Value: 14
  misc_feature: MA Experiment 20000348 PARAMETER Experiment Name: At_100uM_ABA_Sub_P Parameter: Organism Value: A. thaliana
  misc_feature: MA Experiment 20000348 PARAMETER Experiment Name: At_100uM_ABA_Sub_P Parameter: Plant Line Value: WS
  misc_feature: MA Experiment 20000348 PARAMETER Experiment Name: At_100uM_ABA_Sub_P Parameter: Timepoint (hr) Value: 1
  misc_feature: MA Experiment 20000348 PARAMETER Experiment Name: At_100uM_ABA_Sub_P Parameter: Tissue Value: Aerial
  misc_feature: MA Experiment 20000348 PARAMETER Experiment Name: At_100uM_ABA_Sub_P Parameter: Treatment Value: 100uM ABA vs. No Treatment
  misc_feature: MA Experiment ID: 20000349 Result: Up-regulated in Transcription
  misc_feature: MA Experiment 20000349 PARAMETER Experiment Name: At_100uM_ABA_Sub_P Parameter: Age (day) Value: 14
  misc_feature: MA Experiment 20000349 PARAMETER Experiment Name: At_100uM_ABA_Sub_P Parameter: Organism Value: A. thaliana
  misc_feature: MA Experiment 20000349 PARAMETER Experiment Name: At_100uM_ABA_Sub_P Parameter: Plant Line Value: WS
  misc_feature: MA Experiment 20000349 PARAMETER Experiment Name: At_100uM_ABA_Sub_P Parameter: Timepoint (hr) Value: 6
  misc_feature: MA Experiment 20000349 PARAMETER Experiment Name: At_100uM_ABA_Sub_P Parameter: Tissue Value: Aerial
  misc_feature: MA Experiment 20000349 PARAMETER Experiment Name: At_100uM_ABA_Sub_P Parameter: Treatment Value: 100uM ABA vs. No Treatment
aracatcaaaaactaaacaataaaccatataccataaaaaacatgaaaatcctctcactttcacttctcttgctcttggccgctacggtctctgcatccattccagagctcatcgaactcgtcgattcgaacaccatctttacgaacgaagccgaactcttagagaaagagaaactttccatcaactacgccaactgcagaagctggcaccttggtgttgagacctctaatatcatagacttcgacacggtgcccgcaaattgcaaagactatgttgaagactacttgatcacttccaaacagtaccaatacgactccaaaaccgtgtgcaaagaggcttatttctatgccaaaggacttgccctaaagaacgacaccgttaatgtttggatctttgacctagatgataccctcctctctagtattccctactacgcaaaatatggatacgggacagagaagaccgacccgggggcgtactggttgtggttagggaccggagcatcaacccctggactcccggaggccttgcatctttaccaaaacatcatagagctcgggattgaacccatcatactcagtgaccgttggaaattgtggaagaatgtcactctcgacaatctcgaagctgctggcgtggcctactggaagcatctcatattgaagcctaatggttcgaacttgaggcaagtggtttacaagtcaaaggtgaggaagagtctcgttaagaaaggatacaacatcgttggcaatatcggagaccaatgggctgatttggttgaggatacccctggaagggtttttaagctcccaaatccactctactacgtaccttcttaagcatttatcttcatggcattttccccttgtatccacttcatatctatgtcgtttcgtttatctttgtagccgttttggcaccgttgcataaataaaatttctatcctatcgcaacttaataagyacaaagacttcgtactaaatgttgtttttctttaaaggggtcattaattaagtggccatgaaatgatattcac

SEQ ID NO: 41918 - protein, 279 aa, Arabidopsis thaliana
  peptide (1)..(279): Ceres Seq. ID no. 15223123
  misc_feature (50)..(278): Pfam Name: HAD superfamily, subfamily IIIB (Acid phosphatase) Pfam Description: HAD superfamily, subfamily IIIB (Acid
  misc_feature (50)..(278): Pfam Name: HAD superfamily, subfamily IIIB (Acid phosphatase) Pfam Description: HAD superfamily, subfamily IIIB (Acid
  misc_feature (17)..(279): Homolog of NCBI NO: 629583 NR Description: vegetative storage protein, 30K - Arabidopsis
  misc_feature (15)..(279): Homolog of NCBI NO: 2373397 NR Description: vegetative storage protein [Arabidopsis thaliana]
  misc_feature (15)..(279): Homolog of NCBI NO: 18206363 NR Description: Vegetative storage protein 1 precursor
  misc_feature (15)..(279): Homolog of NCBI NO: 18420838 NR Description: vegetative storage protein Vsp1 [Arabidopsis
  misc_feature (15)..(279): Homolog of NCBI NO: 2373397 NR Description: vegetative storage protein [Arabidopsis thaliana]
  misc_feature (15)..(279): Homolog of NCBI NO: 18420838 NR Description: vegetative storage protein Vsp1 [Arabidopsis
  misc_feature (15)..(279): Homolog of NCBI NO: 18420836 NR Description: vegetative storage protein Vsp2 [Arabidopsis
  misc_feature (15)..(279): Homolog of NCBI NO: 21537241 NR Description: vegetative storage protein Vsp2 [Arabidopsis
  misc_feature (15)..(279): Homolog of NCBI NO: 2373399 NR Description: vegetative storage protein [Arabidopsis thaliana]
  misc_feature (15)..(279): Homolog of NCBI NO: 18206363 NR Description: Vegetative storage protein 1 precursor
  misc_feature (17)..(279): Homolog of NCBI NO: 629583 NR Description: vegetative storage protein, 30K - Arabidopsis
  misc_feature (15)..(279): Homolog of NCBI NO: 2373399 NR Description: vegetative storage protein [Arabidopsis thaliana]
  misc_feature (15)..(279): Homolog of NCBI NO: 18420836 NR Description: vegetative storage protein Vsp2 [Arabidopsis
  misc_feature (15)..(279): Homolog of NCBI NO: 21537241 NR Description: vegetative storage protein Vsp2 [Arabidopsis
  misc_feature (1)..(1): Xaa is any aa, unknown or other
XHQKLNNKPYTIKNMKILSLSLLLLLAATVSASIPELIELVDSNTIFTNEAELLEKEKLSINYANCRSWHLGVETSNIIDFDTVPANCKDYVEDYLITSKQYQYDSKTVCKEAYFYAKGLALKNDTVNVWIFDLDDTLLSSIPYYAKYGYGTEKTDPGAYWLWLGTGASTPGLPEALHLYQNIIELGIEPIILSDRWKLWKNVTLDNLEAAGVAYWKHLILKPNGSNLRQVVYKSKVRKSLVKKGYNIVGNIGDQWADLVEDTPGRVFKLPNPLYYVPS

SEQ ID NO: 41919 - protein, 265 aa, Arabidopsis thaliana
  peptide (1)..(265): Ceres Seq. ID no. 15223124
  misc_feature (36)..(264): Pfam Name: HAD superfamily, subfamily IIIB (Acid phosphatase) Pfam Description: HAD superfamily, subfamily IIIB (Acid
  misc_feature (36)..(264): Pfam Name: HAD superfamily, subfamily IIIB (Acid phosphatase) Pfam Description: HAD superfamily, subfamily IIIB (Acid
  misc_feature (3)..(265): Homolog of NCBI NO: 629583 NR Description: vegetative storage protein, 30K - Arabidopsis
  misc_feature (1)..(265): Homolog of NCBI NO: 2373397 NR Description: vegetative storage protein [Arabidopsis thaliana]
  misc_feature (1)..(265): Homolog of NCBI NO: 18206363 NR Description: Vegetative storage protein 1 precursor
  misc_feature (1)..(265): Homolog of NCBI NO: 18420838 NR Description: vegetative storage protein Vsp1 [Arabidopsis
  misc_feature (1)..(265): Homolog of NCBI NO: 2373397 NR Description: vegetative storage protein [Arabidopsis thaliana]
  misc_feature (1)..(265): Homolog of NCBI NO: 18420838 NR Description: vegetative storage protein Vsp1 [Arabidopsis
  misc_feature (1)..(265): Homolog of NCBI NO: 18420836 NR Description: vegetative storage protein Vsp2 [Arabidopsis
  misc_feature (1)..(265): Homolog of NCBI NO: 21537241 NR Description: vegetative storage protein Vsp2 [Arabidopsis
  misc_feature (1)..(265): Homolog of NCBI NO: 2373399 NR Description: vegetative storage protein [Arabidopsis thaliana]
  misc_feature (1)..(265): Homolog of NCBI NO: 18206363 NR Description: Vegetative storage protein 1 precursor
  misc_feature (3)..(265): Homolog of NCBI NO: 629583 NR Description: vegetative storage protein, 30K - Arabidopsis
  misc_feature (1)..(265): Homolog of NCBI NO: 2373399 NR Description: vegetative storage protein [Arabidopsis thaliana]
  misc_feature (1)..(265): Homolog of NCBI NO: 18420836 NR Description: vegetative storage protein Vsp2 [Arabidopsis
  misc_feature (1)..(265): Homolog of NCBI NO: 21537241 NR Description: vegetative storage protein Vsp2 [Arabidopsis
MKILSLSLLLLLAATVSASIPELIELVDSNTIFTNEAELLEKEKLSINYANCRSWHLGVETSNIIDFDTVPANCKDYVEDYLITSKQYQYDSKTVCKEAYFYAKGLALKNDTVNVWIFDLDDTLLSSIPYYAKYGYGTEKTDPGAYWLWLGTGASTPGLPEALHLYQNIIELGIEPIILSDRWKLWKNVTLDNLEAAGVAYWKHLILKPNGSNLRQVVYKSKVRKSLVKKGYNIVGNIGDQWADLVEDTPGRVFKLPNPLYYVPS

SEQ ID NO: 41920 - DNA, 1221 bp, Arabidopsis thaliana
  misc_feature (1)..(1221): Ceres Seq. ID no. 12328669
  misc_feature: MA Experiment ID: 108435 Result: Up-regulated in Transcription
  misc_feature: MA Experiment 108435 PARAMETER Experiment Name: At_stm_Mutants_cDNA_P Parameter: Plant Line Value: wt Landsburg vs stm
  misc_feature: MA Experiment 108435 PARAMETER Experiment Name: At_stm_Mutants_cDNA_P Parameter: Tissue Value: Shoot Apical Meristem Region
  misc_feature: MA Experiment ID: 108489 Result: Up-regulated in Transcription
  misc_feature: MA Experiment ID: 108501 Result: Down-regulated in Transcription
  misc_feature: MA Experiment 108501 PARAMETER Experiment Name: At_ap2_floral_buds_cDNA_P Parameter: Plant Line Value: ap2 (Ler.)
  misc_feature: MA Experiment 108501 PARAMETER Experiment Name: At_ap2_floral_buds_cDNA_P Parameter: Tissue Value: Closed Flower
  misc_feature: MA Experiment ID: 108577 Result: Down-regulated in Transcription
  misc_feature: MA Experiment 108577 PARAMETER Experiment Name: At_42deg_Heat_cDNA_P Parameter: Temperature (deg C) Value: 42 vs. 22
  misc_feature: MA Experiment 108577 PARAMETER Experiment Name: At_42deg_Heat_cDNA_P Parameter: Timepoint (hr) Value: 6
  misc_feature: MA Experiment 108577 PARAMETER Experiment Name: At_42deg_Heat_cDNA_P Parameter: Tissue Value: Aerial
  misc_feature: MA Experiment ID: 108585 Result: Up-regulated in Transcription
  misc_feature: MA Experiment 108585 PARAMETER Experiment Name: At_5mM_NaNP_cDNA_P Parameter: Timepoint (hr) Value: 6
  misc_feature: MA Experiment 108585 PARAMETER Experiment Name: At_5mM_NaNP_cDNA_P Parameter: Tissue Value: Aerial
  misc_feature: MA Experiment 108585 PARAMETER Experiment Name: At_5mM_NaNP_cDNA_P Parameter: Treatment Value: null
  misc_feature: MA Experiment ID: 20000111 Result: Down-regulated in Transcription
  misc_feature: MA Experiment 20000111 PARAMETER Experiment Name: At_42deg_Heat_cDNA_P Parameter: Temperature (deg C) Value: 42 vs. 22
  misc_feature: MA Experiment 20000111 PARAMETER Experiment Name: At_42deg_Heat_cDNA_P Parameter: Timepoint (hr) Value: 6
  misc_feature: MA Experiment 20000111 PARAMETER Experiment Name: At_42deg_Heat_cDNA_P Parameter: Tissue Value: Aerial
  misc_feature: MA Experiment ID: 20000112 Result: Down-regulated in Transcription
  misc_feature: MA Experiment 20000112 PARAMETER Experiment Name: At_42deg_Heat_cDNA_P Parameter: Temperature (deg C) Value: 42 vs. 22
  misc_feature: MA Experiment 20000112 PARAMETER Experiment Name: At_42deg_Heat_cDNA_P Parameter: Timepoint (hr) Value: 2
  misc_feature: MA Experiment 20000112 PARAMETER Experiment Name: At_42deg_Heat_cDNA_P Parameter: Tissue Value: Aerial
  misc_feature: MA Experiment ID: 20000113 Result: Down-regulated in Transcription
  misc_feature: MA Experiment 20000113 PARAMETER Experiment Name: At_42deg_Heat_cDNA_P Parameter: Temperature (deg C) Value: 42 vs. 22
  misc_feature: MA Experiment 20000113 PARAMETER Experiment Name: At_42deg_Heat_cDNA_P Parameter: Timepoint (hr) Value: 8
  misc_feature: MA Experiment 20000113 PARAMETER Experiment Name: At_42deg_Heat_cDNA_P Parameter: Tissue Value: Aerial
  misc_feature: MA Experiment ID: 20000144 Result: Down-regulated in Transcription
  misc_feature: MA Experiment 20000144 PARAMETER Experiment Name: At_42deg_Heat_cDNA_P Parameter: Temperature (deg C) Value: 42 vs. 22
  misc_feature: MA Experiment 20000144 PARAMETER Experiment Name: At_42deg_Heat_cDNA_P Parameter: Timepoint (hr) Value: 1
  misc_feature: MA Experiment 20000144 PARAMETER Experiment Name: At_42deg_Heat_cDNA_P Parameter: Tissue Value: Aerial
  misc_feature: MA Experiment ID: 20000224 Result: Up-regulated in Transcription
  misc_feature: MA Experiment ID: 20000437 Result: Down-regulated in Transcription
  misc_feature: MA Experiment 20000437 PARAMETER Experiment Name: At_Drought_P Parameter: Age (day) Value: 8
  misc_feature: MA Experiment 20000437 PARAMETER Experiment Name: At_Drought_P Parameter: Organism Value: A. thaliana
  misc_feature: MA Experiment 20000437 PARAMETER Experiment Name: At_Drought_P Parameter: Plant Line Value: WS
  misc_feature: MA Experiment 20000437 PARAMETER Experiment Name: At_Drought_P Parameter: Timepoint (hr) Value: 24
  misc_feature: MA Experiment 20000437 PARAMETER Experiment Name: At_Drought_P Parameter: Tissue Value: Whole Plant
  misc_feature: MA Experiment 20000437 PARAMETER Experiment Name: At_Drought_P Parameter: Treatment Value: Drought vs. No Drought
  misc_feature: MA Experiment ID: 20000438 Result: Up-regulated in Transcription
  misc_feature: MA Experiment 20000438 PARAMETER Experiment Name: At_Shoots__P Parameter: Age (day) Value: 14
  misc_feature: MA Experiment 20000438 PARAMETER Experiment Name: At_Shoots__P Parameter: Tissue Value: Shoots vs. Whole Plant
  misc_feature: MA Experiment ID: 20001248 Result: Down-regulated in Transcription
  misc_feature: MA Experiment 20001248 PARAMETER Experiment Name: At_Far-red-induction_P Parameter: Age (day) Value: 7
  misc_feature: MA Experiment 20001248 PARAMETER Experiment Name: At_Far-red-induction_P Parameter: Light Value: Far-red vs. White
  misc_feature: MA Experiment 20001248 PARAMETER Experiment Name: At_Far-red-induction_P Parameter: Organism Value: A. thaliana
  misc_feature: MA Experiment 20001248 PARAMETER Experiment Name: At_Far-red-induction_P Parameter: Plant Line Value: Columbia
  misc_feature: MA Experiment 20001248 PARAMETER Experiment Name: At_Far-red-induction_P Parameter: Timepoint (hr) Value: 4
  misc_feature: MA Experiment 20001248 PARAMETER Experiment Name: At_Far-red-induction_P Parameter: Tissue Value: Whole Plant
  misc_feature: MA Experiment ID: 20001450 Result: Down-regulated in Transcription
  misc_feature: MA Experiment 20001450 PARAMETER Experiment Name: At_Far-red-induction_P Parameter: Age (day) Value: 7
  misc_feature: MA Experiment 20001450 PARAMETER Experiment Name: At_Far-red-induction_P Parameter: Light Value: Far-red vs. White
  misc_feature: MA Experiment 20001450 PARAMETER Experiment Name: At_Far-red-induction_P Parameter: Organism Value: A. thaliana
  misc_feature: MA Experiment 20001450 PARAMETER Experiment Name: At_Far-red-induction_P Parameter: Plant Line Value: Columbia
  misc_feature: MA Experiment 20001450 PARAMETER Experiment Name: At_Far-red-induction_P Parameter: Timepoint (hr) Value: 8
  misc_feature: MA Experiment 20001450 PARAMETER Experiment Name: At_Far-red-induction_P Parameter: Tissue Value: Whole Plant
  misc_feature: MA Experiment ID: 20001451 Result: Down-regulated in Transcription
  misc_feature: MA Experiment 20001451 PARAMETER Experiment Name: At_Far-red-induction_P Parameter: Age (day) Value: 7
  misc_feature: MA Experiment 20001451 PARAMETER Experiment Name: At_Far-red-induction_P Parameter: Light Value: Far-red vs. White
  misc_feature: MA Experiment 20001451 PARAMETER Experiment Name: At_Far-red-induction_P Parameter: Organism Value: A. thaliana
  misc_feature: MA Experiment 20001451 PARAMETER Experiment Name: At_Far-red-induction_P Parameter: Plant Line Value: Columbia
  misc_feature: MA Experiment 20001451 PARAMETER Experiment Name: At_Far-red-induction_P Parameter: Timepoint (hr) Value: 24
  misc_feature: MA Experiment 20001451 PARAMETER Experiment Name: At_Far-red-induction_P Parameter: Tissue Value: Whole Plant
  misc_feature: MA Experiment ID: 20001757 Result: Up-regulated in Transcription
  misc_feature: MA Experiment 20001757 PARAMETER Experiment Name: At_50mM_NH4NO3_L-to-H_P Parameter: Timepoint (hr) Value: 6
  misc_feature: MA Experiment 20001757 PARAMETER Experiment Name: At_50mM_NH4NO3_L-to-H_P Parameter: Tissue Value: Leaf
  misc_feature: MA Experiment 20001757 PARAMETER Experiment Name: At_50mM_NH4NO3_L-to-H_P Parameter: Treatment Value: 50mM NH4NO3 vs 100mM Mannitol
aacgactcataactcatagctatatcttgtcttaaaaagaagaagcaaagagaattagtggagtacgataagcagagaagtatgttaaaggtggtgttgttgatgatgataatgatgttggcgtcacagtccgaggctcagctgaaccgtgacttttacaaggaaagctgtccatcattgttccttgtcgtgagacgagtcgtgaaacgggccgtggccagagagcctcgcatgggtgcttctctccttcgtttgttcttccatgattgttttgtcaatgggtgtgacggatccttactgttggatgacacaccgtcttttttgggagagaaaacctcaggacccagcaataactctgtgagggggttcgaagtgatcgacaaaatcaagtttaaggttgagaaaatgtgcccgggcatcgtctcatgcgcagacattctagccatcactgctcgggactccgttctcctcctaggtggaccggggtggagcgtgaaacttggaagaagagactctacgacggcgaacttcgcggccgcgaactccggagtcatccctcctccgatcactacccttagcaacctcataaaccgtttcaaagcacaaggtttgtccacacgtgacatggtcgccctctctggttctcacaccattggacgagcccaatgtgttacattcagaaaccgaatctacaacgcaagcaatatcgacacctctttcgccatctctaaacggaggaagctgtcctgccaccagtggctccggagacaacaagaaagccaatcttgacgtccgctctcccgataggttcgaccacggcttctacaagcaacttctgagcaaaaaaggtttgcttacgtcagaccaagtcctctttaataatggtcctaccgactcgctcgtcatagcttacagccacaatctcaatgccttctaccgcgactttgcaagggcaatgattaagatgggagacatcagccccctcaccggatccaatggtcagatccgccaaaactgtcggaggcccaactgaatgattctcttttatattatcccaagcccattgagctcaataatcacctcttcgtcaactgttttttcatgtgcattccccttcttcgtcaactgttaaaatacatcttcattatataaaaaacaataaacacgtaaaagtttgtgactatgcagttttccattataaattactgtctatattctctt

SEQ ID NO: 41921 - protein, 235 aa, Arabidopsis thaliana
  peptide (1)..(235): Ceres Seq. ID no. 12328670
  misc_feature (37)..(219): Pfam Name: Peroxidase Pfam Description: Peroxidase
  misc_feature (6)..(223): Homolog of NCBI NO: 28400794 NR Description: peroxidase [Asparagus officinalis]
  misc_feature (17)..(223): Homolog of NCBI NO: 28400798 NR Description: peroxidase [Asparagus officinalis]
  misc_feature (17)..(221): Homolog of NCBI NO: 28400796 NR Description: peroxidase [Asparagus officinalis]
  misc_feature (4)..(223): Homolog of NCBI NO: 5381253 NR Description: peroxidase [Nicotiana tabacum]
  misc_feature (11)..(223): Homolog of NCBI NO: 19698446 NR Description: gaiacol peroxidase [Gossypium hirsutum]
  misc_feature (1)..(223): Homolog of NCBI NO: 39777532 NR Description: peroxidase precursor [Quercus suber]
  misc_feature (1)..(220): Homolog of NCBI NO: 39777536 NR Description: peroxidase precursor [Quercus suber]
  misc_feature (1)..(223): Homolog of NCBI NO: 15237190 NR Description: peroxidase, putative; protein id: At5g58400.1
  misc_feature (1)..(219): Homolog of NCBI NO: 15237187 NR Description: peroxidase, putative
  misc_feature (1)..(219): Homolog of NCBI NO: 21537247 NR Description: peroxidase [Arabidopsis thaliana]
MLKVVLLMMIMMLASQSEAQLNRDFYKESCPSLFLVVRRVVKRAVAREPRMGASLLRLFFHDCFVNGCDGSLLLDDTPSFLGEKTSGPSNNSVRGFEVIDKIKFKVEKMCPGIVSCADILAITARDSVLLLGGPGWSVKLGRRDSTTANFAAANSGVIPPPITTLSNLINRFKAQGLSTRDMVALSGSHTIGRAQCVTFRNRIYNASNIDTSFAISKRRKLSCHQWLRRQQESQS

SEQ ID NO: 41922 - protein, 228 aa, Arabidopsis thaliana
  peptide (1)..(228): Ceres Seq. ID no. 12328671
  misc_feature (30)..(212): Pfam Name: Peroxidase Pfam Description: Peroxidase
  misc_feature (1)..(216): Homolog of NCBI NO: 28400794 NR Description: peroxidase [Asparagus officinalis]
  misc_feature (10)..(216): Homolog of NCBI NO: 28400798 NR Description: peroxidase [Asparagus officinalis]
  misc_feature (10)..(214): Homolog of NCBI NO: 28400796 NR Description: peroxidase [Asparagus officinalis]
  misc_feature (1)..(216): Homolog of NCBI NO: 5381253 NR Description: peroxidase [Nicotiana tabacum]
  misc_feature (4)..(216): Homolog of NCBI NO: 19698446 NR Description: gaiacol peroxidase [Gossypium hirsutum]
  misc_feature (1)..(216): Homolog of NCBI NO: 39777532 NR Description: peroxidase precursor [Quercus suber]
  misc_feature (1)..(213): Homolog of NCBI NO: 39777536 NR Description: peroxidase precursor [Quercus suber]
  misc_feature (1)..(216): Homolog of NCBI NO: 15237190 NR Description: peroxidase, putative; protein id: At5g58400.1
  misc_feature (1)..(212): Homolog of NCBI NO: 15237187 NR Description: peroxidase, putative
  misc_feature (1)..(212): Homolog of NCBI NO: 21537247 NR Description: peroxidase [Arabidopsis thaliana]
MMIMMLASQSEAQLNRDFYKESCPSLFLVVRRVVKRAVAREPRMGASLLRLFFHDCFVNGCDGSLLLDDTPSFLGEKTSGPSNNSVRGFEVIDKIKFKVEKMCPGIVSCADILAITARDSVLLLGGPGWSVKLGRRDSTTANFAAANSGVIPPPITTLSNLINRFKAQGLSTRDMVALSGSHTIGRAQCVTFRNRIYNASNIDTSFAISKRRKLSCHQWLRRQQESQS

SEQ ID NO: 41923 - protein, 227 aa, Arabidopsis thaliana
  peptide (1)..(227): Ceres Seq. ID no. 12328672
  misc_feature (29)..(211): Pfam Name: Peroxidase Pfam Description: Peroxidase
  misc_feature (1)..(215): Homolog of NCBI NO: 28400794 NR Description: peroxidase [Asparagus officinalis]
  misc_feature (9)..(215): Homolog of NCBI NO: 28400798 NR Description: peroxidase [Asparagus officinalis]
  misc_feature (9)..(213): Homolog of NCBI NO: 28400796 NR Description: peroxidase [Asparagus officinalis]
  misc_feature (1)..(215): Homolog of NCBI NO: 5381253 NR Description: peroxidase [Nicotiana tabacum]
  misc_feature (3)..(215): Homolog of NCBI NO: 19698446 NR Description: gaiacol peroxidase [Gossypium hirsutum]
  misc_feature (1)..(215): Homolog of NCBI NO: 39777532 NR Description: peroxidase precursor [Quercus suber]
  misc_feature (1)..(212): Homolog of NCBI NO: 39777536 NR Description: peroxidase precursor [Quercus suber]
  misc_feature (1)..(215): Homolog of NCBI NO: 15237190 NR Description: peroxidase, putative; protein id: At5g58400.1
  misc_feature (1)..(211): Homolog of NCBI NO: 15237187 NR Description: peroxidase, putative
  misc_feature (1)..(211): Homolog of NCBI NO: 21537247 NR Description: peroxidase [Arabidopsis thaliana]
MIMMLASQSEAQLNRDFYKESCPSLFLVVRRVVKRAVAREPRMGASLLRLFFHDCFVNGCDGSLLLDDTPSFLGEKTSGPSNNSVRGFEVIDKIKFKVEKMCPGIVSCADILAITARDSVLLLGGPGWSVKLGRRDSTTANFAAANSGVIPPPITTLSNLINRFKAQGLSTRDMVALSGSHTIGRAQCVTFRNRIYNASNIDTSFAISKRRKLSCHQWLRRQQESQS

SEQ ID NO: 41924 - DNA, 1189 bp, Arabidopsis thaliana
  misc_feature (1)..(1189): Ceres Seq. ID no. 12348483
  misc_feature: MA Experiment ID: 108435 Result: Down-regulated in Transcription
  misc_feature: MA Experiment 108435 PARAMETER Experiment Name: At_stm_Mutants_cDNA_P Parameter: Plant Line Value: wt Landsburg vs stm
  misc_feature: MA Experiment 108435 PARAMETER Experiment Name: At_stm_Mutants_cDNA_P Parameter: Tissue Value: Shoot Apical Meristem Region
  misc_feature: MA Experiment ID: 108461 Result: Up-regulated in Transcription
  misc_feature: MA Experiment 108461 PARAMETER Experiment Name: At_Germinating_Seeds_cDNA_P Parameter: Age (day) Value: 1 vs. 0
  misc_feature: MA Experiment 108461 PARAMETER Experiment Name: At_Germinating_Seeds_cDNA_P Parameter: Tissue Value: Germinating Seeds
  misc_feature: MA Experiment ID: 108462 Result: Up-regulated in Transcription
  misc_feature: MA Experiment 108462 PARAMETER Experiment Name: At_Germinating_Seeds_cDNA_P Parameter: Age (day) Value: 2 vs. 0
  misc_feature: MA Experiment 108462 PARAMETER Experiment Name: At_Germinating_Seeds_cDNA_P Parameter: Tissue Value: Germinating Seeds
  misc_feature: MA Experiment ID: 108463 Result: Up-regulated in Transcription
  misc_feature: MA Experiment 108463 PARAMETER Experiment Name: At_Germinating_Seeds_cDNA_P Parameter: Age (day) Value: 3 vs. 0
  misc_feature: MA Experiment 108463 PARAMETER Experiment Name: At_Germinating_Seeds_cDNA_P Parameter: Tissue Value: Germinating Seeds
  misc_feature: MA Experiment ID: 108464 Result: Up-regulated in Transcription
  misc_feature: MA Experiment 108464 PARAMETER Experiment Name: At_Germinating_Seeds_cDNA_P Parameter: Age (day) Value: 4 vs. 0
  misc_feature: MA Experiment 108464 PARAMETER Experiment Name: At_Germinating_Seeds_cDNA_P Parameter: Tissue Value: Germinating Seeds
  misc_feature: MA Experiment ID: 108501 Result: Down-regulated in Transcription
  misc_feature: MA Experiment 108501 PARAMETER Experiment Name: At_ap2_floral_buds_cDNA_P Parameter: Plant Line Value: ap2 (Ler.)
  misc_feature: MA Experiment 108501 PARAMETER Experiment Name: At_ap2_floral_buds_cDNA_P Parameter: Tissue Value: Closed Flower
  misc_feature: MA Experiment ID: 108594 Result: Down-regulated in Transcription
  misc_feature: MA Experiment 108594 PARAMETER Experiment Name: At_Ler-rhl_Root_cDNA_P Parameter: Plant Line Value: null
  misc_feature: MA Experiment ID: 108595 Result: Down-regulated in Transcription
  misc_feature: MA Experiment 108595 PARAMETER Experiment Name: At_Ler-pi_Ovule_cDNA_P Parameter: Plant Line Value: null
  misc_feature: MA Experiment ID: 20000088 Result: Up-regulated in Transcription
  misc_feature: MA Experiment 20000088 PARAMETER Experiment Name: At_100uM_ABA_Mutants_cDNA_P Parameter: Plant Line Value: Landsberg
  misc_feature: MA Experiment 20000088 PARAMETER Experiment Name: At_100uM_ABA_Mutants_cDNA_P Parameter: Timepoint (hr) Value: 6
  misc_feature: MA Experiment 20000088 PARAMETER Experiment Name: At_100uM_ABA_Mutants_cDNA_P Parameter: Tissue Value: Aerial
  misc_feature: MA Experiment 20000088 PARAMETER Experiment Name: At_100uM_ABA_Mutants_cDNA_P Parameter: Treatment Value: 100uM ABA vs. No Treatment
  misc_feature: MA Experiment ID: 20000111 Result: Down-regulated in Transcription
  misc_feature: MA Experiment 20000111 PARAMETER Experiment Name: At_42deg_Heat_cDNA_P Parameter: Temperature (deg C) Value: 42 vs. 22
  misc_feature: MA Experiment 20000111 PARAMETER Experiment Name: At_42deg_Heat_cDNA_P Parameter: Timepoint (hr) Value: 6
  misc_feature: MA Experiment 20000111 PARAMETER Experiment Name: At_42deg_Heat_cDNA_P Parameter: Tissue Value: Aerial
  misc_feature: MA Experiment ID: 20000117 Result: Up-regulated in Transcription
  misc_feature: MA Experiment 20000117 PARAMETER Experiment Name: At_100uM_ABA_Mutants_cDNA_P Parameter: Plant Line Value: Columbia
  misc_feature: MA Experiment 20000117 PARAMETER Experiment Name: At_100uM_ABA_Mutants_cDNA_P Parameter: Timepoint (hr) Value: 6
  misc_feature: MA Experiment 20000117 PARAMETER Experiment Name: At_100uM_ABA_Mutants_cDNA_P Parameter: Tissue Value: Aerial
  misc_feature: MA Experiment 20000117 PARAMETER Experiment Name: At_100uM_ABA_Mutants_cDNA_P Parameter: Treatment Value: 100uM ABA vs. No Treatment
  misc_feature: MA Experiment ID: 20000180 Result: Up-regulated in Transcription
  misc_feature: MA Experiment 20000180 PARAMETER Experiment Name: At_Germinating_Seeds_P Parameter: Age (hr) Value: 24 vs. 0
  misc_feature: MA Experiment 20000180 PARAMETER Experiment Name: At_Germinating_Seeds_P Parameter: Tissue Value: Germinating Seeds
  misc_feature: MA Experiment ID: 20000185 Result: Down-regulated in Transcription
  misc_feature: MA Experiment 20000185 PARAMETER Experiment Name: At_Roots__P Parameter: Age (day) Value: 7 vs. 21
  misc_feature: MA Experiment 20000185 PARAMETER Experiment Name: At_Roots__P Parameter: Organism Value: A. thaliana
  misc_feature: MA Experiment 20000185 PARAMETER Experiment Name: At_Roots__P Parameter: Tissue Value: Roots vs. Whole Plant
  misc_feature: MA Experiment ID: 20000234 Result: Down-regulated in Transcription
  misc_feature: MA Experiment 20000234 PARAMETER Experiment Name: At_Siliques_P Parameter: Age (day) Value: 21
  misc_feature: MA Experiment 20000234 PARAMETER Experiment Name: At_Siliques_P Parameter: Organism Value: A. thaliana
  misc_feature: MA Experiment 20000234 PARAMETER Experiment Name: At_Siliques_P Parameter: Plant Line Value: WS
  misc_feature: MA Experiment 20000234 PARAMETER Experiment Name: At_Siliques_P Parameter: Tissue Value: Less Than 5mm Siliques vs. Whole Plant
  misc_feature: MA Experiment ID: 20000265 Result: Down-regulated in Transcription
  misc_feature: MA Experiment 20000265 PARAMETER Experiment Name: At_Open_Flower_P Parameter: Age (day) Value: 21
  misc_feature: MA Experiment 20000265 PARAMETER Experiment Name: At_Open_Flower_P Parameter: Plant Line Value: WS
  misc_feature: MA Experiment 20000265 PARAMETER Experiment Name: At_Open_Flower_P Parameter: Tissue Value: Closed Flower vs. Whole Plant
  misc_feature: MA Experiment ID: 20000269 Result: Down-regulated in Transcription
  misc_feature: MA Experiment 20000269 PARAMETER Experiment Name: At_1mM_KNO3_L-vs-H_Roots_P Parameter: Age (day) Value: 7,10,12
  misc_feature: MA Experiment 20000269 PARAMETER Experiment Name: At_1mM_KNO3_L-vs-H_Roots_P Parameter: Organism Value: A. thaliana
  misc_feature: MA Experiment 20000269 PARAMETER Experiment Name: At_1mM_KNO3_L-vs-H_Roots_P Parameter: Plant Line Value: WS
  misc_feature: MA Experiment 20000269 PARAMETER Experiment Name: At_1mM_KNO3_L-vs-H_Roots_P Parameter: Timepoint (day) Value: 7,10,12
  misc_feature: MA Experiment 20000269 PARAMETER Experiment Name: At_1mM_KNO3_L-vs-H_Roots_P Parameter: Tissue Value: Roots
  misc_feature: MA Experiment 20000269 PARAMETER Experiment Name: At_1mM_KNO3_L-vs-H_Roots_P Parameter: Treatment Value: 1mM KNO3 vs. 50mM KNO3
  misc_feature: MA Experiment ID: 20000286 Result: Down-regulated in Transcription
  misc_feature: MA Experiment 20000286 PARAMETER Experiment Name: At_Open_Flower_P Parameter: Age (day) Value: 21
  misc_feature: MA Experiment 20000286 PARAMETER Experiment Name: At_Open_Flower_P Parameter: Plant Line Value: WS
  misc_feature: MA Experiment 20000286 PARAMETER Experiment Name: At_Open_Flower_P Parameter: Tissue Value: Half Open vs. Whole Plant
  misc_feature: MA Experiment ID: 20000439 Result: Down-regulated in Transcription
  misc_feature: MA Experiment 20000439 PARAMETER Experiment Name: At_Roots__P Parameter: Age (day) Value: 14 vs. 21
  misc_feature: MA Experiment 20000439 PARAMETER Experiment Name: At_Roots__P Parameter: Organism Value: A. thaliana
  misc_feature: MA Experiment 20000439 PARAMETER Experiment Name: At_Roots__P Parameter: Tissue Value: Roots vs. Whole Plant
  misc_feature: MA Experiment ID: 20000451 Result: Down-regulated in Transcription
  misc_feature: MA Experiment 20000451 PARAMETER Experiment Name: At_CS6879_Shoots-Roots_P Parameter: Age (day) Value: 14
  misc_feature: MA Experiment 20000451 PARAMETER Experiment Name: At_CS6879_Shoots-Roots_P Parameter: Organism Value: A. thaliana
  misc_feature: MA Experiment 20000451 PARAMETER Experiment Name: At_CS6879_Shoots-Roots_P Parameter: Plant Line Value: CS6879 vs. WS
  misc_feature: MA Experiment 20000451 PARAMETER Experiment Name: At_CS6879_Shoots-Roots_P Parameter: Tissue Value: Roots
  misc_feature: MA Experiment ID: 20001558 Result: Down-regulated in Transcription
  misc_feature: MA Experiment 20001558 PARAMETER Experiment Name: At_Drought_Soil_Dry_P Parameter: Age (day) Value: 27
  misc_feature: MA Experiment 20001558 PARAMETER Experiment Name: At_Drought_Soil_Dry_P Parameter: Organism Value: A. thaliana
  misc_feature: MA Experiment 20001558 PARAMETER Experiment Name: At_Drought_Soil_Dry_P Parameter: Plant Line Value: WS
  misc_feature: MA Experiment 20001558 PARAMETER Experiment Name: At_Drought_Soil_Dry_P Parameter: Post Timepoint (hr) Value: 6
  misc_feature: MA Experiment 20001558 PARAMETER Experiment Name: At_Drought_Soil_Dry_P Parameter: Post-Treatment Value: Re-Water vs. No Drought
  misc_feature: MA Experiment 20001558 PARAMETER Experiment Name: At_Drought_Soil_Dry_P Parameter: Timepoint (day) Value: 13
  misc_feature: MA Experiment 20001558 PARAMETER Experiment Name: At_Drought_Soil_Dry_P Parameter: Treatment Value: Drought vs. No Drought
  misc_feature: MA Experiment ID: 20001560 Result: Down-regulated in Transcription
  misc_feature: MA Experiment 20001560 PARAMETER Experiment Name: At_Drought_Soil_Dry_P Parameter: Age (day) Value: 28
  misc_feature: MA Experiment 20001560 PARAMETER Experiment Name: At_Drought_Soil_Dry_P Parameter: Organism Value: A. thaliana
  misc_feature: MA Experiment 20001560 PARAMETER Experiment Name: At_Drought_Soil_Dry_P Parameter: Plant Line Value: WS
  misc_feature: MA Experiment 20001560 PARAMETER Experiment Name: At_Drought_Soil_Dry_P Parameter: Post Timepoint (hr) Value: None
  misc_feature: MA Experiment 20001560 PARAMETER Experiment Name: At_Drought_Soil_Dry_P Parameter: Post-Treatment Value: None
  misc_feature: MA Experiment 20001560 PARAMETER Experiment Name: At_Drought_Soil_Dry_P Parameter: Timepoint (day) Value: 14
  misc_feature: MA Experiment 20001560 PARAMETER Experiment Name: At_Drought_Soil_Dry_P Parameter: Treatment Value: Drought vs. No Drought
gccattagcttttacattaagagaaaacacttgcaaaactaagtgctatctttcttcttcttccttctcctaaaagcccttaacaacttatataccatgagtctcttcaacactgaaaacacatgggcctttgtctttggcttgctcggcaaccttatctcctttgccgtgttcctatctcctgtgccaacgttctataggatttggaagaagaagacaacagaagggtttcagtctattccttatgttgtggcgctcttcagtgcgacgctttggctttactatgcgacacagaagaaagatgtcttcctcctcgtaaccattaacgcctttggttgcttcatcgaaaccatctacatctctatgttccttgcctacgctcccaagccagctcggatgttgacagtgaagatgctacttcttatgaactttggaggattctgtgcgattctccttctttgccaattcttggtaaaaggagccacacgtgctaagattatcggaggaatctgtgtcggattctctgtttgtgttttcgctgctcctctaagcataatcaggacggtaataaagacaagaagtgtggagtacatgccctttagcttatccttaacccttaccatcagtgctgtcatatggctcctttatggtcttgctctcaaggacatctatgttgctttcccgaatgtgcttggttttgctctcggtgcactccaaatgatactctacgttgtctacaaatactgtaaaacgtcgccgcatctaggagagaaagaagtcgaagctgctaagttaccggaggtgagcctcgatatgttgaagctaggcacagtttcatcccctgagccaatctcagtggttcgtcaagcgaacaagtgtacctgcggaaatgatcgaagggctgagattgaagatggacaaacccctaaacatggcaagcagtcctcttccgcagcagctacatgaataaaaatacgttaatgttgactttaccccaacttgatataccaaccaccacgtgtaccccgttacgctgtcgtatttttctgagtttatcaagtgtgcgaagtagagaattaattttccggagttagtttctctacttctttataaaaatttgtgtaattatctattggggataatgtatatttcctattttctgatttaacgaaaactatttaaaatatcc

SEQ ID NO: 41925 - protein, 289 aa, Arabidopsis thaliana
  peptide (1)..(289): Ceres Seq. ID no. 12348484
  misc_feature (12)..(99): Pfam Name: MtN3/saliva family Pfam Description: MtN3/saliva family
  misc_feature (11)..(245): Homolog of NCBI NO: 15225014 NR Description: similar to MtN3 protein
  misc_feature (11)..(275): Homolog of NCBI NO: 15240040 NR Description: senescence-associated protein (SAG29)
  misc_feature (11)..(252): Homolog of NCBI NO: 21593422 NR Description: senescence-associated protein (SAG29)
  misc_feature (6)..(248): Homolog of NCBI NO: 14715258 NR Description: N3 like protein [Medicago truncatula]
  misc_feature (6)..(215): Homolog of NCBI NO: 1619602 NR Description: MtN3 [Medicago truncatula]
  misc_feature (6)..(259): Homolog of NCBI NO: 15234863 NR Description: MtN3 - like protein; protein id: At4g25010.1
  misc_feature (6)..(246): Homolog of NCBI NO: 15241278 NR Description: MtN3-like protein
  misc_feature (6)..(246): Homolog of NCBI NO: 21593109 NR Description: MtN3-like protein [Arabidopsis thaliana]
  misc_feature (1)..(275): Homolog of NCBI NO: 15237803 NR Description: MtN3-like protein
  misc_feature (1)..(289): Homolog of NCBI NO: 15229019 NR Description: MTN3-like protein
MSLFNTENTWAFVFGLLGNLISFAVFLSPVPTFYRIWKKKTTEGFQSIPYVVALFSATLWLYYATQKKDVFLLVTINAFGCFIETIYISMFLAYAPKPARMLTVKMLLLMNFGGFCAILLLCQFLVKGATRAKIIGGICVGFSVCVFAAPLSIIRTVIKTRSVEYMPFSLSLTLTISAVIWLLYGLALKDIYVAFPNVLGFALGALQMILYVVYKYCKTSPHLGEKEVEAAKLPEVSLDMLKLGTVSSPEPISVVRQANKCTCGNDRRAEIEDGQTPKHGKQSSSAAAT

SEQ ID NO: 41926 - protein, 200 aa, Arabidopsis thaliana
  peptide (1)..(200): Ceres Seq. ID no. 12348485
  misc_feature (1)..(156): Homolog of NCBI NO: 15225014 NR Description: similar to MtN3 protein
  misc_feature (1)..(186): Homolog of NCBI NO: 15240040 NR Description: senescence-associated protein (SAG29)
  misc_feature (1)..(163): Homolog of NCBI NO: 21593422 NR Description: senescence-associated protein (SAG29)
  misc_feature (1)..(159): Homolog of NCBI NO: 14715258 NR Description: N3 like protein [Medicago truncatula]
  misc_feature (1)..(126): Homolog of NCBI NO: 1619602 NR Description: MtN3 [Medicago truncatula]
  misc_feature (1)..(170): Homolog of NCBI NO: 15234863 NR Description: MtN3 - like protein; protein id: At4g25010.1
  misc_feature (1)..(157): Homolog of NCBI NO: 15241278 NR Description: MtN3-like protein
  misc_feature (1)..(157): Homolog of NCBI NO: 21593109 NR Description: MtN3-like protein [Arabidopsis thaliana]
  misc_feature (1)..(186): Homolog of NCBI NO: 15237803 NR Description: MtN3-like protein
  misc_feature (1)..(200): Homolog of NCBI NO: 15229019 NR Description: MTN3-like protein
MFLAYAPKPARMLTVKMLLLMNFGGFCAILLLCQFLVKGATRAKIIGGICVGFSVCVFAAPLSIIRTVIKTRSVEYMPFSLSLTLTISAVIWLLYGLALKDIYVAFPNVLGFALGALQMILYVVYKYCKTSPHLGEKEVEAAKLPEVSLDMLKLGTVSSPEPISVVRQANKCTCGNDRRAEIEDGQTPKHGKQSSSAAAT

SEQ ID NO: 41927 - protein, 189 aa, Arabidopsis thaliana
  peptide (1)..(189): Ceres Seq. ID no. 12348486
  misc_feature (1)..(145): Homolog of NCBI NO: 15225014 NR Description: similar to MtN3 protein
  misc_feature (1)..(175): Homolog of NCBI NO: 15240040 NR Description: senescence-associated protein (SAG29)
  misc_feature (1)..(152): Homolog of NCBI NO: 21593422 NR Description: senescence-associated protein (SAG29)
  misc_feature (1)..(148): Homolog of NCBI NO: 14715258 NR Description: N3 like protein [Medicago truncatula]
  misc_feature (1)..(115): Homolog of NCBI NO: 1619602 NR Description: MtN3 [Medicago truncatula]
  misc_feature (1)..(159): Homolog of NCBI NO: 15234863 NR Description: MtN3 - like protein; protein id: At4g25010.1
  misc_feature (1)..(146): Homolog of NCBI NO: 15241278 NR Description: MtN3-like protein
  misc_feature (1)..(146): Homolog of NCBI NO: 21593109 NR Description: MtN3-like protein [Arabidopsis thaliana]
  misc_feature (1)..(175): Homolog of NCBI NO: 15237803 NR Description: MtN3-like protein
  misc_feature (1)..(189): Homolog of NCBI NO: 15229019 NR Description: MTN3-like protein
MLTVKMLLLMNFGGFCAILLLCQFLVKGATRAKIIGGICVGFSVCVFAAPLSIIRTVIKTRSVEYMPFSLSLTLTISAVIWLLYGLALKDIYVAFPNVLGFALGALQMILYVVYKYCKTSPHLGEKEVEAAKLPEVSLDMLKLGTVSSPEPISVVRQANKCTCGNDRRAEIEDGQTPKHGKQSSSAAAT

SEQ ID NO: 41928 - DNA, 1339 bp, Arabidopsis thaliana
  misc_feature (1)..(1339): Ceres Seq. ID no. 13489605
  misc_feature: MA Experiment ID: 108463 Result: Down-regulated in Transcription
  misc_feature: MA Experiment 108463 PARAMETER Experiment Name: At_Germinating_Seeds_cDNA_P Parameter: Age (day) Value: 3 vs. 0
  misc_feature: MA Experiment 108463 PARAMETER Experiment Name: At_Germinating_Seeds_cDNA_P Parameter: Tissue Value: Germinating Seeds
  misc_feature: MA Experiment ID: 108464 Result: Down-regulated in Transcription
  misc_feature: MA Experiment 108464 PARAMETER Experiment Name: At_Germinating_Seeds_cDNA_P Parameter: Age (day) Value: 4 vs. 0
  misc_feature: MA Experiment 108464 PARAMETER Experiment Name: At_Germinating_Seeds_cDNA_P Parameter: Tissue Value: Germinating Seeds
  misc_feature: MA Experiment ID: 20000180 Result: Down-regulated in Transcription
  misc_feature: MA Experiment 20000180 PARAMETER Experiment Name: At_Germinating_Seeds_P Parameter: Age (hr) Value: 24 vs. 0
  misc_feature: MA Experiment 20000180 PARAMETER Experiment Name: At_Germinating_Seeds_P Parameter: Tissue Value: Germinating Seeds
gtctctttagcccccactggttcgtctctttcttcgatttctctttctatctggtttccattttcgtctcgttggtgttctggtgggtttggtttgtctctgttcttctatttgtggcgttatccatcggttcaattgtcatcttcatcgtttccgtcgtgttatttggtgtttctcgtttgggtctttcgaacatctttcattcttctctttttggtgttgctccccacgaacaggtagattgatgaaaagcaaccatggatgacctacatggaagcaatgctcgaatgcacattagagaagctcaagatccaatgcatgtgcaatttgaacatcatgctttgcatcacatccacaatggaagcggtatggttgatgaccaggctgatgatggcaatgctggtgggatgagtgagggtgtggaaacagacattccttctcaccctggaaatgtaactgacaatcgtggtgaagtggtcgaccgtggtagtgaacaaggagatcagttaacattgtcttttcagggccaagtctacgtttttgacagtgtcttgcctgagaaggttcaagctgtgcttctattattgggtggtcgtgaattacctcaggcagcccctcctggcctaggatcacctcatcagaacaacagagtatcgagtttacctggtactcctcaaaggtttagtattccgcagcgattagcttctttggtcagatttcgagagaaacggaaaggaaggaattttgataagaagattcggtatacagtccgcaaggaggtagctttgaggatgcaacgcaataaaggtcagttcacatctgccaagtcaaacaatgatgaagctgcatctgctggatctagctgggggtcgaatcaaacctgggccatagaaagtagtgaggctcagcatcaagagatctcatgtcggcactgtggaattggcgagaagtcaactccaatgatgcgacgtggacctgccgggccaagaacactttgcaatgcatgtggacttatgtgggcaaacaagggtgcttttagggacttatccaaagcctctcctcaaacagcccagaatcttcctttaaataagaatgaagatgcaaatcttgagactgatcatcaaataatgataacagtggccaatgacataagcaactcacagtgaggacatgttggctcttgccattacaagcaagagaaagatcccaacagagtttgaatcgcctcaggttctgtagctttatcattccctttgaaagaatctgactcgatttaggttatcaggatttgatctatgacaatgtaatctgagtgataatgatctgcaatgttttgctt

SEQ ID NO: 41929 - protein, 302 aa, Arabidopsis thaliana
  peptide (1)..(302): Ceres Seq. ID no. 13489606
  misc_feature (152)..(191): Pfam Name: CCT motif Pfam Description: CCT motif
  misc_feature (179)..(302): Homolog of NCBI NO: 26451385 NR Description: unknown protein [Arabidopsis thaliana]
  misc_feature (67)..(300): Homolog of NCBI NO: 15233844 NR Description: Zinc finger protein, Zim [Arabidopsis thaliana]
  misc_feature (67)..(300): Homolog of NCBI NO: 11358938 NR Description: zinc-finger protein - Arabidopsis thaliana
  misc_feature (40)..(271): Homolog of NCBI NO: 13174240 NR Description: putative zinc finger protein [Oryza sativa]
  misc_feature (1)..(302): Homolog of NCBI NO: 30686115 NR Description: GATA zinc finger protein [Arabidopsis thaliana]
  misc_feature (1)..(302): Homolog of NCBI NO: 18402914 NR Description: GATA zinc finger protein [Arabidopsis thaliana]
  misc_feature (1)..(302): Homolog of NCBI NO: 21537322 NR Description: flowering protein CONSTANS, putative [Arabidopsis
  misc_feature (1)..(302): Homolog of NCBI NO: 25405485 NR Description: hypothetical protein F19C24.17 [imported] -
  misc_feature (1)..(302): Homolog of NCBI NO: 15028099 NR Description: putative flowering protein CONSTANS [Arabidopsis
  misc_feature (1)..(302): Homolog of NCBI NO: 18403600 NR Description: zinc finger protein family [Arabidopsis thaliana]
MDDLHGSNARMHIREAQDPMHVQFEHHALHHIHNGSGMVDDQADDGNAGGMSEGVETDIPSHPGNVTDNRGEVVDRGSEQGDQLTLSFQGQVYVFDSVLPEKVQAVLLLLGGRELPQAAPPGLGSPHQNNRVSSLPGTPQRFSIPQRLASLVRFREKRKGRNFDKKIRYTVRKEVALRMQRNKGQFTSAKSNNDEAASAGSSWGSNQTWAIESSEAQHQEISCRHCGIGEKSTPMMRRGPAGPRTLCNACGLMWANKGAFRDLSKASPQTAQNLPLNKNEDANLETDHQIMITVANDISNSQ

SEQ ID NO: 41930 - protein, 292 aa, Arabidopsis thaliana
  peptide (1)..(292): Ceres Seq. ID no. 13489607
  misc_feature (142)..(181): Pfam Name: CCT motif Pfam Description: CCT motif
  misc_feature (169)..(292): Homolog of NCBI NO: 26451385 NR Description: unknown protein [Arabidopsis thaliana]
  misc_feature (57)..(290): Homolog of NCBI NO: 15233844 NR Description: Zinc finger protein, Zim [Arabidopsis thaliana]
  misc_feature (57)..(290): Homolog of NCBI NO: 11358938 NR Description: zinc-finger protein - Arabidopsis thaliana
  misc_feature (30)..(261): Homolog of NCBI NO: 13174240 NR Description: putative zinc finger protein [Oryza sativa]
  misc_feature (1)..(292): Homolog of NCBI NO: 30686115 NR Description: GATA zinc finger protein [Arabidopsis thaliana]
  misc_feature (1)..(292): Homolog of NCBI NO: 18402914 NR Description: GATA zinc finger protein [Arabidopsis thaliana]
  misc_feature (1)..(292): Homolog of NCBI NO: 21537322 NR Description: flowering protein CONSTANS, putative [Arabidopsis
  misc_feature (1)..(292): Homolog of NCBI NO: 25405485 NR Description: hypothetical protein F19C24.17 [imported] -
  misc_feature (1)..(292): Homolog of NCBI NO: 15028099 NR Description: putative flowering protein CONSTANS [Arabidopsis
  misc_feature (1)..(292): Homolog of NCBI NO: 18403600 NR Description: zinc finger protein family [Arabidopsis thaliana]
MHIREAQDPMHVQFEHHALHHIHNGSGMVDDQADDGNAGGMSEGVETDIPSHPGNVTDNRGEVVDRGSEQGDQLTLSFQGQVYVFDSVLPEKVQAVLLLLGGRELPQAAPPGLGSPHQNNRVSSLPGTPQRFSIPQRLASLVRFREKRKGRNFDKKIRYTVRKEVALRMQRNKGQFTSAKSNNDEAASAGSSWGSNQTWAIESSEAQHQEISCRHCGIGEKSTPMMRRGPAGPRTLCNACGLMWANKGAFRDLSKASPQTAQNLPLNKNEDANLETDHQIMITVANDISNSQ

SEQ ID NO: 41931 - protein, 283 aa, Arabidopsis thaliana
  peptide (1)..(283): Ceres Seq. ID no. 13489608
  misc_feature (133)..(172): Pfam Name: CCT motif Pfam Description: CCT motif
  misc_feature (160)..(283): Homolog of NCBI NO: 26451385 NR Description: unknown protein [Arabidopsis thaliana]
  misc_feature (48)..(281): Homolog of NCBI NO: 15233844 NR Description: Zinc finger protein, Zim [Arabidopsis thaliana]
  misc_feature (48)..(281): Homolog of NCBI NO: 11358938 NR Description: zinc-finger protein - Arabidopsis thaliana
  misc_feature (21)..(252): Homolog of NCBI NO: 13174240 NR Description: putative zinc finger protein [Oryza sativa]
  misc_feature (1)..(283): Homolog of NCBI NO: 30686115 NR Description: GATA zinc finger protein [Arabidopsis thaliana]
  misc_feature (1)..(283): Homolog of NCBI NO: 18402914 NR Description: GATA zinc finger protein [Arabidopsis thaliana]
  misc_feature (1)..(283): Homolog of NCBI NO: 21537322 NR Description: flowering protein CONSTANS, putative [Arabidopsis
  misc_feature (1)..(283): Homolog of NCBI NO: 25405485 NR Description: hypothetical protein F19C24.17 [imported] -
  misc_feature (1)..(283): Homolog of NCBI NO: 15028099 NR Description: putative flowering protein CONSTANS [Arabidopsis
  misc_feature (1)..(283): Homolog of NCBI NO: 18403600 NR Description: zinc finger protein family [Arabidopsis thaliana]
MHVQFEHHALHHIHNGSGMVDDQADDGNAGGMSEGVETDIPSHPGNVTDNRGEVVDRGSEQGDQLTLSFQGQVYVFDSVLPEKVQAVLLLLGGRELPQAAPPGLGSPHQNNRVSSLPGTPQRFSIPQRLASLVRFREKRKGRNFDKKIRYTVRKEVALRMQRNKGQFTSAKSNNDEAASAGSSWGSNQTWAIESSEAQHQEISCRHCGIGEKSTPMMRRGPAGPRTLCNACGLMWANKGAFRDLSKASPQTAQNLPLNKNEDANLETDHQIMITVANDISNSQ

SEQ ID NO: 41932 - DNA, 1138 bp, Arabidopsis thaliana
  misc_feature (1)..(1138): Ceres Seq. ID no. 13488750
  misc_feature: MA Experiment ID: 108434 Result: Down-regulated in Transcription
  misc_feature: MA Experiment 108434 PARAMETER Experiment Name: At_Root_Tips_cDNA_P Parameter: Tissue Value: Root Tips
  misc_feature: MA Experiment ID: 108462 Result: Down-regulated in Transcription
  misc_feature: MA Experiment 108462 PARAMETER Experiment Name: At_Germinating_Seeds_cDNA_P Parameter: Age (day) Value: 2 vs. 0
  misc_feature: MA Experiment 108462 PARAMETER Experiment Name: At_Germinating_Seeds_cDNA_P Parameter: Tissue Value: Germinating Seeds
  misc_feature: MA Experiment ID: 108463 Result: Down-regulated in Transcription
  misc_feature: MA Experiment 108463 PARAMETER Experiment Name: At_Germinating_Seeds_cDNA_P Parameter: Age (day) Value: 3 vs. 0
  misc_feature: MA Experiment 108463 PARAMETER Experiment Name: At_Germinating_Seeds_cDNA_P Parameter: Tissue Value: Germinating Seeds
  misc_feature: MA Experiment ID: 108464 Result: Down-regulated in Transcription
  misc_feature: MA Experiment 108464 PARAMETER Experiment Name: At_Germinating_Seeds_cDNA_P Parameter: Age (day) Value: 4 vs. 0
  misc_feature: MA Experiment 108464 PARAMETER Experiment Name: At_Germinating_Seeds_cDNA_P Parameter: Tissue Value: Germinating Seeds
  misc_feature: MA Experiment ID: 108573 Result: Up-regulated in Transcription
  misc_feature: MA Experiment 108573 PARAMETER Experiment Name: At_Drought_cDNA_P Parameter: Timepoint (hr) Value: 6
  misc_feature: MA Experiment 108573 PARAMETER Experiment Name: At_Drought_cDNA_P Parameter: Tissue Value: Aerial
  misc_feature: MA Experiment 108573 PARAMETER Experiment Name: At_Drought_cDNA_P Parameter: Treatment Value: Drought vs. No Drought
  misc_feature: MA Experiment ID: 108594 Result: Up-regulated in Transcription
  misc_feature: MA Experiment 108594 PARAMETER Experiment Name: At_Ler-rhl_Root_cDNA_P Parameter: Plant Line Value: null
  misc_feature: MA Experiment ID: 20000111 Result: Up-regulated in Transcription
  misc_feature: MA Experiment 20000111 PARAMETER Experiment Name: At_42deg_Heat_cDNA_P Parameter: Temperature (deg C) Value: 42 vs. 22
  misc_feature: MA Experiment 20000111 PARAMETER Experiment Name: At_42deg_Heat_cDNA_P Parameter: Timepoint (hr) Value: 6
  misc_feature: MA Experiment 20000111 PARAMETER Experiment Name: At_42deg_Heat_cDNA_P Parameter: Tissue Value: Aerial
  misc_feature: MA Experiment ID: 20000113 Result: Up-regulated in Transcription
  misc_feature: MA Experiment 20000113 PARAMETER Experiment Name: At_42deg_Heat_cDNA_P Parameter: Temperature (deg C) Value: 42 vs. 22
  misc_feature: MA Experiment 20000113 PARAMETER Experiment Name: At_42deg_Heat_cDNA_P Parameter: Timepoint (hr) Value: 8
  misc_feature: MA Experiment 20000113 PARAMETER Experiment Name: At_42deg_Heat_cDNA_P Parameter: Tissue Value: Aerial
  misc_feature: MA Experiment ID: 20000173 Result: Up-regulated in Transcription
  misc_feature: MA Experiment 20000173 PARAMETER Experiment Name: At_42deg_Heat_P Parameter: Age (day) Value: 14
  misc_feature: MA Experiment 20000173 PARAMETER Experiment Name: At_42deg_Heat_P Parameter: Organism Value: A. thaliana
  misc_feature: MA Experiment 20000173 PARAMETER Experiment Name: At_42deg_Heat_P Parameter: Plant Line Value: WS
  misc_feature: MA Experiment 20000173 PARAMETER Experiment Name: At_42deg_Heat_P Parameter: Temperature (deg C) Value: 42 vs. 22
  misc_feature: MA Experiment 20000173 PARAMETER Experiment Name: At_42deg_Heat_P Parameter: Timepoint (hr) Value: 6
  misc_feature: MA Experiment 20000173 PARAMETER Experiment Name: At_42deg_Heat_P Parameter: Tissue Value: Aerial
  misc_feature: MA Experiment ID: 20000184 Result: Down-regulated in Transcription
  misc_feature: MA Experiment 20000184 PARAMETER Experiment Name: At_Shoots__P Parameter: Age (day) Value: 7
  misc_feature: MA Experiment 20000184 PARAMETER Experiment Name: At_Shoots__P Parameter: Tissue Value: Shoots vs. Whole Plant
  misc_feature: MA Experiment ID: 20000235 Result: Up-regulated in Transcription
  misc_feature: MA Experiment 20000235 PARAMETER Experiment Name: At_Siliques_P Parameter: Age (day) Value: 21
  misc_feature: MA Experiment 20000235 PARAMETER Experiment Name: At_Siliques_P Parameter: Organism Value: A. thaliana
  misc_feature: MA Experiment 20000235 PARAMETER Experiment Name: At_Siliques_P Parameter: Plant Line Value: WS
  misc_feature: MA Experiment 20000235 PARAMETER Experiment Name: At_Siliques_P Parameter: Tissue Value: 5-10mm Siliques vs. Whole Plant
  misc_feature: MA Experiment ID: 20000437 Result: Up-regulated in Transcription
  misc_feature: MA Experiment 20000437 PARAMETER Experiment Name: At_Drought_P Parameter: Age (day) Value: 8
  misc_feature: MA Experiment 20000437 PARAMETER Experiment Name: At_Drought_P Parameter: Organism Value: A. thaliana
  misc_feature: MA Experiment 20000437 PARAMETER Experiment Name: At_Drought_P Parameter: Plant Line Value: WS
  misc_feature: MA Experiment 20000437 PARAMETER Experiment Name: At_Drought_P Parameter: Timepoint (hr) Value: 24
  misc_feature: MA Experiment 20000437 PARAMETER Experiment Name: At_Drought_P Parameter: Tissue Value: Whole Plant
  misc_feature: MA Experiment 20000437 PARAMETER Experiment Name: At_Drought_P Parameter: Treatment Value: Drought vs. No Drought
  misc_feature: MA Experiment ID: 20000496 Result: Up-regulated in Transcription
  misc_feature: MA Experiment 20000496 PARAMETER Experiment Name: At_Guard_Cells_P Parameter: Harvest Date Value: 7/19/2002
  misc_feature: MA Experiment 20000496 PARAMETER Experiment Name: At_Guard_Cells_P Parameter: Organism Value: Canola
  misc_feature: MA Experiment 20000496 PARAMETER Experiment Name: At_Guard_Cells_P Parameter: Tissue Value: Guard Cells vs. Leaves
  misc_feature: MA Experiment ID: 20000794 Result: Up-regulated in Transcription
  misc_feature: MA Experiment 20000794 PARAMETER Experiment Name: At_Petals_P Parameter: Age (day) Value: 23-25 days
  misc_feature: MA Experiment 20000794 PARAMETER Experiment Name: At_Petals_P Parameter: Plant Line Value: WS
  misc_feature: MA Experiment 20000794 PARAMETER Experiment Name: At_Petals_P Parameter: Tissue Value: Petals vs. Whole plant
  misc_feature: MA Experiment ID: 20001556 Result: Down-regulated in Transcription
  misc_feature: MA Experiment 20001556 PARAMETER Experiment Name: At_Drought_Soil_Dry_P Parameter: Age (day) Value: 26
  misc_feature: MA Experiment 20001556 PARAMETER Experiment Name: At_Drought_Soil_Dry_P Parameter: Organism Value: A. thaliana
  misc_feature: MA Experiment 20001556 PARAMETER Experiment Name: At_Drought_Soil_Dry_P Parameter: Plant Line Value: WS
  misc_feature: MA Experiment 20001556 PARAMETER Experiment Name: At_Drought_Soil_Dry_P Parameter: Post Timepoint (hr) Value: None
  misc_feature: MA Experiment 20001556 PARAMETER Experiment Name: At_Drought_Soil_Dry_P Parameter: Post-Treatment Value: None
  misc_feature: MA Experiment 20001556 PARAMETER Experiment Name: At_Drought_Soil_Dry_P Parameter: Timepoint (day) Value: 12
  misc_feature: MA Experiment 20001556 PARAMETER Experiment Name: At_Drought_Soil_Dry_P Parameter: Treatment Value: Drought vs. No Drought
  misc_feature: MA Experiment ID: 20001557 Result: Down-regulated in Transcription
  misc_feature: MA Experiment 20001557 PARAMETER Experiment Name: At_Drought_Soil_Dry_P Parameter: Age (day) Value: 27
  misc_feature: MA Experiment 20001557 PARAMETER Experiment Name: At_Drought_Soil_Dry_P Parameter: Organism Value: A. thaliana
  misc_feature: MA Experiment 20001557 PARAMETER Experiment Name: At_Drought_Soil_Dry_P Parameter: Plant Line Value: WS
  misc_feature: MA Experiment 20001557 PARAMETER Experiment Name: At_Drought_Soil_Dry_P Parameter: Post Timepoint (hr) Value: 3
  misc_feature: MA Experiment 20001557 PARAMETER Experiment Name: At_Drought_Soil_Dry_P Parameter: Post-Treatment Value: Re-Water vs. No Drought
  misc_feature: MA Experiment 20001557 PARAMETER Experiment Name: At_Drought_Soil_Dry_P Parameter: Timepoint (day) Value: 13
  misc_feature: MA Experiment 20001557 PARAMETER Experiment Name: At_Drought_Soil_Dry_P Parameter: Treatment Value: Drought vs. No Drought
  misc_feature: MA Experiment ID: 20001560 Result: Down-regulated in Transcription
  misc_feature: MA Experiment 20001560 PARAMETER Experiment Name: At_Drought_Soil_Dry_P Parameter: Age (day) Value: 28
  misc_feature: MA Experiment 20001560 PARAMETER Experiment Name: At_Drought_Soil_Dry_P Parameter: Organism Value: A. thaliana
  misc_feature: MA Experiment 20001560 PARAMETER Experiment Name: At_Drought_Soil_Dry_P Parameter: Plant Line Value: WS
  misc_feature: MA Experiment 20001560 PARAMETER Experiment Name: At_Drought_Soil_Dry_P Parameter: Post Timepoint (hr) Value: None
  misc_feature: MA Experiment 20001560 PARAMETER Experiment Name: At_Drought_Soil_Dry_P Parameter: Post-Treatment Value: None
  misc_feature: MA Experiment 20001560 PARAMETER Experiment Name: At_Drought_Soil_Dry_P Parameter: Timepoint (day) Value: 14
  misc_feature: MA Experiment 20001560 PARAMETER Experiment Name: At_Drought_Soil_Dry_P Parameter: Treatment Value: Drought vs. No Drought
tctacaagtttttgatttcagagtccaccgttgagcctgttcaattaaatcgttgaatctcgcggtgcgttttactttgattctttcgaattttttttatatggatgttgccgcgatggcgagatgtgtgggaaggtgctacgtttcgccggcgttcggtgagtctgaatcgcaccggttatcggagcggcggtttctgaaattgtctagctccacgaattcggatcccgccggtagtaaaagtttgaagcttcgcgggaaaattcatcggagaatgagctacttccgtccgatcatggcaaaagatgaatccatttcatcgcggtccggtgaaacgaagcaaatcaatggaaagcaaaagaacattgtctggcatgattgtcccgttactaaatccgacaggcaagaattaattaagcaaaagggatgtgtgatttggattactggcttaagtggttcaggtaaaagtagtctggcatgtgctcttagtcgagctttgcacaatcgtggaaagctttcgtatatacttgatggtgacaatgttcgacatggtttaaacagcgatcttagtttcgaagcagatgatcgagctgaaaacattcgaagagttggtgaagtggctaaactgtttgcagattctggtattatctgtattgcaagtttaatatctccttaccggatagaacgagctgcctgccgtgcattattaccacaaggagatttcattgaggtatttatggatgtgccactccatgtttgtgaagctagagatccaaagggcttatacaaacgtgcacgcgctggtaaaatcaaaggttttacaggagtagatgatccatatgaagcgcctttggattgcgagattgtgatacaaaacagtagagacaaggggctttcttcttcatcttcatcttcatcttcaccttcatcttcgtcttcttctctgtgtgaaatggcagatattgttgtgtcgtacttggaccaaaatggatacctgaagaaacactccacaaaatcacgtaattgtatgtaaatgtaatattaatatcattgttgtaacgtttcttaaacctattttacctatggacgattaaattgtgaaaacataaatgtaattcacaatctgcaaagagttggc

SEQ ID NO: 41933 - protein, 310 aa, Arabidopsis thaliana
  peptide (1)..(310): Ceres Seq. ID no. 13488751
  misc_feature (108)..(264): Pfam Name: Adenylylsulphate kinase Pfam Description: Adenylylsulphate kinase
  misc_feature (45)..(258): Homolog of NCBI NO: 6563285 NR Description: adenosine-5'-phosphosulfate kinase [Zea mays]
  misc_feature (84)..(300): Homolog of NCBI NO: 15228666 NR Description: adenylylsulfate kinase -related [Arabidopsis
  misc_feature (85)..(299): Homolog of NCBI NO: 34393551 NR Description: putative adenosine-5'-phosphosulfate kinase
  misc_feature (3)..(266): Homolog of NCBI NO: 21553403 NR Description: putative adenosine phosphosulfate kinase
  misc_feature (3)..(266): Homolog of NCBI NO: 15225999 NR Description: adenosine phosphosulfate kinase -related
  misc_feature (13)..(300): Homolog of NCBI NO: 15236087 NR Description: adenosine-5-phosphosulfate-kinase [Arabidopsis
  misc_feature (45)..(300): Homolog of NCBI NO: 7387809 NR Description: Adenylylsulfate kinase, chloroplast precursor kinase) (Adenosine-5'phosphosulfate kinase) (ATP
  misc_feature (6)..(310): Homolog of NCBI NO: 9757873 NR Description: adenylylsulfate kinase-like protein [Arabidopsis
  misc_feature (6)..(310): Homolog of NCBI NO: 21537248 NR Description: adenylylsulfate kinase-like protein [Arabidopsis
  misc_feature (1)..(310): Homolog of NCBI NO: 18425199 NR Description: adenylylsulfate kinase-related protein
MDVAAMARCVGRCYVSPAFGESESHRLSERRFLKLSSSTNSDPAGSKSLKLRGKIHRRMSYFRPIMAKDESISSRSGETKQINGKQKNIVWHDCPVTKSDRQELIKQKGCVIWITGLSGSGKSSLACALSRALHNRGKLSYILDGDNVRHGLNSDLSFEADDRAENIRRVGEVAKLFADSGIICIASLISPYRIERAACRALLPQGDFIEVFMDVPLHVCEARDPKGLYKRARAGKIKGFTGVDDPYEAPLDCEIVIQNSRDKGLSSSSSSSSSPSSSSSSLCEMADIVVSYLDQNGYLKKHSTKSRNCM

SEQ ID NO: 41934 - protein, 305 aa, Arabidopsis thaliana
  peptide (1)..(305): Ceres Seq. ID no. 13488752
  misc_feature (103)..(259): Pfam Name: Adenylylsulphate kinase Pfam Description: Adenylylsulphate kinase
  misc_feature (40)..(253): Homolog of NCBI NO: 6563285 NR Description: adenosine-5'-phosphosulfate kinase [Zea mays]
  misc_feature (79)..(295): Homolog of NCBI NO: 15228666 NR Description: adenylylsulfate kinase -related [Arabidopsis
  misc_feature (80)..(294): Homolog of NCBI NO: 34393551 NR Description: putative adenosine-5'-phosphosulfate kinase
  misc_feature (1)..(261): Homolog of NCBI NO: 21553403 NR Description: putative adenosine phosphosulfate kinase
  misc_feature (1)..(261): Homolog of NCBI NO: 15225999 NR Description: adenosine phosphosulfate kinase -related
  misc_feature (8)..(295): Homolog of NCBI NO: 15236087 NR Description: adenosine-5-phosphosulfate-kinase [Arabidopsis
  misc_feature (40)..(295): Homolog of NCBI NO: 7387809 NR Description: Adenylylsulfate kinase, chloroplast precursor kinase) (Adenosine-5'phosphosulfate kinase) (ATP
  misc_feature (1)..(305): Homolog of NCBI NO: 9757873 NR Description: adenylylsulfate kinase-like protein [Arabidopsis
  misc_feature (1)..(305): Homolog of NCBI NO: 21537248 NR Description: adenylylsulfate kinase-like protein [Arabidopsis
  misc_feature (1)..(305): Homolog of NCBI NO: 18425199 NR Description: adenylylsulfate kinase-related protein
MARCVGRCYVSPAFGESESHRLSERRFLKLSSSTNSDPAGSKSLKLRGKIHRRMSYFRPIMAKDESISSRSGETKQINGKQKNIVWHDCPVTKSDRQELIKQKGCVIWITGLSGSGKSSLACALSRALHNRGKLSYILDGDNVRHGLNSDLSFEADDRAENIRRVGEVAKLFADSGIICIASLISPYRIERAACRALLPQGDFIEVFMDVPLHVCEARDPKGLYKRARAGKIKGFTGVDDPYEAPLDCEIVIQNSRDKGLSSSSSSSSSPSSSSSSLCEMADIVVSYLDQNGYLKKHSTKSRNCM

SEQ ID NO: 41935 - protein, 252 aa, Arabidopsis thaliana
  peptide (1)..(252): Ceres Seq. ID no. 13488753
  misc_feature (50)..(206): Pfam Name: Adenylylsulphate kinase Pfam Description: Adenylylsulphate kinase
  misc_feature (1)..(200): Homolog of NCBI NO: 6563285 NR Description: adenosine-5'-phosphosulfate kinase [Zea mays]
  misc_feature (26)..(242): Homolog of NCBI NO: 15228666 NR Description: adenylylsulfate kinase -related [Arabidopsis
  misc_feature (27)..(241): Homolog of NCBI NO: 34393551 NR Description: putative adenosine-5'-phosphosulfate kinase
  misc_feature (1)..(208): Homolog of NCBI NO: 21553403 NR Description: putative adenosine phosphosulfate kinase
  misc_feature (1)..(208): Homolog of NCBI NO: 15225999 NR Description: adenosine phosphosulfate kinase -related
  misc_feature (1)..(242): Homolog of NCBI NO: 15236087 NR Description: adenosine-5-phosphosulfate-kinase [Arabidopsis
  misc_feature (1)..(242): Homolog of NCBI NO: 7387809 NR Description: Adenylylsulfate kinase, chloroplast precursor kinase) (Adenosine-5'phosphosulfate kinase) (ATP
  misc_feature (1)..(252): Homolog of NCBI NO: 9757873 NR Description: adenylylsulfate kinase-like protein [Arabidopsis
  misc_feature (1)..(252): Homolog of NCBI NO: 21537248 NR Description: adenylylsulfate kinase-like protein [Arabidopsis
  misc_feature (1)..(252): Homolog of NCBI NO: 18425199 NR Description: adenylylsulfate kinase-related protein
MSYFRPIMAKDESISSRSGETKQINGKQKNIVWHDCPVTKSDRQELIKQKGCVIWITGLSGSGKSSLACALSRALHNRGKLSYILDGDNVRHGLNSDLSFEADDRAENIRRVGEVAKLFADSGIICIASLISPYRIERAACRALLPQGDFIEVFMDVPLHVCEARDPKGLYKRARAGKIKGFTGVDDPYEAPLDCEIVIQNSRDKGLSSSSSSSSSPSSSSSSLCEMADIVVSYLDQNGYLKKHSTKSRNCM

SEQ ID NO: 41936 - DNA, 1497 bp, Arabidopsis thaliana
  misc_feature (1)..(1497): Ceres Seq. ID no. 12328238
  misc_feature: MA Experiment ID: 108462 Result: Down-regulated in Transcription
  misc_feature: MA Experiment 108462 PARAMETER Experiment Name: At_Germinating_Seeds_cDNA_P Parameter: Age (day) Value: 2 vs. 0
  misc_feature: MA Experiment 108462 PARAMETER Experiment Name: At_Germinating_Seeds_cDNA_P Parameter: Tissue Value: Germinating Seeds
  misc_feature: MA Experiment ID: 108463 Result: Down-regulated in Transcription
  misc_feature: MA Experiment 108463 PARAMETER Experiment Name: At_Germinating_Seeds_cDNA_P Parameter: Age (day) Value: 3 vs. 0
  misc_feature: MA Experiment 108463 PARAMETER Experiment Name: At_Germinating_Seeds_cDNA_P Parameter: Tissue Value: Germinating Seeds
  misc_feature: MA Experiment ID: 108464 Result: Down-regulated in Transcription
  misc_feature: MA Experiment 108464 PARAMETER Experiment Name: At_Germinating_Seeds_cDNA_P Parameter: Age (day) Value: 4 vs. 0
  misc_feature: MA Experiment 108464 PARAMETER Experiment Name: At_Germinating_Seeds_cDNA_P Parameter: Tissue Value: Germinating Seeds
  misc_feature: MA Experiment ID: 108573 Result: Up-regulated in Transcription
  misc_feature: MA Experiment 108573 PARAMETER Experiment Name: At_Drought_cDNA_P Parameter: Timepoint (hr) Value: 6
  misc_feature: MA Experiment 108573 PARAMETER Experiment Name: At_Drought_cDNA_P Parameter: Tissue Value: Aerial
  misc_feature: MA Experiment 108573 PARAMETER Experiment Name: At_Drought_cDNA_P Parameter: Treatment Value: Drought vs. No Drought
  misc_feature: MA Experiment ID: 20000224 Result: Up-regulated in Transcription
gattgtctctctcccggagatctctctttctcttcttctccatccttcttctctcggcgcgcgcttcatccccaccaccttcgaattcgtgccctttgagggaagctgctaggatgggtgtgaagcaggctctaaggagcattgatgcgtttccaagagcagaggatcatttgcttcagaagacacaatctggcgctgttgtatctattgttggacttcttataatggctactttgttcttacacgagctgagttattatcttaacacacttacagtgcaccagatgtcagtggacttaaagcgtggagaaactcttccaattcatgtaaatatgacgtttccatctttaccttgtgatgtactgagcgtagatgctatcgacatgtcagggaagcatgaagtggatcttgatacaaacatttggaagctccgtctcaacagtcatggtcatatcataggcacagaatatatatctgatcttgttgaaaaggggcatgagcatggccactcacctcacaagcatgatggcaaagaagaacacaagaatgagactgaaaccgaagcattgaatattcttggctttgaccaagctgctgagactatgattaaaaaagtgaagcaagcattggcagatggagaaggatgtcgggtttatggtgtcctagatgtacaacgggttgccggaaacttccatatttcagttcatgggctgaacatctatgttgctcagatgatatttggcgggtccaaaaacgtaaacgtgagccatatgattcacgatctatcatttgggccgaaataccccggaattcacaacccacttgatgacaccaaccgaatactccatgacaccagtggaacattcaaatactatattaagattgttcccacagaatatagatatctttcaaaagacgtactgtcaacaaatcagtactctgtaactgaatatttcacgccaatgactgaattcgaccgtacatggccagctgtttacttcttatatgatctttcacctatcactgtgaccatcaaggaagaacgccgtagttttctccacttaatcactcgtctttgcgctgtattaggcggtacatttgctttgacaggaatgttagatcgttggatgttccgctttattgaatctttcaacaagaagccgagtactagagcgtaaactagctgaaacagagacaaaacaatgagaaacaaaaaaaaccaaaggaaggaagaagaatctctcaaatcccaaaacttgtatctgccttcttcagacaacaacacccaccagagattccaggattgatgattacattactcagaaactctagaatccatggatatagtttttttttgagtctctcttatgtattactctgattatctctggttaaactagtagagttaatttgtaatttttattcaccttgcttcctgggattttaacatttttgcatcttttcacttgtctcagtaaaaaaacaaaattatactgt

SEQ ID NO: 41937 - protein, 391 aa, Arabidopsis thaliana
  peptide (1)..(391): Ceres Seq. ID no. 12328239
  misc_feature (195)..(364): Homolog of NCBI NO: 6598578 NR Description: F5J5.4 [Arabidopsis thaliana]
  misc_feature (39)..(184): Homolog of NCBI NO: 30693281 NR Description: expressed protein [Arabidopsis thaliana]
  misc_feature (195)..(386): Homolog of NCBI NO: 30693281 NR Description: expressed protein [Arabidopsis thaliana]
  misc_feature (38)..(184): Homolog of NCBI NO: 18395087 NR Description: expressed protein
  misc_feature (195)..(386): Homolog of NCBI NO: 18395087 NR Description: expressed protein
  misc_feature (39)..(184): Homolog of NCBI NO: 38347102 NR Description: OSJNBa0006M15.17 [Oryza sativa (japonica
  misc_feature (195)..(386): Homolog of NCBI NO: 38347102 NR Description: OSJNBa0006M15.17 [Oryza sativa (japonica
  misc_feature (38)..(391): Homolog of NCBI NO: 34897128 NR Description: unknown protein [Oryza sativa]
  misc_feature (38)..(370): Homolog of NCBI NO: 11036454 NR Description: gb|AAF34232.1~gene_id:MCB17.1~similar to unknown
  misc_feature (38)..(391): Homolog of NCBI NO: 30686584 NR Description: expressed protein [Arabidopsis thaliana]
LSLSRRSLFLFFSILLLSARASSPPPSNSCPLREAARMGVKQALRSIDAFPRAEDHLLQKTQSGAVVSIVGLLIMATLFLHELSYYLNTLTVHQMSVDLKRGETLPIHVNMTFPSLPCDVLSVDAIDMSGKHEVDLDTNIWKLRLNSHGHIIGTEYISDLVEKGHEHGHSPHKHDGKEEHKNETETEALNILGFDQAAETMIKKVKQALADGEGCRVYGVLDVQRVAGNFHISVHGLNIYVAQMIFGGSKNVNVSHMIHDLSFGPKYPGIHNPLDDTNRILHDTSGTFKYYIKIVPTEYRYLSKDVLSTNQYSVTEYFTPMTEFDRTWPAVYFLYDLSPITVTIKEERRSFLHLITRLCAVLGGTFALTGMLDRWMFRFIESFNKKPSTRA

SEQ ID NO: 41938 - protein, 354 aa, Arabidopsis thaliana
  peptide (1)..(354): Ceres Seq. ID no. 12328240
  misc_feature (158)..(327): Homolog of NCBI NO: 6598578 NR Description: F5J5.4 [Arabidopsis thaliana]
  misc_feature (2)..(147): Homolog of NCBI NO: 30693281 NR Description: expressed protein [Arabidopsis thaliana]
  misc_feature (158)..(349): Homolog of NCBI NO: 30693281 NR Description: expressed protein [Arabidopsis thaliana]
  misc_feature (1)..(147): Homolog of NCBI NO: 18395087 NR Description: expressed protein
  misc_feature (158)..(349): Homolog of NCBI NO: 18395087 NR Description: expressed protein
  misc_feature (2)..(147): Homolog of NCBI NO: 38347102 NR Description: OSJNBa0006M15.17 [Oryza sativa (japonica
  misc_feature (158)..(349): Homolog of NCBI NO: 38347102 NR Description: OSJNBa0006M15.17 [Oryza sativa (japonica
  misc_feature (1)..(354): Homolog of NCBI NO: 34897128 NR Description: unknown protein [Oryza sativa]
  misc_feature (1)..(333): Homolog of NCBI NO: 11036454 NR Description: gb|AAF34232.1~gene_id:MCB17.1~similar to unknown
  misc_feature (1)..(354): Homolog of NCBI NO: 30686584 NR Description: expressed protein [Arabidopsis thaliana]
MGVKQALRSIDAFPRAEDHLLQKTQSGAVVSIVGLLIMATLFLHELSYYLNTLTVHQMSVDLKRGETLPIHVNMTFPSLPCDVLSVDAIDMSGKHEVDLDTNIWKLRLNSHGHIIGTEYISDLVEKGHEHGHSPHKHDGKEEHKNETETEALNILGFDQAAETMIKKVKQALADGEGCRVYGVLDVQRVAGNFHISVHGLNIYVAQMIFGGSKNVNVSHMIHDLSFGPKYPGIHNPLDDTNRILHDTSGTFKYYIKIVPTEYRYLSKDVLSTNQYSVTEYFTPMTEFDRTWPAVYFLYDLSPITVTIKEERRSFLHLITRLCAVLGGTFALTGMLDRWMFRFIESFNKKPSTRA

SEQ ID NO: 41939 - protein, 317 aa, Arabidopsis thaliana
  peptide (1)..(317): Ceres Seq. ID no. 12328241
  misc_feature (121)..(290): Homolog of NCBI NO: 6598578 NR Description: F5J5.4 [Arabidopsis thaliana]
  misc_feature (1)..(110): Homolog of NCBI NO: 30693281 NR Description: expressed protein [Arabidopsis thaliana]
  misc_feature (121)..(312): Homolog of NCBI NO: 30693281 NR Description: expressed protein [Arabidopsis thaliana]
  misc_feature (1)..(110): Homolog of NCBI NO: 18395087 NR Description: expressed protein
  misc_feature (121)..(312): Homolog of NCBI NO: 18395087 NR Description: expressed protein
  misc_feature (1)..(110): Homolog of NCBI NO: 38347102 NR Description: OSJNBa0006M15.17 [Oryza sativa (japonica
  misc_feature (121)..(312): Homolog of NCBI NO: 38347102 NR Description: OSJNBa0006M15.17 [Oryza sativa (japonica
  misc_feature (1)..(317): Homolog of NCBI NO: 34897128 NR Description: unknown protein [Oryza sativa]
  misc_feature (1)..(296): Homolog of NCBI NO: 11036454 NR Description: gb|AAF34232.1~gene_id:MCB17.1~similar to unknown
  misc_feature (1)..(317): Homolog of NCBI NO: 30686584 NR Description: expressed protein [Arabidopsis thaliana]
MATLFLHELSYYLNTLTVHQMSVDLKRGETLPIHVNMTFPSLPCDVLSVDAIDMSGKHEVDLDTNIWKLRLNSHGHIIGTEYISDLVEKGHEHGHSPHKHDGKEEHKNETETEALNILGFDQAAETMIKKVKQALADGEGCRVYGVLDVQRVAGNFHISVHGLNIYVAQMIFGGSKNVNVSHMIHDLSFGPKYPGIHNPLDDTNRILHDTSGTFKYYIKIVPTEYRYLSKDVLSTNQYSVTEYFTPMTEFDRTWPAVYFLYDLSPITVTIKEERRSFLHLITRLCAVLGGTFALTGMLDRWMFRFIESFNKKPSTRA

SEQ ID NO: 41940 - DNA, 1124 bp, Arabidopsis thaliana
  misc_feature (1)..(1124): Ceres Seq. ID no. 12323982
  misc_feature: MA Experiment ID: 20001247 Result: Up-regulated in Transcription
  misc_feature: MA Experiment 20001247 PARAMETER Experiment Name: At_Far-red-induction_P Parameter: Age (day) Value: 7
  misc_feature: MA Experiment 20001247 PARAMETER Experiment Name: At_Far-red-induction_P Parameter: Light Value: Far-red vs. White
  misc_feature: MA Experiment 20001247 PARAMETER Experiment Name: At_Far-red-induction_P Parameter: Organism Value: A. thaliana
  misc_feature: MA Experiment 20001247 PARAMETER Experiment Name: At_Far-red-induction_P Parameter: Plant Line Value: Columbia
  misc_feature: MA Experiment 20001247 PARAMETER Experiment Name: At_Far-red-induction_P Parameter: Timepoint (hr) Value: 1
  misc_feature: MA Experiment 20001247 PARAMETER Experiment Name: At_Far-red-induction_P Parameter: Tissue Value: Whole Plant
  misc_feature: MA Experiment ID: 20001248 Result: Up-regulated in Transcription
  misc_feature: MA Experiment 20001248 PARAMETER Experiment Name: At_Far-red-induction_P Parameter: Age (day) Value: 7
  misc_feature: MA Experiment 20001248 PARAMETER Experiment Name: At_Far-red-induction_P Parameter: Light Value: Far-red vs. White
  misc_feature: MA Experiment 20001248 PARAMETER Experiment Name: At_Far-red-induction_P Parameter: Organism Value: A. thaliana
  misc_feature: MA Experiment 20001248 PARAMETER Experiment Name: At_Far-red-induction_P Parameter: Plant Line Value: Columbia
  misc_feature: MA Experiment 20001248 PARAMETER Experiment Name: At_Far-red-induction_P Parameter: Timepoint (hr) Value: 4
  misc_feature: MA Experiment 20001248 PARAMETER Experiment Name: At_Far-red-induction_P Parameter: Tissue Value: Whole Plant
  misc_feature: MA Experiment ID: 20001450 Result: Up-regulated in Transcription
  misc_feature: MA Experiment 20001450 PARAMETER Experiment Name: At_Far-red-induction_P Parameter: Age (day) Value: 7
  misc_feature: MA Experiment 20001450 PARAMETER Experiment Name: At_Far-red-induction_P Parameter: Light Value: Far-red vs. White
  misc_feature: MA Experiment 20001450 PARAMETER Experiment Name: At_Far-red-induction_P Parameter: Organism Value: A. thaliana
  misc_feature: MA Experiment 20001450 PARAMETER Experiment Name: At_Far-red-induction_P Parameter: Plant Line Value: Columbia
  misc_feature: MA Experiment 20001450 PARAMETER Experiment Name: At_Far-red-induction_P Parameter: Timepoint (hr) Value: 8
  misc_feature: MA Experiment 20001450 PARAMETER Experiment Name: At_Far-red-induction_P Parameter: Tissue Value: Whole Plant
agcatcttctctctttttctcccccaattctctcaagagaatctctaagcttttgttcttcttacaaatcatgtacttataataaacccaagaaagaagaagaagaaaaacaaaaccaatcccaagctgtgatggcgaaacagagttacttcttcgtcttcaccttcttgtttctttctcttctctcatactgttcttcaacaactacacatcatgatgtgttaaacccaccaacggtctttcctacaaaccccacaactacaccgacggctacatttcctccggtgaccataacgccaacaaatccagccacaacagttcctattgttcctccagtcacaactattccacctcctacactcacaccacctccagtcataacaattcctcctcctacactcacaccacctgtgacaaacccagtaaccaacccagtgactcagtatcctccaacacaaccctcagggacggtcccagtacctgttcctgtggttgcaccgcctgttgtctcaaactctccatcggtttcaggccaaagctggtgtgtggccaagcctggagcctctcaagtctcactccaacaggctcttgactatgcctgcgggatcgcggattgctctcaactacagcaaggcggcaattgttattctcctatcagtcttcagagtcatgcctcatttgccttcaacagctattaccagaagaatccttctccacaaagctgtgattttggcggtgcagcctcattagttaacaccaacccaagcactggttcttgtatataccagacaggttcatcgacatcaacaccaatgacagcaggaacaacaacaccaactccatcaacacaaacagtgaaccagcctcctgtcacatcaacacctataataccaacaggaggcgggataatcggggttggaactccgccagcgatttttaaccccgcaaatcctacatcaaatacgctaaacaatccatcctcaggaggtttagcgggtggttacggttttgatggttcgccaaatgagaacaatccaacatcatcagactctacacacttgaagattcactttggtcatgctatggtggcaacattgattcttcacgcagtgctatttcattag

SEQ ID NO: 41941 - protein, 373 aa, Arabidopsis thaliana
  peptide (1)..(373): Ceres Seq. ID no. 12323983
  misc_feature (52)..(195): Pfam Name: Mucin-like glycoprotein Pfam Description: Mucin-like glycoprotein
  misc_feature (176)..(258): Homolog of NCBI NO: 15218919 NR Description: beta-1,3 glucanase, putative; protein id:
  misc_feature (176)..(349): Homolog of NCBI NO: 25404810 NR Description: unknown protein, 45065-49536 [imported] -
  misc_feature (176)..(354): Homolog of NCBI NO: 21553768 NR Description: unknown [Arabidopsis thaliana]
  misc_feature (176)..(354): Homolog of NCBI NO: 18409239 NR Description: unknown protein
  misc_feature (70)..(260): Homolog of NCBI NO: 37533178 NR Description: hypothetical protein [Oryza sativa (japonica
  misc_feature (75)..(255): Homolog of NCBI NO: 15219387 NR Description: hypothetical protein; protein id: At1g79480.1
  misc_feature (126)..(332): Homolog of NCBI NO: 34912962 NR Description: beta-1,3 glucanase-like protein
  misc_feature (75)..(350): Homolog of NCBI NO: 40714691 NR Description: putative glucanase [Oryza sativa (japonica
  misc_feature (44)..(255): Homolog of NCBI NO: 25402549 NR Description: hypothetical protein [imported] - Arabidopsis
  misc_feature (44)..(373): Homolog of NCBI NO: 22329437 NR Description: unknown protein; protein id: At1g09460.1
HLLSFSPPILSRESLSFCSSYKSCTYNKPKKEEEEKQNQSQAVMAKQSYFFVFTFLFLSLLSYCSSTTTHHDVLNPPTVFPTNPTTTPTATFPPVTITPTNPATTVPIVPPVTTIPPPTLTPPPVITIPPPTLTPPVTNPVTNPVTQYPPTQPSGTVPVPVPVVAPPVVSNSPSVSGQSWCVAKPGASQVSLQQALDYACGIADCSQLQQGGNCYSPISLQSHASFAFNSYYQKNPSPQSCDFGGAASLVNTNPSTGSCIYQTGSSTSTPMTAGTTTPTPSTQTVNQPPVTSTPIIPTGGGIIGVGTPPAIFNPANPTSNTLNNPSSGGLAGGYGFDGSPNENNPTSSDSTHLKIHFGHAMVATLILHAVLFH

SEQ ID NO: 41942 - protein, 330 aa, Arabidopsis thaliana
  peptide (1)..(330): Ceres Seq. ID no. 12323984
  misc_feature (9)..(152): Pfam Name: Mucin-like glycoprotein Pfam Description: Mucin-like glycoprotein
  misc_feature (133)..(215): Homolog of NCBI NO: 15218919 NR Description: beta-1,3 glucanase, putative; protein id:
  misc_feature (133)..(306): Homolog of NCBI NO: 25404810 NR Description: unknown protein, 45065-49536 [imported] -
  misc_feature (133)..(311): Homolog of NCBI NO: 21553768 NR Description: unknown [Arabidopsis thaliana]
  misc_feature (133)..(311): Homolog of NCBI NO: 18409239 NR Description: unknown protein
  misc_feature (27)..(217): Homolog of NCBI NO: 37533178 NR Description: hypothetical protein [Oryza sativa (japonica
  misc_feature (32)..(212): Homolog of NCBI NO: 15219387 NR Description: hypothetical protein; protein id: At1g79480.1
  misc_feature (83)..(289): Homolog of NCBI NO: 34912962 NR Description: beta-1,3 glucanase-like protein
  misc_feature (32)..(307): Homolog of NCBI NO: 40714691 NR Description: putative glucanase [Oryza sativa (japonica
  misc_feature (1)..(212): Homolog of NCBI NO: 25402549 NR Description: hypothetical protein [imported] - Arabidopsis
  misc_feature (1)..(330): Homolog of NCBI NO: 22329437 NR Description: unknown protein; protein id: At1g09460.1
MAKQSYFFVFTFLFLSLLSYCSSTTTHHDVLNPPTVFPTNPTTTPTATFPPVTITPTNPATTVPIVPPVTTIPPPTLTPPPVITIPPPTLTPPVTNPVTNPVTQYPPTQPSGTVPVPVPVVAPPVVSNSPSVSGQSWCVAKPGASQVSLQQALDYACGIADCSQLQQGGNCYSPISLQSHASFAFNSYYQKNPSPQSCDFGGAASLVNTNPSTGSCIYQTGSSTSTPMTAGTTTPTPSTQTVNQPPVTSTPIIPTGGGIIGVGTPPAIFNPANPTSNTLNNPSSGGLAGGYGFDGSPNENNPTSSDSTHLKIHFGHAMVATLILHAVLFH

SEQ ID NO: 41943 - DNA, 1161 bp, Arabidopsis thaliana
  misc_feature (1)..(1161): Ceres Seq. ID no. 12371205
  misc_feature: MA Experiment ID: 20000113 Result: Down-regulated in Transcription
  misc_feature: MA Experiment 20000113 PARAMETER Experiment Name: At_42deg_Heat_cDNA_P Parameter: Temperature (deg C) Value: 42 vs. 22
  misc_feature: MA Experiment 20000113 PARAMETER Experiment Name: At_42deg_Heat_cDNA_P Parameter: Timepoint (hr) Value: 8
  misc_feature: MA Experiment 20000113 PARAMETER Experiment Name: At_42deg_Heat_cDNA_P Parameter: Tissue Value: Aerial
  misc_feature: MA Experiment ID: 20000495 Result: Down-regulated in Transcription
  misc_feature: MA Experiment 20000495 PARAMETER Experiment Name: At_Guard_Cells_P Parameter: Harvest Date Value: 8/2/2002
  misc_feature: MA Experiment 20000495 PARAMETER Experiment Name: At_Guard_Cells_P Parameter: Organism Value: A. thaliana
  misc_feature: MA Experiment 20000495 PARAMETER Experiment Name: At_Guard_Cells_P Parameter: Tissue Value: Guard Cells vs. Leaves
aaacctccaacttttttttgttttatcagattgtagaattagggaagagactttcgcaagcaatctagaagcaaatcgatcgccaaatctccggattatttgcaagaatcattcccagataatcttccccagattctccacttctccagctctgatcggagtgttgctcgaacagcttgaagaagacgacgaagatatggctacttcgaagaaaatgattacacgtgaagagtgggagaagaaactaaatgctgtgaagcttaggaaagaagatatgaatactttggtgatgaattttcttgtgactgaaggatatgttgaagctgctgagaaattccaaagggagtctggaaccaaaccagagatagatcttgcgaccatcactgatcgaatggctgttaaaaaggctgttcaaaacggaaatgtcgaggatgcgattgaaaaagttaatgatttgaatcctgagatactagacacgaatccggagctcttttttcatcttcagcagcaaaggttgatagaattaattcgacaagggaagacagaagaggccttggagtttgctcaagaggaacttgcaccacgtggcgaagaaaaccaagcgtttctagaagaattggaaaaaactgtagccctacttgtttttgacgatgcctctacctgcccggttaaagagcttcttgatctttcccaccgtcttaagacagcaagtgaagtaaatgcagcgattcttacaagccagagccacgaaaaagatcctaaacttccaagcttgttgaagatgttgatttgggctcaaaatcaactggacgagaaagcagtgtatcctcacattaatgatttgtctaccggtaagctcgaagacccgtcagaatgattccgtacttctttcagccattggaaaacagtagcaacaaggaacaatgaatggtgctctcttctcttcccttcaatctcaataacttacaattcatatgctttctgcttttccttttcttctgcatcgggatttgttggacccgcaatggttaggatatgggaaggggaacataagctgttgtaggcaatgaattactctagtcaaatgttcttattatcaacatatttgatgactcattgcatatgtgcatttgatttgaatgaagttatcgactttgtttg

SEQ ID NO: 41944 - protein, 291 aa, Arabidopsis thaliana
  peptide (1)..(291): Ceres Seq. ID no. 12371206
  misc_feature (73)..(287): Homolog of NCBI NO: 31200387 NR Description: ENSANGP00000018568 [Anopheles gambiae]
  misc_feature (73)..(289): Homolog of NCBI NO: 21594655 NR Description: chromosome 20 open reading frame 11 [Homo sapiens]
  misc_feature (66)..(289): Homolog of NCBI NO: 37748055 NR Description: Unknown (protein for MGC:73100) [Danio rerio]
  misc_feature (73)..(289): Homolog of NCBI NO: 8923557 NR Description: chromosome 20 open reading frame 11
  misc_feature (58)..(286): Homolog of NCBI NO: 26451919 NR Description: unknown protein [Arabidopsis thaliana]
  misc_feature (73)..(289): Homolog of NCBI NO: 20863687 NR Description: RIKEN cDNA 2310003C23 [Mus musculus]
  misc_feature (66)..(286): Homolog of NCBI NO: 30681030 NR Description: expressed protein [Arabidopsis thaliana]
  misc_feature (66)..(290): Homolog of NCBI NO: 31296710 NR Description: PG4 [Hordeum vulgare]
  misc_feature (50)..(283): Homolog of NCBI NO: 25404311 NR Description: hypothetical protein F11P17.12 [imported] -
  misc_feature (50)..(291): Homolog of NCBI NO: 15219873 NR Description: hypothetical protein; protein id: At1g61150.1
NLQLFFVLSDCRIREETFASNLEANRSPNLRIICKNHSQIIFPRFSTSPALIGVLLEQLEEDDEDMATSKKMITREEWEKKLNAVKLRKEDMNTLVMNFLVTEGYVEAAEKFQRESGTKPEIDLATITDRMAVKKAVQNGNVEDAIEKVNDLNPEILDTNPELFFHLQQQRLIELIRQGKTEEALEFAQEELAPRGEENQAFLEELEKTVALLVFDDASTCPVKELLDLSHRLKTASEVNAAILTSQSHEKDPKLPSLLKMLIWAQNQLDEKAVYPHINDLSTGKLEDPSE

SEQ ID NO: 41945 - protein, 226 aa, Arabidopsis thaliana
  peptide (1)..(226): Ceres Seq. ID no. 12371207
  misc_feature (8)..(222): Homolog of NCBI NO: 31200387 NR Description: ENSANGP00000018568 [Anopheles gambiae]
  misc_feature (8)..(224): Homolog of NCBI NO: 21594655 NR Description: chromosome 20 open reading frame 11 [Homo sapiens]
  misc_feature (1)..(224): Homolog of NCBI NO: 37748055 NR Description: Unknown (protein for MGC:73100) [Danio rerio]
  misc_feature (8)..(224): Homolog of NCBI NO: 8923557 NR Description: chromosome 20 open reading frame 11
  misc_feature (1)..(221): Homolog of NCBI NO: 26451919 NR Description: unknown protein [Arabidopsis thaliana]
  misc_feature (8)..(224): Homolog of NCBI NO: 20863687 NR Description: RIKEN cDNA 2310003C23 [Mus musculus]
  misc_feature (1)..(221): Homolog of NCBI NO: 30681030 NR Description: expressed protein [Arabidopsis thaliana]
  misc_feature (1)..(225): Homolog of NCBI NO: 31296710 NR Description: PG4 [Hordeum vulgare]
  misc_feature (1)..(218): Homolog of NCBI NO: 25404311 NR Description: hypothetical protein F11P17.12 [imported] -
  misc_feature (1)..(226): Homolog of NCBI NO: 15219873 NR Description: hypothetical protein; protein id: At1g61150.1
MATSKKMITREEWEKKLNAVKLRKEDMNTLVMNFLVTEGYVEAAEKFQRESGTKPEIDLATITDRMAVKKAVQNGNVEDAIEKVNDLNPEILDTNPELFFHLQQQRLIELIRQGKTEEALEFAQEELAPRGEENQAFLEELEKTVALLVFDDASTCPVKELLDLSHRLKTASEVNAAILTSQSHEKDPKLPSLLKMLIWAQNQLDEKAVYPHINDLSTGKLEDPSE

SEQ ID NO: 41946 - protein, 220 aa, Arabidopsis thaliana
  peptide (1)..(220): Ceres Seq. ID no. 12371208
  misc_feature (2)..(216): Homolog of NCBI NO: 31200387 NR Description: ENSANGP00000018568 [Anopheles gambiae]
  misc_feature (2)..(218): Homolog of NCBI NO: 21594655 NR Description: chromosome 20 open reading frame 11 [Homo sapiens]
  misc_feature (1)..(218): Homolog of NCBI NO: 37748055 NR Description: Unknown (protein for MGC:73100) [Danio rerio]
  misc_feature (2)..(218): Homolog of NCBI NO: 8923557 NR Description: chromosome 20 open reading frame 11
  misc_feature (1)..(215): Homolog of NCBI NO: 26451919 NR Description: unknown protein [Arabidopsis thaliana]
  misc_feature (2)..(218): Homolog of NCBI NO: 20863687 NR Description: RIKEN cDNA 2310003C23 [Mus musculus]
  misc_feature (1)..(215): Homolog of NCBI NO: 30681030 NR Description: expressed protein [Arabidopsis thaliana]
  misc_feature (1)..(219): Homolog of NCBI NO: 31296710 NR Description: PG4 [Hordeum vulgare]
  misc_feature (1)..(212): Homolog of NCBI NO: 25404311 NR Description: hypothetical protein F11P17.12 [imported] -
  misc_feature (1)..(220): Homolog of NCBI NO: 15219873 NR Description: hypothetical protein; protein id: At1g61150.1
MITREEWEKKLNAVKLRKEDMNTLVMNFLVTEGYVEAAEKFQRESGTKPEIDLATITDRMAVKKAVQNGNVEDAIEKVNDLNPEILDTNPELFFHLQQQRLIELIRQGKTEEALEFAQEELAPRGEENQAFLEELEKTVALLVFDDASTCPVKELLDLSHRLKTASEVNAAILTSQSHEKDPKLPSLLKMLIWAQNQLDEKAVYPHINDLSTGKLEDPSE

SEQ ID NO: 41947 - DNA, 1273 bp, Arabidopsis thaliana
  misc_feature (1)..(1273): Ceres Seq. ID no. 13499936
  misc_feature: MA Experiment ID: 108462 Result: Down-regulated in Transcription
  misc_feature: MA Experiment 108462 PARAMETER Experiment Name: At_Germinating_Seeds_cDNA_P Parameter: Age (day) Value: 2 vs. 0
  misc_feature: MA Experiment 108462 PARAMETER Experiment Name: At_Germinating_Seeds_cDNA_P Parameter: Tissue Value: Germinating Seeds
  misc_feature: MA Experiment ID: 108463 Result: Down-regulated in Transcription
  misc_feature: MA Experiment 108463 PARAMETER Experiment Name: At_Germinating_Seeds_cDNA_P Parameter: Age (day) Value: 3 vs. 0
  misc_feature: MA Experiment 108463 PARAMETER Experiment Name: At_Germinating_Seeds_cDNA_P Parameter: Tissue Value: Germinating Seeds
  misc_feature: MA Experiment ID: 108464 Result: Down-regulated in Transcription
  misc_feature: MA Experiment 108464 PARAMETER Experiment Name: At_Germinating_Seeds_cDNA_P Parameter: Age (day) Value: 4 vs. 0
  misc_feature: MA Experiment 108464 PARAMETER Experiment Name: At_Germinating_Seeds_cDNA_P Parameter: Tissue Value: Germinating Seeds
  misc_feature: MA Experiment ID: 108488 Result: Down-regulated in Transcription
  misc_feature: MA Experiment ID: 108573 Result: Up-regulated in Transcription
  misc_feature: MA Experiment 108573 PARAMETER Experiment Name: At_Drought_cDNA_P Parameter: Timepoint (hr) Value: 6
  misc_feature: MA Experiment 108573 PARAMETER Experiment Name: At_Drought_cDNA_P Parameter: Tissue Value: Aerial
  misc_feature: MA Experiment 108573 PARAMETER Experiment Name: At_Drought_cDNA_P Parameter: Treatment Value: Drought vs. No Drought
  misc_feature: MA Experiment ID: 20000224 Result: Down-regulated in Transcription
  misc_feature: MA Experiment ID: 20000438 Result: Down-regulated in Transcription
  misc_feature: MA Experiment 20000438 PARAMETER Experiment Name: At_Shoots__P Parameter: Age (day) Value: 14
  misc_feature: MA Experiment 20000438 PARAMETER Experiment Name: At_Shoots__P Parameter: Tissue Value: Shoots vs. Whole Plant
  misc_feature: MA Experiment ID: 20000794 Result: Up-regulated in Transcription
  misc_feature: MA Experiment 20000794 PARAMETER Experiment Name: At_Petals_P Parameter: Age (day) Value: 23-25 days
  misc_feature: MA Experiment 20000794 PARAMETER Experiment Name: At_Petals_P Parameter: Plant Line Value: WS
  misc_feature: MA Experiment 20000794 PARAMETER Experiment Name: At_Petals_P Parameter: Tissue Value: Petals vs. Whole plant
cttgaaaagtcccattaacaaacaaacgagaaaaccaactctggagaatggcgaatctaccttcttctctctccatgggcacacctttcggtggtcctagcacctccgcacaaaatcctaccggagctccggccaacaaagatcgcaatttggcctctgctgaacagttggtactcgatctcagcaatcctgaactcagagaaaatgctcttctcgagctttccaagaaaagagaattgtttcaggatctggcgcctttgttgtggaactcttttggtaccattgctgccttgttacaggagattgtatcaatctactctgttcttgcacctccaaatctgactcctgctcagtccaaccgtgtttgcaactcgctcgctcttcttcagtgcgtagcatctcattctgacacgagaatgttatttctcaaggctcatatcccgttgtacctttatcccttccttaatacaacgagtaagtccagacctttcgaatacttgcggcttactagcctaggtgtcatcggtgcacttgtgaaggttgatgatacagaggtcattagcttccttctttcaactgaaattattcctctgtgcctccgtaccatggaaatggggagtgagctgtcaaaaacagtggcaacatttattgttcaaaagatactgttggatgatgtggggatggattacatctgcacaacagcagagcggttttttgcagttggtcgagtgttgggaaatatggttcagtcacttgtggagcagccttctccgcgccttttgaagcatatcattcgttgctatctccgtttatcagacaacccaagggcttgtgctgcactcgcaagctgtctccctgactcgctacgagatggatcctttagcaattgtcttcgcgaggatccaactgcaagaaggtggctgcaacagttggtgcacaatgttggagttggtcgcgtcccaacacatcaaggtggaggatttgagcacatgctttgagctgaatccatctcaaacccatccatggagtgtgtttcttctgtttttgtttctaattatacatgtgctttttaatgccttaacttagatgatgggttataggctttttagtctgtttgaaattcttattgtaattatttttaagctctagaaccaatcccccagaatgcataagtcttgggataataaaagattggttacaaaagaaatattatagagtttgtattatcatgttgaacggtaacaatttttattccagcaaaagctttagcggt

SEQ ID NO: 41948 - protein, 316 aa, Arabidopsis thaliana
  peptide (1)..(316): Ceres Seq. ID no. 13499937
  misc_feature (40)..(302): Pfam Name: Cell differentiation family, Rcd1-like Pfam Description: Cell differentiation family, Rcd1-like
  misc_feature (18)..(309): Homolog of NCBI NO: 38174128 NR Description: Unknown (protein for MGC:76003) [Silurana
  misc_feature (27)..(307): Homolog of NCBI NO: 23480586 NR Description: hypothetical protein [Plasmodium yoelii yoelii]
  misc_feature (18)..(309): Homolog of NCBI NO: 4885579 NR Description: RCD1 required for cell differentiation1 homolog
  misc_feature (18)..(309): Homolog of NCBI NO: 10946722 NR Description: rcd1 (required for cell differentiation) homolog 1
  misc_feature (12)..(316): Homolog of NCBI NO: 34899762 NR Description: putative cell differentiation protein
  misc_feature (1)..(316): Homolog of NCBI NO: 34897134 NR Description: putative cell differentiation protein [Oryza
  misc_feature (1)..(315): Homolog of NCBI NO: 15239962 NR Description: expressed protein [Arabidopsis thaliana]
  misc_feature (10)..(316): Homolog of NCBI NO: 9294407 NR Description: RCD1 [Arabidopsis thaliana]
  misc_feature (1)..(316): Homolog of NCBI NO: 21537250 NR Description: putative cell differentiation protein
  misc_feature (1)..(316): Homolog of NCBI NO: 15232369 NR Description: cell differentiation protein -related
MANLPSSLSMGTPFGGPSTSAQNPTGAPANKDRNLASAEQLVLDLSNPELRENALLELSKKRELFQDLAPLLWNSFGTIAALLQEIVSIYSVLAPPNLTPAQSNRVCNSLALLQCVASHSDTRMLFLKAHIPLYLYPFLNTTSKSRPFEYLRLTSLGVIGALVKVDDTEVISFLLSTEIIPLCLRTMEMGSELSKTVATFIVQKILLDDVGMDYICTTAERFFAVGRVLGNMVQSLVEQPSPRLLKHIIRCYLRLSDNPRACAALASCLPDSLRDGSFSNCLREDPTARRWLQQLVHNVGVGRVPTHQGGGFEHML

SEQ ID NO: 41949 - protein, 307 aa, Arabidopsis thaliana
  peptide (1)..(307): Ceres Seq. ID no. 13499938
  misc_feature (31)..(293): Pfam Name: Cell differentiation family, Rcd1-like Pfam Description: Cell differentiation family, Rcd1-like
  misc_feature (9)..(300): Homolog of NCBI NO: 38174128 NR Description: Unknown (protein for MGC:76003) [Silurana
  misc_feature (18)..(298): Homolog of NCBI NO: 23480586 NR Description: hypothetical protein [Plasmodium yoelii yoelii]
  misc_feature (9)..(300): Homolog of NCBI NO: 4885579 NR Description: RCD1 required for cell differentiation1 homolog
  misc_feature (9)..(300): Homolog of NCBI NO: 10946722 NR Description: rcd1 (required for cell differentiation) homolog 1
  misc_feature (3)..(307): Homolog of NCBI NO: 34899762 NR Description: putative cell differentiation protein
  misc_feature (1)..(307): Homolog of NCBI NO: 34897134 NR Description: putative cell differentiation protein [Oryza
  misc_feature (1)..(306): Homolog of NCBI NO: 15239962 NR Description: expressed protein [Arabidopsis thaliana]
  misc_feature (1)..(307): Homolog of NCBI NO: 9294407 NR Description: RCD1 [Arabidopsis thaliana]
  misc_feature (1)..(307): Homolog of NCBI NO: 21537250 NR Description: putative cell differentiation protein
  misc_feature (1)..(307): Homolog of NCBI NO: 15232369 NR Description: cell differentiation protein -related
MGTPFGGPSTSAQNPTGAPANKDRNLASAEQLVLDLSNPELRENALLELSKKRELFQDLAPLLWNSFGTIAALLQEIVSIYSVLAPPNLTPAQSNRVCNSLALLQCVASHSDTRMLFLKAHIPLYLYPFLNTTSKSRPFEYLRLTSLGVIGALVKVDDTEVISFLLSTEIIPLCLRTMEMGSELSKTVATFIVQKILLDDVGMDYICTTAERFFAVGRVLGNMVQSLVEQPSPRLLKHIIRCYLRLSDNPRACAALASCLPDSLRDGSFSNCLREDPTARRWLQQLVHNVGVGRVPTHQGGGFEHML

SEQ ID NO: 41950 - protein, 193 aa, Arabidopsis thaliana
  peptide (1)..(193): Ceres Seq. ID no. 13499939
  misc_feature (1)..(179): Pfam Name: Cell differentiation family, Rcd1-like Pfam Description: Cell differentiation family, Rcd1-like
  misc_feature (1)..(186): Homolog of NCBI NO: 38174128 NR Description: Unknown (protein for MGC:76003) [Silurana
  misc_feature (1)..(184): Homolog of NCBI NO: 23480586 NR Description: hypothetical protein [Plasmodium yoelii yoelii]
  misc_feature (1)..(186): Homolog of NCBI NO: 4885579 NR Description: RCD1 required for cell differentiation1 homolog
  misc_feature (1)..(186): Homolog of NCBI NO: 10946722 NR Description: rcd1 (required for cell differentiation) homolog 1
  misc_feature (1)..(193): Homolog of NCBI NO: 34899762 NR Description: putative cell differentiation protein
  misc_feature (1)..(193): Homolog of NCBI NO: 34897134 NR Description: putative cell differentiation protein [Oryza
  misc_feature (1)..(192): Homolog of NCBI NO: 15239962 NR Description: expressed protein [Arabidopsis thaliana]
  misc_feature (1)..(193): Homolog of NCBI NO: 9294407 NR Description: RCD1 [Arabidopsis thaliana]
  misc_feature (1)..(193): Homolog of NCBI NO: 21537250 NR Description: putative cell differentiation protein
  misc_feature (1)..(193): Homolog of NCBI NO: 15232369 NR Description: cell differentiation protein -related
MLFLKAHIPLYLYPFLNTTSKSRPFEYLRLTSLGVIGALVKVDDTEVISFLLSTEIIPLCLRTMEMGSELSKTVATFIVQKILLDDVGMDYICTTAERFFAVGRVLGNMVQSLVEQPSPRLLKHIIRCYLRLSDNPRACAALASCLPDSLRDGSFSNCLREDPTARRWLQQLVHNVGVGRVPTHQGGGFEHML

SEQ ID NO: 41951 - DNA, 1419 bp, Arabidopsis thaliana
  misc_feature (1)..(1419): Ceres Seq. ID no. 12602810
  misc_feature: MA Experiment ID: 20000171 Result: Down-regulated in Transcription
  misc_feature: MA Experiment 20000171 PARAMETER Experiment Name: At_42deg_Heat_P Parameter: Age (day) Value: 14
  misc_feature: MA Experiment 20000171 PARAMETER Experiment Name: At_42deg_Heat_P Parameter: Organism Value: A. thaliana
  misc_feature: MA Experiment 20000171 PARAMETER Experiment Name: At_42deg_Heat_P Parameter: Plant Line Value: WS
  misc_feature: MA Experiment 20000171 PARAMETER Experiment Name: At_42deg_Heat_P Parameter: Temperature (deg C) Value: 42 vs. 22
  misc_feature: MA Experiment 20000171 PARAMETER Experiment Name: At_42deg_Heat_P Parameter: Timepoint (hr) Value: 1
  misc_feature: MA Experiment 20000171 PARAMETER Experiment Name: At_42deg_Heat_P Parameter: Tissue Value: Aerial
  misc_feature: MA Experiment ID: 20000173 Result: Down-regulated in Transcription
  misc_feature: MA Experiment 20000173 PARAMETER Experiment Name: At_42deg_Heat_P Parameter: Age (day) Value: 14
  misc_feature: MA Experiment 20000173 PARAMETER Experiment Name: At_42deg_Heat_P Parameter: Organism Value: A. thaliana
  misc_feature: MA Experiment 20000173 PARAMETER Experiment Name: At_42deg_Heat_P Parameter: Plant Line Value: WS
  misc_feature: MA Experiment 20000173 PARAMETER Experiment Name: At_42deg_Heat_P Parameter: Temperature (deg C) Value: 42 vs. 22
  misc_feature: MA Experiment 20000173 PARAMETER Experiment Name: At_42deg_Heat_P Parameter: Timepoint (hr) Value: 6
  misc_feature: MA Experiment 20000173 PARAMETER Experiment Name: At_42deg_Heat_P Parameter: Tissue Value: Aerial
  misc_feature: MA Experiment ID: 20000180 Result: Down-regulated in Transcription
  misc_feature: MA Experiment 20000180 PARAMETER Experiment Name: At_Germinating_Seeds_P Parameter: Age (hr) Value: 24 vs. 0
  misc_feature: MA Experiment 20000180 PARAMETER Experiment Name: At_Germinating_Seeds_P Parameter: Tissue Value: Germinating Seeds
  misc_feature: MA Experiment ID: 20000184 Result: Down-regulated in Transcription
  misc_feature: MA Experiment 20000184 PARAMETER Experiment Name: At_Shoots__P Parameter: Age (day) Value: 7
  misc_feature: MA Experiment 20000184 PARAMETER Experiment Name: At_Shoots__P Parameter: Tissue Value: Shoots vs. Whole Plant
  misc_feature: MA Experiment ID: 20000185 Result: Down-regulated in Transcription
  misc_feature: MA Experiment 20000185 PARAMETER Experiment Name: At_Roots__P Parameter: Age (day) Value: 7 vs. 21
  misc_feature: MA Experiment 20000185 PARAMETER Experiment Name: At_Roots__P Parameter: Organism Value: A. thaliana
  misc_feature: MA Experiment 20000185 PARAMETER Experiment Name: At_Roots__P Parameter: Tissue Value: Roots vs. Whole Plant
  misc_feature: MA Experiment ID: 20000234 Result: Down-regulated in Transcription
  misc_feature: MA Experiment 20000234 PARAMETER Experiment Name: At_Siliques_P Parameter: Age (day) Value: 21
  misc_feature: MA Experiment 20000234 PARAMETER Experiment Name: At_Siliques_P Parameter: Organism Value: A. thaliana
  misc_feature: MA Experiment 20000234 PARAMETER Experiment Name: At_Siliques_P Parameter: Plant Line Value: WS
  misc_feature: MA Experiment 20000234 PARAMETER Experiment Name: At_Siliques_P Parameter: Tissue Value: Less Than 5mm Siliques vs. Whole Plant
  misc_feature: MA Experiment ID: 20000235 Result: Down-regulated in Transcription
  misc_feature: MA Experiment 20000235 PARAMETER Experiment Name: At_Siliques_P Parameter: Age (day) Value: 21
  misc_feature: MA Experiment 20000235 PARAMETER Experiment Name: At_Siliques_P Parameter: Organism Value: A. thaliana
  misc_feature: MA Experiment 20000235 PARAMETER Experiment Name: At_Siliques_P Parameter: Plant Line Value: WS
  misc_feature: MA Experiment 20000235 PARAMETER Experiment Name: At_Siliques_P Parameter: Tissue Value: 5-10mm Siliques vs. Whole Plant
  misc_feature: MA Experiment ID: 20000264 Result: Down-regulated in Transcription
  misc_feature: MA Experiment 20000264 PARAMETER Experiment Name: At_Open_Flower_P Parameter: Age (day) Value: 21
  misc_feature: MA Experiment 20000264 PARAMETER Experiment Name: At_Open_Flower_P Parameter: Plant Line Value: WS
  misc_feature: MA Experiment 20000264 PARAMETER Experiment Name: At_Open_Flower_P Parameter: Tissue Value: Open Flower vs. Whole Plant
  misc_feature: MA Experiment ID: 20000265 Result: Down-regulated in Transcription
  misc_feature: MA Experiment 20000265 PARAMETER Experiment Name: At_Open_Flower_P Parameter: Age (day) Value: 21
  misc_feature: MA Experiment 20000265 PARAMETER Experiment Name: At_Open_Flower_P Parameter: Plant Line Value: WS
  misc_feature: MA Experiment 20000265 PARAMETER Experiment Name: At_Open_Flower_P Parameter: Tissue Value: Closed Flower vs. Whole Plant
  misc_feature: MA Experiment ID: 20000286 Result: Down-regulated in Transcription
  misc_feature: MA Experiment 20000286 PARAMETER Experiment Name: At_Open_Flower_P Parameter: Age (day) Value: 21
  misc_feature: MA Experiment 20000286 PARAMETER Experiment Name: At_Open_Flower_P Parameter: Plant Line Value: WS
  misc_feature: MA Experiment 20000286 PARAMETER Experiment Name: At_Open_Flower_P Parameter: Tissue Value: Half Open vs. Whole Plant
  misc_feature: MA Experiment ID: 20000437 Result: Up-regulated in Transcription
  misc_feature: MA Experiment 20000437 PARAMETER Experiment Name: At_Drought_P Parameter: Age (day) Value: 8
  misc_feature: MA Experiment 20000437 PARAMETER Experiment Name: At_Drought_P Parameter: Organism Value: A. thaliana
  misc_feature: MA Experiment 20000437 PARAMETER Experiment Name: At_Drought_P Parameter: Plant Line Value: WS
  misc_feature: MA Experiment 20000437 PARAMETER Experiment Name: At_Drought_P Parameter: Timepoint (hr) Value: 24
  misc_feature: MA Experiment 20000437 PARAMETER Experiment Name: At_Drought_P Parameter: Tissue Value: Whole Plant
  misc_feature: MA Experiment 20000437 PARAMETER Experiment Name: At_Drought_P Parameter: Treatment Value: Drought vs. No Drought
  misc_feature: MA Experiment ID: 20000438 Result: Down-regulated in Transcription
  misc_feature: MA Experiment 20000438 PARAMETER Experiment Name: At_Shoots__P Parameter: Age (day) Value: 14
  misc_feature: MA Experiment 20000438 PARAMETER Experiment Name: At_Shoots__P Parameter: Tissue Value: Shoots vs. Whole Plant
  misc_feature: MA Experiment ID: 20000439 Result: Down-regulated in Transcription
  misc_feature: MA Experiment 20000439 PARAMETER Experiment Name: At_Roots__P Parameter: Age (day) Value: 14 vs. 21
  misc_feature: MA Experiment 20000439 PARAMETER Experiment Name: At_Roots__P Parameter: Organism Value: A. thaliana
  misc_feature: MA Experiment 20000439 PARAMETER Experiment Name: At_Roots__P Parameter: Tissue Value: Roots vs. Whole Plant
  misc_feature: MA Experiment ID: 20000460 Result: Up-regulated in Transcription
  misc_feature: MA Experiment 20000460 PARAMETER Experiment Name: At_10percent_PEG_P Parameter: Age (day) Value: 12
  misc_feature: MA Experiment 20000460 PARAMETER Experiment Name: At_10percent_PEG_P Parameter: Organism Value: A. thaliana
  misc_feature: MA Experiment 20000460 PARAMETER Experiment Name: At_10percent_PEG_P Parameter: Plant Line Value: WS
  misc_feature: MA Experiment 20000460 PARAMETER Experiment Name: At_10percent_PEG_P Parameter: Timepoint (day) Value: 12
  misc_feature: MA Experiment 20000460 PARAMETER Experiment Name: At_10percent_PEG_P Parameter: Tissue Value: Whole Plant
  misc_feature: MA Experiment 20000460 PARAMETER Experiment Name: At_10percent_PEG_P Parameter: Treatment Value: 10percent PEG vs. No Treatment
  misc_feature: MA Experiment ID: 20000794 Result: Down-regulated in Transcription
  misc_feature: MA Experiment 20000794 PARAMETER Experiment Name: At_Petals_P Parameter: Age (day) Value: 23-25 days
  misc_feature: MA Experiment 20000794 PARAMETER Experiment Name: At_Petals_P Parameter: Plant Line Value: WS
  misc_feature: MA Experiment 20000794 PARAMETER Experiment Name: At_Petals_P Parameter: Tissue Value: Petals vs. Whole plant
  misc_feature: MA Experiment ID: 20001247 Result: Down-regulated in Transcription
  misc_feature: MA Experiment 20001247 PARAMETER Experiment Name: At_Far-red-induction_P Parameter: Age (day) Value: 7
  misc_feature: MA Experiment 20001247 PARAMETER Experiment Name: At_Far-red-induction_P Parameter: Light Value: Far-red vs. White
  misc_feature: MA Experiment 20001247 PARAMETER Experiment Name: At_Far-red-induction_P Parameter: Organism Value: A. thaliana
  misc_feature: MA Experiment 20001247 PARAMETER Experiment Name: At_Far-red-induction_P Parameter: Plant Line Value: Columbia
  misc_feature: MA Experiment 20001247 PARAMETER Experiment Name: At_Far-red-induction_P Parameter: Timepoint (hr) Value: 1
  misc_feature: MA Experiment 20001247 PARAMETER Experiment Name: At_Far-red-induction_P Parameter: Tissue Value: Whole Plant
  misc_feature: MA Experiment ID: 20001248 Result: Up-regulated in Transcription
  misc_feature: MA Experiment 20001248 PARAMETER Experiment Name: At_Far-red-induction_P Parameter: Age (day) Value: 7
  misc_feature: MA Experiment 20001248 PARAMETER Experiment Name: At_Far-red-induction_P Parameter: Light Value: Far-red vs. White
  misc_feature: MA Experiment 20001248 PARAMETER Experiment Name: At_Far-red-induction_P Parameter: Organism Value: A. thaliana
  misc_feature: MA Experiment 20001248 PARAMETER Experiment Name: At_Far-red-induction_P Parameter: Plant Line Value: Columbia
  misc_feature: MA Experiment 20001248 PARAMETER Experiment Name: At_Far-red-induction_P Parameter: Timepoint (hr) Value: 4
  misc_feature: MA Experiment 20001248 PARAMETER Experiment Name: At_Far-red-induction_P Parameter: Tissue Value: Whole Plant
  misc_feature: MA Experiment ID: 20001558 Result: Down-regulated in Transcription
  misc_feature: MA Experiment 20001558 PARAMETER Experiment Name: At_Drought_Soil_Dry_P Parameter: Age (day) Value: 27
  misc_feature: MA Experiment 20001558 PARAMETER Experiment Name: At_Drought_Soil_Dry_P Parameter: Organism Value: A. thaliana
  misc_feature: MA Experiment 20001558 PARAMETER Experiment Name: At_Drought_Soil_Dry_P Parameter: Plant Line Value: WS
  misc_feature: MA Experiment 20001558 PARAMETER Experiment Name: At_Drought_Soil_Dry_P Parameter: Post Timepoint (hr) Value: 6
  misc_feature: MA Experiment 20001558 PARAMETER Experiment Name: At_Drought_Soil_Dry_P Parameter: Post-Treatment Value: Re-Water vs. No Drought
  misc_feature: MA Experiment 20001558 PARAMETER Experiment Name: At_Drought_Soil_Dry_P Parameter: Timepoint (day) Value: 13
  misc_feature: MA Experiment 20001558 PARAMETER Experiment Name: At_Drought_Soil_Dry_P Parameter: Treatment Value: Drought vs. No Drought
atcccttgcccaacgcacaagtttcatctccttcccacataaaccccaatcccaaattctcttcatttttccttattcttgcgactaatcgattcaatcccaaatttcagaattcaaaatttcatctaaagtttagagatttctcgattatggtgaaatcgacggacggtggtggtgggtcttcttcttcttcttcagtggcgccgttcttgagaaaatgttacgatatggttgatgattctactactgactctataatctcatggagtccaagtgcagataatagcttcgttatcttggacaccaccgtcttctctgttcaactcttgcctaaatactttaaacacagcaatttctctagcttcattcgtcagctcaatatctacggttttagaaaagttgatgcagatcgatgggagtttgcgaatgacgggtttgtgagaggtcaaaaggatttgctgaagaatgttatcaggaggaagaatgttcaaagtagtgagcagagcaaacatgagagtacaagtacaacatatgctcaggaaaagagtggattgtggaaggaagttgatattttgaaaggtgataagcaggtattggcgcaggagttgatcaaagttaggcagtatcaggaggtgacggatactaagatgttacatttagaagacagagttcaaggaatggaagagagtcagcaggagatgctttcgtttttggttatggttatgaagaatccaagtcttttagttcagttacttcagccaaaggagaaaaacacttggcgaaaagcgggggaaggagcgaagattgtggaagaagtgactgatgaaggagaatcaaactcatatggtcttcctttagtaacataccagccaccatcggacaacaatggaactgcaaagtcaaactcgaacgacgtaaatgatttcttgagaaacgccgatatgttgaagttctgcttagatgaaaaccatgtgccattgatcatacctgatctatacgatgatggagcatgggaaaagcttttgttgttgagcccttcaaggaagaagacgaagaagcaggagaacattgtgaagaaaggaaaggatgatttgacattggaggaggaggaggaggatggaacaatggaattagacaagagctatatgcttaagctgatatcagaagagatggagaaaccagatgactttgaatttggacagcttactcctgagaggtctaggaaccttgagattttgacagagcagatggaattgctggcttcaaatgaatagttgattttttgaacatatcagcctcaaaacttttgttatgtaactctataacaaacaacgaagtatgcaccggatatattactttcaccggtgcaattctcaatgatgtgttatagcagcttactacaaaaacatggttgaaact

SEQ ID NO: 41952 - protein, 423 aa, Arabidopsis thaliana
  peptide (1)..(423): Ceres Seq. ID no. 12602811
  misc_feature (67)..(237): Pfam Name: HSF-type DNA-binding Pfam Description: HSF-type DNA-binding
  misc_feature (62)..(267): Homolog of NCBI NO: 11386827 NR Description: Heat shock factor protein HSF8 (Heat shock
  misc_feature (64)..(297): Homolog of NCBI NO: 6624612 NR Description: heat shock factor 2 [Arabidopsis thaliana]
  misc_feature (61)..(281): Homolog of NCBI NO: 429155 NR Description: heat shock factor [Arabidopsis thaliana]
  misc_feature (64)..(297): Homolog of NCBI NO: 15228440 NR Description: putative heat shock transcription factor; protein
  misc_feature (61)..(281): Homolog of NCBI NO: 15236631 NR Description: heat shock transcription factor HSF1; protein id:
  misc_feature (59)..(325): Homolog of NCBI NO: 29126355 NR Description: putative heat shock transcription factor
  misc_feature (64)..(290): Homolog of NCBI NO: 30686034 NR Description: heat shock transcription factor 3 (HSF3)
  misc_feature (64)..(290): Homolog of NCBI NO: 27261140 NR Description: HSF3 DNA-binding domain/VP16 activation domain
  misc_feature (28)..(290): Homolog of NCBI NO: 25296101 NR Description: heat shock transcription factor HSF3
  misc_feature (50)..(423): Homolog of NCBI NO: 15220611 NR Description: putative heat shock transcription factor
PLPNAQVSSPSHINPNPKFSSFFLILATNRFNPKFQNSKFHLKFRDFSIMVKSTDGGGGSSSSSSVAPFLRKCYDMVDDSTTDSIISWSPSADNSFVILDTTVFSVQLLPKYFKHSNFSSFIRQLNIYGFRKVDADRWEFANDGFVRGQKDLLKNVIRRKNVQSSEQSKHESTSTTYAQEKSGLWKEVDILKGDKQVLAQELIKVRQYQEVTDTKMLHLEDRVQGMEESQQEMLSFLVMVMKNPSLLVQLLQPKEKNTWRKAGEGAKIVEEVTDEGESNSYGLPLVTYQPPSDNNGTAKSNSNDVNDFLRNADMLKFCLDENHVPLIIPDLYDDGAWEKLLLLSPSRKKTKKQENIVKKGKDDLTLEEEEEDGTMELDKSYMLKLISEEMEKPDDFEFGQLTPERSRNLEILTEQMELLASNE

SEQ ID NO: 41953 - protein, 374 aa, Arabidopsis thaliana
  peptide (1)..(374): Ceres Seq. ID no. 12602812
  misc_feature (18)..(188): Pfam Name: HSF-type DNA-binding Pfam Description: HSF-type DNA-binding
  misc_feature (13)..(218): Homolog of NCBI NO: 11386827 NR Description: Heat shock factor protein HSF8 (Heat shock
  misc_feature (15)..(248): Homolog of NCBI NO: 6624612 NR Description: heat shock factor 2 [Arabidopsis thaliana]
  misc_feature (12)..(232): Homolog of NCBI NO: 429155 NR Description: heat shock factor [Arabidopsis thaliana]
  misc_feature (15)..(248): Homolog of NCBI NO: 15228440 NR Description: putative heat shock transcription factor; protein
  misc_feature (12)..(232): Homolog of NCBI NO: 15236631 NR Description: heat shock transcription factor HSF1; protein id:
  misc_feature (10)..(276): Homolog of NCBI NO: 29126355 NR Description: putative heat shock transcription factor
  misc_feature (15)..(241): Homolog of NCBI NO: 30686034 NR Description: heat shock transcription factor 3 (HSF3)
  misc_feature (15)..(241): Homolog of NCBI NO: 27261140 NR Description: HSF3 DNA-binding domain/VP16 activation domain
  misc_feature (1)..(241): Homolog of NCBI NO: 25296101 NR Description: heat shock transcription factor HSF3
  misc_feature (1)..(374): Homolog of NCBI NO: 15220611 NR Description: putative heat shock transcription factor
MVKSTDGGGGSSSSSSVAPFLRKCYDMVDDSTTDSIISWSPSADNSFVILDTTVFSVQLLPKYFKHSNFSSFIRQLNIYGFRKVDADRWEFANDGFVRGQKDLLKNVIRRKNVQSSEQSKHESTSTTYAQEKSGLWKEVDILKGDKQVLAQELIKVRQYQEVTDTKMLHLEDRVQGMEESQQEMLSFLVMVMKNPSLLVQLLQPKEKNTWRKAGEGAKIVEEVTDEGESNSYGLPLVTYQPPSDNNGTAKSNSNDVNDFLRNADMLKFCLDENHVPLIIPDLYDDGAWEKLLLLSPSRKKTKKQENIVKKGKDDLTLEEEEEDGTMELDKSYMLKLISEEMEKPDDFEFGQLTPERSRNLEILTEQMELLASNE

SEQ ID NO: 41954 - protein, 348 aa, Arabidopsis thaliana
  peptide (1)..(348): Ceres Seq. ID no. 12602813
  misc_feature (1)..(162): Pfam Name: HSF-type DNA-binding Pfam Description: HSF-type DNA-binding
  misc_feature (1)..(192): Homolog of NCBI NO: 11386827 NR Description: Heat shock factor protein HSF8 (Heat shock
  misc_feature (1)..(222): Homolog of NCBI NO: 6624612 NR Description: heat shock factor 2 [Arabidopsis thaliana]
  misc_feature (1)..(206): Homolog of NCBI NO: 429155 NR Description: heat shock factor [Arabidopsis thaliana]
  misc_feature (1)..(222): Homolog of NCBI NO: 15228440 NR Description: putative heat shock transcription factor; protein
  misc_feature (1)..(206): Homolog of NCBI NO: 15236631 NR Description: heat shock transcription factor HSF1; protein id:
  misc_feature (1)..(250): Homolog of NCBI NO: 29126355 NR Description: putative heat shock transcription factor
  misc_feature (1)..(215): Homolog of NCBI NO: 30686034 NR Description: heat shock transcription factor 3 (HSF3)
  misc_feature (1)..(215): Homolog of NCBI NO: 27261140 NR Description: HSF3 DNA-binding domain/VP16 activation domain
  misc_feature (1)..(215): Homolog of NCBI NO: 25296101 NR Description: heat shock transcription factor HSF3
  misc_feature (1)..(348): Homolog of NCBI NO: 15220611 NR Description: putative heat shock transcription factor
MVDDSTTDSIISWSPSADNSFVILDTTVFSVQLLPKYFKHSNFSSFIRQLNIYGFRKVDADRWEFANDGFVRGQKDLLKNVIRRKNVQSSEQSKHESTSTTYAQEKSGLWKEVDILKGDKQVLAQELIKVRQYQEVTDTKMLHLEDRVQGMEESQQEMLSFLVMVMKNPSLLVQLLQPKEKNTWRKAGEGAKIVEEVTDEGESNSYGLPLVTYQPPSDNNGTAKSNSNDVNDFLRNADMLKFCLDENHVPLIIPDLYDDGAWEKLLLLSPSRKKTKKQENIVKKGKDDLTLEEEEEDGTMELDKSYMLKLISEEMEKPDDFEFGQLTPERSRNLEILTEQMELLASNE

SEQ ID NO: 41955 - DNA, 1091 bp, Arabidopsis thaliana
  misc_feature (1)..(1091): Ceres Seq. ID no. 13488786
  misc_feature: MA Experiment ID: 108462 Result: Up-regulated in Transcription
  misc_feature: MA Experiment 108462 PARAMETER Experiment Name: At_Germinating_Seeds_cDNA_P Parameter: Age (day) Value: 2 vs. 0
  misc_feature: MA Experiment 108462 PARAMETER Experiment Name: At_Germinating_Seeds_cDNA_P Parameter: Tissue Value: Germinating Seeds
  misc_feature: MA Experiment ID: 108463 Result: Up-regulated in Transcription
  misc_feature: MA Experiment 108463 PARAMETER Experiment Name: At_Germinating_Seeds_cDNA_P Parameter: Age (day) Value: 3 vs. 0
  misc_feature: MA Experiment 108463 PARAMETER Experiment Name: At_Germinating_Seeds_cDNA_P Parameter: Tissue Value: Germinating Seeds
  misc_feature: MA Experiment ID: 108464 Result: Up-regulated in Transcription
  misc_feature: MA Experiment 108464 PARAMETER Experiment Name: At_Germinating_Seeds_cDNA_P Parameter: Age (day) Value: 4 vs. 0
  misc_feature: MA Experiment 108464 PARAMETER Experiment Name: At_Germinating_Seeds_cDNA_P Parameter: Tissue Value: Germinating Seeds
  misc_feature: MA Experiment ID: 108572 Result: Up-regulated in Transcription
  misc_feature: MA Experiment 108572 PARAMETER Experiment Name: At_Drought_cDNA_P Parameter: Timepoint (hr) Value: 1
  misc_feature: MA Experiment 108572 PARAMETER Experiment Name: At_Drought_cDNA_P Parameter: Tissue Value: Aerial
  misc_feature: MA Experiment 108572 PARAMETER Experiment Name: At_Drought_cDNA_P Parameter: Treatment Value: Drought vs. No Drought
  misc_feature: MA Experiment ID: 108573 Result: Up-regulated in Transcription
  misc_feature: MA Experiment 108573 PARAMETER Experiment Name: At_Drought_cDNA_P Parameter: Timepoint (hr) Value: 6
  misc_feature: MA Experiment 108573 PARAMETER Experiment Name: At_Drought_cDNA_P Parameter: Tissue Value: Aerial
  misc_feature: MA Experiment 108573 PARAMETER Experiment Name: At_Drought_cDNA_P Parameter: Treatment Value: Drought vs. No Drought
  misc_feature: MA Experiment ID: 108576 Result: Down-regulated in Transcription
  misc_feature: MA Experiment 108576 PARAMETER Experiment Name: At_42deg_Heat_cDNA_P Parameter: Temperature (deg C) Value: 42 vs. 22
  misc_feature: MA Experiment 108576 PARAMETER Experiment Name: At_42deg_Heat_cDNA_P Parameter: Timepoint (hr) Value: 1
  misc_feature: MA Experiment 108576 PARAMETER Experiment Name: At_42deg_Heat_cDNA_P Parameter: Tissue Value: Aerial
  misc_feature: MA Experiment ID: 108577 Result: Down-regulated in Transcription
  misc_feature: MA Experiment 108577 PARAMETER Experiment Name: At_42deg_Heat_cDNA_P Parameter: Temperature (deg C) Value: 42 vs. 22
  misc_feature: MA Experiment 108577 PARAMETER Experiment Name: At_42deg_Heat_cDNA_P Parameter: Timepoint (hr) Value: 6
  misc_feature: MA Experiment 108577 PARAMETER Experiment Name: At_42deg_Heat_cDNA_P Parameter: Tissue Value: Aerial
  misc_feature: MA Experiment ID: 108595 Result: Down-regulated in Transcription
  misc_feature: MA Experiment 108595 PARAMETER Experiment Name: At_Ler-pi_Ovule_cDNA_P Parameter: Plant Line Value: null
  misc_feature: MA Experiment ID: 20000111 Result: Down-regulated in Transcription
  misc_feature: MA Experiment 20000111 PARAMETER Experiment Name: At_42deg_Heat_cDNA_P Parameter: Temperature (deg C) Value: 42 vs. 22
  misc_feature: MA Experiment 20000111 PARAMETER Experiment Name: At_42deg_Heat_cDNA_P Parameter: Timepoint (hr) Value: 6
  misc_feature: MA Experiment 20000111 PARAMETER Experiment Name: At_42deg_Heat_cDNA_P Parameter: Tissue Value: Aerial
  misc_feature: MA Experiment ID: 20000112 Result: Down-regulated in Transcription
  misc_feature: MA Experiment 20000112 PARAMETER Experiment Name: At_42deg_Heat_cDNA_P Parameter: Temperature (deg C) Value: 42 vs. 22
  misc_feature: MA Experiment 20000112 PARAMETER Experiment Name: At_42deg_Heat_cDNA_P Parameter: Timepoint (hr) Value: 2
  misc_feature: MA Experiment 20000112 PARAMETER Experiment Name: At_42deg_Heat_cDNA_P Parameter: Tissue Value: Aerial
  misc_feature: MA Experiment ID: 20000113 Result: Down-regulated in Transcription
  misc_feature: MA Experiment 20000113 PARAMETER Experiment Name: At_42deg_Heat_cDNA_P Parameter: Temperature (deg C) Value: 42 vs. 22
  misc_feature: MA Experiment 20000113 PARAMETER Experiment Name: At_42deg_Heat_cDNA_P Parameter: Timepoint (hr) Value: 8
  misc_feature: MA Experiment 20000113 PARAMETER Experiment Name: At_42deg_Heat_cDNA_P Parameter: Tissue Value: Aerial
  misc_feature: MA Experiment ID: 20000144 Result: Down-regulated in Transcription
  misc_feature: MA Experiment 20000144 PARAMETER Experiment Name: At_42deg_Heat_cDNA_P Parameter: Temperature (deg C) Value: 42 vs. 22
  misc_feature: MA Experiment 20000144 PARAMETER Experiment Name: At_42deg_Heat_cDNA_P Parameter: Timepoint (hr) Value: 1
  misc_feature: MA Experiment 20000144 PARAMETER Experiment Name: At_42deg_Heat_cDNA_P Parameter: Tissue Value: Aerial
  misc_feature: MA Experiment ID: 20000185 Result: Down-regulated in Transcription
  misc_feature: MA Experiment 20000185 PARAMETER Experiment Name: At_Roots__P Parameter: Age (day) Value: 7 vs. 21
  misc_feature: MA Experiment 20000185 PARAMETER Experiment Name: At_Roots__P Parameter: Organism Value: A. thaliana
  misc_feature: MA Experiment 20000185 PARAMETER Experiment Name: At_Roots__P Parameter: Tissue Value: Roots vs. Whole Plant
  misc_feature: MA Experiment ID: 20000265 Result: Down-regulated in Transcription
  misc_feature: MA Experiment 20000265 PARAMETER Experiment Name: At_Open_Flower_P Parameter: Age (day) Value: 21
  misc_feature: MA Experiment 20000265 PARAMETER Experiment Name: At_Open_Flower_P Parameter: Plant Line Value: WS
  misc_feature: MA Experiment 20000265 PARAMETER Experiment Name: At_Open_Flower_P Parameter: Tissue Value: Closed Flower vs. Whole Plant
  misc_feature: MA Experiment ID: 20000286 Result: Down-regulated in Transcription
  misc_feature: MA Experiment 20000286 PARAMETER Experiment Name: At_Open_Flower_P Parameter: Age (day) Value: 21
  misc_feature: MA Experiment 20000286 PARAMETER Experiment Name: At_Open_Flower_P Parameter: Plant Line Value: WS
  misc_feature: MA Experiment 20000286 PARAMETER Experiment Name: At_Open_Flower_P Parameter: Tissue Value: Half Open vs. Whole Plant
  misc_feature: MA Experiment ID: 20000439 Result: Down-regulated in Transcription
  misc_feature: MA Experiment 20000439 PARAMETER Experiment Name: At_Roots__P Parameter: Age (day) Value: 14 vs. 21
  misc_feature: MA Experiment 20000439 PARAMETER Experiment Name: At_Roots__P Parameter: Organism Value: A. thaliana
  misc_feature: MA Experiment 20000439 PARAMETER Experiment Name: At_Roots__P Parameter: Tissue Value: Roots vs. Whole Plant
  misc_feature: MA Experiment ID: 20000794 Result: Down-regulated in Transcription
  misc_feature: MA Experiment 20000794 PARAMETER Experiment Name: At_Petals_P Parameter: Age (day) Value: 23-25 days
  misc_feature: MA Experiment 20000794 PARAMETER Experiment Name: At_Petals_P Parameter: Plant Line Value: WS
  misc_feature: MA Experiment 20000794 PARAMETER Experiment Name: At_Petals_P Parameter: Tissue Value: Petals vs. Whole plant
  misc_feature: MA Experiment ID: 20001557 Result: Down-regulated in Transcription
  misc_feature: MA Experiment 20001557 PARAMETER Experiment Name: At_Drought_Soil_Dry_P Parameter: Age (day) Value: 27
  misc_feature: MA Experiment 20001557 PARAMETER Experiment Name: At_Drought_Soil_Dry_P Parameter: Organism Value: A. thaliana
  misc_feature: MA Experiment 20001557 PARAMETER Experiment Name: At_Drought_Soil_Dry_P Parameter: Plant Line Value: WS
  misc_feature: MA Experiment 20001557 PARAMETER Experiment Name: At_Drought_Soil_Dry_P Parameter: Post Timepoint (hr) Value: 3
  misc_feature: MA Experiment 20001557 PARAMETER Experiment Name: At_Drought_Soil_Dry_P Parameter: Post-Treatment Value: Re-Water vs. No Drought
  misc_feature: MA Experiment 20001557 PARAMETER Experiment Name: At_Drought_Soil_Dry_P Parameter: Timepoint (day) Value: 13
  misc_feature: MA Experiment 20001557 PARAMETER Experiment Name: At_Drought_Soil_Dry_P Parameter: Treatment Value: Drought vs. No Drought
aaaaaaagataaattacaaaatatcattttccttatcttattgacttgtcaagattctcttcttcttcttcttcttcctcctcctccaaactcagttccctccgtccatggcagcaaccttacctctatctccgatcaatcatcagttgtgtcggttcgggaacaactctttgacgactcaccggttctgttctcctggcttcttgatttcttctccttgtttcattggtttgaccggaatgggctctgctactcagttacgtgctcgtcgttctctgatctcttcagcagttgcgacgaattcgctgttgcatgacgtcggagccgccgtggcagtgcttggtggagcatacgcgcttgtcttaagcttcgagagtctcaccaagcgaaacgtcattcaacagagtttgagcagaaagcttgtgcatatactctcaggtctgcttttcgtacttgcgtggccaatcttcagcggatcgaccgaggctcgatactttgctgcttttgttccgttagtgaatggcttaaggcttgttattaacggactatccatttccccaaattcgatgctaatcaaatccgtcacaagagaagggagagcagaagagttgcttaaaggtcctttgttctacgttctagctcttcttttctctgcggttttcttctggagagagtctcctatcggtatgatctcgttagcaatgatgtgtggtggcgatggaatagctgatataatgggacgtaagtttgggtcaactaagataccttacaacccaagaaagagttgggcaggaagcatctccatgttcatcttcggcttcttcatctccatcgcattactttactattactcaagccttgggtaccttcacatgaactgggaaacgaccttgcagagagtagcaatggtctcaatggtcgccacggtagtcgagtcgctacccatcaccgatcaattagacgacaatatttcggttcctctggctactattttagctgcttatttaagtttcggatattagattaatccctcataaaccgaatgtgtatatacgtatttttttaatgaatccgaccttacaaatgtttcc

SEQ ID NO: 41956 - protein, 304 aa, Arabidopsis thaliana
  peptide (1)..(304): Ceres Seq. ID no. 13488787
  misc_feature (69)..(300): Homolog of NCBI NO: 21674801 NR Description: conserved hypothetical protein [Chlorobium
  misc_feature (62)..(304): Homolog of NCBI NO: 28850457 NR Description: similar to Oryza sativa (japonica
  misc_feature (48)..(272): Homolog of NCBI NO: 8843778 NR Description: emb|CAB85555.1~gene_id:MZN1.2~similar to unknown
  misc_feature (48)..(302): Homolog of NCBI NO: 21593148 NR Description: unknown [Arabidopsis thaliana]
  misc_feature (48)..(302): Homolog of NCBI NO: 15237702 NR Description: expressed protein [Arabidopsis thaliana]
  misc_feature (54)..(302): Homolog of NCBI NO: 34907982 NR Description: P0446G04.23 [Oryza sativa (japonica
  misc_feature (2)..(304): Homolog of NCBI NO: 32488404 NR Description: OSJNBa0043A12.34 [Oryza sativa (japonica
  misc_feature (1)..(304): Homolog of NCBI NO: 21537252 NR Description: unknown [Arabidopsis thaliana]
  misc_feature (1)..(304): Homolog of NCBI NO: 15238184 NR Description: expressed protein [Arabidopsis thaliana]
  misc_feature (1)..(304): Homolog of NCBI NO: 28393229 NR Description: unknown protein [Arabidopsis thaliana]
MAATLPLSPINHQLCRFGNNSLTTHRFCSPGFLISSPCFIGLTGMGSATQLRARRSLISSAVATNSLLHDVGAAVAVLGGAYALVLSFESLTKRNVIQQSLSRKLVHILSGLLFVLAWPIFSGSTEARYFAAFVPLVNGLRLVINGLSISPNSMLIKSVTREGRAEELLKGPLFYVLALLFSAVFFWRESPIGMISLAMMCGGDGIADIMGRKFGSTKIPYNPRKSWAGSISMFIFGFFISIALLYYYSSLGYLHMNWETTLQRVAMVSMVATVVESLPITDQLDDNISVPLATILAAYLSFGY

SEQ ID NO: 41957 - protein, 260 aa, Arabidopsis thaliana
  peptide (1)..(260): Ceres Seq. ID no. 13488788
  misc_feature (25)..(256): Homolog of NCBI NO: 21674801 NR Description: conserved hypothetical protein [Chlorobium
  misc_feature (18)..(260): Homolog of NCBI NO: 28850457 NR Description: similar to Oryza sativa (japonica
  misc_feature (4)..(228): Homolog of NCBI NO: 8843778 NR Description: emb|CAB85555.1~gene_id:MZN1.2~similar to unknown
  misc_feature (4)..(258): Homolog of NCBI NO: 21593148 NR Description: unknown [Arabidopsis thaliana]
  misc_feature (4)..(258): Homolog of NCBI NO: 15237702 NR Description: expressed protein [Arabidopsis thaliana]
  misc_feature (10)..(258): Homolog of NCBI NO: 34907982 NR Description: P0446G04.23 [Oryza sativa (japonica
  misc_feature (1)..(260): Homolog of NCBI NO: 32488404 NR Description: OSJNBa0043A12.34 [Oryza sativa (japonica
  misc_feature (1)..(260): Homolog of NCBI NO: 21537252 NR Description: unknown [Arabidopsis thaliana]
  misc_feature (1)..(260): Homolog of NCBI NO: 15238184 NR Description: expressed protein [Arabidopsis thaliana]
  misc_feature (1)..(260): Homolog of NCBI NO: 28393229 NR Description: unknown protein [Arabidopsis thaliana]
MGSATQLRARRSLISSAVATNSLLHDVGAAVAVLGGAYALVLSFESLTKRNVIQQSLSRKLVHILSGLLFVLAWPIFSGSTEARYFAAFVPLVNGLRLVINGLSISPNSMLIKSVTREGRAEELLKGPLFYVLALLFSAVFFWRESPIGMISLAMMCGGDGIADIMGRKFGSTKIPYNPRKSWAGSISMFIFGFFISIALLYYYSSLGYLHMNWETTLQRVAMVSMVATVVESLPITDQLDDNISVPLATILAAYLSFGY

SEQ ID NO: 41958 - DNA, 1340 bp, Arabidopsis thaliana
  misc_feature (1)..(1340): Ceres Seq. ID no. 13488762
  misc_feature: MA Experiment ID: 108577 Result: Down-regulated in Transcription
  misc_feature: MA Experiment 108577 PARAMETER Experiment Name: At_42deg_Heat_cDNA_P Parameter: Temperature (deg C) Value: 42 vs. 22
  misc_feature: MA Experiment 108577 PARAMETER Experiment Name: At_42deg_Heat_cDNA_P Parameter: Timepoint (hr) Value: 6
  misc_feature: MA Experiment 108577 PARAMETER Experiment Name: At_42deg_Heat_cDNA_P Parameter: Tissue Value: Aerial
  misc_feature: MA Experiment ID: 20000069 Result: Up-regulated in Transcription
  misc_feature: MA Experiment 20000069 PARAMETER Experiment Name: At_100uM_ABA_Mutants_cDNA_P Parameter: Plant Line Value: CS23
  misc_feature: MA Experiment 20000069 PARAMETER Experiment Name: At_100uM_ABA_Mutants_cDNA_P Parameter: Timepoint (hr) Value: 6
  misc_feature: MA Experiment 20000069 PARAMETER Experiment Name: At_100uM_ABA_Mutants_cDNA_P Parameter: Tissue Value: Aerial
  misc_feature: MA Experiment 20000069 PARAMETER Experiment Name: At_100uM_ABA_Mutants_cDNA_P Parameter: Treatment Value: 100uM ABA vs. No Treatment
  misc_feature: MA Experiment ID: 20000070 Result: Up-regulated in Transcription
  misc_feature: MA Experiment 20000070 PARAMETER Experiment Name: At_100uM_ABA_Mutants_cDNA_P Parameter: Plant Line Value: CS24
  misc_feature: MA Experiment 20000070 PARAMETER Experiment Name: At_100uM_ABA_Mutants_cDNA_P Parameter: Timepoint (hr) Value: 6
  misc_feature: MA Experiment 20000070 PARAMETER Experiment Name: At_100uM_ABA_Mutants_cDNA_P Parameter: Tissue Value: Aerial
  misc_feature: MA Experiment 20000070 PARAMETER Experiment Name: At_100uM_ABA_Mutants_cDNA_P Parameter: Treatment Value: 100uM ABA vs. No Treatment
  misc_feature: MA Experiment ID: 20000071 Result: Up-regulated in Transcription
  misc_feature: MA Experiment 20000071 PARAMETER Experiment Name: At_100uM_ABA_Mutants_cDNA_P Parameter: Plant Line Value: CS8104
  misc_feature: MA Experiment 20000071 PARAMETER Experiment Name: At_100uM_ABA_Mutants_cDNA_P Parameter: Timepoint (hr) Value: 6
  misc_feature: MA Experiment 20000071 PARAMETER Experiment Name: At_100uM_ABA_Mutants_cDNA_P Parameter: Tissue Value: Aerial
  misc_feature: MA Experiment 20000071 PARAMETER Experiment Name: At_100uM_ABA_Mutants_cDNA_P Parameter: Treatment Value: 100uM ABA vs. No Treatment
  misc_feature: MA Experiment ID: 20000111 Result: Down-regulated in Transcription
  misc_feature: MA Experiment 20000111 PARAMETER Experiment Name: At_42deg_Heat_cDNA_P Parameter: Temperature (deg C) Value: 42 vs. 22
  misc_feature: MA Experiment 20000111 PARAMETER Experiment Name: At_42deg_Heat_cDNA_P Parameter: Timepoint (hr) Value: 6
  misc_feature: MA Experiment 20000111 PARAMETER Experiment Name: At_42deg_Heat_cDNA_P Parameter: Tissue Value: Aerial
  misc_feature: MA Experiment ID: 20000113 Result: Down-regulated in Transcription
  misc_feature: MA Experiment 20000113 PARAMETER Experiment Name: At_42deg_Heat_cDNA_P Parameter: Temperature (deg C) Value: 42 vs. 22
  misc_feature: MA Experiment 20000113 PARAMETER Experiment Name: At_42deg_Heat_cDNA_P Parameter: Timepoint (hr) Value: 8
  misc_feature: MA Experiment 20000113 PARAMETER Experiment Name: At_42deg_Heat_cDNA_P Parameter: Tissue Value: Aerial
  misc_feature: MA Experiment ID: 20000117 Result: Up-regulated in Transcription
  misc_feature: MA Experiment 20000117 PARAMETER Experiment Name: At_100uM_ABA_Mutants_cDNA_P Parameter: Plant Line Value: Columbia
  misc_feature: MA Experiment 20000117 PARAMETER Experiment Name: At_100uM_ABA_Mutants_cDNA_P Parameter: Timepoint (hr) Value: 6
  misc_feature: MA Experiment 20000117 PARAMETER Experiment Name: At_100uM_ABA_Mutants_cDNA_P Parameter: Tissue Value: Aerial
  misc_feature: MA Experiment 20000117 PARAMETER Experiment Name: At_100uM_ABA_Mutants_cDNA_P Parameter: Treatment Value: 100uM ABA vs. No Treatment
  misc_feature: MA Experiment ID: 20000182 Result: Up-regulated in Transcription
  misc_feature: MA Experiment 20000182 PARAMETER Experiment Name: At_2mM_SA_P Parameter: Age (day) Value: 14
  misc_feature: MA Experiment 20000182 PARAMETER Experiment Name: At_2mM_SA_P Parameter: Organism Value: A. thaliana
  misc_feature: MA Experiment 20000182 PARAMETER Experiment Name: At_2mM_SA_P Parameter: Plant Line Value: WS
  misc_feature: MA Experiment 20000182 PARAMETER Experiment Name: At_2mM_SA_P Parameter: Timepoint (hr) Value: 6
  misc_feature: MA Experiment 20000182 PARAMETER Experiment Name: At_2mM_SA_P Parameter: Tissue Value: Aerial
  misc_feature: MA Experiment 20000182 PARAMETER Experiment Name: At_2mM_SA_P Parameter: Treatment Value: 2mM SA vs. No Treatment
  misc_feature: MA Experiment ID: 20000437 Result: Up-regulated in Transcription
  misc_feature: MA Experiment 20000437 PARAMETER Experiment Name: At_Drought_P Parameter: Age (day) Value: 8
  misc_feature: MA Experiment 20000437 PARAMETER Experiment Name: At_Drought_P Parameter: Organism Value: A. thaliana
  misc_feature: MA Experiment 20000437 PARAMETER Experiment Name: At_Drought_P Parameter: Plant Line Value: WS
  misc_feature: MA Experiment 20000437 PARAMETER Experiment Name: At_Drought_P Parameter: Timepoint (hr) Value: 24
  misc_feature: MA Experiment 20000437 PARAMETER Experiment Name: At_Drought_P Parameter: Tissue Value: Whole Plant
  misc_feature: MA Experiment 20000437 PARAMETER Experiment Name: At_Drought_P Parameter: Treatment Value: Drought vs. No Drought
  misc_feature: MA Experiment ID: 20000438 Result: Down-regulated in Transcription
  misc_feature: MA Experiment 20000438 PARAMETER Experiment Name: At_Shoots__P Parameter: Age (day) Value: 14
  misc_feature: MA Experiment 20000438 PARAMETER Experiment Name: At_Shoots__P Parameter: Tissue Value: Shoots vs. Whole Plant
  misc_feature: MA Experiment ID: 20000794 Result: Up-regulated in Transcription
  misc_feature: MA Experiment 20000794 PARAMETER Experiment Name: At_Petals_P Parameter: Age (day) Value: 23-25 days
  misc_feature: MA Experiment 20000794 PARAMETER Experiment Name: At_Petals_P Parameter: Plant Line Value: WS
  misc_feature: MA Experiment 20000794 PARAMETER Experiment Name: At_Petals_P Parameter: Tissue Value: Petals vs. Whole plant
  misc_feature: MA Experiment ID: 20001558 Result: Down-regulated in Transcription
  misc_feature: MA Experiment 20001558 PARAMETER Experiment Name: At_Drought_Soil_Dry_P Parameter: Age (day) Value: 27
  misc_feature: MA Experiment 20001558 PARAMETER Experiment Name: At_Drought_Soil_Dry_P Parameter: Organism Value: A. thaliana
  misc_feature: MA Experiment 20001558 PARAMETER Experiment Name: At_Drought_Soil_Dry_P Parameter: Plant Line Value: WS
  misc_feature: MA Experiment 20001558 PARAMETER Experiment Name: At_Drought_Soil_Dry_P Parameter: Post Timepoint (hr) Value: 6
  misc_feature: MA Experiment 20001558 PARAMETER Experiment Name: At_Drought_Soil_Dry_P Parameter: Post-Treatment Value: Re-Water vs. No Drought
  misc_feature: MA Experiment 20001558 PARAMETER Experiment Name: At_Drought_Soil_Dry_P Parameter: Timepoint (day) Value: 13
  misc_feature: MA Experiment 20001558 PARAMETER Experiment Name: At_Drought_Soil_Dry_P Parameter: Treatment Value: Drought vs. No Drought
  misc_feature: MA Experiment ID: 20001757 Result: Down-regulated in Transcription
  misc_feature: MA Experiment 20001757 PARAMETER Experiment Name: At_50mM_NH4NO3_L-to-H_P Parameter: Timepoint (hr) Value: 6
  misc_feature: MA Experiment 20001757 PARAMETER Experiment Name: At_50mM_NH4NO3_L-to-H_P Parameter: Tissue Value: Leaf
  misc_feature: MA Experiment 20001757 PARAMETER Experiment Name: At_50mM_NH4NO3_L-to-H_P Parameter: Treatment Value: 50mM NH4NO3 vs 100mM Mannitol
  misc_feature: MA Experiment ID: 20001905 Result: Up-regulated in Transcription
  misc_feature: MA Experiment 20001905 PARAMETER Experiment Name: At_Drought_Reproduction_P Parameter: Age (day) Value: 40
  misc_feature: MA Experiment 20001905 PARAMETER Experiment Name: At_Drought_Reproduction_P Parameter: Organism Value: A. thaliana
  misc_feature: MA Experiment 20001905 PARAMETER Experiment Name: At_Drought_Reproduction_P Parameter: Plant Line Value: WS
  misc_feature: MA Experiment 20001905 PARAMETER Experiment Name: At_Drought_Reproduction_P Parameter: Timepoint (day) Value: 10
  misc_feature: MA Experiment 20001905 PARAMETER Experiment Name: At_Drought_Reproduction_P Parameter: Tissue Value: Rosettes
  misc_feature: MA Experiment 20001905 PARAMETER Experiment Name: At_Drought_Reproduction_P Parameter: Treatment Value: Drought vs. No Drought
gtcttggtctccgacaggaccgactctgttctcgtgttcttttttccctgtcatttccagatttcataaagctaaaagaaatctaatttctttgtttaccagagacttaaactggtttctgtatcttttactgggttctttcagatatataaatggatcaaatcgttaacgtggatgagtttcaagagctggccaaacaggccctccctaagatgtactatgatttctacaatggaggagcagaggatcaacacactctcaatgaaaatgtccaagctttccgtagaatcatgtttaggcctagggttcttgttgatgtgagcaacatagatatgtctacaagtatgttgggttacccaatctcagctcccatcatgattgctccaacagcaatgcataagttggctcatcctaaaggagaaatcgccacagcgaaagctgcagctgcgtgtaacactatcatgatagtatcattcatgtctacttgcactattgaggaggttgcttccagttgtaacgctgttcggtttcttcaaatatatgtgtacaagagacgtgatgtaacagctcagattgtgaaaagagctgaaaaagctggattcaaggctatagttctaactgttgatgttcccagacttggtagaagggaagcagatataaagaacaaaatgatatccccacagctgaagaattttgaaggcttagtttcaaccgaagtccgacctaatgaaggttcaggggttgaagcctttgcctctagtgcatttgatgcttcgttaagctggaaggatatcgaatggttaagatctattacaaagttgccaattctggtcaaagggttactcacacgtgaagacgctcttaaggctgttgaagccggtgtagatggaatagtggtatccaaccacggggctcgccagctcgactattccccggctacgataactgttttagaagaggttgttcatgctgtgaaaggtaggattccggttttgcttgatggaggagtaagacgaggaacagatgttttcaaagcgctggcgctcggagcacaagctgttcttatagggaggcctatagtctatgggcttgcagctaagggtgaagatggagtgaaaaaagtgattgatatgctgaaaaatgagtttgagattactatggccctttctggctgtccaaccattgatgacgtaaccagaaaccatgttaggacagagaatgagagaattaaatctatgctctgatcctaaaaccaacagatctagtctcagagacttaatcagacagttggacaacagtatgaaatactgtcaatgcacataaataaaaagctctatttc

SEQ ID NO: 41959 - protein, 363 aa, Arabidopsis thaliana
  peptide (1)..(363): Ceres Seq. ID no. 13488763
  misc_feature (14)..(354): Pfam Name: FMN-dependent dehydrogenase Pfam Description: FMN-dependent dehydrogenase
  misc_feature (1)..(362): Homolog of NCBI NO: 34395056 NR Description: putative glycolate oxidase
  misc_feature (3)..(355): Homolog of NCBI NO: 16226772 NR Description: AT3g14420/MOA2_2 [Arabidopsis thaliana]
  misc_feature (3)..(355): Homolog of NCBI NO: 999542 NR Description: Chain A, Glycolate Oxidase (E.C.1.1.3.15) Mutant
  misc_feature (3)..(355): Homolog of NCBI NO: 15231850 NR Description: glycolate oxidase -related [Arabidopsis thaliana]
  misc_feature (5)..(363): Homolog of NCBI NO: 33146942 NR Description: putative (S)-2-hydroxy-acid oxidase
  misc_feature (1)..(363): Homolog of NCBI NO: 21618144 NR Description: glycolate oxidase, putative [Arabidopsis thaliana]
  misc_feature (1)..(363): Homolog of NCBI NO: 9294640 NR Description: glycolate oxidase [Arabidopsis thaliana]
  misc_feature (1)..(363): Homolog of NCBI NO: 15231792 NR Description: glycolate oxidase -related [Arabidopsis thaliana]
  misc_feature (1)..(363): Homolog of NCBI NO: 21537253 NR Description: glycolate oxidase, putative [Arabidopsis thaliana]
  misc_feature (1)..(363): Homolog of NCBI NO: 15231789 NR Description: glycolate oxidase -related [Arabidopsis thaliana]
MDQIVNVDEFQELAKQALPKMYYDFYNGGAEDQHTLNENVQAFRRIMFRPRVLVDVSNIDMSTSMLGYPISAPIMIAPTAMHKLAHPKGEIATAKAAAACNTIMIVSFMSTCTIEEVASSCNAVRFLQIYVYKRRDVTAQIVKRAEKAGFKAIVLTVDVPRLGRREADIKNKMISPQLKNFEGLVSTEVRPNEGSGVEAFASSAFDASLSWKDIEWLRSITKLPILVKGLLTREDALKAVEAGVDGIVVSNHGARQLDYSPATITVLEEVVHAVKGRIPVLLDGGVRRGTDVFKALALGAQAVLIGRPIVYGLAAKGEDGVKKVIDMLKNEFEITMALSGCPTIDDVTRNHVRTENERIKSML

SEQ ID NO: 41960 - protein, 343 aa, Arabidopsis thaliana
  peptide (1)..(343): Ceres Seq. ID no. 13488764
  misc_feature (1)..(334): Pfam Name: FMN-dependent dehydrogenase Pfam Description: FMN-dependent dehydrogenase
  misc_feature (1)..(342): Homolog of NCBI NO: 34395056 NR Description: putative glycolate oxidase
  misc_feature (1)..(335): Homolog of NCBI NO: 16226772 NR Description: AT3g14420/MOA2_2 [Arabidopsis thaliana]
  misc_feature (1)..(335): Homolog of NCBI NO: 999542 NR Description: Chain A, Glycolate Oxidase (E.C.1.1.3.15) Mutant
  misc_feature (1)..(335): Homolog of NCBI NO: 15231850 NR Description: glycolate oxidase -related [Arabidopsis thaliana]
  misc_feature (1)..(343): Homolog of NCBI NO: 33146942 NR Description: putative (S)-2-hydroxy-acid oxidase
  misc_feature (1)..(343): Homolog of NCBI NO: 21618144 NR Description: glycolate oxidase, putative [Arabidopsis thaliana]
  misc_feature (1)..(343): Homolog of NCBI NO: 9294640 NR Description: glycolate oxidase [Arabidopsis thaliana]
  misc_feature (1)..(343): Homolog of NCBI NO: 15231792 NR Description: glycolate oxidase -related [Arabidopsis thaliana]
  misc_feature (1)..(343): Homolog of NCBI NO: 21537253 NR Description: glycolate oxidase, putative [Arabidopsis thaliana]
  misc_feature (1)..(343): Homolog of NCBI NO: 15231789 NR Description: glycolate oxidase -related [Arabidopsis thaliana]
MYYDFYNGGAEDQHTLNENVQAFRRIMFRPRVLVDVSNIDMSTSMLGYPISAPIMIAPTAMHKLAHPKGEIATAKAAAACNTIMIVSFMSTCTIEEVASSCNAVRFLQIYVYKRRDVTAQIVKRAEKAGFKAIVLTVDVPRLGRREADIKNKMISPQLKNFEGLVSTEVRPNEGSGVEAFASSAFDASLSWKDIEWLRSITKLPILVKGLLTREDALKAVEAGVDGIVVSNHGARQLDYSPATITVLEEVVHAVKGRIPVLLDGGVRRGTDVFKALALGAQAVLIGRPIVYGLAAKGEDGVKKVIDMLKNEFEITMALSGCPTIDDVTRNHVRTENERIKSML

SEQ ID NO: 41961 - protein, 317 aa, Arabidopsis thaliana
  peptide (1)..(317): Ceres Seq. ID no. 13488765
  misc_feature (1)..(308): Pfam Name: FMN-dependent dehydrogenase Pfam Description: FMN-dependent dehydrogenase
  misc_feature (1)..(316): Homolog of NCBI NO: 34395056 NR Description: putative glycolate oxidase
  misc_feature (1)..(309): Homolog of NCBI NO: 16226772 NR Description: AT3g14420/MOA2_2 [Arabidopsis thaliana]
  misc_feature (1)..(309): Homolog of NCBI NO: 999542 NR Description: Chain A, Glycolate Oxidase (E.C.1.1.3.15) Mutant
  misc_feature (1)..(309): Homolog of NCBI NO: 15231850 NR Description: glycolate oxidase -related [Arabidopsis thaliana]
  misc_feature (1)..(317): Homolog of NCBI NO: 33146942 NR Description: putative (S)-2-hydroxy-acid oxidase
  misc_feature (1)..(317): Homolog of NCBI NO: 21618144 NR Description: glycolate oxidase, putative [Arabidopsis thaliana]
  misc_feature (1)..(317): Homolog of NCBI NO: 9294640 NR Description: glycolate oxidase [Arabidopsis thaliana]
  misc_feature (1)..(317): Homolog of NCBI NO: 15231792 NR Description: glycolate oxidase -related [Arabidopsis thaliana]
  misc_feature (1)..(317): Homolog of NCBI NO: 21537253 NR Description: glycolate oxidase, putative [Arabidopsis thaliana]
  misc_feature (1)..(317): Homolog of NCBI NO: 15231789 NR Description: glycolate oxidase -related [Arabidopsis thaliana]
MFRPRVLVDVSNIDMSTSMLGYPISAPIMIAPTAMHKLAHPKGEIATAKAAAACNTIMIVSFMSTCTIEEVASSCNAVRFLQIYVYKRRDVTAQIVKRAEKAGFKAIVLTVDVPRLGRREADIKNKMISPQLKNFEGLVSTEVRPNEGSGVEAFASSAFDASLSWKDIEWLRSITKLPILVKGLLTREDALKAVEAGVDGIVVSNHGARQLDYSPATITVLEEVVHAVKGRIPVLLDGGVRRGTDVFKALALGAQAVLIGRPIVYGLAAKGEDGVKKVIDMLKNEFEITMALSGCPTIDDVTRNHVRTENERIKSML

SEQ ID NO: 41962 - DNA, 1135 bp, Arabidopsis thaliana
  misc_feature (1)..(1135): Ceres Seq. ID no. 12385211
  misc_feature: MA Experiment ID: 108434 Result: Up-regulated in Transcription
  misc_feature: MA Experiment 108434 PARAMETER Experiment Name: At_Root_Tips_cDNA_P Parameter: Tissue Value: Root Tips
  misc_feature: MA Experiment ID: 108463 Result: Down-regulated in Transcription
  misc_feature: MA Experiment 108463 PARAMETER Experiment Name: At_Germinating_Seeds_cDNA_P Parameter: Age (day) Value: 3 vs. 0
  misc_feature: MA Experiment 108463 PARAMETER Experiment Name: At_Germinating_Seeds_cDNA_P Parameter: Tissue Value: Germinating Seeds
  misc_feature: MA Experiment ID: 108573 Result: Up-regulated in Transcription
  misc_feature: MA Experiment 108573 PARAMETER Experiment Name: At_Drought_cDNA_P Parameter: Timepoint (hr) Value: 6
  misc_feature: MA Experiment 108573 PARAMETER Experiment Name: At_Drought_cDNA_P Parameter: Tissue Value: Aerial
  misc_feature: MA Experiment 108573 PARAMETER Experiment Name: At_Drought_cDNA_P Parameter: Treatment Value: Drought vs. No Drought
  misc_feature: MA Experiment ID: 108595 Result: Down-regulated in Transcription
  misc_feature: MA Experiment 108595 PARAMETER Experiment Name: At_Ler-pi_Ovule_cDNA_P Parameter: Plant Line Value: null
  misc_feature: MA Experiment ID: 20000111 Result: Up-regulated in Transcription
  misc_feature: MA Experiment 20000111 PARAMETER Experiment Name: At_42deg_Heat_cDNA_P Parameter: Temperature (deg C) Value: 42 vs. 22
  misc_feature: MA Experiment 20000111 PARAMETER Experiment Name: At_42deg_Heat_cDNA_P Parameter: Timepoint (hr) Value: 6
  misc_feature: MA Experiment 20000111 PARAMETER Experiment Name: At_42deg_Heat_cDNA_P Parameter: Tissue Value: Aerial
  misc_feature: MA Experiment ID: 20000112 Result: Up-regulated in Transcription
  misc_feature: MA Experiment 20000112 PARAMETER Experiment Name: At_42deg_Heat_cDNA_P Parameter: Temperature (deg C) Value: 42 vs. 22
  misc_feature: MA Experiment 20000112 PARAMETER Experiment Name: At_42deg_Heat_cDNA_P Parameter: Timepoint (hr) Value: 2
  misc_feature: MA Experiment 20000112 PARAMETER Experiment Name: At_42deg_Heat_cDNA_P Parameter: Tissue Value: Aerial
  misc_feature: MA Experiment ID: 20000113 Result: Up-regulated in Transcription
  misc_feature: MA Experiment 20000113 PARAMETER Experiment Name: At_42deg_Heat_cDNA_P Parameter: Temperature (deg C) Value: 42 vs. 22
  misc_feature: MA Experiment 20000113 PARAMETER Experiment Name: At_42deg_Heat_cDNA_P Parameter: Timepoint (hr) Value: 8
  misc_feature: MA Experiment 20000113 PARAMETER Experiment Name: At_42deg_Heat_cDNA_P Parameter: Tissue Value: Aerial
  misc_feature: MA Experiment ID: 20000173 Result: Up-regulated in Transcription
  misc_feature: MA Experiment 20000173 PARAMETER Experiment Name: At_42deg_Heat_P Parameter: Age (day) Value: 14
  misc_feature: MA Experiment 20000173 PARAMETER Experiment Name: At_42deg_Heat_P Parameter: Organism Value: A. thaliana
  misc_feature: MA Experiment 20000173 PARAMETER Experiment Name: At_42deg_Heat_P Parameter: Plant Line Value: WS
  misc_feature: MA Experiment 20000173 PARAMETER Experiment Name: At_42deg_Heat_P Parameter: Temperature (deg C) Value: 42 vs. 22
  misc_feature: MA Experiment 20000173 PARAMETER Experiment Name: At_42deg_Heat_P Parameter: Timepoint (hr) Value: 6
  misc_feature: MA Experiment 20000173 PARAMETER Experiment Name: At_42deg_Heat_P Parameter: Tissue Value: Aerial
  misc_feature: MA Experiment ID: 20000224 Result: Down-regulated in Transcription
gggatcgtaagaacagaggatttttctcggccaagttttctctggctcaggtgtttgatgtgaattttttgagggaggggaatgagttcaatgagcagaagcagaagtagaagtagaagtcgtagtcgggatcggtttcgtagtcggagtccgagagacaggagaatgagatctgaacgagtttcttaccatgatgctccttctagaagggagagggagccacgtcgtgccttcagccaaggaaatctctgcaacaactgcaagcgacctggtcactttgcaagagactgttctaatgtttccgtctgtaacaactgtggtcttccagggcacattggcagcagaatgcactgcggaatcacgttgttggaactgtagagaaccgggccacgtagcctcaaactgttcaaacgaaggaatctgccactcctgtggtaaatctggacatcgagccagagactgctctaattcggattctcgtgcaggagacttaaggctctgcaacaactgcttcaaacagggacatcttgccgctgactgcacaaatgacaaggcgtgcaagaactgcaggacttcaggtcacatagctcgcgattgcaggaacgatccagtttgtaacatctgcagtatctcggggcatgttgctagacactgcccaaagggtgacagcaattactctgacagaggaagcagggttcgagatggtggtatgcaaagaggtggtttgagcagaatgagcagagacagagaaggcgttagtgctatgataatatgtcacaattgtggtggccgaggacacagggcgtacgagtgtccgtctgctcgagtcgctgaccgtggattccgccggtactgaggctcttaaatttaccaattgaagttccattcatcttcacctttacccttttagcttctgcactcttgtttttgttgagctacattgttgttttctaatctcatggtttttgtctattggagtgaatcaaggatcgttttagttttggtttgttttcggaaaatttgagacattgcttgtgttgtatgaagtattgaacagattagtgtgatgcagagttctgagttttcagaactcaatattatattaaaaacaaattttaatggtttgctttctccc

SEQ ID NO: 41963 - protein, 221 aa, Arabidopsis thaliana
  peptide (1)..(221): Ceres Seq. ID no. 12385212
  misc_feature (193)..(210): Pfam Name: Zinc knuckle Pfam Description: Zinc knuckle
  misc_feature (59)..(217): Homolog of NCBI NO: 37536582 NR Description: putative zinc finger protein
  misc_feature (47)..(208): Homolog of NCBI NO: 37536582 NR Description: putative zinc finger protein
  misc_feature (54)..(157): Homolog of NCBI NO: 6324074 NR Description: GIG3 suppressor; Gis2p [Saccharomyces cerevisiae]
  misc_feature (46)..(136): Homolog of NCBI NO: 25404984 NR Description: protein F10A5.22 [imported] - Arabidopsis
  misc_feature (46)..(136): Homolog of NCBI NO: 21537255 NR Description: DNA-binding protein [Arabidopsis thaliana]
  misc_feature (46)..(136): Homolog of NCBI NO: 18410883 NR Description: DNA-binding protein
  misc_feature (47)..(216): Homolog of NCBI NO: 37536582 NR Description: putative zinc finger protein
  misc_feature (47)..(221): Homolog of NCBI NO: 25404984 NR Description: protein F10A5.22 [imported] - Arabidopsis
  misc_feature (47)..(221): Homolog of NCBI NO: 21537255 NR Description: DNA-binding protein [Arabidopsis thaliana]
  misc_feature (47)..(221): Homolog of NCBI NO: 18410883 NR Description: DNA-binding protein
MMLLLEGRGSHVVPSAKEISATTASDLVTLQETVLMFPSVTTVVFQGTLAAECTAESRCWNCREPGHVASNCSNEGICHSCGKSGHRARDCSNSDSRAGDLRLCNNCFKQGHLAADCTNDKACKNCRTSGHIARDCRNDPVCNICSISGHVARHCPKGDSNYSDRGSRVRDGGMQRGGLSRMSRDREGVSAMIICHNCGGRGHRAYECPSARVADRGFRRY

SEQ ID NO: 41964 - protein, 220 aa, Arabidopsis thaliana
  peptide (1)..(220): Ceres Seq. ID no. 12385213
  misc_feature (192)..(209): Pfam Name: Zinc knuckle Pfam Description: Zinc knuckle
  misc_feature (58)..(216): Homolog of NCBI NO: 37536582 NR Description: putative zinc finger protein
  misc_feature (46)..(207): Homolog of NCBI NO: 37536582 NR Description: putative zinc finger protein
  misc_feature (53)..(156): Homolog of NCBI NO: 6324074 NR Description: GIG3 suppressor; Gis2p [Saccharomyces cerevisiae]
  misc_feature (45)..(135): Homolog of NCBI NO: 25404984 NR Description: protein F10A5.22 [imported] - Arabidopsis
  misc_feature (45)..(135): Homolog of NCBI NO: 21537255 NR Description: DNA-binding protein [Arabidopsis thaliana]
  misc_feature (45)..(135): Homolog of NCBI NO: 18410883 NR Description: DNA-binding protein
  misc_feature (46)..(215): Homolog of NCBI NO: 37536582 NR Description: putative zinc finger protein
  misc_feature (46)..(220): Homolog of NCBI NO: 25404984 NR Description: protein F10A5.22 [imported] - Arabidopsis
  misc_feature (46)..(220): Homolog of NCBI NO: 21537255 NR Description: DNA-binding protein [Arabidopsis thaliana]
  misc_feature (46)..(220): Homolog of NCBI NO: 18410883 NR Description: DNA-binding protein
MLLLEGRGSHVVPSAKEISATTASDLVTLQETVLMFPSVTTVVFQGTLAAECTAESRCWNCREPGHVASNCSNEGICHSCGKSGHRARDCSNSDSRAGDLRLCNNCFKQGHLAADCTNDKACKNCRTSGHIARDCRNDPVCNICSISGHVARHCPKGDSNYSDRGSRVRDGGMQRGGLSRMSRDREGVSAMIICHNCGGRGHRAYECPSARVADRGFRRY

SEQ ID NO: 41965 - protein, 186 aa, Arabidopsis thaliana
  peptide (1)..(186): Ceres Seq. ID no. 12385214
  misc_feature (158)..(175): Pfam Name: Zinc knuckle Pfam Description: Zinc knuckle
  misc_feature (24)..(182): Homolog of NCBI NO: 37536582 NR Description: putative zinc finger protein
  misc_feature (12)..(173): Homolog of NCBI NO: 37536582 NR Description: putative zinc finger protein
  misc_feature (19)..(122): Homolog of NCBI NO: 6324074 NR Description: GIG3 suppressor; Gis2p [Saccharomyces cerevisiae]
  misc_feature (11)..(101): Homolog of NCBI NO: 25404984 NR Description: protein F10A5.22 [imported] - Arabidopsis
  misc_feature (11)..(101): Homolog of NCBI NO: 21537255 NR Description: DNA-binding protein [Arabidopsis thaliana]
  misc_feature (11)..(101): Homolog of NCBI NO: 18410883 NR Description: DNA-binding protein
  misc_feature (12)..(181): Homolog of NCBI NO: 37536582 NR Description: putative zinc finger protein
  misc_feature (12)..(186): Homolog of NCBI NO: 25404984 NR Description: protein F10A5.22 [imported] - Arabidopsis
  misc_feature (12)..(186): Homolog of NCBI NO: 21537255 NR Description: DNA-binding protein [Arabidopsis thaliana]
  misc_feature (12)..(186): Homolog of NCBI NO: 18410883 NR Description: DNA-binding protein
MFPSVTTVVFQGTLAAECTAESRCWNCREPGHVASNCSNEGICHSCGKSGHRARDCSNSDSRAGDLRLCNNCFKQGHLAADCTNDKACKNCRTSGHIARDCRNDPVCNICSISGHVARHCPKGDSNYSDRGSRVRDGGMQRGGLSRMSRDREGVSAMIICHNCGGRGHRAYECPSARVADRGFRRY

SEQ ID NO: 41966 - DNA, 1121 bp, Arabidopsis thaliana
  misc_feature (1)..(1121): Ceres Seq. ID no. 12739044
  misc_feature: MA Experiment ID: 108435 Result: Up-regulated in Transcription
  misc_feature: MA Experiment 108435 PARAMETER Experiment Name: At_stm_Mutants_cDNA_P Parameter: Plant Line Value: wt Landsburg vs stm
  misc_feature: MA Experiment 108435 PARAMETER Experiment Name: At_stm_Mutants_cDNA_P Parameter: Tissue Value: Shoot Apical Meristem Region
  misc_feature: MA Experiment ID: 108461 Result: Up-regulated in Transcription
  misc_feature: MA Experiment 108461 PARAMETER Experiment Name: At_Germinating_Seeds_cDNA_P Parameter: Age (day) Value: 1 vs. 0
  misc_feature: MA Experiment 108461 PARAMETER Experiment Name: At_Germinating_Seeds_cDNA_P Parameter: Tissue Value: Germinating Seeds
  misc_feature: MA Experiment ID: 108462 Result: Up-regulated in Transcription
  misc_feature: MA Experiment 108462 PARAMETER Experiment Name: At_Germinating_Seeds_cDNA_P Parameter: Age (day) Value: 2 vs. 0
  misc_feature: MA Experiment 108462 PARAMETER Experiment Name: At_Germinating_Seeds_cDNA_P Parameter: Tissue Value: Germinating Seeds
  misc_feature: MA Experiment ID: 108489 Result: Down-regulated in Transcription
  misc_feature: MA Experiment ID: 20000069 Result: Down-regulated in Transcription
  misc_feature: MA Experiment 20000069 PARAMETER Experiment Name: At_100uM_ABA_Mutants_cDNA_P Parameter: Plant Line Value: CS23
  misc_feature: MA Experiment 20000069 PARAMETER Experiment Name: At_100uM_ABA_Mutants_cDNA_P Parameter: Timepoint (hr) Value: 6
  misc_feature: MA Experiment 20000069 PARAMETER Experiment Name: At_100uM_ABA_Mutants_cDNA_P Parameter: Tissue Value: Aerial
  misc_feature: MA Experiment 20000069 PARAMETER Experiment Name: At_100uM_ABA_Mutants_cDNA_P Parameter: Treatment Value: 100uM ABA vs. No Treatment
  misc_feature: MA Experiment ID: 20000070 Result: Down-regulated in Transcription
  misc_feature: MA Experiment 20000070 PARAMETER Experiment Name: At_100uM_ABA_Mutants_cDNA_P Parameter: Plant Line Value: CS24
  misc_feature: MA Experiment 20000070 PARAMETER Experiment Name: At_100uM_ABA_Mutants_cDNA_P Parameter: Timepoint (hr) Value: 6
  misc_feature: MA Experiment 20000070 PARAMETER Experiment Name: At_100uM_ABA_Mutants_cDNA_P Parameter: Tissue Value: Aerial
  misc_feature: MA Experiment 20000070 PARAMETER Experiment Name: At_100uM_ABA_Mutants_cDNA_P Parameter: Treatment Value: 100uM ABA vs. No Treatment
  misc_feature: MA Experiment ID: 20000071 Result: Down-regulated in Transcription
  misc_feature: MA Experiment 20000071 PARAMETER Experiment Name: At_100uM_ABA_Mutants_cDNA_P Parameter: Plant Line Value: CS8104
  misc_feature: MA Experiment 20000071 PARAMETER Experiment Name: At_100uM_ABA_Mutants_cDNA_P Parameter: Timepoint (hr) Value: 6
  misc_feature: MA Experiment 20000071 PARAMETER Experiment Name: At_100uM_ABA_Mutants_cDNA_P Parameter: Tissue Value: Aerial
  misc_feature: MA Experiment 20000071 PARAMETER Experiment Name: At_100uM_ABA_Mutants_cDNA_P Parameter: Treatment Value: 100uM ABA vs. No Treatment
  misc_feature: MA Experiment ID: 20000072 Result: Down-regulated in Transcription
  misc_feature: MA Experiment 20000072 PARAMETER Experiment Name: At_100uM_ABA_Mutants_cDNA_P Parameter: Plant Line Value: CS8105
  misc_feature: MA Experiment 20000072 PARAMETER Experiment Name: At_100uM_ABA_Mutants_cDNA_P Parameter: Timepoint (hr) Value: 6
  misc_feature: MA Experiment 20000072 PARAMETER Experiment Name: At_100uM_ABA_Mutants_cDNA_P Parameter: Tissue Value: Aerial
  misc_feature: MA Experiment 20000072 PARAMETER Experiment Name: At_100uM_ABA_Mutants_cDNA_P Parameter: Treatment Value: 100uM ABA vs. No Treatment
  misc_feature: MA Experiment ID: 20000087 Result: Down-regulated in Transcription
  misc_feature: MA Experiment 20000087 PARAMETER Experiment Name: At_100uM_ABA_Mutants_cDNA_P Parameter: Plant Line Value: WS
  misc_feature: MA Experiment 20000087 PARAMETER Experiment Name: At_100uM_ABA_Mutants_cDNA_P Parameter: Timepoint (hr) Value: 6
  misc_feature: MA Experiment 20000087 PARAMETER Experiment Name: At_100uM_ABA_Mutants_cDNA_P Parameter: Tissue Value: Aerial
  misc_feature: MA Experiment 20000087 PARAMETER Experiment Name: At_100uM_ABA_Mutants_cDNA_P Parameter: Treatment Value: 100uM ABA vs. No Treatment
  misc_feature: MA Experiment ID: 20000088 Result: Down-regulated in Transcription
  misc_feature: MA Experiment 20000088 PARAMETER Experiment Name: At_100uM_ABA_Mutants_cDNA_P Parameter: Plant Line Value: Landsberg
  misc_feature: MA Experiment 20000088 PARAMETER Experiment Name: At_100uM_ABA_Mutants_cDNA_P Parameter: Timepoint (hr) Value: 6
  misc_feature: MA Experiment 20000088 PARAMETER Experiment Name: At_100uM_ABA_Mutants_cDNA_P Parameter: Tissue Value: Aerial
  misc_feature: MA Experiment 20000088 PARAMETER Experiment Name: At_100uM_ABA_Mutants_cDNA_P Parameter: Treatment Value: 100uM ABA vs. No Treatment
  misc_feature: MA Experiment ID: 20000089 Result: Down-regulated in Transcription
  misc_feature: MA Experiment ID: 20000113 Result: Up-regulated in Transcription
  misc_feature: MA Experiment 20000113 PARAMETER Experiment Name: At_42deg_Heat_cDNA_P Parameter: Temperature (deg C) Value: 42 vs. 22
  misc_feature: MA Experiment 20000113 PARAMETER Experiment Name: At_42deg_Heat_cDNA_P Parameter: Timepoint (hr) Value: 8
  misc_feature: MA Experiment 20000113 PARAMETER Experiment Name: At_42deg_Heat_cDNA_P Parameter: Tissue Value: Aerial
  misc_feature: MA Experiment ID: 20000117 Result: Down-regulated in Transcription
  misc_feature: MA Experiment 20000117 PARAMETER Experiment Name: At_100uM_ABA_Mutants_cDNA_P Parameter: Plant Line Value: Columbia
  misc_feature: MA Experiment 20000117 PARAMETER Experiment Name: At_100uM_ABA_Mutants_cDNA_P Parameter: Timepoint (hr) Value: 6
  misc_feature: MA Experiment 20000117 PARAMETER Experiment Name: At_100uM_ABA_Mutants_cDNA_P Parameter: Tissue Value: Aerial
  misc_feature: MA Experiment 20000117 PARAMETER Experiment Name: At_100uM_ABA_Mutants_cDNA_P Parameter: Treatment Value: 100uM ABA vs. No Treatment
  misc_feature: MA Experiment ID: 20000234 Result: Up-regulated in Transcription
  misc_feature: MA Experiment 20000234 PARAMETER Experiment Name: At_Siliques_P Parameter: Age (day) Value: 21
  misc_feature: MA Experiment 20000234 PARAMETER Experiment Name: At_Siliques_P Parameter: Organism Value: A. thaliana
  misc_feature: MA Experiment 20000234 PARAMETER Experiment Name: At_Siliques_P Parameter: Plant Line Value: WS
  misc_feature: MA Experiment 20000234 PARAMETER Experiment Name: At_Siliques_P Parameter: Tissue Value: Less Than 5mm Siliques vs. Whole Plant
  misc_feature: MA Experiment ID: 20000235 Result: Up-regulated in Transcription
  misc_feature: MA Experiment 20000235 PARAMETER Experiment Name: At_Siliques_P Parameter: Age (day) Value: 21
  misc_feature: MA Experiment 20000235 PARAMETER Experiment Name: At_Siliques_P Parameter: Organism Value: A. thaliana
  misc_feature: MA Experiment 20000235 PARAMETER Experiment Name: At_Siliques_P Parameter: Plant Line Value: WS
  misc_feature: MA Experiment 20000235 PARAMETER Experiment Name: At_Siliques_P Parameter: Tissue Value: 5-10mm Siliques vs. Whole Plant
  misc_feature: MA Experiment ID: 20000264 Result: Up-regulated in Transcription
  misc_feature: MA Experiment 20000264 PARAMETER Experiment Name: At_Open_Flower_P Parameter: Age (day) Value: 21
  misc_feature: MA Experiment 20000264 PARAMETER Experiment Name: At_Open_Flower_P Parameter: Plant Line Value: WS
  misc_feature: MA Experiment 20000264 PARAMETER Experiment Name: At_Open_Flower_P Parameter: Tissue Value: Open Flower vs. Whole Plant
  misc_feature: MA Experiment ID: 20000265 Result: Up-regulated in Transcription
  misc_feature: MA Experiment 20000265 PARAMETER Experiment Name: At_Open_Flower_P Parameter: Age (day) Value: 21
  misc_feature: MA Experiment 20000265 PARAMETER Experiment Name: At_Open_Flower_P Parameter: Plant Line Value: WS
  misc_feature: MA Experiment 20000265 PARAMETER Experiment Name: At_Open_Flower_P Parameter: Tissue Value: Closed Flower vs. Whole Plant
  misc_feature: MA Experiment ID: 20000267 Result: Up-regulated in Transcription
  misc_feature: MA Experiment 20000267 PARAMETER Experiment Name: At_Drought_P Parameter: Age (day) Value: 7
  misc_feature: MA Experiment 20000267 PARAMETER Experiment Name: At_Drought_P Parameter: Organism Value: A. thaliana
  misc_feature: MA Experiment 20000267 PARAMETER Experiment Name: At_Drought_P Parameter: Plant Line Value: WS
  misc_feature: MA Experiment 20000267 PARAMETER Experiment Name: At_Drought_P Parameter: Timepoint (hr) Value: 6
  misc_feature: MA Experiment 20000267 PARAMETER Experiment Name: At_Drought_P Parameter: Tissue Value: Whole Plant
  misc_feature: MA Experiment 20000267 PARAMETER Experiment Name: At_Drought_P Parameter: Treatment Value: Drought vs. No Drought
  misc_feature: MA Experiment ID: 20000286 Result: Up-regulated in Transcription
  misc_feature: MA Experiment 20000286 PARAMETER Experiment Name: At_Open_Flower_P Parameter: Age (day) Value: 21
  misc_feature: MA Experiment 20000286 PARAMETER Experiment Name: At_Open_Flower_P Parameter: Plant Line Value: WS
  misc_feature: MA Experiment 20000286 PARAMETER Experiment Name: At_Open_Flower_P Parameter: Tissue Value: Half Open vs. Whole Plant
  misc_feature: MA Experiment ID: 20000308 Result: Up-regulated in Transcription
  misc_feature: MA Experiment 20000308 PARAMETER Experiment Name: At_100mM_NaCl__P Parameter: Age (day) Value: 17
  misc_feature: MA Experiment 20000308 PARAMETER Experiment Name: At_100mM_NaCl__P Parameter: Organism Value: A. thaliana
  misc_feature: MA Experiment 20000308 PARAMETER Experiment Name: At_100mM_NaCl__P Parameter: Plant Line Value: WS
  misc_feature: MA Experiment 20000308 PARAMETER Experiment Name: At_100mM_NaCl__P Parameter: Timepoint (hr) Value: 72
  misc_feature: MA Experiment 20000308 PARAMETER Experiment Name: At_100mM_NaCl__P Parameter: Tissue Value: Whole Plant
  misc_feature: MA Experiment 20000308 PARAMETER Experiment Name: At_100mM_NaCl__P Parameter: Treatment Value: 100mM NaCl vs. No Treatment
  misc_feature: MA Experiment ID: 20000436 Result: Up-regulated in Transcription
  misc_feature: MA Experiment 20000436 PARAMETER Experiment Name: At_Drought_P Parameter: Age (day) Value: 7
  misc_feature: MA Experiment 20000436 PARAMETER Experiment Name: At_Drought_P Parameter: Organism Value: A. thaliana
  misc_feature: MA Experiment 20000436 PARAMETER Experiment Name: At_Drought_P Parameter: Plant Line Value: WS
  misc_feature: MA Experiment 20000436 PARAMETER Experiment Name: At_Drought_P Parameter: Timepoint (hr) Value: 12
  misc_feature: MA Experiment 20000436 PARAMETER Experiment Name: At_Drought_P Parameter: Tissue Value: Whole Plant
  misc_feature: MA Experiment 20000436 PARAMETER Experiment Name: At_Drought_P Parameter: Treatment Value: Drought vs. No Drought
  misc_feature: MA Experiment ID: 20000438 Result: Down-regulated in Transcription
  misc_feature: MA Experiment 20000438 PARAMETER Experiment Name: At_Shoots__P Parameter: Age (day) Value: 14
  misc_feature: MA Experiment 20000438 PARAMETER Experiment Name: At_Shoots__P Parameter: Tissue Value: Shoots vs. Whole Plant
  misc_feature: MA Experiment ID: 20000439 Result: Down-regulated in Transcription
  misc_feature: MA Experiment 20000439 PARAMETER Experiment Name: At_Roots__P Parameter: Age (day) Value: 14 vs. 21
  misc_feature: MA Experiment 20000439 PARAMETER Experiment Name: At_Roots__P Parameter: Organism Value: A. thaliana
  misc_feature: MA Experiment 20000439 PARAMETER Experiment Name: At_Roots__P Parameter: Tissue Value: Roots vs. Whole Plant
  misc_feature: MA Experiment ID: 20000441 Result: Down-regulated in Transcription
  misc_feature: MA Experiment 20000441 PARAMETER Experiment Name: At_1uM_BR-BRZ__P Parameter: Tissue Value: Shoot Apices
  misc_feature: MA Experiment 20000441 PARAMETER Experiment Name: At_1uM_BR-BRZ__P Parameter: Treatment Value: 1uM BR vs. No Treatment
  misc_feature: MA Experiment ID: 20000443 Result: Down-regulated in Transcription
  misc_feature: MA Experiment 20000443 PARAMETER Experiment Name: At_1uM_BR-BRZ__P Parameter: Tissue Value: Shoot Apices
  misc_feature: MA Experiment 20000443 PARAMETER Experiment Name: At_1uM_BR-BRZ__P Parameter: Treatment Value: 1uM BRZ vs. No Treatment
  misc_feature: MA Experiment ID: 20000451 Result: Up-regulated in Transcription
  misc_feature: MA Experiment 20000451 PARAMETER Experiment Name: At_CS6879_Shoots-Roots_P Parameter: Age (day) Value: 14
  misc_feature: MA Experiment 20000451 PARAMETER Experiment Name: At_CS6879_Shoots-Roots_P Parameter: Organism Value: A. thaliana
  misc_feature: MA Experiment 20000451 PARAMETER Experiment Name: At_CS6879_Shoots-Roots_P Parameter: Plant Line Value: CS6879 vs. WS
  misc_feature: MA Experiment 20000451 PARAMETER Experiment Name: At_CS6879_Shoots-Roots_P Parameter: Tissue Value: Roots
  misc_feature: MA Experiment ID: 20001556 Result: Up-regulated in Transcription
  misc_feature: MA Experiment 20001556 PARAMETER Experiment Name: At_Drought_Soil_Dry_P Parameter: Age (day) Value: 26
  misc_feature: MA Experiment 20001556 PARAMETER Experiment Name: At_Drought_Soil_Dry_P Parameter: Organism Value: A. thaliana
  misc_feature: MA Experiment 20001556 PARAMETER Experiment Name: At_Drought_Soil_Dry_P Parameter: Plant Line Value: WS
  misc_feature: MA Experiment 20001556 PARAMETER Experiment Name: At_Drought_Soil_Dry_P Parameter: Post Timepoint (hr) Value: None
  misc_feature: MA Experiment 20001556 PARAMETER Experiment Name: At_Drought_Soil_Dry_P Parameter: Post-Treatment Value: None
  misc_feature: MA Experiment 20001556 PARAMETER Experiment Name: At_Drought_Soil_Dry_P Parameter: Timepoint (day) Value: 12
  misc_feature: MA Experiment 20001556 PARAMETER Experiment Name: At_Drought_Soil_Dry_P Parameter: Treatment Value: Drought vs. No Drought
  misc_feature: MA Experiment ID: 20001557 Result: Up-regulated in Transcription
  misc_feature: MA Experiment 20001557 PARAMETER Experiment Name: At_Drought_Soil_Dry_P Parameter: Age (day) Value: 27
  misc_feature: MA Experiment 20001557 PARAMETER Experiment Name: At_Drought_Soil_Dry_P Parameter: Organism Value: A. thaliana
  misc_feature: MA Experiment 20001557 PARAMETER Experiment Name: At_Drought_Soil_Dry_P Parameter: Plant Line Value: WS
  misc_feature: MA Experiment 20001557 PARAMETER Experiment Name: At_Drought_Soil_Dry_P Parameter: Post Timepoint (hr) Value: 3
  misc_feature: MA Experiment 20001557 PARAMETER Experiment Name: At_Drought_Soil_Dry_P Parameter: Post-Treatment Value: Re-Water vs. No Drought
  misc_feature: MA Experiment 20001557 PARAMETER Experiment Name: At_Drought_Soil_Dry_P Parameter: Timepoint (day) Value: 13
  misc_feature: MA Experiment 20001557 PARAMETER Experiment Name: At_Drought_Soil_Dry_P Parameter: Treatment Value: Drought vs. No Drought
  misc_feature: MA Experiment ID: 20001757 Result: Down-regulated in Transcription
  misc_feature: MA Experiment 20001757 PARAMETER Experiment Name: At_50mM_NH4NO3_L-to-H_P Parameter: Timepoint (hr) Value: 6
  misc_feature: MA Experiment 20001757 PARAMETER Experiment Name: At_50mM_NH4NO3_L-to-H_P Parameter: Tissue Value: Leaf
  misc_feature: MA Experiment 20001757 PARAMETER Experiment Name: At_50mM_NH4NO3_L-to-H_P Parameter: Treatment Value: 50mM NH4NO3 vs 100mM Mannitol
aagctgacgagtttcgatcgatggtgacggaaatgatggctctcgccggagtatttaacatcggagatttcgtgccgtcacttgattggttagatttacaaggcgtcgctggtaaaatgaaacggcttcacaaaagattcgacgcttttctatcgtcgattttgatagagcacgaaatgaacggtcaagatcaaaagcatactgatatgcttagcactttaatctcccttaaaggaactgatcttgacggtgacggaggaagcttaacggatactgagattaaagccttgctattgaacatgttcacagctgggactgacacgtcagcaagtacggtggactgggctatagctgaacttattcgtcacccggatataatggttaaagcccaagcagaacttgatattgttgtgggccgtgacaggcctgttaacgaatccgacatctctcagcttccttaccttcaggcggttatcaaagagaatttcaggcttcatccaccaacaccactctcgttaccacacatcgcgtcagagagctgtgagatcaacggctaccatatcccgaaaggatcgactctattgacaaacatatgggccatagcccgtgacccggatcaatggtccgacccattagcatttaaacccgagagattcttacccggtggtgaaaaatccggcgttgatgtgaaaggaagcgatttcgagctgataccgttcggagctgggaggagaatctgtgccggtttaagttagggttacgtacgattcagtttcttacggcgacgttggttcaaggatttgattgggaattagctggaggagttacgccggagaagctgaatatggaggagagttatgggcttacactgcaaagagcggttcctttggtggtacatcctaagccaaggttggctccgatcgtttatggagtcgggtcaggttaaaatttaactttgcttcttggacaaggtatatggcttgcacgaaaataaagttttaaaacagcgtagtttgatccggagttagctttatgtaagaacgtgtaacgccaaatcaagttattattaaatattgtgagttgtttgtaacctatatataaatcttgaagaggaagatttc

SEQ ID NO: 41967 - protein, 250 aa, Arabidopsis thaliana
  peptide (1)..(250): Ceres Seq. ID no. 12739045
  misc_feature (1)..(250): Pfam Name: Cytochrome P450 Pfam Description: Cytochrome P450
  misc_feature (1)..(250): Homolog of NCBI NO: 12231914 NR Description: flavonoid 3'-hydroxylase [Pelargonium x hortorum]
  misc_feature (1)..(250): Homolog of NCBI NO: 12231886 NR Description: flavonoid 3'-hydroxylase [Matthiola incana]
  misc_feature (1)..(250): Homolog of NCBI NO: 15241483 NR Description: flavonoid 3'-hydroxylase (F3'H)
ADEFRSMVTEMMALAGVFNIGDFVPSLDWLDLQGVAGKMKRLHKRFDAFLSSILIEHEMNGQDQKHTDMLSTLISLKGTDLDGDGGSLTDTEIKALLLNMFTAGTDTSASTVDWAIAELIRHPDIMVKAQAELDIVVGRDRPVNESDISQLPYLQAVIKENFRLHPPTPLSLPHIASESCEINGYHIPKGSTLLTNIWAIARDPDQWSDPLAFKPERFLPGGEKSGVDVKGSDFELIPFGAGRRICAGLS

SEQ ID NO: 41968 - protein, 244 aa, Arabidopsis thaliana
  peptide (1)..(244): Ceres Seq. ID no. 12739046
  misc_feature (1)..(244): Pfam Name: Cytochrome P450 Pfam Description: Cytochrome P450
  misc_feature (1)..(244): Homolog of NCBI NO: 12231914 NR Description: flavonoid 3'-hydroxylase [Pelargonium x hortorum]
  misc_feature (1)..(244): Homolog of NCBI NO: 12231886 NR Description: flavonoid 3'-hydroxylase [Matthiola incana]
  misc_feature (1)..(244): Homolog of NCBI NO: 15241483 NR Description: flavonoid 3'-hydroxylase (F3'H)
MVTEMMALAGVFNIGDFVPSLDWLDLQGVAGKMKRLHKRFDAFLSSILIEHEMNGQDQKHTDMLSTLISLKGTDLDGDGGSLTDTEIKALLLNMFTAGTDTSASTVDWAIAELIRHPDIMVKAQAELDIVVGRDRPVNESDISQLPYLQAVIKENFRLHPPTPLSLPHIASESCEINGYHIPKGSTLLTNIWAIARDPDQWSDPLAFKPERFLPGGEKSGVDVKGSDFELIPFGAGRRICAGLS

SEQ ID NO: 41969 - protein, 240 aa, Arabidopsis thaliana
  peptide (1)..(240): Ceres Seq. ID no. 12739047
  misc_feature (1)..(240): Pfam Name: Cytochrome P450 Pfam Description: Cytochrome P450
  misc_feature (1)..(240): Homolog of NCBI NO: 12231914 NR Description: flavonoid 3'-hydroxylase [Pelargonium x hortorum]
  misc_feature (1)..(240): Homolog of NCBI NO: 12231886 NR Description: flavonoid 3'-hydroxylase [Matthiola incana]
  misc_feature (1)..(240): Homolog of NCBI NO: 15241483 NR Description: flavonoid 3'-hydroxylase (F3'H)
MMALAGVFNIGDFVPSLDWLDLQGVAGKMKRLHKRFDAFLSSILIEHEMNGQDQKHTDMLSTLISLKGTDLDGDGGSLTDTEIKALLLNMFTAGTDTSASTVDWAIAELIRHPDIMVKAQAELDIVVGRDRPVNESDISQLPYLQAVIKENFRLHPPTPLSLPHIASESCEINGYHIPKGSTLLTNIWAIARDPDQWSDPLAFKPERFLPGGEKSGVDVKGSDFELIPFGAGRRICAGLS

SEQ ID NO: 41970 - DNA, 1146 bp, Arabidopsis thaliana; identical to SEQ ID NO: 22034
  misc_feature (1)..(1146): Ceres Seq. ID no. 12325970
  misc_feature: MA Experiment ID: 108579 Result: Down-regulated in Transcription
  misc_feature: MA Experiment 108579 PARAMETER Experiment Name: At_4deg_Cold_cDNA_P Parameter: Temperature (deg C) Value: 4 vs. 22
  misc_feature: MA Experiment 108579 PARAMETER Experiment Name: At_4deg_Cold_cDNA_P Parameter: Timepoint (hr) Value: 6
  misc_feature: MA Experiment 108579 PARAMETER Experiment Name: At_4deg_Cold_cDNA_P Parameter: Tissue Value: Aerial

SEQ ID NO: 41971 - protein, 299 aa, Arabidopsis thaliana; identical to SEQ ID NO: 22035
  peptide (1)..(299): Ceres Seq. ID no. 12325971
  misc_feature (245)..(295): Pfam Name: PHD-finger Pfam Description: PHD-finger
  misc_feature (245)..(295): Pfam Name: PHD-finger Pfam Description: PHD-finger
  misc_feature (48)..(299): Homolog of NCBI NO: 4091080 NR Description: nucleic acid binding protein [Oryza sativa]
  misc_feature (48)..(299): Homolog of NCBI NO: 34907474 NR Description: nucleic acid binding protein
  misc_feature (53)..(298): Homolog of NCBI NO: 21593407 NR Description: putative PHD-type zinc finger protein
  misc_feature (53)..(298): Homolog of NCBI NO: 15226967 NR Description: putative PHD-type zinc finger protein
  misc_feature (51)..(293): Homolog of NCBI NO: 34394182 NR Description: putative nucleic acid binding protein
  misc_feature (48)..(299): Homolog of NCBI NO: 4091080 NR Description: nucleic acid binding protein [Oryza sativa]
  misc_feature (53)..(298): Homolog of NCBI NO: 21593407 NR Description: putative PHD-type zinc finger protein
  misc_feature (51)..(293): Homolog of NCBI NO: 34394182 NR Description: putative nucleic acid binding protein
  misc_feature (45)..(299): Homolog of NCBI NO: 15239624 NR Description: nucleic acid binding protein - like
  misc_feature (45)..(299): Homolog of NCBI NO: 7486722 NR Description: hypothetical protein F9D12.13 - Arabidopsis
  misc_feature (45)..(298): Homolog of NCBI NO: 30687843 NR Description: zinc finger protein - like [Arabidopsis thaliana]
  misc_feature (45)..(299): Homolog of NCBI NO: 15229157 NR Description: nucleic acid binding protein-like
  misc_feature (51)..(293): Homolog of NCBI NO: 14192880 NR Description: Putative nucleic acid binding protein [Oryza
  misc_feature (53)..(298): Homolog of NCBI NO: 15226967 NR Description: putative PHD-type zinc finger protein
  misc_feature (48)..(299): Homolog of NCBI NO: 34907474 NR Description: nucleic acid binding protein
  misc_feature (51)..(293): Homolog of NCBI NO: 14192880 NR Description: Putative nucleic acid binding protein [Oryza
  misc_feature (45)..(299): Homolog of NCBI NO: 15229157 NR Description: nucleic acid binding protein-like
  misc_feature (45)..(298): Homolog of NCBI NO: 30687843 NR Description: zinc finger protein - like [Arabidopsis thaliana]
  misc_feature (45)..(299): Homolog of NCBI NO: 7486722 NR Description: hypothetical protein F9D12.13 - Arabidopsis
  misc_feature (45)..(299): Homolog of NCBI NO: 15239624 NR Description: nucleic acid binding protein - like

SEQ ID NO: 41972 - protein, 255 aa, Arabidopsis thaliana; identical to SEQ ID NO: 22036
  peptide (1)..(255): Ceres Seq. ID no. 12325972
  misc_feature (201)..(251): Pfam Name: PHD-finger Pfam Description: PHD-finger
  misc_feature (201)..(251): Pfam Name: PHD-finger Pfam Description: PHD-finger
  misc_feature (4)..(255): Homolog of NCBI NO: 4091080 NR Description: nucleic acid binding protein [Oryza sativa]
  misc_feature (4)..(255): Homolog of NCBI NO: 34907474 NR Description: nucleic acid binding protein
  misc_feature (9)..(254): Homolog of NCBI NO: 21593407 NR Description: putative PHD-type zinc finger protein
  misc_feature (9)..(254): Homolog of NCBI NO: 15226967 NR Description: putative PHD-type zinc finger protein
  misc_feature (7)..(249): Homolog of NCBI NO: 34394182 NR Description: putative nucleic acid binding protein
  misc_feature (4)..(255): Homolog of NCBI NO: 4091080 NR Description: nucleic acid binding protein [Oryza sativa]
  misc_feature (9)..(254): Homolog of NCBI NO: 21593407 NR Description: putative PHD-type zinc finger protein
  misc_feature (7)..(249): Homolog of NCBI NO: 34394182 NR Description: putative nucleic acid binding protein
  misc_feature (1)..(255): Homolog of NCBI NO: 15239624 NR Description: nucleic acid binding protein - like
  misc_feature (1)..(255): Homolog of NCBI NO: 7486722 NR Description: hypothetical protein F9D12.13 - Arabidopsis
  misc_feature (1)..(254): Homolog of NCBI NO: 30687843 NR Description: zinc finger protein - like [Arabidopsis thaliana]
  misc_feature (1)..(255): Homolog of NCBI NO: 15229157 NR Description: nucleic acid binding protein-like
  misc_feature (7)..(249): Homolog of NCBI NO: 14192880 NR Description: Putative nucleic acid binding protein [Oryza
  misc_feature (9)..(254): Homolog of NCBI NO: 15226967 NR Description: putative PHD-type zinc finger protein
  misc_feature (4)..(255): Homolog of NCBI NO: 34907474 NR Description: nucleic acid binding protein
  misc_feature (7)..(249): Homolog of NCBI NO: 14192880 NR Description: Putative nucleic acid binding protein [Oryza
  misc_feature (1)..(255): Homolog of NCBI NO: 15229157 NR Description: nucleic acid binding protein-like
  misc_feature (1)..(254): Homolog of NCBI NO: 30687843 NR Description: zinc finger protein - like [Arabidopsis thaliana]
  misc_feature (1)..(255): Homolog of NCBI NO: 7486722 NR Description: hypothetical protein F9D12.13 - Arabidopsis
  misc_feature (1)..(255): Homolog of NCBI NO: 15239624 NR Description: nucleic acid binding protein - like

SEQ ID NO: 41973 - protein, 230 aa, Arabidopsis thaliana; identical to SEQ ID NO: 22037
  peptide (1)..(230): Ceres Seq. ID no. 12325973
  misc_feature (176)..(226): Pfam Name: PHD-finger Pfam Description: PHD-finger
  misc_feature (176)..(226): Pfam Name: PHD-finger Pfam Description: PHD-finger
  misc_feature (1)..(230): Homolog of NCBI NO: 4091080 NR Description: nucleic acid binding protein [Oryza sativa]
  misc_feature (1)..(230): Homolog of NCBI NO: 34907474 NR Description: nucleic acid binding protein
  misc_feature (1)..(229): Homolog of NCBI NO: 21593407 NR Description: putative PHD-type zinc finger protein
  misc_feature (1)..(229): Homolog of NCBI NO: 15226967 NR Description: putative PHD-type zinc finger protein
  misc_feature (1)..(224): Homolog of NCBI NO: 34394182 NR Description: putative nucleic acid binding protein
  misc_feature (1)..(230): Homolog of NCBI NO: 4091080 NR Description: nucleic acid binding protein [Oryza sativa]
  misc_feature (1)..(229): Homolog of NCBI NO: 21593407 NR Description: putative PHD-type zinc finger protein
  misc_feature (1)..(224): Homolog of NCBI NO: 34394182 NR Description: putative nucleic acid binding protein
  misc_feature (1)..(230): Homolog of NCBI NO: 15239624 NR Description: nucleic acid binding protein - like
  misc_feature (1)..(230): Homolog of NCBI NO: 7486722 NR Description: hypothetical protein F9D12.13 - Arabidopsis
  misc_feature (1)..(229): Homolog of NCBI NO: 30687843 NR Description: zinc finger protein - like [Arabidopsis thaliana]
  misc_feature (1)..(230): Homolog of NCBI NO: 15229157 NR Description: nucleic acid binding protein-like
  misc_feature (1)..(224): Homolog of NCBI NO: 14192880 NR Description: Putative nucleic acid binding protein [Oryza
  misc_feature (1)..(229): Homolog of NCBI NO: 15226967 NR Description: putative PHD-type zinc finger protein
  misc_feature (1)..(230): Homolog of NCBI NO: 34907474 NR Description: nucleic acid binding protein
  misc_feature (1)..(224): Homolog of NCBI NO: 14192880 NR Description: Putative nucleic acid binding protein [Oryza
  misc_feature (1)..(230): Homolog of NCBI NO: 15229157 NR Description: nucleic acid binding protein-like
  misc_feature (1)..(229): Homolog of NCBI NO: 30687843 NR Description: zinc finger protein - like [Arabidopsis thaliana]
  misc_feature (1)..(230): Homolog of NCBI NO: 7486722 NR Description: hypothetical protein F9D12.13 - Arabidopsis
  misc_feature (1)..(230): Homolog of NCBI NO: 15239624 NR Description: nucleic acid binding protein - like

SEQ ID NO: 41974 - DNA, 912 bp, Arabidopsis thaliana; identical to SEQ ID NO: 35017
  misc_feature (1)..(912): Ceres Seq. ID no. 13488171
  misc_feature: MA Experiment ID: 108577 Result: Down-regulated in Transcription
  misc_feature: MA Experiment 108577 PARAMETER Experiment Name: At_42deg_Heat_cDNA_P Parameter: Temperature (deg C) Value: 42 vs. 22
  misc_feature: MA Experiment 108577 PARAMETER Experiment Name: At_42deg_Heat_cDNA_P Parameter: Timepoint (hr) Value: 6
  misc_feature: MA Experiment 108577 PARAMETER Experiment Name: At_42deg_Heat_cDNA_P Parameter: Tissue Value: Aerial
  misc_feature: MA Experiment ID: 108579 Result: Up-regulated in Transcription
  misc_feature: MA Experiment 108579 PARAMETER Experiment Name: At_4deg_Cold_cDNA_P Parameter: Temperature (deg C) Value: 4 vs. 22
  misc_feature: MA Experiment 108579 PARAMETER Experiment Name: At_4deg_Cold_cDNA_P Parameter: Timepoint (hr) Value: 6
  misc_feature: MA Experiment 108579 PARAMETER Experiment Name: At_4deg_Cold_cDNA_P Parameter: Tissue Value: Aerial
  misc_feature: MA Experiment ID: 108595 Result: Down-regulated in Transcription
  misc_feature: MA Experiment 108595 PARAMETER Experiment Name: At_Ler-pi_Ovule_cDNA_P Parameter: Plant Line Value: null
  misc_feature: MA Experiment ID: 20000179 Result: Up-regulated in Transcription
  misc_feature: MA Experiment 20000179 PARAMETER Experiment Name: At_Germinating_Seeds_P Parameter: Age (hr) Value: 6 vs. 0
  misc_feature: MA Experiment 20000179 PARAMETER Experiment Name: At_Germinating_Seeds_P Parameter: Tissue Value: Germinating Seeds
  misc_feature: MA Experiment ID: 20000185 Result: Down-regulated in Transcription
  misc_feature: MA Experiment 20000185 PARAMETER Experiment Name: At_Roots__P Parameter: Age (day) Value: 7 vs. 21
  misc_feature: MA Experiment 20000185 PARAMETER Experiment Name: At_Roots__P Parameter: Organism Value: A. thaliana
  misc_feature: MA Experiment 20000185 PARAMETER Experiment Name: At_Roots__P Parameter: Tissue Value: Roots vs. Whole Plant
  misc_feature: MA Experiment ID: 20000437 Result: Down-regulated in Transcription
  misc_feature: MA Experiment 20000437 PARAMETER Experiment Name: At_Drought_P Parameter: Age (day) Value: 8
  misc_feature: MA Experiment 20000437 PARAMETER Experiment Name: At_Drought_P Parameter: Organism Value: A. thaliana
  misc_feature: MA Experiment 20000437 PARAMETER Experiment Name: At_Drought_P Parameter: Plant Line Value: WS
  misc_feature: MA Experiment 20000437 PARAMETER Experiment Name: At_Drought_P Parameter: Timepoint (hr) Value: 24
  misc_feature: MA Experiment 20000437 PARAMETER Experiment Name: At_Drought_P Parameter: Tissue Value: Whole Plant
  misc_feature: MA Experiment 20000437 PARAMETER Experiment Name: At_Drought_P Parameter: Treatment Value: Drought vs. No Drought
  misc_feature: MA Experiment ID: 20000439 Result: Down-regulated in Transcription
  misc_feature: MA Experiment 20000439 PARAMETER Experiment Name: At_Roots__P Parameter: Age (day) Value: 14 vs. 21
  misc_feature: MA Experiment 20000439 PARAMETER Experiment Name: At_Roots__P Parameter: Organism Value: A. thaliana
  misc_feature: MA Experiment 20000439 PARAMETER Experiment Name: At_Roots__P Parameter: Tissue Value: Roots vs. Whole Plant
  misc_feature: MA Experiment ID: 20000495 Result: Down-regulated in Transcription
  misc_feature: MA Experiment 20000495 PARAMETER Experiment Name: At_Guard_Cells_P Parameter: Harvest Date Value: 8/2/2002
  misc_feature: MA Experiment 20000495 PARAMETER Experiment Name: At_Guard_Cells_P Parameter: Organism Value: A. thaliana
  misc_feature: MA Experiment 20000495 PARAMETER Experiment Name: At_Guard_Cells_P Parameter: Tissue Value: Guard Cells vs. Leaves
  misc_feature: MA Experiment ID: 20001905 Result: Down-regulated in Transcription
  misc_feature: MA Experiment 20001905 PARAMETER Experiment Name: At_Drought_Reproduction_P Parameter: Age (day) Value: 40
  misc_feature: MA Experiment 20001905 PARAMETER Experiment Name: At_Drought_Reproduction_P Parameter: Organism Value: A. thaliana
  misc_feature: MA Experiment 20001905 PARAMETER Experiment Name: At_Drought_Reproduction_P Parameter: Plant Line Value: WS
  misc_feature: MA Experiment 20001905 PARAMETER Experiment Name: At_Drought_Reproduction_P Parameter: Timepoint (day) Value: 10
  misc_feature: MA Experiment 20001905 PARAMETER Experiment Name: At_Drought_Reproduction_P Parameter: Tissue Value: Rosettes
  misc_feature: MA Experiment 20001905 PARAMETER Experiment Name: At_Drought_Reproduction_P Parameter: Treatment Value: Drought vs. No Drought
  misc_feature: MA Experiment ID: 20001911 Result: Down-regulated in Transcription
  misc_feature: MA Experiment 20001911 PARAMETER Experiment Name: At_Drought_Reproduction_P Parameter: Age (day) Value: 40
  misc_feature: MA Experiment 20001911 PARAMETER Experiment Name: At_Drought_Reproduction_P Parameter: Organism Value: A. thaliana
  misc_feature: MA Experiment 20001911 PARAMETER Experiment Name: At_Drought_Reproduction_P Parameter: Plant Line Value: WS
  misc_feature: MA Experiment 20001911 PARAMETER Experiment Name: At_Drought_Reproduction_P Parameter: Timepoint (day) Value: 10
  misc_feature: MA Experiment 20001911 PARAMETER Experiment Name: At_Drought_Reproduction_P Parameter: Tissue Value: Flowers
  misc_feature: MA Experiment 20001911 PARAMETER Experiment Name: At_Drought_Reproduction_P Parameter: Treatment Value: Drought vs. No Drought

SEQ ID NO: 41975 - protein, 207 aa, Arabidopsis thaliana; identical to SEQ ID NO: 35018
  peptide (1)..(207): Ceres Seq. ID no. 13488172
  misc_feature (90)..(203): Homolog of NCBI NO: 34905864 NR Description: similar to DNA-directed RNA polymerase subunit A'
  misc_feature (91)..(204): Homolog of NCBI NO: 15225617 NR Description: expressed protein [Arabidopsis thaliana]
  misc_feature (83)..(204): Homolog of NCBI NO: 6014934 NR Description: DCL PROTEIN, CHLOROPLAST PRECURSOR (DEFECTIVE
  misc_feature (80)..(204): Homolog of NCBI NO: 22330069 NR Description: defective chloroplasts and leaves (DCL) protein
  misc_feature (74)..(204): Homolog of NCBI NO: 18650724 NR Description: DCL protein [Coffea arabica]
  misc_feature (87)..(204): Homolog of NCBI NO: 34015211 NR Description: putative defective chloroplasts and leaves (DCL)
  misc_feature (1)..(207): Homolog of NCBI NO: 15232596 NR Description: expressed protein [Arabidopsis thaliana]
  misc_feature (90)..(203): Homolog of NCBI NO: 34905864 NR Description: similar to DNA-directed RNA polymerase subunit A'
  misc_feature (91)..(204): Homolog of NCBI NO: 15225617 NR Description: expressed protein [Arabidopsis thaliana]
  misc_feature (83)..(204): Homolog of NCBI NO: 6014934 NR Description: DCL PROTEIN, CHLOROPLAST PRECURSOR (DEFECTIVE
  misc_feature (80)..(204): Homolog of NCBI NO: 22330069 NR Description: defective chloroplasts and leaves (DCL) protein
  misc_feature (74)..(204): Homolog of NCBI NO: 18650724 NR Description: DCL protein [Coffea arabica]
  misc_feature (87)..(204): Homolog of NCBI NO: 34015211 NR Description: putative defective chloroplasts and leaves (DCL)
  misc_feature (1)..(207): Homolog of NCBI NO: 15232596 NR Description: expressed protein [Arabidopsis thaliana]

SEQ ID NO: 41976 - protein, 142 aa, Arabidopsis thaliana; identical to SEQ ID NO: 35019
  peptide (1)..(142): Ceres Seq. ID no. 13488173
  misc_feature (25)..(138): Homolog of NCBI NO: 34905864 NR Description: similar to DNA-directed RNA polymerase subunit A'
  misc_feature (26)..(139): Homolog of NCBI NO: 15225617 NR Description: expressed protein [Arabidopsis thaliana]
  misc_feature (18)..(139): Homolog of NCBI NO: 6014934 NR Description: DCL PROTEIN, CHLOROPLAST PRECURSOR (DEFECTIVE
  misc_feature (15)..(139): Homolog of NCBI NO: 22330069 NR Description: defective chloroplasts and leaves (DCL) protein
  misc_feature (9)..(139): Homolog of NCBI NO: 18650724 NR Description: DCL protein [Coffea arabica]
  misc_feature (22)..(139): Homolog of NCBI NO: 34015211 NR Description: putative defective chloroplasts and leaves (DCL)
  misc_feature (1)..(142): Homolog of NCBI NO: 15232596 NR Description: expressed protein [Arabidopsis thaliana]
  misc_feature (25)..(138): Homolog of NCBI NO: 34905864 NR Description: similar to DNA-directed RNA polymerase subunit A'
  misc_feature (26)..(139): Homolog of NCBI NO: 15225617 NR Description: expressed protein [Arabidopsis thaliana]
  misc_feature (18)..(139): Homolog of NCBI NO: 6014934 NR Description: DCL PROTEIN, CHLOROPLAST PRECURSOR (DEFECTIVE
  misc_feature (15)..(139): Homolog of NCBI NO: 22330069 NR Description: defective chloroplasts and leaves (DCL) protein
  misc_feature (9)..(139): Homolog of NCBI NO: 18650724 NR Description: DCL protein [Coffea arabica]
  misc_feature (22)..(139): Homolog of NCBI NO: 34015211 NR Description: putative defective chloroplasts and leaves (DCL)
  misc_feature (1)..(142): Homolog of NCBI NO: 15232596 NR Description: expressed protein [Arabidopsis thaliana]

SEQ ID NO: 41977 - DNA, 2325 bp, Arabidopsis thaliana
  misc_feature (1)..(2325): Ceres Seq. ID no. 12385500
  misc_feature: MA Experiment ID: 108434 Result: Down-regulated in Transcription
  misc_feature: MA Experiment 108434 PARAMETER Experiment Name: At_Root_Tips_cDNA_P Parameter: Tissue Value: Root Tips
  misc_feature: MA Experiment ID: 108462 Result: Down-regulated in Transcription
  misc_feature: MA Experiment 108462 PARAMETER Experiment Name: At_Germinating_Seeds_cDNA_P Parameter: Age (day) Value: 2 vs. 0
  misc_feature: MA Experiment 108462 PARAMETER Experiment Name: At_Germinating_Seeds_cDNA_P Parameter: Tissue Value: Germinating Seeds
  misc_feature: MA Experiment ID: 108463 Result: Down-regulated in Transcription
  misc_feature: MA Experiment 108463 PARAMETER Experiment Name: At_Germinating_Seeds_cDNA_P Parameter: Age (day) Value: 3 vs. 0
  misc_feature: MA Experiment 108463 PARAMETER Experiment Name: At_Germinating_Seeds_cDNA_P Parameter: Tissue Value: Germinating Seeds
  misc_feature: MA Experiment ID: 108464 Result: Down-regulated in Transcription
  misc_feature: MA Experiment 108464 PARAMETER Experiment Name: At_Germinating_Seeds_cDNA_P Parameter: Age (day) Value: 4 vs. 0
  misc_feature: MA Experiment 108464 PARAMETER Experiment Name: At_Germinating_Seeds_cDNA_P Parameter: Tissue Value: Germinating Seeds
  misc_feature: MA Experiment ID: 108595 Result: Down-regulated in Transcription
  misc_feature: MA Experiment 108595 PARAMETER Experiment Name: At_Ler-pi_Ovule_cDNA_P Parameter: Plant Line Value: null
  misc_feature: MA Experiment ID: 108668 Result: Up-regulated in Transcription
  misc_feature: MA Experiment 108668 PARAMETER Experiment Name: At_2mM_SA_cDNA_P Parameter: Plant Line Value: WS
  misc_feature: MA Experiment 108668 PARAMETER Experiment Name: At_2mM_SA_cDNA_P Parameter: Timepoint (hr) Value: 6
  misc_feature: MA Experiment 108668 PARAMETER Experiment Name: At_2mM_SA_cDNA_P Parameter: Treatment Value: 2mM SA vs. No Treatment
  misc_feature: MA Experiment ID: 20000113 Result: Down-regulated in Transcription
  misc_feature: MA Experiment 20000113 PARAMETER Experiment Name: At_42deg_Heat_cDNA_P Parameter: Temperature (deg C) Value: 42 vs. 22
  misc_feature: MA Experiment 20000113 PARAMETER Experiment Name: At_42deg_Heat_cDNA_P Parameter: Timepoint (hr) Value: 8
  misc_feature: MA Experiment 20000113 PARAMETER Experiment Name: At_42deg_Heat_cDNA_P Parameter: Tissue Value: Aerial
  misc_feature: MA Experiment ID: 20000171 Result: Down-regulated in Transcription
  misc_feature: MA Experiment 20000171 PARAMETER Experiment Name: At_42deg_Heat_P Parameter: Age (day) Value: 14
  misc_feature: MA Experiment 20000171 PARAMETER Experiment Name: At_42deg_Heat_P Parameter: Organism Value: A. thaliana
  misc_feature: MA Experiment 20000171 PARAMETER Experiment Name: At_42deg_Heat_P Parameter: Plant Line Value: WS
  misc_feature: MA Experiment 20000171 PARAMETER Experiment Name: At_42deg_Heat_P Parameter: Temperature (deg C) Value: 42 vs. 22
  misc_feature: MA Experiment 20000171 PARAMETER Experiment Name: At_42deg_Heat_P Parameter: Timepoint (hr) Value: 1
  misc_feature: MA Experiment 20000171 PARAMETER Experiment Name: At_42deg_Heat_P Parameter: Tissue Value: Aerial
  misc_feature: MA Experiment ID: 20000173 Result: Down-regulated in Transcription
  misc_feature: MA Experiment 20000173 PARAMETER Experiment Name: At_42deg_Heat_P Parameter: Age (day) Value: 14
  misc_feature: MA Experiment 20000173 PARAMETER Experiment Name: At_42deg_Heat_P Parameter: Organism Value: A. thaliana
  misc_feature: MA Experiment 20000173 PARAMETER Experiment Name: At_42deg_Heat_P Parameter: Plant Line Value: WS
  misc_feature: MA Experiment 20000173 PARAMETER Experiment Name: At_42deg_Heat_P Parameter: Temperature (deg C) Value: 42 vs. 22
  misc_feature: MA Experiment 20000173 PARAMETER Experiment Name: At_42deg_Heat_P Parameter: Timepoint (hr) Value: 6
  misc_feature: MA Experiment 20000173 PARAMETER Experiment Name: At_42deg_Heat_P Parameter: Tissue Value: Aerial
  misc_feature: MA Experiment ID: 20000182 Result: Up-regulated in Transcription
  misc_feature: MA Experiment 20000182 PARAMETER Experiment Name: At_2mM_SA_P Parameter: Age (day) Value: 14
  misc_feature: MA Experiment 20000182 PARAMETER Experiment Name: At_2mM_SA_P Parameter: Organism Value: A. thaliana
  misc_feature: MA Experiment 20000182 PARAMETER Experiment Name: At_2mM_SA_P Parameter: Plant Line Value: WS
  misc_feature: MA Experiment 20000182 PARAMETER Experiment Name: At_2mM_SA_P Parameter: Timepoint (hr) Value: 6
  misc_feature: MA Experiment 20000182 PARAMETER Experiment Name: At_2mM_SA_P Parameter: Tissue Value: Aerial
  misc_feature: MA Experiment 20000182 PARAMETER Experiment Name: At_2mM_SA_P Parameter: Treatment Value: 2mM SA vs. No Treatment
  misc_feature: MA Experiment ID: 20000184 Result: Down-regulated in Transcription
  misc_feature: MA Experiment 20000184 PARAMETER Experiment Name: At_Shoots__P Parameter: Age (day) Value: 7
  misc_feature: MA Experiment 20000184 PARAMETER Experiment Name: At_Shoots__P Parameter: Tissue Value: Shoots vs. Whole Plant
  misc_feature: MA Experiment ID: 20000185 Result: Down-regulated in Transcription
  misc_feature: MA Experiment 20000185 PARAMETER Experiment Name: At_Roots__P Parameter: Age (day) Value: 7 vs. 21
  misc_feature: MA Experiment 20000185 PARAMETER Experiment Name: At_Roots__P Parameter: Organism Value: A. thaliana
  misc_feature: MA Experiment 20000185 PARAMETER Experiment Name: At_Roots__P Parameter: Tissue Value: Roots vs. Whole Plant
  misc_feature: MA Experiment ID: 20000439 Result: Down-regulated in Transcription
  misc_feature: MA Experiment 20000439 PARAMETER Experiment Name: At_Roots__P Parameter: Age (day) Value: 14 vs. 21
  misc_feature: MA Experiment 20000439 PARAMETER Experiment Name: At_Roots__P Parameter: Organism Value: A. thaliana
  misc_feature: MA Experiment 20000439 PARAMETER Experiment Name: At_Roots__P Parameter: Tissue Value: Roots vs. Whole Plant
  misc_feature: MA Experiment ID: 20000445 Result: Up-regulated in Transcription
  misc_feature: MA Experiment 20000445 PARAMETER Experiment Name: At_100uM_NAA__P Parameter: Age (day) Value: 14
  misc_feature: MA Experiment 20000445 PARAMETER Experiment Name: At_100uM_NAA__P Parameter: Organism Value: A. thaliana
  misc_feature: MA Experiment 20000445 PARAMETER Experiment Name: At_100uM_NAA__P Parameter: Plant Line Value: WS
  misc_feature: MA Experiment 20000445 PARAMETER Experiment Name: At_100uM_NAA__P Parameter: Timepoint (hr) Value: 6
  misc_feature: MA Experiment 20000445 PARAMETER Experiment Name: At_100uM_NAA__P Parameter: Tissue Value: Aerial
  misc_feature: MA Experiment 20000445 PARAMETER Experiment Name: At_100uM_NAA__P Parameter: Treatment Value: 100uM NAA vs. No Treatment
  misc_feature: MA Experiment ID: 20000495 Result: Down-regulated in Transcription
  misc_feature: MA Experiment 20000495 PARAMETER Experiment Name: At_Guard_Cells_P Parameter: Harvest Date Value: 8/2/2002
  misc_feature: MA Experiment 20000495 PARAMETER Experiment Name: At_Guard_Cells_P Parameter: Organism Value: A. thaliana
  misc_feature: MA Experiment 20000495 PARAMETER Experiment Name: At_Guard_Cells_P Parameter: Tissue Value: Guard Cells vs. Leaves
  misc_feature: MA Experiment ID: 20000496 Result: Down-regulated in Transcription
  misc_feature: MA Experiment 20000496 PARAMETER Experiment Name: At_Guard_Cells_P Parameter: Harvest Date Value: 7/19/2002
  misc_feature: MA Experiment 20000496 PARAMETER Experiment Name: At_Guard_Cells_P Parameter: Organism Value: Canola
  misc_feature: MA Experiment 20000496 PARAMETER Experiment Name: At_Guard_Cells_P Parameter: Tissue Value: Guard Cells vs. Leaves
  misc_feature: MA Experiment ID: 20000527 Result: Down-regulated in Transcription
  misc_feature: MA Experiment 20000527 PARAMETER Experiment Name: At_10percent_PEG_P Parameter: Age (day) Value: 20
  misc_feature: MA Experiment 20000527 PARAMETER Experiment Name: At_10percent_PEG_P Parameter: Organism Value: A. thaliana
  misc_feature: MA Experiment 20000527 PARAMETER Experiment Name: At_10percent_PEG_P Parameter: Plant Line Value: WS
  misc_feature: MA Experiment 20000527 PARAMETER Experiment Name: At_10percent_PEG_P Parameter: Timepoint (day) Value: 20
  misc_feature: MA Experiment 20000527 PARAMETER Experiment Name: At_10percent_PEG_P Parameter: Tissue Value: Whole Plant
  misc_feature: MA Experiment 20000527 PARAMETER Experiment Name: At_10percent_PEG_P Parameter: Treatment Value: 10percent PEG vs. No Treatment
  misc_feature: MA Experiment ID: 20001451 Result: Down-regulated in Transcription
  misc_feature: MA Experiment 20001451 PARAMETER Experiment Name: At_Far-red-induction_P Parameter: Age (day) Value: 7
  misc_feature: MA Experiment 20001451 PARAMETER Experiment Name: At_Far-red-induction_P Parameter: Light Value: Far-red vs. White
  misc_feature: MA Experiment 20001451 PARAMETER Experiment Name: At_Far-red-induction_P Parameter: Organism Value: A. thaliana
  misc_feature: MA Experiment 20001451 PARAMETER Experiment Name: At_Far-red-induction_P Parameter: Plant Line Value: Columbia
  misc_feature: MA Experiment 20001451 PARAMETER Experiment Name: At_Far-red-induction_P Parameter: Timepoint (hr) Value: 24
  misc_feature: MA Experiment 20001451 PARAMETER Experiment Name: At_Far-red-induction_P Parameter: Tissue Value: Whole Plant
  misc_feature: MA Experiment ID: 20001554 Result: Down-regulated in Transcription
  misc_feature: MA Experiment 20001554 PARAMETER Experiment Name: At_Drought_Soil_Dry_P Parameter: Age (day) Value: 21
  misc_feature: MA Experiment 20001554 PARAMETER Experiment Name: At_Drought_Soil_Dry_P Parameter: Organism Value: A. thaliana
  misc_feature: MA Experiment 20001554 PARAMETER Experiment Name: At_Drought_Soil_Dry_P Parameter: Plant Line Value: WS
  misc_feature: MA Experiment 20001554 PARAMETER Experiment Name: At_Drought_Soil_Dry_P Parameter: Post Timepoint (hr) Value: None
  misc_feature: MA Experiment 20001554 PARAMETER Experiment Name: At_Drought_Soil_Dry_P Parameter: Post-Treatment Value: None
  misc_feature: MA Experiment 20001554 PARAMETER Experiment Name: At_Drought_Soil_Dry_P Parameter: Timepoint (day) Value: 7
  misc_feature: MA Experiment 20001554 PARAMETER Experiment Name: At_Drought_Soil_Dry_P Parameter: Treatment Value: Drought vs. No Drought
  misc_feature: MA Experiment ID: 20001558 Result: Up-regulated in Transcription
  misc_feature: MA Experiment 20001558 PARAMETER Experiment Name: At_Drought_Soil_Dry_P Parameter: Age (day) Value: 27
  misc_feature: MA Experiment 20001558 PARAMETER Experiment Name: At_Drought_Soil_Dry_P Parameter: Organism Value: A. thaliana
  misc_feature: MA Experiment 20001558 PARAMETER Experiment Name: At_Drought_Soil_Dry_P Parameter: Plant Line Value: WS
  misc_feature: MA Experiment 20001558 PARAMETER Experiment Name: At_Drought_Soil_Dry_P Parameter: Post Timepoint (hr) Value: 6
  misc_feature: MA Experiment 20001558 PARAMETER Experiment Name: At_Drought_Soil_Dry_P Parameter: Post-Treatment Value: Re-Water vs. No Drought
  misc_feature: MA Experiment 20001558 PARAMETER Experiment Name: At_Drought_Soil_Dry_P Parameter: Timepoint (day) Value: 13
  misc_feature: MA Experiment 20001558 PARAMETER Experiment Name: At_Drought_Soil_Dry_P Parameter: Treatment Value: Drought vs. No Drought
acttctcatagagacagaaaaagactactaatttacctctcgtgtaggaaaacaaagcaaaactggagtcattctctgtttcaaagagttatggtggtttcagtgaccatacgtcgtcgttttgttcttcttctacttgcatgcacttgtttgttgtctcggagactctgttttggtgaggacagaatcactttctcaactcctatcaaagactcagagtcagagacccttctatgcaaaagtggtattttcaggtttggtttcttcactcctgttaattccactactcggttacgttatgttgggatttggtacgaaaagattccaatccaaactgtggtttgggttgctaacaaagactctcccatcaacgacacttccggtgttatctcgatctatcaagatggaaatctcgcggttaccgatggtcgaaagcgccttgtatggtcgacgaatgtctcagtaccagtagctccaaatgctacttgggttcagcttatggattccgggaatcttatgttacaagataacagaaacaatggtgagattctttgggagagtttcaagcatccttatgattctttcatgccaagaatgactcttggcaccgacggtagaactggaggtaacctaaagcttacttcttggacaagccacgatggtccttcaacaggaaactacacagctggtattgctcctttcacgtttcctgagcttcttatctggaagaacaatgtcccaacgtggcgtagcggaccgtggaacggtcaggttttcatcggtttaccgaatatggattcacttctgtttcttgatgggtttaatctaaacagtgataatcaaggaacgatctcaatgtcttatgctaatgattcgttcatgtatcactttaacttggatcctgaaggaattatttatcagaaagattggagtacttctatgagaacttggaggatcggtgtaaagtttccatacacagactgtgatgcatacggtagatgtggtcgattcgggagttgtcatgccggggaaaacccgccttgtaaatgtgttaaaggtttttttccaaagaataacacagagtggaatggtgggaattggagtaatggatgtgtgagaaaagctccattgcagtgtgaaagacagaggaatgtaagtaatggtggtggtggtggaaaagcagatgggtttttgaaactgcagaagatgaaagttccaatctctgcggaacggtctgaggctagtgaacaagtttgtcctaaagtttgtttagataactgttcttgcactgcttatgcttatgatagaggaatcgggtgcatgctttggagtggtgatttagttgatatgcaatcgtttttgggaagtggcattgatctttttattcgtgttgctaattcagaactcaaaacacatagcaatctagcagttatgatcgcagcacctgttataggcgttgcgttaattgctgctgtctgcgttcttttagcatgccgaaaatacagaaagcgtccagctccagcgaaagatagaagtgcagagctaatgtttaaaagaatggaagcacttacaagtgataatgagtctgcttctaaccaaatcaagctcaaggagcttccactctttgagtttcaagtgttagctacatcaactgatagcttctctctcagaaacaagctcgggcaaggcgggtttggtcctgtttacaagggaaaattacctgaaggacaagaaattgcagtgaagaggctctcacggaaatcaggtcaaggactagaggaacttatgaacgaagtggttgtgatatcgaagttgcaacatcggaatctagtgaaattacttggatgttgcattgaaggtgaagaaagaatgttagtatatgaatatatgccaaagaaaagcttggatgcatatctatttgacccaatgaagcaaaagattcttgattggaagactcggttcaacataatggaaggaatttgtagaggtcttttgtaccttcacagagattcaagactaaagatcatacacagagatttaaaagccagcaacattttgttagatgagaatctaaaccccaagatatctgatttcggacttgcaagaattttccgtgcgaatgaagatgaagctaacacaagaagggttgttggaacatacggctatatgtcaccggagtatgcaatggaaggtttcttttcagaaaaatcagatgttttcagcttgggggttatatttctagagatcataagtggaagaagaaactctagttctcacaaggaagagaataatctcaaccttttggcttatgcatggaagctgtgg

SEQ ID NO: 41978 - protein, 775 aa, Arabidopsis thaliana
  peptide (1)..(775): Ceres Seq. ID no. 12385501
  misc_feature (110)..(223): Pfam Name: D-mannose binding lectin Pfam Description: D-mannose binding lectin
  misc_feature (60)..(774): Homolog of NCBI NO: 7434416 NR Description: serine/threonine kinase (EC 2.7.1.-) BRLK - wild
  misc_feature (42)..(774): Homolog of NCBI NO: 25287697 NR Description: hypothetical protein [imported] - Arabidopsis
  misc_feature (42)..(774): Homolog of NCBI NO: 15220338 NR Description: serine/threonine kinase, putative; protein id:
  misc_feature (464)..(774): Homolog of NCBI NO: 15220338 NR Description: serine/threonine kinase, putative; protein id:
  misc_feature (41)..(489): Homolog of NCBI NO: 15220338 NR Description: serine/threonine kinase, putative; protein id:
  misc_feature (742)..(774): Homolog of NCBI NO: 6554204 NR Description: T23J18.2 [Arabidopsis thaliana]
  misc_feature (42)..(720): Homolog of NCBI NO: 6554204 NR Description: T23J18.2 [Arabidopsis thaliana]
  misc_feature (41)..(774): Homolog of NCBI NO: 25287696 NR Description: hypothetical protein [imported] - Arabidopsis
  misc_feature (42)..(774): Homolog of NCBI NO: 4008010 NR Description: receptor-like protein kinase [Arabidopsis
  misc_feature (42)..(774): Homolog of NCBI NO: 15220353 NR Description: serine/threonine kinase, putative; protein id:
TSHRDRKRLLIYLSCRKTKQNWSHSLFQRVMVVSVTIRRRFVLLLLACTCLLSRRLCFGEDRITFSTPIKDSESETLLCKSGIFRFGFFTPVNSTTRLRYVGIWYEKIPIQTVVWVANKDSPINDTSGVISIYQDGNLAVTDGRKRLVWSTNVSVPVAPNATWVQLMDSGNLMLQDNRNNGEILWESFKHPYDSFMPRMTLGTDGRTGGNLKLTSWTSHDGPSTGNYTAGIAPFTFPELLIWKNNVPTWRSGPWNGQVFIGLPNMDSLLFLDGFNLNSDNQGTISMSYANDSFMYHFNLDPEGIIYQKDWSTSMRTWRIGVKFPYTDCDAYGRCGRFGSCHAGENPPCKCVKGFFPKNNTEWNGGNWSNGCVRKAPLQCERQRNVSNGGGGGKADGFLKLQKMKVPISAERSEASEQVCPKVCLDNCSCTAYAYDRGIGCMLWSGDLVDMQSFLGSGIDLFIRVANSELKTHSNLAVMIAAPVIGVALIAAVCVLLACRKYRKRPAPAKDRSAELMFKRMEALTSDNESASNQIKLKELPLFEFQVLATSTDSFSLRNKLGQGGFGPVYKGKLPEGQEIAVKRLSRKSGQGLEELMNEVVVISKLQHRNLVKLLGCCIEGEERMLVYEYMPKKSLDAYLFDPMKQKILDWKTRFNIMEGICRGLLYLHRDSRLKIIHRDLKASNILLDENLNPKISDFGLARIFRANEDEANTRRVVGTYGYMSPEYAMEGFFSEKSDVFSLGVIFLEIISGRRNSSSHKEENNLNLLAYAWKLW

SEQ ID NO: 41979 - protein, 745 aa, Arabidopsis thaliana
  peptide (1)..(745): Ceres Seq. ID no. 12385502
  misc_feature (80)..(193): Pfam Name: D-mannose binding lectin Pfam Description: D-mannose binding lectin
  misc_feature (30)..(744): Homolog of NCBI NO: 7434416 NR Description: serine/threonine kinase (EC 2.7.1.-) BRLK - wild
  misc_feature (12)..(744): Homolog of NCBI NO: 25287697 NR Description: hypothetical protein [imported] - Arabidopsis
  misc_feature (12)..(744): Homolog of NCBI NO: 15220338 NR Description: serine/threonine kinase, putative; protein id:
  misc_feature (434)..(744): Homolog of NCBI NO: 15220338 NR Description: serine/threonine kinase, putative; protein id:
  misc_feature (11)..(459): Homolog of NCBI NO: 15220338 NR Description: serine/threonine kinase, putative; protein id:
  misc_feature (712)..(744): Homolog of NCBI NO: 6554204 NR Description: T23J18.2 [Arabidopsis thaliana]
  misc_feature (12)..(690): Homolog of NCBI NO: 6554204 NR Description: T23J18.2 [Arabidopsis thaliana]
  misc_feature (11)..(744): Homolog of NCBI NO: 25287696 NR Description: hypothetical protein [imported] - Arabidopsis
  misc_feature (12)..(744): Homolog of NCBI NO: 4008010 NR Description: receptor-like protein kinase [Arabidopsis
  misc_feature (12)..(744): Homolog of NCBI NO: 15220353 NR Description: serine/threonine kinase, putative; protein id:
MVVSVTIRRRFVLLLLACTCLLSRRLCFGEDRITFSTPIKDSESETLLCKSGIFRFGFFTPVNSTTRLRYVGIWYEKIPIQTVVWVANKDSPINDTSGVISIYQDGNLAVTDGRKRLVWSTNVSVPVAPNATWVQLMDSGNLMLQDNRNNGEILWESFKHPYDSFMPRMTLGTDGRTGGNLKLTSWTSHDGPSTGNYTAGIAPFTFPELLIWKNNVPTWRSGPWNGQVFIGLPNMDSLLFLDGFNLNSDNQGTISMSYANDSFMYHFNLDPEGIIYQKDWSTSMRTWRIGVKFPYTDCDAYGRCGRFGSCHAGENPPCKCVKGFFPKNNTEWNGGNWSNGCVRKAPLQCERQRNVSNGGGGGKADGFLKLQKMKVPISAERSEASEQVCPKVCLDNCSCTAYAYDRGIGCMLWSGDLVDMQSFLGSGIDLFIRVANSELKTHSNLAVMIAAPVIGVALIAAVCVLLACRKYRKRPAPAKDRSAELMFKRMEALTSDNESASNQIKLKELPLFEFQVLATSTDSFSLRNKLGQGGFGPVYKGKLPEGQEIAVKRLSRKSGQGLEELMNEVVVISKLQHRNLVKLLGCCIEGEERMLVYEYMPKKSLDAYLFDPMKQKILDWKTRFNIMEGICRGLLYLHRDSRLKIIHRDLKASNILLDENLNPKISDFGLARIFRANEDEANTRRVVGTYGYMSPEYAMEGFFSEKSDVFSLGVIFLEIISGRRNSSSHKEENNLNLLAYAWKLW

SEQ ID NO: 41980 - protein, 609 aa, Arabidopsis thaliana
  peptide (1)..(609): Ceres Seq. ID no. 12385503
  misc_feature (1)..(57): Pfam Name: D-mannose binding lectin Pfam Description: D-mannose binding lectin
  misc_feature (1)..(608): Homolog of NCBI NO: 7434416 NR Description: serine/threonine kinase (EC 2.7.1.-) BRLK - wild
  misc_feature (1)..(608): Homolog of NCBI NO: 25287697 NR Description: hypothetical protein [imported] - Arabidopsis
  misc_feature (1)..(608): Homolog of NCBI NO: 15220338 NR Description: serine/threonine kinase, putative; protein id:
  misc_feature (298)..(608): Homolog of NCBI NO: 15220338 NR Description: serine/threonine kinase, putative; protein id:
  misc_feature (1)..(323): Homolog of NCBI NO: 15220338 NR Description: serine/threonine kinase, putative; protein id:
  misc_feature (576)..(608): Homolog of NCBI NO: 6554204 NR Description: T23J18.2 [Arabidopsis thaliana]
  misc_feature (1)..(554): Homolog of NCBI NO: 6554204 NR Description: T23J18.2 [Arabidopsis thaliana]
  misc_feature (1)..(608): Homolog of NCBI NO: 25287696 NR Description: hypothetical protein [imported] - Arabidopsis
  misc_feature (1)..(608): Homolog of NCBI NO: 4008010 NR Description: receptor-like protein kinase [Arabidopsis
  misc_feature (1)..(608): Homolog of NCBI NO: 15220353 NR Description: serine/threonine kinase, putative; protein id:
MDSGNLMLQDNRNNGEILWESFKHPYDSFMPRMTLGTDGRTGGNLKLTSWTSHDGPSTGNYTAGIAPFTFPELLIWKNNVPTWRSGPWNGQVFIGLPNMDSLLFLDGFNLNSDNQGTISMSYANDSFMYHFNLDPEGIIYQKDWSTSMRTWRIGVKFPYTDCDAYGRCGRFGSCHAGENPPCKCVKGFFPKNNTEWNGGNWSNGCVRKAPLQCERQRNVSNGGGGGKADGFLKLQKMKVPISAERSEASEQVCPKVCLDNCSCTAYAYDRGIGCMLWSGDLVDMQSFLGSGIDLFIRVANSELKTHSNLAVMIAAPVIGVALIAAVCVLLACRKYRKRPAPAKDRSAELMFKRMEALTSDNESASNQIKLKELPLFEFQVLATSTDSFSLRNKLGQGGFGPVYKGKLPEGQEIAVKRLSRKSGQGLEELMNEVVVISKLQHRNLVKLLGCCIEGEERMLVYEYMPKKSLDAYLFDPMKQKILDWKTRFNIMEGICRGLLYLHRDSRLKIIHRDLKASNILLDENLNPKISDFGLARIFRANEDEANTRRVVGTYGYMSPEYAMEGFFSEKSDVFSLGVIFLEIISGRRNSSSHKEENNLNLLAYAWKLW

SEQ ID NO: 41981 - DNA, 654 bp, Arabidopsis thaliana
  misc_feature (1)..(654): Ceres Seq. ID no. 12385549
  misc_feature: MA Experiment ID: 108464 Result: Down-regulated in Transcription
  misc_feature: MA Experiment 108464 PARAMETER Experiment Name: At_Germinating_Seeds_cDNA_P Parameter: Age (day) Value: 4 vs. 0
  misc_feature: MA Experiment 108464 PARAMETER Experiment Name: At_Germinating_Seeds_cDNA_P Parameter: Tissue Value: Germinating Seeds
  misc_feature: MA Experiment ID: 108488 Result: Down-regulated in Transcription
  misc_feature: MA Experiment ID: 20000069 Result: Up-regulated in Transcription
  misc_feature: MA Experiment 20000069 PARAMETER Experiment Name: At_100uM_ABA_Mutants_cDNA_P Parameter: Plant Line Value: CS23
  misc_feature: MA Experiment 20000069 PARAMETER Experiment Name: At_100uM_ABA_Mutants_cDNA_P Parameter: Timepoint (hr) Value: 6
  misc_feature: MA Experiment 20000069 PARAMETER Experiment Name: At_100uM_ABA_Mutants_cDNA_P Parameter: Tissue Value: Aerial
  misc_feature: MA Experiment 20000069 PARAMETER Experiment Name: At_100uM_ABA_Mutants_cDNA_P Parameter: Treatment Value: 100uM ABA vs. No Treatment
  misc_feature: MA Experiment ID: 20000070 Result: Up-regulated in Transcription
  misc_feature: MA Experiment 20000070 PARAMETER Experiment Name: At_100uM_ABA_Mutants_cDNA_P Parameter: Plant Line Value: CS24
  misc_feature: MA Experiment 20000070 PARAMETER Experiment Name: At_100uM_ABA_Mutants_cDNA_P Parameter: Timepoint (hr) Value: 6
  misc_feature: MA Experiment 20000070 PARAMETER Experiment Name: At_100uM_ABA_Mutants_cDNA_P Parameter: Tissue Value: Aerial
  misc_feature: MA Experiment 20000070 PARAMETER Experiment Name: At_100uM_ABA_Mutants_cDNA_P Parameter: Treatment Value: 100uM ABA vs. No Treatment
  misc_feature: MA Experiment ID: 20000086 Result: Up-regulated in Transcription
  misc_feature: MA Experiment 20000086 PARAMETER Experiment Name: At_100uM_ABA_Mutants_cDNA_P Parameter: Plant Line Value: CS22
  misc_feature: MA Experiment 20000086 PARAMETER Experiment Name: At_100uM_ABA_Mutants_cDNA_P Parameter: Timepoint (hr) Value: 6
  misc_feature: MA Experiment 20000086 PARAMETER Experiment Name: At_100uM_ABA_Mutants_cDNA_P Parameter: Tissue Value: Aerial
  misc_feature: MA Experiment 20000086 PARAMETER Experiment Name: At_100uM_ABA_Mutants_cDNA_P Parameter: Treatment Value: 100uM ABA vs. No Treatment
  misc_feature: MA Experiment ID: 20000087 Result: Up-regulated in Transcription
  misc_feature: MA Experiment 20000087 PARAMETER Experiment Name: At_100uM_ABA_Mutants_cDNA_P Parameter: Plant Line Value: WS
  misc_feature: MA Experiment 20000087 PARAMETER Experiment Name: At_100uM_ABA_Mutants_cDNA_P Parameter: Timepoint (hr) Value: 6
  misc_feature: MA Experiment 20000087 PARAMETER Experiment Name: At_100uM_ABA_Mutants_cDNA_P Parameter: Tissue Value: Aerial
  misc_feature: MA Experiment 20000087 PARAMETER Experiment Name: At_100uM_ABA_Mutants_cDNA_P Parameter: Treatment Value: 100uM ABA vs. No Treatment
  misc_feature: MA Experiment ID: 20000088 Result: Up-regulated in Transcription
  misc_feature: MA Experiment 20000088 PARAMETER Experiment Name: At_100uM_ABA_Mutants_cDNA_P Parameter: Plant Line Value: Landsberg
  misc_feature: MA Experiment 20000088 PARAMETER Experiment Name: At_100uM_ABA_Mutants_cDNA_P Parameter: Timepoint (hr) Value: 6
  misc_feature: MA Experiment 20000088 PARAMETER Experiment Name: At_100uM_ABA_Mutants_cDNA_P Parameter: Tissue Value: Aerial
  misc_feature: MA Experiment 20000088 PARAMETER Experiment Name: At_100uM_ABA_Mutants_cDNA_P Parameter: Treatment Value: 100uM ABA vs. No Treatment
  misc_feature: MA Experiment ID: 20000117 Result: Up-regulated in Transcription
  misc_feature: MA Experiment 20000117 PARAMETER Experiment Name: At_100uM_ABA_Mutants_cDNA_P Parameter: Plant Line Value: Columbia
  misc_feature: MA Experiment 20000117 PARAMETER Experiment Name: At_100uM_ABA_Mutants_cDNA_P Parameter: Timepoint (hr) Value: 6
  misc_feature: MA Experiment 20000117 PARAMETER Experiment Name: At_100uM_ABA_Mutants_cDNA_P Parameter: Tissue Value: Aerial
  misc_feature: MA Experiment 20000117 PARAMETER Experiment Name: At_100uM_ABA_Mutants_cDNA_P Parameter: Treatment Value: 100uM ABA vs. No Treatment
  misc_feature: MA Experiment ID: 20000213 Result: Up-regulated in Transcription
  misc_feature: MA Experiment 20000213 PARAMETER Experiment Name: At_4deg_Cold_P Parameter: Timepoint (hr) Value: 2
  misc_feature: MA Experiment ID: 20000224 Result: Down-regulated in Transcription
  misc_feature: MA Experiment ID: 20000437 Result: Up-regulated in Transcription
  misc_feature: MA Experiment 20000437 PARAMETER Experiment Name: At_Drought_P Parameter: Age (day) Value: 8
  misc_feature: MA Experiment 20000437 PARAMETER Experiment Name: At_Drought_P Parameter: Organism Value: A. thaliana
  misc_feature: MA Experiment 20000437 PARAMETER Experiment Name: At_Drought_P Parameter: Plant Line Value: WS
  misc_feature: MA Experiment 20000437 PARAMETER Experiment Name: At_Drought_P Parameter: Timepoint (hr) Value: 24
  misc_feature: MA Experiment 20000437 PARAMETER Experiment Name: At_Drought_P Parameter: Tissue Value: Whole Plant
  misc_feature: MA Experiment 20000437 PARAMETER Experiment Name: At_Drought_P Parameter: Treatment Value: Drought vs. No Drought
  misc_feature: MA Experiment ID: 20000438 Result: Down-regulated in Transcription
  misc_feature: MA Experiment 20000438 PARAMETER Experiment Name: At_Shoots__P Parameter: Age (day) Value: 14
  misc_feature: MA Experiment 20000438 PARAMETER Experiment Name: At_Shoots__P Parameter: Tissue Value: Shoots vs. Whole Plant
  misc_feature: MA Experiment ID: 20001451 Result: Up-regulated in Transcription
  misc_feature: MA Experiment 20001451 PARAMETER Experiment Name: At_Far-red-induction_P Parameter: Age (day) Value: 7
  misc_feature: MA Experiment 20001451 PARAMETER Experiment Name: At_Far-red-induction_P Parameter: Light Value: Far-red vs. White
  misc_feature: MA Experiment 20001451 PARAMETER Experiment Name: At_Far-red-induction_P Parameter: Organism Value: A. thaliana
  misc_feature: MA Experiment 20001451 PARAMETER Experiment Name: At_Far-red-induction_P Parameter: Plant Line Value: Columbia
  misc_feature: MA Experiment 20001451 PARAMETER Experiment Name: At_Far-red-induction_P Parameter: Timepoint (hr) Value: 24
  misc_feature: MA Experiment 20001451 PARAMETER Experiment Name: At_Far-red-induction_P Parameter: Tissue Value: Whole Plant
  misc_feature: MA Experiment ID: 20001557 Result: Up-regulated in Transcription
  misc_feature: MA Experiment 20001557 PARAMETER Experiment Name: At_Drought_Soil_Dry_P Parameter: Age (day) Value: 27
  misc_feature: MA Experiment 20001557 PARAMETER Experiment Name: At_Drought_Soil_Dry_P Parameter: Organism Value: A. thaliana
  misc_feature: MA Experiment 20001557 PARAMETER Experiment Name: At_Drought_Soil_Dry_P Parameter: Plant Line Value: WS
  misc_feature: MA Experiment 20001557 PARAMETER Experiment Name: At_Drought_Soil_Dry_P Parameter: Post Timepoint (hr) Value: 3
  misc_feature: MA Experiment 20001557 PARAMETER Experiment Name: At_Drought_Soil_Dry_P Parameter: Post-Treatment Value: Re-Water vs. No Drought
  misc_feature: MA Experiment 20001557 PARAMETER Experiment Name: At_Drought_Soil_Dry_P Parameter: Timepoint (day) Value: 13
  misc_feature: MA Experiment 20001557 PARAMETER Experiment Name: At_Drought_Soil_Dry_P Parameter: Treatment Value: Drought vs. No Drought
aacacatctcactgctcactactctcactgtaatcccttagatcttcttttcaaatttcaatggcgtccggtgatgttgagtatcggtgcttcgttggaggtctagcatgggccactgatgacagagctcttgagactgccttcgctcaatacggcgacgttattgattccaagatcattaacgatcgtgagactggaagatcaaggggattcggattcgtcaccttcaaggatgagaaagccatgaaggatgcgattgagggaatgaacggacaagatctcgatggccgtagcatcactgttaaagaggctcagtcacgaggaagcggtggcggcggaggccaccgtggaggtggtggaagacgtgagggaggaggaggatacggtggtggtgaaggaggaggttacggaggaagcggtggtggtggaggatggtaattcctttaattaggtttgggattaccaatgaatgttctctctctcgcttgttatgcttctacttggttttgtgtgttctctattttgttctggttctgctttagatttgatgtaacagttcgtgattaggtattttggtatctggaaacgtaatgttaagtcacttgtcattctctaaataacaaatttcttcggagatattatctctgttgattg

SEQ ID NO: 41982 - protein, 125 aa, Arabidopsis thaliana
  peptide (1)..(125): Ceres Seq. ID no. 12385550
  misc_feature (10)..(81): Pfam Name: RNA recognition motif. (a.k.a. RRM, RBD, or RNP domain) Pfam Description: RNA recognition motif. (a.k.a. RRM, RBD, or RNP
  misc_feature (1)..(125): Homolog of NCBI NO: 7439987 NR Description: glycine-rich RNA-binding protein - rice
  misc_feature (5)..(125): Homolog of NCBI NO: 2119044 NR Description: glycine-rich RNA-binding protein RGP-1b - wood
  misc_feature (5)..(125): Homolog of NCBI NO: 30692254 NR Description: glycine-rich RNA-binding protein 8 (GRP8) (CCR1)
  misc_feature (5)..(125): Homolog of NCBI NO: 544426 NR Description: Glycine-rich RNA-binding protein
  misc_feature (1)..(124): Homolog of NCBI NO: 2267567 NR Description: glycine-rich RNA binding protein 1 [Pelargonium x
  misc_feature (1)..(125): Homolog of NCBI NO: 1346181 NR Description: Glycine-rich RNA-binding protein GRP2A
  misc_feature (1)..(125): Homolog of NCBI NO: 1346180 NR Description: Glycine-rich RNA-binding protein GRP1A
  misc_feature (1)..(124): Homolog of NCBI NO: 21553354 NR Description: glycine-rich RNA binding protein 7 [Arabidopsis
  misc_feature (1)..(124): Homolog of NCBI NO: 15226605 NR Description: glycine-rich RNA binding protein AtGRP7
  misc_feature (1)..(124): Homolog of NCBI NO: 30681492 NR Description: glycine-rich RNA-binding protein (AtGRP7)
MASGDVEYRCFVGGLAWATDDRALETAFAQYGDVIDSKIINDRETGRSRGFGFVTFKDEKAMKDAIEGMNGQDLDGRSITVKEAQSRGSGGGGGHRGGGGRREGGGGYGGGEGGGYGGSGGGGGW

SEQ ID NO: 41983 - protein, 64 aa, Arabidopsis thaliana
  peptide (1)..(64): Ceres Seq. ID no. 12385551
  misc_feature (1)..(64): Homolog of NCBI NO: 7439987 NR Description: glycine-rich RNA-binding protein - rice
  misc_feature (1)..(64): Homolog of NCBI NO: 2119044 NR Description: glycine-rich RNA-binding protein RGP-1b - wood
  misc_feature (1)..(64): Homolog of NCBI NO: 30692254 NR Description: glycine-rich RNA-binding protein 8 (GRP8) (CCR1)
  misc_feature (1)..(64): Homolog of NCBI NO: 544426 NR Description: Glycine-rich RNA-binding protein
  misc_feature (1)..(63): Homolog of NCBI NO: 2267567 NR Description: glycine-rich RNA binding protein 1 [Pelargonium x
  misc_feature (1)..(64): Homolog of NCBI NO: 1346181 NR Description: Glycine-rich RNA-binding protein GRP2A
  misc_feature (1)..(64): Homolog of NCBI NO: 1346180 NR Description: Glycine-rich RNA-binding protein GRP1A
  misc_feature (1)..(63): Homolog of NCBI NO: 21553354 NR Description: glycine-rich RNA binding protein 7 [Arabidopsis
  misc_feature (1)..(63): Homolog of NCBI NO: 15226605 NR Description: glycine-rich RNA binding protein AtGRP7
  misc_feature (1)..(63): Homolog of NCBI NO: 30681492 NR Description: glycine-rich RNA-binding protein (AtGRP7)
MKDAIEGMNGQDLDGRSITVKEAQSRGSGGGGGHRGGGGRREGGGGYGGGEGGGYGGSGGGGGW

SEQ ID NO: 41984 - DNA, 1252 bp, Arabidopsis thaliana
  misc_feature (1)..(1252): Ceres Seq. ID no. 12395490
  misc_feature: MA Experiment ID: 108572 Result: Up-regulated in Transcription
  misc_feature: MA Experiment 108572 PARAMETER Experiment Name: At_Drought_cDNA_P Parameter: Timepoint (hr) Value: 1
  misc_feature: MA Experiment 108572 PARAMETER Experiment Name: At_Drought_cDNA_P Parameter: Tissue Value: Aerial
  misc_feature: MA Experiment 108572 PARAMETER Experiment Name: At_Drought_cDNA_P Parameter: Treatment Value: Drought vs. No Drought
  misc_feature: MA Experiment ID: 108573 Result: Up-regulated in Transcription
  misc_feature: MA Experiment 108573 PARAMETER Experiment Name: At_Drought_cDNA_P Parameter: Timepoint (hr) Value: 6
  misc_feature: MA Experiment 108573 PARAMETER Experiment Name: At_Drought_cDNA_P Parameter: Tissue Value: Aerial
  misc_feature: MA Experiment 108573 PARAMETER Experiment Name: At_Drought_cDNA_P Parameter: Treatment Value: Drought vs. No Drought
  misc_feature: MA Experiment ID: 20000234 Result: Down-regulated in Transcription
  misc_feature: MA Experiment 20000234 PARAMETER Experiment Name: At_Siliques_P Parameter: Age (day) Value: 21
  misc_feature: MA Experiment 20000234 PARAMETER Experiment Name: At_Siliques_P Parameter: Organism Value: A. thaliana
  misc_feature: MA Experiment 20000234 PARAMETER Experiment Name: At_Siliques_P Parameter: Plant Line Value: WS
  misc_feature: MA Experiment 20000234 PARAMETER Experiment Name: At_Siliques_P Parameter: Tissue Value: Less Than 5mm Siliques vs. Whole Plant
  misc_feature: MA Experiment ID: 20000265 Result: Down-regulated in Transcription
  misc_feature: MA Experiment 20000265 PARAMETER Experiment Name: At_Open_Flower_P Parameter: Age (day) Value: 21
  misc_feature: MA Experiment 20000265 PARAMETER Experiment Name: At_Open_Flower_P Parameter: Plant Line Value: WS
  misc_feature: MA Experiment 20000265 PARAMETER Experiment Name: At_Open_Flower_P Parameter: Tissue Value: Closed Flower vs. Whole Plant
  misc_feature: MA Experiment ID: 20000438 Result: Down-regulated in Transcription
  misc_feature: MA Experiment 20000438 PARAMETER Experiment Name: At_Shoots__P Parameter: Age (day) Value: 14
  misc_feature: MA Experiment 20000438 PARAMETER Experiment Name: At_Shoots__P Parameter: Tissue Value: Shoots vs. Whole Plant
  misc_feature: MA Experiment ID: 20000794 Result: Up-regulated in Transcription
  misc_feature: MA Experiment 20000794 PARAMETER Experiment Name: At_Petals_P Parameter: Age (day) Value: 23-25 days
  misc_feature: MA Experiment 20000794 PARAMETER Experiment Name: At_Petals_P Parameter: Plant Line Value: WS
  misc_feature: MA Experiment 20000794 PARAMETER Experiment Name: At_Petals_P Parameter: Tissue Value: Petals vs. Whole plant
  misc_feature: MA Experiment ID: 20001248 Result: Up-regulated in Transcription
  misc_feature: MA Experiment 20001248 PARAMETER Experiment Name: At_Far-red-induction_P Parameter: Age (day) Value: 7
  misc_feature: MA Experiment 20001248 PARAMETER Experiment Name: At_Far-red-induction_P Parameter: Light Value: Far-red vs. White
  misc_feature: MA Experiment 20001248 PARAMETER Experiment Name: At_Far-red-induction_P Parameter: Organism Value: A. thaliana
  misc_feature: MA Experiment 20001248 PARAMETER Experiment Name: At_Far-red-induction_P Parameter: Plant Line Value: Columbia
  misc_feature: MA Experiment 20001248 PARAMETER Experiment Name: At_Far-red-induction_P Parameter: Timepoint (hr) Value: 4
  misc_feature: MA Experiment 20001248 PARAMETER Experiment Name: At_Far-red-induction_P Parameter: Tissue Value: Whole Plant
  misc_feature: MA Experiment ID: 20001558 Result: Down-regulated in Transcription
  misc_feature: MA Experiment 20001558 PARAMETER Experiment Name: At_Drought_Soil_Dry_P Parameter: Age (day) Value: 27
  misc_feature: MA Experiment 20001558 PARAMETER Experiment Name: At_Drought_Soil_Dry_P Parameter: Organism Value: A. thaliana
  misc_feature: MA Experiment 20001558 PARAMETER Experiment Name: At_Drought_Soil_Dry_P Parameter: Plant Line Value: WS
  misc_feature: MA Experiment 20001558 PARAMETER Experiment Name: At_Drought_Soil_Dry_P Parameter: Post Timepoint (hr) Value: 6
  misc_feature: MA Experiment 20001558 PARAMETER Experiment Name: At_Drought_Soil_Dry_P Parameter: Post-Treatment Value: Re-Water vs. No Drought
  misc_feature: MA Experiment 20001558 PARAMETER Experiment Name: At_Drought_Soil_Dry_P Parameter: Timepoint (day) Value: 13
  misc_feature: MA Experiment 20001558 PARAMETER Experiment Name: At_Drought_Soil_Dry_P Parameter: Treatment Value: Drought vs. No Drought
  misc_feature: MA Experiment ID: 20001560 Result: Down-regulated in Transcription
  misc_feature: MA Experiment 20001560 PARAMETER Experiment Name: At_Drought_Soil_Dry_P Parameter: Age (day) Value: 28
  misc_feature: MA Experiment 20001560 PARAMETER Experiment Name: At_Drought_Soil_Dry_P Parameter: Organism Value: A. thaliana
  misc_feature: MA Experiment 20001560 PARAMETER Experiment Name: At_Drought_Soil_Dry_P Parameter: Plant Line Value: WS
  misc_feature: MA Experiment 20001560 PARAMETER Experiment Name: At_Drought_Soil_Dry_P Parameter: Post Timepoint (hr) Value: None
  misc_feature: MA Experiment 20001560 PARAMETER Experiment Name: At_Drought_Soil_Dry_P Parameter: Post-Treatment Value: None
  misc_feature: MA Experiment 20001560 PARAMETER Experiment Name: At_Drought_Soil_Dry_P Parameter: Timepoint (day) Value: 14
  misc_feature: MA Experiment 20001560 PARAMETER Experiment Name: At_Drought_Soil_Dry_P Parameter: Treatment Value: Drought vs. No Drought
aaaatcaaatggatcgtcttaagctttatttctccgttttcgttttgtctttctttatcgtctcggtttcgtcgtctgatgtcaacgacggcgatgatctcgtgatccgtcaggtggttggtggagccgagcctcaggttttgacctcagaggatcacttttctctcttcaggaagttcgggaaggtctacgcttccaacgaggagcatgactatatatctcaggcgagcgaggcgtcaccagaagttggatccgtcggcgactcatggtgttacgcagttctcagatctgactcggtctgagttccgtaagaagcacttgggggttagaagtggctttaagcttcctaaagatgccaacaaggctccgattctccctaccgaaaatctccctgaggattttgattggagagatcatggcgccgttactcccgtcaaaaatcagggatcttgcggctcttgctggagtttcagcgccactggagctttggaaggtgctaacttcctcgctaccggcaaactcgtcagcctcagcgaacaacagctcgtcgactgtgatcacgagtgtgatcccgaggaggcagattcctgcgactctggttgcaatggtgggctaatgaacagcgcttttgaatacaccctcaaaaccggagggctcatgaaagaagaagactatccttacaccggaaaggacggcaagacctgcaagctagacaagtccaagatcgttgcctctgtctccaacttcagtgttatctccattgatgaagaacagattgctgcaaaccttgtcaagaacggacctcttgctgtagccatcaacgctggctatatgcagacttacattggaggagtctcatgcccttacatatgcaccaggaggctcaaccacggtgtcttattggttggctatggagcggcaggttacgctccggctaggttcaaggagaagccttactggatcatcaagaactcgtggggagagacttggggtgaaaatggtttctacaaaatctgcaaaggccgtaacatttgtggtgttgacagtatggtctccactgttgcagccaccgtctcaaccaccgcccattaagcatctcgtcaataagttttaattactttggtgatttgtatgagcgagctctctttgcgctgctgactctctctatttatctctgcttcttgcttgtaaataaaatgcgttctattgagcaaaaccgtacaatgctcattagcaatgagcccactttaac

SEQ ID NO: 41985 - protein, 294 aa, Arabidopsis thaliana
  peptide (1)..(294): Ceres Seq. ID no. 12395491
  misc_feature (61)..(286): Pfam Name: Papain family cysteine protease Pfam Description: Papain family cysteine protease
  misc_feature (5)..(293): Homolog of NCBI NO: 13491752 NR Description: cysteine protease [Ipomoea batatas]
  misc_feature (5)..(293): Homolog of NCBI NO: 7211743 NR Description: papain-like cysteine proteinase isoform II
  misc_feature (5)..(293): Homolog of NCBI NO: 7381221 NR Description: papain-like cysteine proteinase isoform II
  misc_feature (5)..(293): Homolog of NCBI NO: 7211745 NR Description: papain-like cysteine proteinase isoform III
  misc_feature (5)..(293): Homolog of NCBI NO: 7381219 NR Description: papain-like cysteine proteinase isoform I
  misc_feature (5)..(293): Homolog of NCBI NO: 7211741 NR Description: papain-like cysteine proteinase isoform I
  misc_feature (5)..(290): Homolog of NCBI NO: 18399697 NR Description: cysteine proteinase
  misc_feature (5)..(294): Homolog of NCBI NO: 18141287 NR Description: senescence-associated cysteine protease [Brassica
  misc_feature (5)..(294): Homolog of NCBI NO: 21593213 NR Description: cysteine proteinase RD19A [Arabidopsis thaliana]
  misc_feature (5)..(294): Homolog of NCBI NO: 18420375 NR Description: cysteine proteinase RD19A
MTIYLRRARRHQKLDPSATHGVTQFSDLTRSEFRKKHLGVRSGFKLPKDANKAPILPTENLPEDFDWRDHGAVTPVKNQGSCGSCWSFSATGALEGANFLATGKLVSLSEQQLVDCDHECDPEEADSCDSGCNGGLMNSAFEYTLKTGGLMKEEDYPYTGKDGKTCKLDKSKIVASVSNFSVISIDEEQIAANLVKNGPLAVAINAGYMQTYIGGVSCPYICTRRLNHGVLLVGYGAAGYAPARFKEKPYWIIKNSWGETWGENGFYKICKGRNICGVDSMVSTVAATVSTTAH

SEQ ID NO: 41986 - protein, 158 aa, Arabidopsis thaliana; identical to SEQ ID NO: 27260
  peptide (1)..(158): Ceres Seq. ID no. 12395492
  misc_feature (1)..(150): Pfam Name: Papain family cysteine protease Pfam Description: Papain family cysteine protease
  misc_feature (1)..(157): Homolog of NCBI NO: 13491752 NR Description: cysteine protease [Ipomoea batatas]
  misc_feature (1)..(157): Homolog of NCBI NO: 7211743 NR Description: papain-like cysteine proteinase isoform II
  misc_feature (1)..(157): Homolog of NCBI NO: 7381221 NR Description: papain-like cysteine proteinase isoform II
  misc_feature (1)..(157): Homolog of NCBI NO: 7211745 NR Description: papain-like cysteine proteinase isoform III
  misc_feature (1)..(157): Homolog of NCBI NO: 7381219 NR Description: papain-like cysteine proteinase isoform I
  misc_feature (1)..(157): Homolog of NCBI NO: 7211741 NR Description: papain-like cysteine proteinase isoform I
  misc_feature (1)..(154): Homolog of NCBI NO: 18399697 NR Description: cysteine proteinase
  misc_feature (1)..(158): Homolog of NCBI NO: 18141287 NR Description: senescence-associated cysteine protease [Brassica
  misc_feature (1)..(158): Homolog of NCBI NO: 21593213 NR Description: cysteine proteinase RD19A [Arabidopsis thaliana]
  misc_feature (1)..(158): Homolog of NCBI NO: 18420375 NR Description: cysteine proteinase RD19A

SEQ ID NO: 41987 - DNA, 1140 bp, Arabidopsis thaliana
  misc_feature (1)..(1140): Ceres Seq. ID no. 13489385
  misc_feature: MA Experiment ID: 108595 Result: Down-regulated in Transcription
  misc_feature: MA Experiment 108595 PARAMETER Experiment Name: At_Ler-pi_Ovule_cDNA_P Parameter: Plant Line Value: null
  misc_feature: MA Experiment ID: 20000111 Result: Down-regulated in Transcription
  misc_feature: MA Experiment 20000111 PARAMETER Experiment Name: At_42deg_Heat_cDNA_P Parameter: Temperature (deg C) Value: 42 vs. 22
  misc_feature: MA Experiment 20000111 PARAMETER Experiment Name: At_42deg_Heat_cDNA_P Parameter: Timepoint (hr) Value: 6
  misc_feature: MA Experiment 20000111 PARAMETER Experiment Name: At_42deg_Heat_cDNA_P Parameter: Tissue Value: Aerial
  misc_feature: MA Experiment ID: 20000264 Result: Up-regulated in Transcription
  misc_feature: MA Experiment 20000264 PARAMETER Experiment Name: At_Open_Flower_P Parameter: Age (day) Value: 21
  misc_feature: MA Experiment 20000264 PARAMETER Experiment Name: At_Open_Flower_P Parameter: Plant Line Value: WS
  misc_feature: MA Experiment 20000264 PARAMETER Experiment Name: At_Open_Flower_P Parameter: Tissue Value: Open Flower vs. Whole Plant
  misc_feature: MA Experiment ID: 20000794 Result: Up-regulated in Transcription
  misc_feature: MA Experiment 20000794 PARAMETER Experiment Name: At_Petals_P Parameter: Age (day) Value: 23-25 days
  misc_feature: MA Experiment 20000794 PARAMETER Experiment Name: At_Petals_P Parameter: Plant Line Value: WS
  misc_feature: MA Experiment 20000794 PARAMETER Experiment Name: At_Petals_P Parameter: Tissue Value: Petals vs. Whole plant
  misc_feature: MA Experiment ID: 20001557 Result: Down-regulated in Transcription
  misc_feature: MA Experiment 20001557 PARAMETER Experiment Name: At_Drought_Soil_Dry_P Parameter: Age (day) Value: 27
  misc_feature: MA Experiment 20001557 PARAMETER Experiment Name: At_Drought_Soil_Dry_P Parameter: Organism Value: A. thaliana
  misc_feature: MA Experiment 20001557 PARAMETER Experiment Name: At_Drought_Soil_Dry_P Parameter: Plant Line Value: WS
  misc_feature: MA Experiment 20001557 PARAMETER Experiment Name: At_Drought_Soil_Dry_P Parameter: Post Timepoint (hr) Value: 3
  misc_feature: MA Experiment 20001557 PARAMETER Experiment Name: At_Drought_Soil_Dry_P Parameter: Post-Treatment Value: Re-Water vs. No Drought
  misc_feature: MA Experiment 20001557 PARAMETER Experiment Name: At_Drought_Soil_Dry_P Parameter: Timepoint (day) Value: 13
  misc_feature: MA Experiment 20001557 PARAMETER Experiment Name: At_Drought_Soil_Dry_P Parameter: Treatment Value: Drought vs. No Drought
  misc_feature: MA Experiment ID: 20001558 Result: Down-regulated in Transcription
  misc_feature: MA Experiment 20001558 PARAMETER Experiment Name: At_Drought_Soil_Dry_P Parameter: Age (day) Value: 27
  misc_feature: MA Experiment 20001558 PARAMETER Experiment Name: At_Drought_Soil_Dry_P Parameter: Organism Value: A. thaliana
  misc_feature: MA Experiment 20001558 PARAMETER Experiment Name: At_Drought_Soil_Dry_P Parameter: Plant Line Value: WS
  misc_feature: MA Experiment 20001558 PARAMETER Experiment Name: At_Drought_Soil_Dry_P Parameter: Post Timepoint (hr) Value: 6
  misc_feature: MA Experiment 20001558 PARAMETER Experiment Name: At_Drought_Soil_Dry_P Parameter: Post-Treatment Value: Re-Water vs. No Drought
  misc_feature: MA Experiment 20001558 PARAMETER Experiment Name: At_Drought_Soil_Dry_P Parameter: Timepoint (day) Value: 13
  misc_feature: MA Experiment 20001558 PARAMETER Experiment Name: At_Drought_Soil_Dry_P Parameter: Treatment Value: Drought vs. No Drought
tgcttattcaccagggaaaaatgttgcagaagatttctcagtctatttctttatgtaacggcgatcaatttaagccgttaatatacctcgccggagctccgacgaacttcatctcttcccctctctcagtttcaggcaagaagaaatcatcttctctgagaattaaaaggatacaacaacttcaaagtacattagaagatagaataaatccaccactagtatgtggaacagtatcgccacgtcttagtgttcctgatcatatactaaagcctctatatgttgagtctagcaaagttccagagatatcaagtgaattacagattcctgactctataggcattgtgaaaatgaagaaagcgtgtgagcttgcggctcgtgtattagactatgcaggaactttggttagaccgtttgttactacagatgaaattgataaagcagtgcatcagatggttattgagtttggtgcatatccttcacctcttggatatggtggatttcctaaaagtgtttgtacatcggttaatgaatgtatgtttcacgggattcccgattctcgtccgctacagaatggagatattataaacatcgatgttgcggtttacttggatgggtatcatggagatacgtcaaagactttcttatgtggagacgtcaatggaagccttaaacaacttgtcaaggtcacagaagaatgcttggagaaaggtatatctgtttgtaaagatggagcaagcttcaaacaaatcgggaagataatcagtgagcatgctgcaaagtatggctataatatggagcgattcatcggtcatggtttaggaacggtattacactcggaacctcttatatatcttcatagtaactatgattatgaacttgaatatatgattgaaggtcaaacttttacgctcgaaccaattctcaccattggaacaacagagtttgtaacatggcctgacaaatggacaattgtgaccgcagatggtggtccggccgcacagtttgagcatacaattcttattaccaccactggtgcagaaattctcaccatatcatcatgaattatatcacaaaatgttaaggaatttacattatgaaccatccatttctgttgtaaataagataaaaactgtttggttg

SEQ ID NO: 41988 - protein, 352 aa, Arabidopsis thaliana
  peptide (1)..(352): Ceres Seq. ID no. 13489386
  misc_feature (38)..(349): Homolog of NCBI NO: 40385867 NR Description: methionine aminopeptidase 1D
  misc_feature (75)..(349): Homolog of NCBI NO: 18419957 NR Description: methionyl aminopeptidase-related protein
  misc_feature (51)..(349): Homolog of NCBI NO: 25289731 NR Description: methionyl aminopeptidase-like protein
  misc_feature (59)..(349): Homolog of NCBI NO: 34394646 NR Description: putative methionine aminopeptidase I (MAP1)
  misc_feature (37)..(349): Homolog of NCBI NO: 38345794 NR Description: OSJNBa0085I10.11 [Oryza sativa (japonica
  misc_feature (29)..(349): Homolog of NCBI NO: 15222218 NR Description: methionine aminopeptidase I (MAP1) -related
  misc_feature (29)..(349): Homolog of NCBI NO: 11320956 NR Description: methionine aminopeptidase-like protein
  misc_feature (7)..(352): Homolog of NCBI NO: 7939560 NR Description: methionine aminopeptidase-like protein
  misc_feature (7)..(352): Homolog of NCBI NO: 15230872 NR Description: methionine aminopeptidase -related [Arabidopsis
  misc_feature (7)..(352): Homolog of NCBI NO: 11320958 NR Description: methionine aminopeptidase-like protein
LIHQGKMLQKISQSISLCNGDQFKPLIYLAGAPTNFISSPLSVSGKKKSSSLRIKRIQQLQSTLEDRINPPLVCGTVSPRLSVPDHILKPLYVESSKVPEISSELQIPDSIGIVKMKKACELAARVLDYAGTLVRPFVTTDEIDKAVHQMVIEFGAYPSPLGYGGFPKSVCTSVNECMFHGIPDSRPLQNGDIINIDVAVYLDGYHGDTSKTFLCGDVNGSLKQLVKVTEECLEKGISVCKDGASFKQIGKIISEHAAKYGYNMERFIGHGLGTVLHSEPLIYLHSNYDYELEYMIEGQTFTLEPILTIGTTEFVTWPDKWTIVTADGGPAAQFEHTILITTTGAEILTISS

SEQ ID NO: 41989 - protein, 346 aa, Arabidopsis thaliana
  peptide (1)..(346): Ceres Seq. ID no. 13489387
  misc_feature (32)..(343): Homolog of NCBI NO: 40385867 NR Description: methionine aminopeptidase 1D
  misc_feature (69)..(343): Homolog of NCBI NO: 18419957 NR Description: methionyl aminopeptidase-related protein
  misc_feature (45)..(343): Homolog of NCBI NO: 25289731 NR Description: methionyl aminopeptidase-like protein
  misc_feature (53)..(343): Homolog of NCBI NO: 34394646 NR Description: putative methionine aminopeptidase I (MAP1)
  misc_feature (31)..(343): Homolog of NCBI NO: 38345794 NR Description: OSJNBa0085I10.11 [Oryza sativa (japonica
  misc_feature (23)..(343): Homolog of NCBI NO: 15222218 NR Description: methionine aminopeptidase I (MAP1) -related
  misc_feature (23)..(343): Homolog of NCBI NO: 11320956 NR Description: methionine aminopeptidase-like protein
  misc_feature (1)..(346): Homolog of NCBI NO: 7939560 NR Description: methionine aminopeptidase-like protein
  misc_feature (1)..(346): Homolog of NCBI NO: 15230872 NR Description: methionine aminopeptidase -related [Arabidopsis
  misc_feature (1)..(346): Homolog of NCBI NO: 11320958 NR Description: methionine aminopeptidase-like protein
MLQKISQSISLCNGDQFKPLIYLAGAPTNFISSPLSVSGKKKSSSLRIKRIQQLQSTLEDRINPPLVCGTVSPRLSVPDHILKPLYVESSKVPEISSELQIPDSIGIVKMKKACELAARVLDYAGTLVRPFVTTDEIDKAVHQMVIEFGAYPSPLGYGGFPKSVCTSVNECMFHGIPDSRPLQNGDIINIDVAVYLDGYHGDTSKTFLCGDVNGSLKQLVKVTEECLEKGISVCKDGASFKQIGKIISEHAAKYGYNMERFIGHGLGTVLHSEPLIYLHSNYDYELEYMIEGQTFTLEPILTIGTTEFVTWPDKWTIVTADGGPAAQFEHTILITTTGAEILTISS

SEQ ID NO: 41990 - protein, 237 aa, Arabidopsis thaliana
  peptide (1)..(237): Ceres Seq. ID no. 13489388
  misc_feature (1)..(234): Homolog of NCBI NO: 40385867 NR Description: methionine aminopeptidase 1D
  misc_feature (1)..(234): Homolog of NCBI NO: 18419957 NR Description: methionyl aminopeptidase-related protein
  misc_feature (1)..(234): Homolog of NCBI NO: 25289731 NR Description: methionyl aminopeptidase-like protein
  misc_feature (1)..(234): Homolog of NCBI NO: 34394646 NR Description: putative methionine aminopeptidase I (MAP1)
  misc_feature (1)..(234): Homolog of NCBI NO: 38345794 NR Description: OSJNBa0085I10.11 [Oryza sativa (japonica
  misc_feature (1)..(234): Homolog of NCBI NO: 15222218 NR Description: methionine aminopeptidase I (MAP1) -related
  misc_feature (1)..(234): Homolog of NCBI NO: 11320956 NR Description: methionine aminopeptidase-like protein
  misc_feature (1)..(237): Homolog of NCBI NO: 7939560 NR Description: methionine aminopeptidase-like protein
  misc_feature (1)..(237): Homolog of NCBI NO: 15230872 NR Description: methionine aminopeptidase -related [Arabidopsis
  misc_feature (1)..(237): Homolog of NCBI NO: 11320958 NR Description: methionine aminopeptidase-like protein
MKKACELAARVLDYAGTLVRPFVTTDEIDKAVHQMVIEFGAYPSPLGYGGFPKSVCTSVNECMFHGIPDSRPLQNGDIINIDVAVYLDGYHGDTSKTFLCGDVNGSLKQLVKVTEECLEKGISVCKDGASFKQIGKIISEHAAKYGYNMERFIGHGLGTVLHSEPLIYLHSNYDYELEYMIEGQTFTLEPILTIGTTEFVTWPDKWTIVTADGGPAAQFEHTILITTTGAEILTISS

SEQ ID NO: 41991 - DNA, 1782 bp, Arabidopsis thaliana
  misc_feature (1)..(1782): Ceres Seq. ID no. 13492929
  misc_feature: MA Experiment ID: 108461 Result: Down-regulated in Transcription
  misc_feature: MA Experiment 108461 PARAMETER Experiment Name: At_Germinating_Seeds_cDNA_P Parameter: Age (day) Value: 1 vs. 0
  misc_feature: MA Experiment 108461 PARAMETER Experiment Name: At_Germinating_Seeds_cDNA_P Parameter: Tissue Value: Germinating Seeds
  misc_feature: MA Experiment ID: 108572 Result: Down-regulated in Transcription
  misc_feature: MA Experiment 108572 PARAMETER Experiment Name: At_Drought_cDNA_P Parameter: Timepoint (hr) Value: 1
  misc_feature: MA Experiment 108572 PARAMETER Experiment Name: At_Drought_cDNA_P Parameter: Tissue Value: Aerial
  misc_feature: MA Experiment 108572 PARAMETER Experiment Name: At_Drought_cDNA_P Parameter: Treatment Value: Drought vs. No Drought
  misc_feature: MA Experiment ID: 108573 Result: Down-regulated in Transcription
  misc_feature: MA Experiment 108573 PARAMETER Experiment Name: At_Drought_cDNA_P Parameter: Timepoint (hr) Value: 6
  misc_feature: MA Experiment 108573 PARAMETER Experiment Name: At_Drought_cDNA_P Parameter: Tissue Value: Aerial
  misc_feature: MA Experiment 108573 PARAMETER Experiment Name: At_Drought_cDNA_P Parameter: Treatment Value: Drought vs. No Drought
  misc_feature: MA Experiment ID: 108577 Result: Down-regulated in Transcription
  misc_feature: MA Experiment 108577 PARAMETER Experiment Name: At_42deg_Heat_cDNA_P Parameter: Temperature (deg C) Value: 42 vs. 22
  misc_feature: MA Experiment 108577 PARAMETER Experiment Name: At_42deg_Heat_cDNA_P Parameter: Timepoint (hr) Value: 6
  misc_feature: MA Experiment 108577 PARAMETER Experiment Name: At_42deg_Heat_cDNA_P Parameter: Tissue Value: Aerial
  misc_feature: MA Experiment ID: 108579 Result: Up-regulated in Transcription
  misc_feature: MA Experiment 108579 PARAMETER Experiment Name: At_4deg_Cold_cDNA_P Parameter: Temperature (deg C) Value: 4 vs. 22
  misc_feature: MA Experiment 108579 PARAMETER Experiment Name: At_4deg_Cold_cDNA_P Parameter: Timepoint (hr) Value: 6
  misc_feature: MA Experiment 108579 PARAMETER Experiment Name: At_4deg_Cold_cDNA_P Parameter: Tissue Value: Aerial
  misc_feature: MA Experiment ID: 20000171 Result: Down-regulated in Transcription
  misc_feature: MA Experiment 20000171 PARAMETER Experiment Name: At_42deg_Heat_P Parameter: Age (day) Value: 14
  misc_feature: MA Experiment 20000171 PARAMETER Experiment Name: At_42deg_Heat_P Parameter: Organism Value: A. thaliana
  misc_feature: MA Experiment 20000171 PARAMETER Experiment Name: At_42deg_Heat_P Parameter: Plant Line Value: WS
  misc_feature: MA Experiment 20000171 PARAMETER Experiment Name: At_42deg_Heat_P Parameter: Temperature (deg C) Value: 42 vs. 22
  misc_feature: MA Experiment 20000171 PARAMETER Experiment Name: At_42deg_Heat_P Parameter: Timepoint (hr) Value: 1
  misc_feature: MA Experiment 20000171 PARAMETER Experiment Name: At_42deg_Heat_P Parameter: Tissue Value: Aerial
  misc_feature: MA Experiment ID: 20000173 Result: Down-regulated in Transcription
  misc_feature: MA Experiment 20000173 PARAMETER Experiment Name: At_42deg_Heat_P Parameter: Age (day) Value: 14
  misc_feature: MA Experiment 20000173 PARAMETER Experiment Name: At_42deg_Heat_P Parameter: Organism Value: A. thaliana
  misc_feature: MA Experiment 20000173 PARAMETER Experiment Name: At_42deg_Heat_P Parameter: Plant Line Value: WS
  misc_feature: MA Experiment 20000173 PARAMETER Experiment Name: At_42deg_Heat_P Parameter: Temperature (deg C) Value: 42 vs. 22
  misc_feature: MA Experiment 20000173 PARAMETER Experiment Name: At_42deg_Heat_P Parameter: Timepoint (hr) Value: 6
  misc_feature: MA Experiment 20000173 PARAMETER Experiment Name: At_42deg_Heat_P Parameter: Tissue Value: Aerial
  misc_feature: MA Experiment ID: 20000179 Result: Down-regulated in Transcription
  misc_feature: MA Experiment 20000179 PARAMETER Experiment Name: At_Germinating_Seeds_P Parameter: Age (hr) Value: 6 vs. 0
  misc_feature: MA Experiment 20000179 PARAMETER Experiment Name: At_Germinating_Seeds_P Parameter: Tissue Value: Germinating Seeds
  misc_feature: MA Experiment ID: 20000180 Result: Down-regulated in Transcription
  misc_feature: MA Experiment 20000180 PARAMETER Experiment Name: At_Germinating_Seeds_P Parameter: Age (hr) Value: 24 vs. 0
  misc_feature: MA Experiment 20000180 PARAMETER Experiment Name: At_Germinating_Seeds_P Parameter: Tissue Value: Germinating Seeds
  misc_feature: MA Experiment ID: 20000184 Result: Down-regulated in Transcription
  misc_feature: MA Experiment 20000184 PARAMETER Experiment Name: At_Shoots__P Parameter: Age (day) Value: 7
  misc_feature: MA Experiment 20000184 PARAMETER Experiment Name: At_Shoots__P Parameter: Tissue Value: Shoots vs. Whole Plant
  misc_feature: MA Experiment ID: 20000437 Result: Down-regulated in Transcription
  misc_feature: MA Experiment 20000437 PARAMETER Experiment Name: At_Drought_P Parameter: Age (day) Value: 8
  misc_feature: MA Experiment 20000437 PARAMETER Experiment Name: At_Drought_P Parameter: Organism Value: A. thaliana
  misc_feature: MA Experiment 20000437 PARAMETER Experiment Name: At_Drought_P Parameter: Plant Line Value: WS
  misc_feature: MA Experiment 20000437 PARAMETER Experiment Name: At_Drought_P Parameter: Timepoint (hr) Value: 24
  misc_feature: MA Experiment 20000437 PARAMETER Experiment Name: At_Drought_P Parameter: Tissue Value: Whole Plant
  misc_feature: MA Experiment 20000437 PARAMETER Experiment Name: At_Drought_P Parameter: Treatment Value: Drought vs. No Drought
  misc_feature: MA Experiment ID: 20000495 Result: Down-regulated in Transcription
  misc_feature: MA Experiment 20000495 PARAMETER Experiment Name: At_Guard_Cells_P Parameter: Harvest Date Value: 8/2/2002
  misc_feature: MA Experiment 20000495 PARAMETER Experiment Name: At_Guard_Cells_P Parameter: Organism Value: A. thaliana
  misc_feature: MA Experiment 20000495 PARAMETER Experiment Name: At_Guard_Cells_P Parameter: Tissue Value: Guard Cells vs. Leaves
  misc_feature: MA Experiment ID: 20001558 Result: Up-regulated in Transcription
  misc_feature: MA Experiment 20001558 PARAMETER Experiment Name: At_Drought_Soil_Dry_P Parameter: Age (day) Value: 27
  misc_feature: MA Experiment 20001558 PARAMETER Experiment Name: At_Drought_Soil_Dry_P Parameter: Organism Value: A. thaliana
  misc_feature: MA Experiment 20001558 PARAMETER Experiment Name: At_Drought_Soil_Dry_P Parameter: Plant Line Value: WS
  misc_feature: MA Experiment 20001558 PARAMETER Experiment Name: At_Drought_Soil_Dry_P Parameter: Post Timepoint (hr) Value: 6
  misc_feature: MA Experiment 20001558 PARAMETER Experiment Name: At_Drought_Soil_Dry_P Parameter: Post-Treatment Value: Re-Water vs. No Drought
  misc_feature: MA Experiment 20001558 PARAMETER Experiment Name: At_Drought_Soil_Dry_P Parameter: Timepoint (day) Value: 13
  misc_feature: MA Experiment 20001558 PARAMETER Experiment Name: At_Drought_Soil_Dry_P Parameter: Treatment Value: Drought vs. No Drought
ggttcttcatctgcattgttctccgcctctctctctcaaactcttcagtttgcaaaacccttaagaaggtgtgaattagtaagtaatggggaagaagaagtttattgataagaaaaaggcggcgactttcgagttgtgtcctcgtgatacgtcagacccaagatacagtgatgcaccaggtggtgataagatcttcttacgagttgatcaaaaccctgttaacatcaatggtttcattgaagaagatgaagaagaagaaggagacagctcacggtttgatgatgctcctgaagagatggattatggttactctagttttggggattcgagtagttctttacctgctcatgtgaggaaggagattttagagttagggtatcctgatgatggttataattacttggagcatttgagagagattaagaatactggtggtggttctaatttctatgtgaatcctaagtatgaggttgctcagttacctcgtgatgttaaggcttatgatgcgtctcgtgtgaagatctctggtatggtgaatgaagaaggtaatgataataagttgatgtatagtgttgcgtccaagactgttaacgtcaaggtgcagaaagctattgatcctgaagttgctgcgttgcttgaaaacagtgatgggtctgagtttggttctgatgttgaggatttggaagaagattttgttgttcaagctaatcttactcaaaagggtgaatcttctggtgtgagcaatggagagctcgagttttctgtaagacgtgaggttagagaaagagaaagtgatgaacctgtggctgaaaacccgagagttcctcgtcaaattgatgagctatttgatcagctcgaactcaatgaatatggaagtgatagtgacggtgatggttacatagctgaagatggagaagaagaagaagaagaagacttcatggctcaagaagttcagaatcttattcatgggaaggcaaaagattatgagcttgaagaaaaatatatgaaccctgcggatatactgaagaacagtgactctgtcagagataaagaggaagtggacactgctgctcatgttatccgccgaactgtagaatatggtgaaaattttgataacgggaatgaagatgaatttgtagagctgactgaagaaagcagcgatgaaagcgagaagcatgattgtgaaaccatagtctcaacatactcgaatctcgataacctccctggtaaaatccttgctgcagagtcagctaggcagaagaagctgagtgaaacattagctaacgcattgagttcaaatggaagaatcattaatctccaagggagagagaggattcctgtcgagtttttacctggtaggagagctgaacaaaccgatgtcaaagcggaaatcccaaaagctgaaccgatcaagaggaagactcatggtcaagagtcgaaagaagagaagaaagagcggaaaaatgctgtaaaagccgaaaagcgagaagcaaggataattaagaaacagacaaagatgctgtattgcggtgaaacgcagcgtgctcaaagagctgttgctacctctggtccatcgtcgagacctctaaaataatatgttactaaggtaaaacaaaacaattctcagactgtttaaaaccagtttttccagccatttcgtgtaatatttgctgtttgtttttttctttttcatcaagatttgaaaatcttgaatcttgttttggatgtggacttttgaatattatttattacttttactagtctaatttcgagaaagtgatg

SEQ ID NO: 41992 - protein, 502 aa, Arabidopsis thaliana
  peptide (1)..(502): Ceres Seq. ID no. 13492930
  misc_feature (278)..(489): Homolog of NCBI NO: 14042772 NR Description: unnamed protein product [Homo sapiens]
  misc_feature (100)..(489): Homolog of NCBI NO: 31324539 NR Description: RIKEN cDNA 2610020N02 gene [Mus musculus]
  misc_feature (100)..(489): Homolog of NCBI NO: 21361875 NR Description: hypothetical protein FLJ14909 [Homo sapiens]
  misc_feature (1)..(208): Homolog of NCBI NO: 34913326 NR Description: hypothetical protein~predicted by FGENESH etc.
  misc_feature (1)..(208): Homolog of NCBI NO: 33146615 NR Description: unknown protein [Oryza sativa (japonica
  misc_feature (13)..(498): Homolog of NCBI NO: 28927687 NR Description: unknown protein [Oryza sativa (japonica
  misc_feature (1)..(502): Homolog of NCBI NO: 15229649 NR Description: expressed protein [Arabidopsis thaliana]
MGKKKFIDKKKAATFELCPRDTSDPRYSDAPGGDKIFLRVDQNPVNINGFIEEDEEEEGDSSRFDDAPEEMDYGYSSFGDSSSSLPAHVRKEILELGYPDDGYNYLEHLREIKNTGGGSNFYVNPKYEVAQLPRDVKAYDASRVKISGMVNEEGNDNKLMYSVASKTVNVKVQKAIDPEVAALLENSDGSEFGSDVEDLEEDFVVQANLTQKGESSGVSNGELEFSVRREVRERESDEPVAENPRVPRQIDELFDQLELNEYGSDSDGDGYIAEDGEEEEEEDFMAQEVQNLIHGKAKDYELEEKYMNPADILKNSDSVRDKEEVDTAAHVIRRTVEYGENFDNGNEDEFVELTEESSDESEKHDCETIVSTYSNLDNLPGKILAAESARQKKLSETLANALSSNGRIINLQGRERIPVEFLPGRRAEQTDVKAEIPKAEPIKRKTHGQESKEEKKERKNAVKAEKREARIIKKQTKMLYCGETQRAQRAVATSGPSSRPLK

SEQ ID NO: 41993 - protein, 432 aa, Arabidopsis thaliana
  peptide (1)..(432): Ceres Seq. ID no. 13492931
  misc_feature (208)..(419): Homolog of NCBI NO: 14042772 NR Description: unnamed protein product [Homo sapiens]
  misc_feature (30)..(419): Homolog of NCBI NO: 31324539 NR Description: RIKEN cDNA 2610020N02 gene [Mus musculus]
  misc_feature (30)..(419): Homolog of NCBI NO: 21361875 NR Description: hypothetical protein FLJ14909 [Homo sapiens]
  misc_feature (1)..(138): Homolog of NCBI NO: 34913326 NR Description: hypothetical protein~predicted by FGENESH etc.
  misc_feature (1)..(138): Homolog of NCBI NO: 33146615 NR Description: unknown protein [Oryza sativa (japonica
  misc_feature (1)..(428): Homolog of NCBI NO: 28927687 NR Description: unknown protein [Oryza sativa (japonica
  misc_feature (1)..(432): Homolog of NCBI NO: 15229649 NR Description: expressed protein [Arabidopsis thaliana]
MDYGYSSFGDSSSSLPAHVRKEILELGYPDDGYNYLEHLREIKNTGGGSNFYVNPKYEVAQLPRDVKAYDASRVKISGMVNEEGNDNKLMYSVASKTVNVKVQKAIDPEVAALLENSDGSEFGSDVEDLEEDFVVQANLTQKGESSGVSNGELEFSVRREVRERESDEPVAENPRVPRQIDELFDQLELNEYGSDSDGDGYIAEDGEEEEEEDFMAQEVQNLIHGKAKDYELEEKYMNPADILKNSDSVRDKEEVDTAAHVIRRTVEYGENFDNGNEDEFVELTEESSDESEKHDCETIVSTYSNLDNLPGKILAAESARQKKLSETLANALSSNGRIINLQGRERIPVEFLPGRRAEQTDVKAEIPKAEPIKRKTHGQESKEEKKERKNAVKAEKREARIIKKQTKMLYCGETQRAQRAVATSGPSSRPLK

SEQ ID NO: 41994 - protein, 354 aa, Arabidopsis thaliana
  peptide (1)..(354): Ceres Seq. ID no. 13492932
  misc_feature (130)..(341): Homolog of NCBI NO: 14042772 NR Description: unnamed protein product [Homo sapiens]
  misc_feature (1)..(341): Homolog of NCBI NO: 31324539 NR Description: RIKEN cDNA 2610020N02 gene [Mus musculus]
  misc_feature (1)..(341): Homolog of NCBI NO: 21361875 NR Description: hypothetical protein FLJ14909 [Homo sapiens]
  misc_feature (1)..(60): Homolog of NCBI NO: 34913326 NR Description: hypothetical protein~predicted by FGENESH etc.
  misc_feature (1)..(60): Homolog of NCBI NO: 33146615 NR Description: unknown protein [Oryza sativa (japonica
  misc_feature (1)..(350): Homolog of NCBI NO: 28927687 NR Description: unknown protein [Oryza sativa (japonica
  misc_feature (1)..(354): Homolog of NCBI NO: 15229649 NR Description: expressed protein [Arabidopsis thaliana]
MVNEEGNDNKLMYSVASKTVNVKVQKAIDPEVAALLENSDGSEFGSDVEDLEEDFVVQANLTQKGESSGVSNGELEFSVRREVRERESDEPVAENPRVPRQIDELFDQLELNEYGSDSDGDGYIAEDGEEEEEEDFMAQEVQNLIHGKAKDYELEEKYMNPADILKNSDSVRDKEEVDTAAHVIRRTVEYGENFDNGNEDEFVELTEESSDESEKHDCETIVSTYSNLDNLPGKILAAESARQKKLSETLANALSSNGRIINLQGRERIPVEFLPGRRAEQTDVKAEIPKAEPIKRKTHGQESKEEKKERKNAVKAEKREARIIKKQTKMLYCGETQRAQRAVATSGPSSRPLK

SEQ ID NO: 41995 - DNA, 1779 bp, Arabidopsis thaliana
  misc_feature (1)..(1779): Ceres Seq. ID no. 13492875
  misc_feature: MA Experiment ID: 108461 Result: Up-regulated in Transcription
  misc_feature: MA Experiment 108461 PARAMETER Experiment Name: At_Germinating_Seeds_cDNA_P Parameter: Age (day) Value: 1 vs. 0
  misc_feature: MA Experiment 108461 PARAMETER Experiment Name: At_Germinating_Seeds_cDNA_P Parameter: Tissue Value: Germinating Seeds
  misc_feature: MA Experiment ID: 108574 Result: Up-regulated in Transcription
  misc_feature: MA Experiment 108574 PARAMETER Experiment Name: At_Wounding__cDNA_P Parameter: Timepoint (hr) Value: 1
  misc_feature: MA Experiment 108574 PARAMETER Experiment Name: At_Wounding__cDNA_P Parameter: Tissue Value: Aerial
  misc_feature: MA Experiment 108574 PARAMETER Experiment Name: At_Wounding__cDNA_P Parameter: Treatment Value: Wounding vs. No Wounding
  misc_feature: MA Experiment ID: 108579 Result: Up-regulated in Transcription
  misc_feature: MA Experiment 108579 PARAMETER Experiment Name: At_4deg_Cold_cDNA_P Parameter: Temperature (deg C) Value: 4 vs. 22
  misc_feature: MA Experiment 108579 PARAMETER Experiment Name: At_4deg_Cold_cDNA_P Parameter: Timepoint (hr) Value: 6
  misc_feature: MA Experiment 108579 PARAMETER Experiment Name: At_4deg_Cold_cDNA_P Parameter: Tissue Value: Aerial
  misc_feature: MA Experiment ID: 20000088 Result: Down-regulated in Transcription
  misc_feature: MA Experiment 20000088 PARAMETER Experiment Name: At_100uM_ABA_Mutants_cDNA_P Parameter: Plant Line Value: Landsberg
  misc_feature: MA Experiment 20000088 PARAMETER Experiment Name: At_100uM_ABA_Mutants_cDNA_P Parameter: Timepoint (hr) Value: 6
  misc_feature: MA Experiment 20000088 PARAMETER Experiment Name: At_100uM_ABA_Mutants_cDNA_P Parameter: Tissue Value: Aerial
  misc_feature: MA Experiment 20000088 PARAMETER Experiment Name: At_100uM_ABA_Mutants_cDNA_P Parameter: Treatment Value: 100uM ABA vs. No Treatment
  misc_feature: MA Experiment ID: 20000180 Result: Up-regulated in Transcription
  misc_feature: MA Experiment 20000180 PARAMETER Experiment Name: At_Germinating_Seeds_P Parameter: Age (hr) Value: 24 vs. 0
  misc_feature: MA Experiment 20000180 PARAMETER Experiment Name: At_Germinating_Seeds_P Parameter: Tissue Value: Germinating Seeds
  misc_feature: MA Experiment ID: 20000185 Result: Down-regulated in Transcription
  misc_feature: MA Experiment 20000185 PARAMETER Experiment Name: At_Roots__P Parameter: Age (day) Value: 7 vs. 21
  misc_feature: MA Experiment 20000185 PARAMETER Experiment Name: At_Roots__P Parameter: Organism Value: A. thaliana
  misc_feature: MA Experiment 20000185 PARAMETER Experiment Name: At_Roots__P Parameter: Tissue Value: Roots vs. Whole Plant
  misc_feature: MA Experiment ID: 20000235 Result: Up-regulated in Transcription
  misc_feature: MA Experiment 20000235 PARAMETER Experiment Name: At_Siliques_P Parameter: Age (day) Value: 21
  misc_feature: MA Experiment 20000235 PARAMETER Experiment Name: At_Siliques_P Parameter: Organism Value: A. thaliana
  misc_feature: MA Experiment 20000235 PARAMETER Experiment Name: At_Siliques_P Parameter: Plant Line Value: WS
  misc_feature: MA Experiment 20000235 PARAMETER Experiment Name: At_Siliques_P Parameter: Tissue Value: 5-10mm Siliques vs. Whole Plant
  misc_feature: MA Experiment ID: 20000286 Result: Up-regulated in Transcription
  misc_feature: MA Experiment 20000286 PARAMETER Experiment Name: At_Open_Flower_P Parameter: Age (day) Value: 21
  misc_feature: MA Experiment 20000286 PARAMETER Experiment Name: At_Open_Flower_P Parameter: Plant Line Value: WS
  misc_feature: MA Experiment 20000286 PARAMETER Experiment Name: At_Open_Flower_P Parameter: Tissue Value: Half Open vs. Whole Plant
  misc_feature: MA Experiment ID: 20000437 Result: Down-regulated in Transcription
  misc_feature: MA Experiment 20000437 PARAMETER Experiment Name: At_Drought_P Parameter: Age (day) Value: 8
  misc_feature: MA Experiment 20000437 PARAMETER Experiment Name: At_Drought_P Parameter: Organism Value: A. thaliana
  misc_feature: MA Experiment 20000437 PARAMETER Experiment Name: At_Drought_P Parameter: Plant Line Value: WS
  misc_feature: MA Experiment 20000437 PARAMETER Experiment Name: At_Drought_P Parameter: Timepoint (hr) Value: 24
  misc_feature: MA Experiment 20000437 PARAMETER Experiment Name: At_Drought_P Parameter: Tissue Value: Whole Plant
  misc_feature: MA Experiment 20000437 PARAMETER Experiment Name: At_Drought_P Parameter: Treatment Value: Drought vs. No Drought
  misc_feature: MA Experiment ID: 20000439 Result: Down-regulated in Transcription
  misc_feature: MA Experiment 20000439 PARAMETER Experiment Name: At_Roots__P Parameter: Age (day) Value: 14 vs. 21
  misc_feature: MA Experiment 20000439 PARAMETER Experiment Name: At_Roots__P Parameter: Organism Value: A. thaliana
  misc_feature: MA Experiment 20000439 PARAMETER Experiment Name: At_Roots__P Parameter: Tissue Value: Roots vs. Whole Plant
  misc_feature: MA Experiment ID: 20000573 Result: Down-regulated in Transcription
  misc_feature: MA Experiment 20000573 PARAMETER Experiment Name: At_100uM_ABA_Mutants__P Parameter: Organism Value: A. thaliana
  misc_feature: MA Experiment 20000573 PARAMETER Experiment Name: At_100uM_ABA_Mutants__P Parameter: Plant Line Value: CS22 vs. Ler wt
  misc_feature: MA Experiment 20000573 PARAMETER Experiment Name: At_100uM_ABA_Mutants__P Parameter: Timepoint (hr) Value: N/A
  misc_feature: MA Experiment 20000573 PARAMETER Experiment Name: At_100uM_ABA_Mutants__P Parameter: Tissue Value: Whole Plant
  misc_feature: MA Experiment 20000573 PARAMETER Experiment Name: At_100uM_ABA_Mutants__P Parameter: Treatment Value: None
  misc_feature: MA Experiment ID: 20000574 Result: Down-regulated in Transcription
  misc_feature: MA Experiment 20000574 PARAMETER Experiment Name: At_100uM_ABA_Mutants__P Parameter: Organism Value: A. thaliana
  misc_feature: MA Experiment 20000574 PARAMETER Experiment Name: At_100uM_ABA_Mutants__P Parameter: Plant Line Value: CS23 vs. Ler wt
  misc_feature: MA Experiment 20000574 PARAMETER Experiment Name: At_100uM_ABA_Mutants__P Parameter: Timepoint (hr) Value: N/A
  misc_feature: MA Experiment 20000574 PARAMETER Experiment Name: At_100uM_ABA_Mutants__P Parameter: Tissue Value: Whole Plant
  misc_feature: MA Experiment 20000574 PARAMETER Experiment Name: At_100uM_ABA_Mutants__P Parameter: Treatment Value: None
  misc_feature: MA Experiment ID: 20001248 Result: Down-regulated in Transcription
  misc_feature: MA Experiment 20001248 PARAMETER Experiment Name: At_Far-red-induction_P Parameter: Age (day) Value: 7
  misc_feature: MA Experiment 20001248 PARAMETER Experiment Name: At_Far-red-induction_P Parameter: Light Value: Far-red vs. White
  misc_feature: MA Experiment 20001248 PARAMETER Experiment Name: At_Far-red-induction_P Parameter: Organism Value: A. thaliana
  misc_feature: MA Experiment 20001248 PARAMETER Experiment Name: At_Far-red-induction_P Parameter: Plant Line Value: Columbia
  misc_feature: MA Experiment 20001248 PARAMETER Experiment Name: At_Far-red-induction_P Parameter: Timepoint (hr) Value: 4
  misc_feature: MA Experiment 20001248 PARAMETER Experiment Name: At_Far-red-induction_P Parameter: Tissue Value: Whole Plant
  misc_feature: MA Experiment ID: 20001558 Result: Up-regulated in Transcription
  misc_feature: MA Experiment 20001558 PARAMETER Experiment Name: At_Drought_Soil_Dry_P Parameter: Age (day) Value: 27
  misc_feature: MA Experiment 20001558 PARAMETER Experiment Name: At_Drought_Soil_Dry_P Parameter: Organism Value: A. thaliana
  misc_feature: MA Experiment 20001558 PARAMETER Experiment Name: At_Drought_Soil_Dry_P Parameter: Plant Line Value: WS
  misc_feature: MA Experiment 20001558 PARAMETER Experiment Name: At_Drought_Soil_Dry_P Parameter: Post Timepoint (hr) Value: 6
  misc_feature: MA Experiment 20001558 PARAMETER Experiment Name: At_Drought_Soil_Dry_P Parameter: Post-Treatment Value: Re-Water vs. No Drought
  misc_feature: MA Experiment 20001558 PARAMETER Experiment Name: At_Drought_Soil_Dry_P Parameter: Timepoint (day) Value: 13
  misc_feature: MA Experiment 20001558 PARAMETER Experiment Name: At_Drought_Soil_Dry_P Parameter: Treatment Value: Drought vs. No Drought
  misc_feature: MA Experiment ID: 20001904 Result: Up-regulated in Transcription
  misc_feature: MA Experiment 20001904 PARAMETER Experiment Name: At_Drought_Reproduction_P Parameter: Age (day) Value: 37
  misc_feature: MA Experiment 20001904 PARAMETER Experiment Name: At_Drought_Reproduction_P Parameter: Organism Value: A. thaliana
  misc_feature: MA Experiment 20001904 PARAMETER Experiment Name: At_Drought_Reproduction_P Parameter: Plant Line Value: WS
  misc_feature: MA Experiment 20001904 PARAMETER Experiment Name: At_Drought_Reproduction_P Parameter: Timepoint (day) Value: 7
  misc_feature: MA Experiment 20001904 PARAMETER Experiment Name: At_Drought_Reproduction_P Parameter: Tissue Value: Rosettes
  misc_feature: MA Experiment 20001904 PARAMETER Experiment Name: At_Drought_Reproduction_P Parameter: Treatment Value: Drought vs. No Drought
  misc_feature: MA Experiment ID: 20001905 Result: Up-regulated in Transcription
  misc_feature: MA Experiment 20001905 PARAMETER Experiment Name: At_Drought_Reproduction_P Parameter: Age (day) Value: 40
  misc_feature: MA Experiment 20001905 PARAMETER Experiment Name: At_Drought_Reproduction_P Parameter: Organism Value: A. thaliana
  misc_feature: MA Experiment 20001905 PARAMETER Experiment Name: At_Drought_Reproduction_P Parameter: Plant Line Value: WS
  misc_feature: MA Experiment 20001905 PARAMETER Experiment Name: At_Drought_Reproduction_P Parameter: Timepoint (day) Value: 10
  misc_feature: MA Experiment 20001905 PARAMETER Experiment Name: At_Drought_Reproduction_P Parameter: Tissue Value: Rosettes
  misc_feature: MA Experiment 20001905 PARAMETER Experiment Name: At_Drought_Reproduction_P Parameter: Treatment Value: Drought vs. No Drought
  misc_feature: MA Experiment ID: 20001911 Result: Down-regulated in Transcription
  misc_feature: MA Experiment 20001911 PARAMETER Experiment Name: At_Drought_Reproduction_P Parameter: Age (day) Value: 40
  misc_feature: MA Experiment 20001911 PARAMETER Experiment Name: At_Drought_Reproduction_P Parameter: Organism Value: A. thaliana
  misc_feature: MA Experiment 20001911 PARAMETER Experiment Name: At_Drought_Reproduction_P Parameter: Plant Line Value: WS
  misc_feature: MA Experiment 20001911 PARAMETER Experiment Name: At_Drought_Reproduction_P Parameter: Timepoint (day) Value: 10
  misc_feature: MA Experiment 20001911 PARAMETER Experiment Name: At_Drought_Reproduction_P Parameter: Tissue Value: Flowers
  misc_feature: MA Experiment 20001911 PARAMETER Experiment Name: At_Drought_Reproduction_P Parameter: Treatment Value: Drought vs. No Drought
acttgcactcctctttttctttctttctttcttgttggtctctcttacttctttcttattcatctaaaacaatttcgatccatttacacataaatatatgtaactggccgtagaagaaacacattgaaggaagagatggctcataggagattaatcatgacgatgacaaagatgatgatgatggtgaccatgatgatgatgatgatgatggataaaacatgcatatgtgcggacatttccagaggcagttttccaaagggctttgtctttggaactgcttcttcggcttttcagcatgaaggagcggtgaaggcagaaggcagaggtcctacgatatgggacacattttcccacacttttggtaaaatcaccgattttagcaatgctgatgtcgctgttgatcagtatcatcgttacgaggaagatgtacaacttatgaagaatatgggaatggacgcttacagattttccatttcttggacccgcatctttccaaatggtgttggacatataaatgaagccggaatcgatcactacaacaaactcataaatgctttacttgctaaagggatcgagccgtacgtgacactgtaccactgggatcttccacaagcacttcatgatcgatacctcggttggctaaacccacaaatcataaatgattttgcagcgtatgcggaggtttgtttccagagatttggagatagagtgaagcactggatcacgttcaacgagccacacacgttcgcgatacaaggctatgatgttggcctacaagctccaggccgttgcactattctttttaagctcacttgtcgcgaaggaaactcatcgaccgagccttacattgttggtcacaatgttattttaactcacgccacagtatccgatatctataggaaaaagtataaggcaaagcaaggaggttcgttagggattgcgtttgatgtaatgtggtttgaaccagagtcgaacaagacagaggacattgaagctgcacaaagagctcaagactttcaacttggctggtttttggatccgttgatgtttggggattacccaagctcgatgagaagcagagtcggaagcagattaccggtgtttacaggatctcaatcttctctggtgaagggttctttagattttgtagggattaatcactacacaacgtactacgcaaggaacaatgccaccaatctcattggcactcttctacacgacgccgtttctgattctggaaccgtcactctaccgtttaagggtttaagcacgattggagatagggcaagttcgatatggttgtacatagtgcctagagggatgagaagcttgatgaattacattaaacatagatatggaaaccctccagtcttcatcactgaaaatggaatggacgacccaaacagcattctgatctcaagaaaagacgctctcaaagatgcaaagaggatcaaataccatcatgattacctttctagcttacaagcttcgataaaagaggatggatgtaatgtcaaagggtacttcgtatggtcgctattggacaattgggaatgggcagcaggttatagttcaagatttggtctctacttcgttgattacagagacaacctcaagagatatcctaaagactctgttcattggttcacttctttcttaaactccacttcttgatttttccttcccattttattggtttagcgtaatgtatacaaaagtttatgattagttatggatttcggtttagataaatatatttaaatcaagatatgttgatat

SEQ ID NO: 41996 - protein, 512 aa, Arabidopsis thaliana
  peptide (1)..(512): Ceres Seq. ID no. 13492876
  misc_feature (35)..(511): Pfam Name: Glycosyl hydrolase family 1 Pfam Description: Glycosyl hydrolase family 1
  misc_feature (36)..(347): Homolog of NCBI NO: 30689721 NR Description: glycosyl hydrolase family 1 [Arabidopsis thaliana]
  misc_feature (30)..(512): Homolog of NCBI NO: 7435446 NR Description: beta-glucosidase (EC 3.2.1.21) precursor,
  misc_feature (31)..(508): Homolog of NCBI NO: 15778634 NR Description: amygdalin hydrolase isoform AH I precursor
  misc_feature (31)..(508): Homolog of NCBI NO: 16757966 NR Description: amygdalin hydrolase isoform AH I precursor
  misc_feature (31)..(508): Homolog of NCBI NO: 7435445 NR Description: beta-glucosidase (EC 3.2.1.21) precursor isoform
  misc_feature (34)..(512): Homolog of NCBI NO: 9758949 NR Description: beta-glucosidase [Arabidopsis thaliana]
  misc_feature (34)..(512): Homolog of NCBI NO: 22327832 NR Description: glycosyl hydrolase family 1 [Arabidopsis thaliana]
  misc_feature (34)..(510): Homolog of NCBI NO: 22658440 NR Description: beta-glucosidase [Oryza sativa (japonica
  misc_feature (13)..(512): Homolog of NCBI NO: 21537259 NR Description: beta-glucosidase, putative [Arabidopsis thaliana]
  misc_feature (1)..(512): Homolog of NCBI NO: 15222734 NR Description: glycosyl hydrolase family 1 [Arabidopsis
MAHRRLIMTMTKMMMMVTMMMMMMMDKTCICADISRGSFPKGFVFGTASSAFQHEGAVKAEGRGPTIWDTFSHTFGKITDFSNADVAVDQYHRYEEDVQLMKNMGMDAYRFSISWTRIFPNGVGHINEAGIDHYNKLINALLAKGIEPYVTLYHWDLPQALHDRYLGWLNPQIINDFAAYAEVCFQRFGDRVKHWITFNEPHTFAIQGYDVGLQAPGRCTILFKLTCREGNSSTEPYIVGHNVILTHATVSDIYRKKYKAKQGGSLGIAFDVMWFEPESNKTEDIEAAQRAQDFQLGWFLDPLMFGDYPSSMRSRVGSRLPVFTGSQSSLVKGSLDFVGINHYTTYYARNNATNLIGTLLHDAVSDSGTVTLPFKGLSTIGDRASSIWLYIVPRGMRSLMNYIKHRYGNPPVFITENGMDDPNSILISRKDALKDAKRIKYHHDYLSSLQASIKEDGCNVKGYFVWSLLDNWEWAAGYSSRFGLYFVDYRDNLKRYPKDSVHWFTSFLNSTS

SEQ ID NO: 41997 - protein, 505 aa, Arabidopsis thaliana
  peptide (1)..(505): Ceres Seq. ID no. 13492877
  misc_feature (28)..(504): Pfam Name: Glycosyl hydrolase family 1 Pfam Description: Glycosyl hydrolase family 1
  misc_feature (29)..(340): Homolog of NCBI NO: 30689721 NR Description: glycosyl hydrolase family 1 [Arabidopsis thaliana]
  misc_feature (23)..(505): Homolog of NCBI NO: 7435446 NR Description: beta-glucosidase (EC 3.2.1.21) precursor,
  misc_feature (24)..(501): Homolog of NCBI NO: 15778634 NR Description: amygdalin hydrolase isoform AH I precursor
  misc_feature (24)..(501): Homolog of NCBI NO: 16757966 NR Description: amygdalin hydrolase isoform AH I precursor
  misc_feature (24)..(501): Homolog of NCBI NO: 7435445 NR Description: beta-glucosidase (EC 3.2.1.21) precursor isoform
  misc_feature (27)..(505): Homolog of NCBI NO: 9758949 NR Description: beta-glucosidase [Arabidopsis thaliana]
  misc_feature (27)..(505): Homolog of NCBI NO: 22327832 NR Description: glycosyl hydrolase family 1 [Arabidopsis thaliana]
  misc_feature (27)..(503): Homolog of NCBI NO: 22658440 NR Description: beta-glucosidase [Oryza sativa (japonica
  misc_feature (6)..(505): Homolog of NCBI NO: 21537259 NR Description: beta-glucosidase, putative [Arabidopsis thaliana]
  misc_feature (1)..(505): Homolog of NCBI NO: 15222734 NR Description: glycosyl hydrolase family 1 [Arabidopsis
MTMTKMMMMVTMMMMMMMDKTCICADISRGSFPKGFVFGTASSAFQHEGAVKAEGRGPTIWDTFSHTFGKITDFSNADVAVDQYHRYEEDVQLMKNMGMDAYRFSISWTRIFPNGVGHINEAGIDHYNKLINALLAKGIEPYVTLYHWDLPQALHDRYLGWLNPQIINDFAAYAEVCFQRFGDRVKHWITFNEPHTFAIQGYDVGLQAPGRCTILFKLTCREGNSSTEPYIVGHNVILTHATVSDIYRKKYKAKQGGSLGIAFDVMWFEPESNKTEDIEAAQRAQDFQLGWFLDPLMFGDYPSSMRSRVGSRLPVFTGSQSSLVKGSLDFVGINHYTTYYARNNATNLIGTLLHDAVSDSGTVTLPFKGLSTIGDRASSIWLYIVPRGMRSLMNYIKHRYGNPPVFITENGMDDPNSILISRKDALKDAKRIKYHHDYLSSLQASIKEDGCNVKGYFVWSLLDNWEWAAGYSSRFGLYFVDYRDNLKRYPKDSVHWFTSFLNSTS

SEQ ID NO: 41998 - protein, 503 aa, Arabidopsis thaliana
  peptide (1)..(503): Ceres Seq. ID no. 13492878
  misc_feature (26)..(502): Pfam Name: Glycosyl hydrolase family 1 Pfam Description: Glycosyl hydrolase family 1
  misc_feature (27)..(338): Homolog of NCBI NO: 30689721 NR Description: glycosyl hydrolase family 1 [Arabidopsis thaliana]
  misc_feature (21)..(503): Homolog of NCBI NO: 7435446 NR Description: beta-glucosidase (EC 3.2.1.21) precursor,
  misc_feature (22)..(499): Homolog of NCBI NO: 15778634 NR Description: amygdalin hydrolase isoform AH I precursor
  misc_feature (22)..(499): Homolog of NCBI NO: 16757966 NR Description: amygdalin hydrolase isoform AH I precursor
  misc_feature (22)..(499): Homolog of NCBI NO: 7435445 NR Description: beta-glucosidase (EC 3.2.1.21) precursor isoform
  misc_feature (25)..(503): Homolog of NCBI NO: 9758949 NR Description: beta-glucosidase [Arabidopsis thaliana]
  misc_feature (25)..(503): Homolog of NCBI NO: 22327832 NR Description: glycosyl hydrolase family 1 [Arabidopsis thaliana]
  misc_feature (25)..(501): Homolog of NCBI NO: 22658440 NR Description: beta-glucosidase [Oryza sativa (japonica
  misc_feature (4)..(503): Homolog of NCBI NO: 21537259 NR Description: beta-glucosidase, putative [Arabidopsis thaliana]
  misc_feature (1)..(503): Homolog of NCBI NO: 15222734 NR Description: glycosyl hydrolase family 1 [Arabidopsis
MTKMMMMVTMMMMMMMDKTCICADISRGSFPKGFVFGTASSAFQHEGAVKAEGRGPTIWDTFSHTFGKITDFSNADVAVDQYHRYEEDVQLMKNMGMDAYRFSISWTRIFPNGVGHINEAGIDHYNKLINALLAKGIEPYVTLYHWDLPQALHDRYLGWLNPQIINDFAAYAEVCFQRFGDRVKHWITFNEPHTFAIQGYDVGLQAPGRCTILFKLTCREGNSSTEPYIVGHNVILTHATVSDIYRKKYKAKQGGSLGIAFDVMWFEPESNKTEDIEAAQRAQDFQLGWFLDPLMFGDYPSSMRSRVGSRLPVFTGSQSSLVKGSLDFVGINHYTTYYARNNATNLIGTLLHDAVSDSGTVTLPFKGLSTIGDRASSIWLYIVPRGMRSLMNYIKHRYGNPPVFITENGMDDPNSILISRKDALKDAKRIKYHHDYLSSLQASIKEDGCNVKGYFVWSLLDNWEWAAGYSSRFGLYFVDYRDNLKRYPKDSVHWFTSFLNSTS

SEQ ID NO: 41999 - DNA, 1948 bp, Arabidopsis thaliana
  misc_feature (1)..(1948): Ceres Seq. ID no. 13645793
ttggaggtaacgattgagaagaatctctcttttctccactgagagaatcacattctgagagatcagacaagaagaaacaatggtggaaggaggaattgcgaaagcagacaaaacagagttcacagagtgttggagaacaacatggaagacaccttacatcatgcgacttgctctctccgccggaatcggaggtcttctcttcggttacgataccggagtcatttccggagctcttcttttcatcaaagaagattttgatgaagttgataagaaaacatggcttcagtcaactattgttagtatggcagtggctggagccatcgtcggagcagcagtcggaggttggatcaatgataagtttggtaggaggatgtcgattcttatcgccgatgttcttttcttgatcggtgcgattgtgatggcatttgctccggctccttgggttatcatcgttggaagaatctttgttgggtttggtgttggtatggcttcgatgacgtctccgttgtatatctctgaagcttctccggcgaggattagaggtgcacttgttagtaccaatggtcttctcatcactggtggacaattcttctcgtacctcatcaatcttgcttttgtccatactccgggaacatggagatggatgttgggtgttgcgggagttccagctattgttcagtttgtgcttatgttgtcgctacctgagtctccaaggtggttatatagaaaggacaggattgcggaatccagagcgattcttgagaggatttacccggctgacgaagtggaggcggagatggaagctttgaaactgtcagtggaggcagagaaagcagacgaggcaatcattggagatagcttctctgcaaagctgaaaggagctttcgggaatcccgttgttcgacgtggactcgctgctggtatcacggtgcaagtggctcagcagtttgtggggatcaacactgtcatgtactacagtccttctattgtgcaatttgctggttacgcctctaacaagacagctatggccttgtctcttattacttccggtttgaatgctttgggttctattgtgagcatgatgtttgtcgatcggtacgggagaaggaagctcatgatcatctctatgtttgggatcatagcatgtcttatcatcttagccacggtgttctcacaagcggccatccacgcccccaagatcgatgcgtttgagtcaaggacgtttgcaccaaatgctacttgttcagcatatgcccctctcgcagccgaaaatgctcctccctcgaggtggaactgcatgaagtgtctcaggtccgaatgtggattctgcgccagcggggtacagccgtacgcaccaggagcatgtgtggtgttgtcagatgacatgaaagcaacttgcagctcaagaggaagaacattcttcaaagatggatgtccaagcaagtttgggttcttagctatagtgtttttggggctttacatcgtagtctacgcaccaggtatgggcactgtcccgtggatcgtcaactctgagatctatccgctcagatacagaggtcttggtggaggaatagccgccgtctcgaattgggtctccaacctgatagtgagtgagagcttcctctcactcacccatgctctcggctcctctggtaccttccttctctttgctggcttctccacgatcgggctcttcttcatttggttgctcgttcctgagaccaaagggcttcagtttgaggaggtcgagaagttgctcgaggtcggcttcaagcccagtctcttgcggcggagggagaagaagggcaaagaagtcgatgctgcttaagacgatgatgatcacttatctctctctttctatttttattattgtcgctgtctgttcctaattctataatgtatgacaccggatttggaatacgtatttttcaacaccttttaaaacctc

SEQ ID NO: 42000 - protein, 582 aa, Arabidopsis thaliana
  peptide (1)..(582): Ceres Seq. ID no. 13645794
  misc_feature (30)..(560): Pfam Name: Sugar (and other) transporter Pfam Description: Sugar (and other) transporter
  misc_feature (26)..(364): Homolog of NCBI NO: 38347452 NR Description: OSJNBa0076N16.21 [Oryza sativa (japonica
  misc_feature (446)..(559): Homolog of NCBI NO: 30689342 NR Description: sugar transporter family [Arabidopsis thaliana]
  misc_feature (26)..(364): Homolog of NCBI NO: 30689342 NR Description: sugar transporter family [Arabidopsis thaliana]
  misc_feature (2)..(561): Homolog of NCBI NO: 33146705 NR Description: putative proton myo-inositol transporter
  misc_feature (2)..(561): Homolog of NCBI NO: 15220697 NR Description: sugar transporter family [Arabidopsis thaliana]
  misc_feature (2)..(579): Homolog of NCBI NO: 32488451 NR Description: OSJNBa0004N05.8 [Oryza sativa (japonica
  misc_feature (1)..(582): Homolog of NCBI NO: 9652184 NR Description: putative Na+/myo-inositol symporter
  misc_feature (1)..(582): Homolog of NCBI NO: 9652186 NR Description: putative Na+/myo-inositol symporter
  misc_feature (1)..(577): Homolog of NCBI NO: 15227479 NR Description: sugar transporter family [Arabidopsis thaliana]
  misc_feature (1)..(582): Homolog of NCBI NO: 15235767 NR Description: sugar transporter family [Arabidopsis thaliana]
MVEGGIAKADKTEFTECWRTTWKTPYIMRLALSAGIGGLLFGYDTGVISGALLFIKEDFDEVDKKTWLQSTIVSMAVAGAIVGAAVGGWINDKFGRRMSILIADVLFLIGAIVMAFAPAPWVIIVGRIFVGFGVGMASMTSPLYISEASPARIRGALVSTNGLLITGGQFFSYLINLAFVHTPGTWRWMLGVAGVPAIVQFVLMLSLPESPRWLYRKDRIAESRAILERIYPADEVEAEMEALKLSVEAEKADEAIIGDSFSAKLKGAFGNPVVRRGLAAGITVQVAQQFVGINTVMYYSPSIVQFAGYASNKTAMALSLITSGLNALGSIVSMMFVDRYGRRKLMIISMFGIIACLIILATVFSQAAIHAPKIDAFESRTFAPNATCSAYAPLAAENAPPSRWNCMKCLRSECGFCASGVQPYAPGACVVLSDDMKATCSSRGRTFFKDGCPSKFGFLAIVFLGLYIVVYAPGMGTVPWIVNSEIYPLRYRGLGGGIAAVSNWVSNLIVSESFLSLTHALGSSGTFLLFAGFSTIGLFFIWLLVPETKGLQFEEVEKLLEVGFKPSLLRRREKKGKEVDAA

SEQ ID NO: 42001 - protein, 555 aa, Arabidopsis thaliana
  peptide (1)..(555): Ceres Seq. ID no. 13645795
  misc_feature (3)..(533): Pfam Name: Sugar (and other) transporter Pfam Description: Sugar (and other) transporter
  misc_feature (1)..(337): Homolog of NCBI NO: 38347452 NR Description: OSJNBa0076N16.21 [Oryza sativa (japonica
  misc_feature (419)..(532): Homolog of NCBI NO: 30689342 NR Description: sugar transporter family [Arabidopsis thaliana]
  misc_feature (1)..(337): Homolog of NCBI NO: 30689342 NR Description: sugar transporter family [Arabidopsis thaliana]
  misc_feature (1)..(534): Homolog of NCBI NO: 33146705 NR Description: putative proton myo-inositol transporter
  misc_feature (1)..(534): Homolog of NCBI NO: 15220697 NR Description: sugar transporter family [Arabidopsis thaliana]
  misc_feature (1)..(552): Homolog of NCBI NO: 32488451 NR Description: OSJNBa0004N05.8 [Oryza sativa (japonica
  misc_feature (1)..(555): Homolog of NCBI NO: 9652184 NR Description: putative Na+/myo-inositol symporter
  misc_feature (1)..(555): Homolog of NCBI NO: 9652186 NR Description: putative Na+/myo-inositol symporter
  misc_feature (1)..(550): Homolog of NCBI NO: 15227479 NR Description: sugar transporter family [Arabidopsis thaliana]
  misc_feature (1)..(555): Homolog of NCBI NO: 15235767 NR Description: sugar transporter family [Arabidopsis thaliana]
MRLALSAGIGGLLFGYDTGVISGALLFIKEDFDEVDKKTWLQSTIVSMAVAGAIVGAAVGGWINDKFGRRMSILIADVLFLIGAIVMAFAPAPWVIIVGRIFVGFGVGMASMTSPLYISEASPARIRGALVSTNGLLITGGQFFSYLINLAFVHTPGTWRWMLGVAGVPAIVQFVLMLSLPESPRWLYRKDRIAESRAILERIYPADEVEAEMEALKLSVEAEKADEAIIGDSFSAKLKGAFGNPVVRRGLAAGITVQVAQQFVGINTVMYYSPSIVQFAGYASNKTAMALSLITSGLNALGSIVSMMFVDRYGRRKLMIISMFGIIACLIILATVFSQAAIHAPKIDAFESRTFAPNATCSAYAPLAAENAPPSRWNCMKCLRSECGFCASGVQPYAPGACVVLSDDMKATCSSRGRTFFKDGCPSKFGFLAIVFLGLYIVVYAPGMGTVPWIVNSEIYPLRYRGLGGGIAAVSNWVSNLIVSESFLSLTHALGSSGTFLLFAGFSTIGLFFIWLLVPETKGLQFEEVEKLLEVGFKPSLLRRREKKGKEVDAA

SEQ ID NO: 42002 - protein, 508 aa, Arabidopsis thaliana
  peptide (1)..(508): Ceres Seq. ID no. 13645796
  misc_feature (1)..(486): Pfam Name: Sugar (and other) transporter Pfam Description: Sugar (and other) transporter
  misc_feature (1)..(290): Homolog of NCBI NO: 38347452 NR Description: OSJNBa0076N16.21 [Oryza sativa (japonica
  misc_feature (372)..(485): Homolog of NCBI NO: 30689342 NR Description: sugar transporter family [Arabidopsis thaliana]
  misc_feature (1)..(290): Homolog of NCBI NO: 30689342 NR Description: sugar transporter family [Arabidopsis thaliana]
  misc_feature (1)..(487): Homolog of NCBI NO: 33146705 NR Description: putative proton myo-inositol transporter
  misc_feature (1)..(487): Homolog of NCBI NO: 15220697 NR Description: sugar transporter family [Arabidopsis thaliana]
  misc_feature (1)..(505): Homolog of NCBI NO: 32488451 NR Description: OSJNBa0004N05.8 [Oryza sativa (japonica
  misc_feature (1)..(508): Homolog of NCBI NO: 9652184 NR Description: putative Na+/myo-inositol symporter
  misc_feature (1)..(508): Homolog of NCBI NO: 9652186 NR Description: putative Na+/myo-inositol symporter
  misc_feature (1)..(503): Homolog of NCBI NO: 15227479 NR Description: sugar transporter family [Arabidopsis thaliana]
  misc_feature (1)..(508): Homolog of NCBI NO: 15235767 NR Description: sugar transporter family [Arabidopsis thaliana]
MAVAGAIVGAAVGGWINDKFGRRMSILIADVLFLIGAIVMAFAPAPWVIIVGRIFVGFGVGMASMTSPLYISEASPARIRGALVSTNGLLITGGQFFSYLINLAFVHTPGTWRWMLGVAGVPAIVQFVLMLSLPESPRWLYRKDRIAESRAILERIYPADEVEAEMEALKLSVEAEKADEAIIGDSFSAKLKGAFGNPVVRRGLAAGITVQVAQQFVGINTVMYYSPSIVQFAGYASNKTAMALSLITSGLNALGSIVSMMFVDRYGRRKLMIISMFGIIACLIILATVFSQAAIHAPKIDAFESRTFAPNATCSAYAPLAAENAPPSRWNCMKCLRSECGFCASGVQPYAPGACVVLSDDMKATCSSRGRTFFKDGCPSKFGFLAIVFLGLYIVVYAPGMGTVPWIVNSEIYPLRYRGLGGGIAAVSNWVSNLIVSESFLSLTHALGSSGTFLLFAGFSTIGLFFIWLLVPETKGLQFEEVEKLLEVGFKPSLLRRREKKGKEVDAA

SEQ ID NO: 42003 - DNA, 1274 bp, Arabidopsis thaliana
  misc_feature (1)..(1274): Ceres Seq. ID no. 12345067
  misc_feature: MA Experiment ID: 108434 Result: Up-regulated in Transcription
  misc_feature: MA Experiment 108434 PARAMETER Experiment Name: At_Root_Tips_cDNA_P Parameter: Tissue Value: Root Tips
  misc_feature: MA Experiment ID: 108595 Result: Down-regulated in Transcription
  misc_feature: MA Experiment 108595 PARAMETER Experiment Name: At_Ler-pi_Ovule_cDNA_P Parameter: Plant Line Value: null
aaacattgtcttttcgggttaatttcttcttcttcttccttttcttactaaattctcttagggttttagtcatatttaatggcttccaattcggagaaaaatcctcttctttcagatgagaaacccaaatcgacggaggagaataagagttctaagccggaatcagcttctgggagttcaacttcatcagctatgcctggcttgaatttcaatgcttttgatttctctaatatggctagtattctcaacgatcctagcatcagagaaatgtctgagcaaatagctaaagatcctgcctttaaccaattggctgagcagcttcagagatctattcctaacgctggccaggaaggtggtttccctaactttgatcctcaacagtatgtcaacacaatgcaacaggttatgcataaccctgagtttaagacaatggccgagaaacttggtaccgccttagttcaggatccacaaatgtctccttttttggatgctttctcgaatcctgaaacagcagaacactttactgagcgtatggcgcggatgaaagaagatccagagttgaaacctatactagatgagattgatgctggtggtccttctgccatgatgaagtactggaatgatccagaagtgctgaaaaagctgggtgaagcaatgggtatgcctgttgctggcttaccagaccagactgtttcagctgaacctgaggtagcagaagaaggtgaagaagaagagtctattgttcaccaaactgccagtcttggtgatgttgagggtttgaaagctgccttggcatctggtggtaacaaagatgaagaagattctgaaggaaggacagcattgcattttgcttgtggatacggcgagttgaaatgtgctcaagttcttatcgatgctggagcaagtgttaatgcggttgacaaaaacaagaacacacctctgcattatgctgctggttacgggaggaaagagtgtgtaagccttctcctggagaatggtgctgcagtcactctgcaaaacctagacgagaagacgccaattgatgtagcgaagctcaacagccagctggaggtggtgaagctgcttgagaaggatgctttcctttgagctctgctggttaaaggaaagctctaagctcatattgtctttgaggcatttgtcttgtgtgtgtcctgaaccagtttcacaggctttttgtgtacactttttattagttcctctcttctaaatttgtctcttatgttgttttaaaagtcaataaagaaagaaatagc

SEQ ID NO: 42004 - protein, 342 aa, Arabidopsis thaliana
  peptide (1)..(342): Ceres Seq. ID no. 12345068
  misc_feature (250)..(282): Pfam Name: Ankyrin repeat Pfam Description: Ankyrin repeat
  misc_feature (1)..(342): Homolog of NCBI NO: 27573339 NR Description: unknown protein [Oryza sativa (japonica
  misc_feature (2)..(342): Homolog of NCBI NO: 24637568 NR Description: ankyrin domain protein [Nicotiana tabacum]
  misc_feature (13)..(342): Homolog of NCBI NO: 29826244 NR Description: TGB12K interacting protein 3 [Nicotiana tabacum]
  misc_feature (13)..(342): Homolog of NCBI NO: 29826242 NR Description: TGB12K interacting protein 2 [Nicotiana tabacum]
  misc_feature (2)..(342): Homolog of NCBI NO: 13310811 NR Description: ankyrin-repeat protein HBP1 [Nicotiana tabacum]
  misc_feature (1)..(342): Homolog of NCBI NO: 15227825 NR Description: putative glucanase; protein id: At2g17390.1
  misc_feature (39)..(342): Homolog of NCBI NO: 30690372 NR Description: ankyrin repeat-containing protein 2 [Arabidopsis
  misc_feature (1)..(342): Homolog of NCBI NO: 4205079 NR Description: ankyrin repeat-containing protein 2 [Arabidopsis
  misc_feature (1)..(342): Homolog of NCBI NO: 3478700 NR Description: AFT protein [Arabidopsis thaliana]
  misc_feature (1)..(342): Homolog of NCBI NO: 15237008 NR Description: ankyrin repeat-containing protein 2
MASNSEKNPLLSDEKPKSTEENKSSKPESASGSSTSSAMPGLNFNAFDFSNMASILNDPSIREMSEQIAKDPAFNQLAEQLQRSIPNAGQEGGFPNFDPQQYVNTMQQVMHNPEFKTMAEKLGTALVQDPQMSPFLDAFSNPETAEHFTERMARMKEDPELKPILDEIDAGGPSAMMKYWNDPEVLKKLGEAMGMPVAGLPDQTVSAEPEVAEEGEEEESIVHQTASLGDVEGLKAALASGGNKDEEDSEGRTALHFACGYGELKCAQVLIDAGASVNAVDKNKNTPLHYAAGYGRKECVSLLLENGAAVTLQNLDEKTPIDVAKLNSQLEVVKLLEKDAFL

SEQ ID NO: 42005 - protein, 304 aa, Arabidopsis thaliana
  peptide (1)..(304): Ceres Seq. ID no. 12345069
  misc_feature (212)..(244): Pfam Name: Ankyrin repeat Pfam Description: Ankyrin repeat
  misc_feature (1)..(304): Homolog of NCBI NO: 27573339 NR Description: unknown protein [Oryza sativa (japonica
  misc_feature (1)..(304): Homolog of NCBI NO: 24637568 NR Description: ankyrin domain protein [Nicotiana tabacum]
  misc_feature (1)..(304): Homolog of NCBI NO: 29826244 NR Description: TGB12K interacting protein 3 [Nicotiana tabacum]
  misc_feature (1)..(304): Homolog of NCBI NO: 29826242 NR Description: TGB12K interacting protein 2 [Nicotiana tabacum]
  misc_feature (1)..(304): Homolog of NCBI NO: 13310811 NR Description: ankyrin-repeat protein HBP1 [Nicotiana tabacum]
  misc_feature (1)..(304): Homolog of NCBI NO: 15227825 NR Description: putative glucanase; protein id: At2g17390.1
  misc_feature (1)..(304): Homolog of NCBI NO: 30690372 NR Description: ankyrin repeat-containing protein 2 [Arabidopsis
  misc_feature (1)..(304): Homolog of NCBI NO: 4205079 NR Description: ankyrin repeat-containing protein 2 [Arabidopsis
  misc_feature (1)..(304): Homolog of NCBI NO: 3478700 NR Description: AFT protein [Arabidopsis thaliana]
  misc_feature (1)..(304): Homolog of NCBI NO: 15237008 NR Description: ankyrin repeat-containing protein 2
MPGLNFNAFDFSNMASILNDPSIREMSEQIAKDPAFNQLAEQLQRSIPNAGQEGGFPNFDPQQYVNTMQQVMHNPEFKTMAEKLGTALVQDPQMSPFLDAFSNPETAEHFTERMARMKEDPELKPILDEIDAGGPSAMMKYWNDPEVLKKLGEAMGMPVAGLPDQTVSAEPEVAEEGEEEESIVHQTASLGDVEGLKAALASGGNKDEEDSEGRTALHFACGYGELKCAQVLIDAGASVNAVDKNKNTPLHYAAGYGRKECVSLLLENGAAVTLQNLDEKTPIDVAKLNSQLEVVKLLEKDAFL

SEQ ID NO: 42006 - protein, 291 aa, Arabidopsis thaliana
  peptide (1)..(291): Ceres Seq. ID no. 12345070
  misc_feature (199)..(231): Pfam Name: Ankyrin repeat Pfam Description: Ankyrin repeat
  misc_feature (1)..(291): Homolog of NCBI NO: 27573339 NR Description: unknown protein [Oryza sativa (japonica
  misc_feature (1)..(291): Homolog of NCBI NO: 24637568 NR Description: ankyrin domain protein [Nicotiana tabacum]
  misc_feature (1)..(291): Homolog of NCBI NO: 29826244 NR Description: TGB12K interacting protein 3 [Nicotiana tabacum]
  misc_feature (1)..(291): Homolog of NCBI NO: 29826242 NR Description: TGB12K interacting protein 2 [Nicotiana tabacum]
  misc_feature (1)..(291): Homolog of NCBI NO: 13310811 NR Description: ankyrin-repeat protein HBP1 [Nicotiana tabacum]
  misc_feature (1)..(291): Homolog of NCBI NO: 15227825 NR Description: putative glucanase; protein id: At2g17390.1
  misc_feature (1)..(291): Homolog of NCBI NO: 30690372 NR Description: ankyrin repeat-containing protein 2 [Arabidopsis
  misc_feature (1)..(291): Homolog of NCBI NO: 4205079 NR Description: ankyrin repeat-containing protein 2 [Arabidopsis
  misc_feature (1)..(291): Homolog of NCBI NO: 3478700 NR Description: AFT protein [Arabidopsis thaliana]
  misc_feature (1)..(291): Homolog of NCBI NO: 15237008 NR Description: ankyrin repeat-containing protein 2
MASILNDPSIREMSEQIAKDPAFNQLAEQLQRSIPNAGQEGGFPNFDPQQYVNTMQQVMHNPEFKTMAEKLGTALVQDPQMSPFLDAFSNPETAEHFTERMARMKEDPELKPILDEIDAGGPSAMMKYWNDPEVLKKLGEAMGMPVAGLPDQTVSAEPEVAEEGEEEESIVHQTASLGDVEGLKAALASGGNKDEEDSEGRTALHFACGYGELKCAQVLIDAGASVNAVDKNKNTPLHYAAGYGRKECVSLLLENGAAVTLQNLDEKTPIDVAKLNSQLEVVKLLEKDAFL

SEQ ID NO: 42007 - DNA, 1291 bp, Arabidopsis thaliana
  misc_feature (1)..(1291): Ceres Seq. ID no. 14306846
  misc_feature: MA Experiment ID: 108434 Result: Down-regulated in Transcription
  misc_feature: MA Experiment 108434 PARAMETER Experiment Name: At_Root_Tips_cDNA_P Parameter: Tissue Value: Root Tips
  misc_feature: MA Experiment ID: 108488 Result: Down-regulated in Transcription
  misc_feature: MA Experiment ID: 108585 Result: Up-regulated in Transcription
  misc_feature: MA Experiment 108585 PARAMETER Experiment Name: At_5mM_NaNP_cDNA_P Parameter: Timepoint (hr) Value: 6
  misc_feature: MA Experiment 108585 PARAMETER Experiment Name: At_5mM_NaNP_cDNA_P Parameter: Tissue Value: Aerial
  misc_feature: MA Experiment 108585 PARAMETER Experiment Name: At_5mM_NaNP_cDNA_P Parameter: Treatment Value: null
  misc_feature: MA Experiment ID: 108594 Result: Up-regulated in Transcription
  misc_feature: MA Experiment 108594 PARAMETER Experiment Name: At_Ler-rhl_Root_cDNA_P Parameter: Plant Line Value: null
  misc_feature: MA Experiment ID: 20000111 Result: Down-regulated in Transcription
  misc_feature: MA Experiment 20000111 PARAMETER Experiment Name: At_42deg_Heat_cDNA_P Parameter: Temperature (deg C) Value: 42 vs. 22
  misc_feature: MA Experiment 20000111 PARAMETER Experiment Name: At_42deg_Heat_cDNA_P Parameter: Timepoint (hr) Value: 6
  misc_feature: MA Experiment 20000111 PARAMETER Experiment Name: At_42deg_Heat_cDNA_P Parameter: Tissue Value: Aerial
  misc_feature: MA Experiment ID: 20000173 Result: Down-regulated in Transcription
  misc_feature: MA Experiment 20000173 PARAMETER Experiment Name: At_42deg_Heat_P Parameter: Age (day) Value: 14
  misc_feature: MA Experiment 20000173 PARAMETER Experiment Name: At_42deg_Heat_P Parameter: Organism Value: A. thaliana
  misc_feature: MA Experiment 20000173 PARAMETER Experiment Name: At_42deg_Heat_P Parameter: Plant Line Value: WS
  misc_feature: MA Experiment 20000173 PARAMETER Experiment Name: At_42deg_Heat_P Parameter: Temperature (deg C) Value: 42 vs. 22
  misc_feature: MA Experiment 20000173 PARAMETER Experiment Name: At_42deg_Heat_P Parameter: Timepoint (hr) Value: 6
  misc_feature: MA Experiment 20000173 PARAMETER Experiment Name: At_42deg_Heat_P Parameter: Tissue Value: Aerial
  misc_feature: MA Experiment ID: 20000182 Result: Up-regulated in Transcription
  misc_feature: MA Experiment 20000182 PARAMETER Experiment Name: At_2mM_SA_P Parameter: Age (day) Value: 14
  misc_feature: MA Experiment 20000182 PARAMETER Experiment Name: At_2mM_SA_P Parameter: Organism Value: A. thaliana
  misc_feature: MA Experiment 20000182 PARAMETER Experiment Name: At_2mM_SA_P Parameter: Plant Line Value: WS
  misc_feature: MA Experiment 20000182 PARAMETER Experiment Name: At_2mM_SA_P Parameter: Timepoint (hr) Value: 6
  misc_feature: MA Experiment 20000182 PARAMETER Experiment Name: At_2mM_SA_P Parameter: Tissue Value: Aerial
  misc_feature: MA Experiment 20000182 PARAMETER Experiment Name: At_2mM_SA_P Parameter: Treatment Value: 2mM SA vs. No Treatment
  misc_feature: MA Experiment ID: 20000184 Result: Down-regulated in Transcription
  misc_feature: MA Experiment 20000184 PARAMETER Experiment Name: At_Shoots__P Parameter: Age (day) Value: 7
  misc_feature: MA Experiment 20000184 PARAMETER Experiment Name: At_Shoots__P Parameter: Tissue Value: Shoots vs. Whole Plant
  misc_feature: MA Experiment ID: 20000234 Result: Down-regulated in Transcription
  misc_feature: MA Experiment 20000234 PARAMETER Experiment Name: At_Siliques_P Parameter: Age (day) Value: 21
  misc_feature: MA Experiment 20000234 PARAMETER Experiment Name: At_Siliques_P Parameter: Organism Value: A. thaliana
  misc_feature: MA Experiment 20000234 PARAMETER Experiment Name: At_Siliques_P Parameter: Plant Line Value: WS
  misc_feature: MA Experiment 20000234 PARAMETER Experiment Name: At_Siliques_P Parameter: Tissue Value: Less Than 5mm Siliques vs. Whole Plant
  misc_feature: MA Experiment ID: 20000235 Result: Down-regulated in Transcription
  misc_feature: MA Experiment 20000235 PARAMETER Experiment Name: At_Siliques_P Parameter: Age (day) Value: 21
  misc_feature: MA Experiment 20000235 PARAMETER Experiment Name: At_Siliques_P Parameter: Organism Value: A. thaliana
  misc_feature: MA Experiment 20000235 PARAMETER Experiment Name: At_Siliques_P Parameter: Plant Line Value: WS
  misc_feature: MA Experiment 20000235 PARAMETER Experiment Name: At_Siliques_P Parameter: Tissue Value: 5-10mm Siliques vs. Whole Plant
  misc_feature: MA Experiment ID: 20000264 Result: Down-regulated in Transcription
  misc_feature: MA Experiment 20000264 PARAMETER Experiment Name: At_Open_Flower_P Parameter: Age (day) Value: 21
  misc_feature: MA Experiment 20000264 PARAMETER Experiment Name: At_Open_Flower_P Parameter: Plant Line Value: WS
  misc_feature: MA Experiment 20000264 PARAMETER Experiment Name: At_Open_Flower_P Parameter: Tissue Value: Open Flower vs. Whole Plant
  misc_feature: MA Experiment ID: 20000265 Result: Down-regulated in Transcription
  misc_feature: MA Experiment 20000265 PARAMETER Experiment Name: At_Open_Flower_P Parameter: Age (day) Value: 21
  misc_feature: MA Experiment 20000265 PARAMETER Experiment Name: At_Open_Flower_P Parameter: Plant Line Value: WS
  misc_feature: MA Experiment 20000265 PARAMETER Experiment Name: At_Open_Flower_P Parameter: Tissue Value: Closed Flower vs. Whole Plant
  misc_feature: MA Experiment ID: 20000286 Result: Down-regulated in Transcription
  misc_feature: MA Experiment 20000286 PARAMETER Experiment Name: At_Open_Flower_P Parameter: Age (day) Value: 21
  misc_feature: MA Experiment 20000286 PARAMETER Experiment Name: At_Open_Flower_P Parameter: Plant Line Value: WS
  misc_feature: MA Experiment 20000286 PARAMETER Experiment Name: At_Open_Flower_P Parameter: Tissue Value: Half Open vs. Whole Plant
  misc_feature: MA Experiment ID: 20000438 Result: Down-regulated in Transcription
  misc_feature: MA Experiment 20000438 PARAMETER Experiment Name: At_Shoots__P Parameter: Age (day) Value: 14
  misc_feature: MA Experiment 20000438 PARAMETER Experiment Name: At_Shoots__P Parameter: Tissue Value: Shoots vs. Whole Plant
  misc_feature: MA Experiment ID: 20001247 Result: Up-regulated in Transcription
  misc_feature: MA Experiment 20001247 PARAMETER Experiment Name: At_Far-red-induction_P Parameter: Age (day) Value: 7
  misc_feature: MA Experiment 20001247 PARAMETER Experiment Name: At_Far-red-induction_P Parameter: Light Value: Far-red vs. White
  misc_feature: MA Experiment 20001247 PARAMETER Experiment Name: At_Far-red-induction_P Parameter: Organism Value: A. thaliana
  misc_feature: MA Experiment 20001247 PARAMETER Experiment Name: At_Far-red-induction_P Parameter: Plant Line Value: Columbia
  misc_feature: MA Experiment 20001247 PARAMETER Experiment Name: At_Far-red-induction_P Parameter: Timepoint (hr) Value: 1
  misc_feature: MA Experiment 20001247 PARAMETER Experiment Name: At_Far-red-induction_P Parameter: Tissue Value: Whole Plant
cagacacttacccacaaaatattcctctcggcgatgatccctttctgctgaatttttagtcctttgtcgctcgactgttttcttcgtctactatttgttccttttggatattcttcggacttttcgttgatttgattttcaagagagagagtttgaacaaggaaggattgaactatggaagatgcatcagagactagctactggtgtcacatgtgctcccgatcggtgattccattgattcaagacgaaatcatcaaatgcaatttctgtcaaagtggttttgttgaagaaatggataataatgatgaccatcaggctgctgattctctctggactcctatcttgatggagatgatgaacaacaatcacgaccaacattctaccaatcaggaagactcagaatctattcttgaagatgaagacgaagacgaagatgatggtgatgatggtgatcagaacaatgatggagaaattgatataactcatcaacttgaagagattaggaggataaggactagacattcaactgctattgttaatctgcttcaggggattcgagctggattattgatcgaatccgagaacaacgaggataatcccgataatagcgagcttgtcgtcttgatcaactcatttaaccaaaggatcagggttcatcaagattctgtagacaccacttctgttccttctggatctttgggtgactatttcattggacctggattcgagacgttgcttcagcgtttggctgagaatgatctgaacaacaggtatgggacacctccagctacaaaagaagcggttgaggcattggcgatggtgaaaatcgaagatagtttgttgcagtgtagtgtgtgtttggatgattttgagattggaatggaggctaaagagatgccttgtaagcataagtttcatagtgactgcttgttgccatggcttgagcttcatagctcatgccctgtttgcagatatctgcttcctacaggagatgatgatgagccaaagactgatgcagaaacatcgagaaacgatgataacaatgaagatatcagtaatgcttctatggctagtaatggatcatcaccagactcaagttcgaacaattcatcggttaactaaactaaggctcactatctgagacaggtttacttgaacagaggagaactgatgggatcgtttgagatcagtctttagtgtttaatgttatttggtttgcacatagtttctcagatttggtggaaaatgtattctttggaattaattaacagtcttttttttttttgacttt

SEQ ID NO: 42008 - protein, 315 aa, Arabidopsis thaliana
  peptide (1)..(315): Ceres Seq. ID no. 14306847
  misc_feature (225)..(265): Pfam Name: Zinc finger, C3HC4 type (RING finger) Pfam Description: Zinc finger, C3HC4 type (RING finger)
  misc_feature (173)..(287): Homolog of NCBI NO: 15231003 NR Description: expressed protein [Arabidopsis thaliana]
  misc_feature (173)..(287): Homolog of NCBI NO: 11994207 NR Description: gene_id:MPN9.20~unknown protein [Arabidopsis
  misc_feature (62)..(307): Homolog of NCBI NO: 32129334 NR Description: unknown protein [Oryza sativa (japonica
  misc_feature (11)..(313): Homolog of NCBI NO: 22328949 NR Description: expressed protein [Arabidopsis thaliana]
  misc_feature (11)..(313): Homolog of NCBI NO: 7486783 NR Description: hypothetical protein M3E9.170 - Arabidopsis
  misc_feature (1)..(43): Homolog of NCBI NO: 15241188 NR Description: expressed protein [Arabidopsis thaliana]
  misc_feature (71)..(306): Homolog of NCBI NO: 15241188 NR Description: expressed protein [Arabidopsis thaliana]
  misc_feature (1)..(310): Homolog of NCBI NO: 18405411 NR Description: expressed protein [Arabidopsis thaliana]
  misc_feature (1)..(315): Homolog of NCBI NO: 38454178 NR Description: At3g13430 [Arabidopsis thaliana]
  misc_feature (1)..(315): Homolog of NCBI NO: 15231238 NR Description: expressed protein [Arabidopsis thaliana]
MEDASETSYWCHMCSRSVIPLIQDEIIKCNFCQSGFVEEMDNNDDHQAADSLWTPILMEMMNNNHDQHSTNQEDSESILEDEDEDEDDGDDGDQNNDGEIDITHQLEEIRRIRTRHSTAIVNLLQGIRAGLLIESENNEDNPDNSELVVLINSFNQRIRVHQDSVDTTSVPSGSLGDYFIGPGFETLLQRLAENDLNNRYGTPPATKEAVEALAMVKIEDSLLQCSVCLDDFEIGMEAKEMPCKHKFHSDCLLPWLELHSSCPVCRYLLPTGDDDEPKTDAETSRNDDNNEDISNASMASNGSSPDSSSNNSSVN

SEQ ID NO: 42009 - protein, 303 aa, Arabidopsis thaliana
  peptide (1)..(303): Ceres Seq. ID no. 14306848
  misc_feature (213)..(253): Pfam Name: Zinc finger, C3HC4 type (RING finger) Pfam Description: Zinc finger, C3HC4 type (RING finger)
  misc_feature (161)..(275): Homolog of NCBI NO: 15231003 NR Description: expressed protein [Arabidopsis thaliana]
  misc_feature (161)..(275): Homolog of NCBI NO: 11994207 NR Description: gene_id:MPN9.20~unknown protein [Arabidopsis
  misc_feature (50)..(295): Homolog of NCBI NO: 32129334 NR Description: unknown protein [Oryza sativa (japonica
  misc_feature (1)..(301): Homolog of NCBI NO: 22328949 NR Description: expressed protein [Arabidopsis thaliana]
  misc_feature (1)..(301): Homolog of NCBI NO: 7486783 NR Description: hypothetical protein M3E9.170 - Arabidopsis
  misc_feature (1)..(31): Homolog of NCBI NO: 15241188 NR Description: expressed protein [Arabidopsis thaliana]
  misc_feature (59)..(294): Homolog of NCBI NO: 15241188 NR Description: expressed protein [Arabidopsis thaliana]
  misc_feature (1)..(298): Homolog of NCBI NO: 18405411 NR Description: expressed protein [Arabidopsis thaliana]
  misc_feature (1)..(303): Homolog of NCBI NO: 38454178 NR Description: At3g13430 [Arabidopsis thaliana]
  misc_feature (1)..(303): Homolog of NCBI NO: 15231238 NR Description: expressed protein [Arabidopsis thaliana]
MCSRSVIPLIQDEIIKCNFCQSGFVEEMDNNDDHQAADSLWTPILMEMMNNNHDQHSTNQEDSESILEDEDEDEDDGDDGDQNNDGEIDITHQLEEIRRIRTRHSTAIVNLLQGIRAGLLIESENNEDNPDNSELVVLINSFNQRIRVHQDSVDTTSVPSGSLGDYFIGPGFETLLQRLAENDLNNRYGTPPATKEAVEALAMVKIEDSLLQCSVCLDDFEIGMEAKEMPCKHKFHSDCLLPWLELHSSCPVCRYLLPTGDDDEPKTDAETSRNDDNNEDISNASMASNGSSPDSSSNNSSVN

SEQ ID NO: 42010 - protein, 276 aa, Arabidopsis thaliana
  peptide (1)..(276): Ceres Seq. ID no. 14306849
  misc_feature (186)..(226): Pfam Name: Zinc finger, C3HC4 type (RING finger) Pfam Description: Zinc finger, C3HC4 type (RING finger)
  misc_feature (16)..(264): Homolog of NCBI NO: 15238295 NR Description: COP1-interacting protein CIP8 [Arabidopsis
  misc_feature (134)..(248): Homolog of NCBI NO: 15231003 NR Description: expressed protein [Arabidopsis thaliana]
  misc_feature (134)..(248): Homolog of NCBI NO: 11994207 NR Description: gene_id:MPN9.20~unknown protein [Arabidopsis
  misc_feature (23)..(268): Homolog of NCBI NO: 32129334 NR Description: unknown protein [Oryza sativa (japonica
  misc_feature (1)..(274): Homolog of NCBI NO: 22328949 NR Description: expressed protein [Arabidopsis thaliana]
  misc_feature (1)..(274): Homolog of NCBI NO: 7486783 NR Description: hypothetical protein M3E9.170 - Arabidopsis
  misc_feature (32)..(267): Homolog of NCBI NO: 15241188 NR Description: expressed protein [Arabidopsis thaliana]
  misc_feature (1)..(271): Homolog of NCBI NO: 18405411 NR Description: expressed protein [Arabidopsis thaliana]
  misc_feature (1)..(276): Homolog of NCBI NO: 38454178 NR Description: At3g13430 [Arabidopsis thaliana]
  misc_feature (1)..(276): Homolog of NCBI NO: 15231238 NR Description: expressed protein [Arabidopsis thaliana]
MDNNDDHQAADSLWTPILMEMMNNNHDQHSTNQEDSESILEDEDEDEDDGDDGDQNNDGEIDITHQLEEIRRIRTRHSTAIVNLLQGIRAGLLIESENNEDNPDNSELVVLINSFNQRIRVHQDSVDTTSVPSGSLGDYFIGPGFETLLQRLAENDLNNRYGTPPATKEAVEALAMVKIEDSLLQCSVCLDDFEIGMEAKEMPCKHKFHSDCLLPWLELHSSCPVCRYLLPTGDDDEPKTDAETSRNDDNNEDISNASMASNGSSPDSSSNNSSVN

SEQ ID NO: 42011 - DNA, 981 bp, Arabidopsis thaliana
  misc_feature (1)..(981): Ceres Seq. ID no. 13488069
  misc_feature: MA Experiment ID: 108464 Result: Up-regulated in Transcription
  misc_feature: MA Experiment 108464 PARAMETER Experiment Name: At_Germinating_Seeds_cDNA_P Parameter: Age (day) Value: 4 vs. 0
  misc_feature: MA Experiment 108464 PARAMETER Experiment Name: At_Germinating_Seeds_cDNA_P Parameter: Tissue Value: Germinating Seeds
  misc_feature: MA Experiment ID: 108579 Result: Down-regulated in Transcription
  misc_feature: MA Experiment 108579 PARAMETER Experiment Name: At_4deg_Cold_cDNA_P Parameter: Temperature (deg C) Value: 4 vs. 22
  misc_feature: MA Experiment 108579 PARAMETER Experiment Name: At_4deg_Cold_cDNA_P Parameter: Timepoint (hr) Value: 6
  misc_feature: MA Experiment 108579 PARAMETER Experiment Name: At_4deg_Cold_cDNA_P Parameter: Tissue Value: Aerial
  misc_feature: MA Experiment ID: 20000179 Result: Up-regulated in Transcription
  misc_feature: MA Experiment 20000179 PARAMETER Experiment Name: At_Germinating_Seeds_P Parameter: Age (hr) Value: 6 vs. 0
  misc_feature: MA Experiment 20000179 PARAMETER Experiment Name: At_Germinating_Seeds_P Parameter: Tissue Value: Germinating Seeds
  misc_feature: MA Experiment ID: 20000180 Result: Up-regulated in Transcription
  misc_feature: MA Experiment 20000180 PARAMETER Experiment Name: At_Germinating_Seeds_P Parameter: Age (hr) Value: 24 vs. 0
  misc_feature: MA Experiment 20000180 PARAMETER Experiment Name: At_Germinating_Seeds_P Parameter: Tissue Value: Germinating Seeds
  misc_feature: MA Experiment ID: 20001911 Result: Down-regulated in Transcription
  misc_feature: MA Experiment 20001911 PARAMETER Experiment Name: At_Drought_Reproduction_P Parameter: Age (day) Value: 40
  misc_feature: MA Experiment 20001911 PARAMETER Experiment Name: At_Drought_Reproduction_P Parameter: Organism Value: A. thaliana
  misc_feature: MA Experiment 20001911 PARAMETER Experiment Name: At_Drought_Reproduction_P Parameter: Plant Line Value: WS
  misc_feature: MA Experiment 20001911 PARAMETER Experiment Name: At_Drought_Reproduction_P Parameter: Timepoint (day) Value: 10
  misc_feature: MA Experiment 20001911 PARAMETER Experiment Name: At_Drought_Reproduction_P Parameter: Tissue Value: Flowers
  misc_feature: MA Experiment 20001911 PARAMETER Experiment Name: At_Drought_Reproduction_P Parameter: Treatment Value: Drought vs. No Drought
gttggtttgcacaaaaaaaaaaattccattgttgttgttccacggaactctaaaatggagagtggcgatgagagtccggtggttctaattacgggatgttctcagggaggaattggtcacgcgctggcccgtgagttcactgagaagggatgtcgagtagtggcgacgagtcgatcacggagtacgatgacggatctggagcaagattcgaggttattcgtgaaggagcttgatgtgcaatcggaccagaatgtgagtaaggttttgtcggaggttattgataagttcggtaagatcgacgttcttgttaataacgccggagttcagtgcgttggacctctggcggagactccaatttccgccatggaaaacacattcaacaccaatgtttttggttccatgaggatgactcaagctgttgtaccacacatggtgtctaagaaaaagggaaagattgtcaacgttggaagtatcactgttatggcacctggtccatgggctggtgtctatacagctaccaaagctgctattcatgctcttaccgatactctgaggttggagcttcgtccgtttgggattgatgtcatcaatgttgtcccgggaggaataagaacaaacatagcaaactcagctgtggcaactttcaacaaaatgcctgagctgaaactatacaagccttatgaagaagctatcagagaaagggcgtttatatcacagaggatgaatccaactcctgcagaaacatttgccagagacactgtagccgcagtgctgaagaagaatccacccgcttggttctcgtcaggcaggtattcaaccctcatggcaggcatgtatcatatgcccttatggctcaaagattttttccagaagcaggttttaatgaagaagtgataatcaggttggggtttaagacagaatgtaccttaaacacgaatgtaaaagctttgttcaaattgttaattgaatctcttatgtctc

SEQ ID NO: 42012 - protein, 297 aa, Arabidopsis thaliana
  peptide (1)..(297): Ceres Seq. ID no. 13488070
  misc_feature (26)..(287): Homolog of NCBI NO: 28868436 NR Description: oxidoreductase, short chain
  misc_feature (26)..(297): Homolog of NCBI NO: 32039035 NR Description: hypothetical protein [Pseudomonas aeruginosa
  misc_feature (63)..(296): Homolog of NCBI NO: 38567881 NR Description: OSJNBa0036B21.7 [Oryza sativa (japonica
  misc_feature (63)..(297): Homolog of NCBI NO: 26450169 NR Description: unknown protein [Arabidopsis thaliana]
  misc_feature (21)..(268): Homolog of NCBI NO: 10178182 NR Description: contains similarity to
  misc_feature (21)..(297): Homolog of NCBI NO: 18424923 NR Description: short-chain dehydrogenase/reductase family
  misc_feature (19)..(133): Homolog of NCBI NO: 11358313 NR Description: hypothetical protein T31P16.40 - Arabidopsis
  misc_feature (125)..(297): Homolog of NCBI NO: 11358313 NR Description: hypothetical protein T31P16.40 - Arabidopsis
  misc_feature (19)..(297): Homolog of NCBI NO: 30682984 NR Description: short-chain dehydrogenase/reductase family
  misc_feature (19)..(297): Homolog of NCBI NO: 26453106 NR Description: unknown protein [Arabidopsis thaliana]
VGLHKKKNSIVVVPRNSKMESGDESPVVLITGCSQGGIGHALAREFTEKGCRVVATSRSRSTMTDLEQDSRLFVKELDVQSDQNVSKVLSEVIDKFGKIDVLVNNAGVQCVGPLAETPISAMENTFNTNVFGSMRMTQAVVPHMVSKKKGKIVNVGSITVMAPGPWAGVYTATKAAIHALTDTLRLELRPFGIDVINVVPGGIRTNIANSAVATFNKMPELKLYKPYEEAIRERAFISQRMNPTPAETFARDTVAAVLKKNPPAWFSSGRYSTLMAGMYHMPLWLKDFFQKQVLMKK

SEQ ID NO: 42013 - protein, 279 aa, Arabidopsis thaliana
  peptide (1)..(279): Ceres Seq. ID no. 13488071
  misc_feature (8)..(269): Homolog of NCBI NO: 28868436 NR Description: oxidoreductase, short chain
  misc_feature (8)..(279): Homolog of NCBI NO: 32039035 NR Description: hypothetical protein [Pseudomonas aeruginosa
  misc_feature (45)..(278): Homolog of NCBI NO: 38567881 NR Description: OSJNBa0036B21.7 [Oryza sativa (japonica
  misc_feature (45)..(279): Homolog of NCBI NO: 26450169 NR Description: unknown protein [Arabidopsis thaliana]
  misc_feature (3)..(250): Homolog of NCBI NO: 10178182 NR Description: contains similarity to
  misc_feature (3)..(279): Homolog of NCBI NO: 18424923 NR Description: short-chain dehydrogenase/reductase family
  misc_feature (1)..(115): Homolog of NCBI NO: 11358313 NR Description: hypothetical protein T31P16.40 - Arabidopsis
  misc_feature (107)..(279): Homolog of NCBI NO: 11358313 NR Description: hypothetical protein T31P16.40 - Arabidopsis
  misc_feature (1)..(279): Homolog of NCBI NO: 30682984 NR Description: short-chain dehydrogenase/reductase family
  misc_feature (1)..(279): Homolog of NCBI NO: 26453106 NR Description: unknown protein [Arabidopsis thaliana]
MESGDESPVVLITGCSQGGIGHALAREFTEKGCRVVATSRSRSTMTDLEQDSRLFVKELDVQSDQNVSKVLSEVIDKFGKIDVLVNNAGVQCVGPLAETPISAMENTFNTNVFGSMRMTQAVVPHMVSKKKGKIVNVGSITVMAPGPWAGVYTATKAAIHALTDTLRLELRPFGIDVINVVPGGIRTNIANSAVATFNKMPELKLYKPYEEAIRERAFISQRMNPTPAETFARDTVAAVLKKNPPAWFSSGRYSTLMAGMYHMPLWLKDFFQKQVLMKK

SEQ ID NO: 42014 - protein, 235 aa, Arabidopsis thaliana
  peptide (1)..(235): Ceres Seq. ID no. 13488072
  misc_feature (1)..(225): Homolog of NCBI NO: 28868436 NR Description: oxidoreductase, short chain
  misc_feature (1)..(235): Homolog of NCBI NO: 32039035 NR Description: hypothetical protein [Pseudomonas aeruginosa
  misc_feature (1)..(234): Homolog of NCBI NO: 38567881 NR Description: OSJNBa0036B21.7 [Oryza sativa (japonica
  misc_feature (1)..(235): Homolog of NCBI NO: 26450169 NR Description: unknown protein [Arabidopsis thaliana]
  misc_feature (1)..(206): Homolog of NCBI NO: 10178182 NR Description: contains similarity to
  misc_feature (1)..(235): Homolog of NCBI NO: 18424923 NR Description: short-chain dehydrogenase/reductase family
  misc_feature (1)..(71): Homolog of NCBI NO: 11358313 NR Description: hypothetical protein T31P16.40 - Arabidopsis
  misc_feature (63)..(235): Homolog of NCBI NO: 11358313 NR Description: hypothetical protein T31P16.40 - Arabidopsis
  misc_feature (1)..(235): Homolog of NCBI NO: 30682984 NR Description: short-chain dehydrogenase/reductase family
  misc_feature (1)..(235): Homolog of NCBI NO: 26453106 NR Description: unknown protein [Arabidopsis thaliana]
MTDLEQDSRLFVKELDVQSDQNVSKVLSEVIDKFGKIDVLVNNAGVQCVGPLAETPISAMENTFNTNVFGSMRMTQAVVPHMVSKKKGKIVNVGSITVMAPGPWAGVYTATKAAIHALTDTLRLELRPFGIDVINVVPGGIRTNIANSAVATFNKMPELKLYKPYEEAIRERAFISQRMNPTPAETFARDTVAAVLKKNPPAWFSSGRYSTLMAGMYHMPLWLKDFFQKQVLMKK

SEQ ID NO: 42015 - DNA, 1624 bp, Arabidopsis thaliana
  misc_feature (1)..(1624): Ceres Seq. ID no. 12328464
  misc_feature: MA Experiment ID: 108595 Result: Up-regulated in Transcription
  misc_feature: MA Experiment 108595 PARAMETER Experiment Name: At_Ler-pi_Ovule_cDNA_P Parameter: Plant Line Value: null
  misc_feature: MA Experiment ID: 20000070 Result: Up-regulated in Transcription
  misc_feature: MA Experiment 20000070 PARAMETER Experiment Name: At_100uM_ABA_Mutants_cDNA_P Parameter: Plant Line Value: CS24
  misc_feature: MA Experiment 20000070 PARAMETER Experiment Name: At_100uM_ABA_Mutants_cDNA_P Parameter: Timepoint (hr) Value: 6
  misc_feature: MA Experiment 20000070 PARAMETER Experiment Name: At_100uM_ABA_Mutants_cDNA_P Parameter: Tissue Value: Aerial
  misc_feature: MA Experiment 20000070 PARAMETER Experiment Name: At_100uM_ABA_Mutants_cDNA_P Parameter: Treatment Value: 100uM ABA vs. No Treatment
  misc_feature: MA Experiment ID: 20000072 Result: Up-regulated in Transcription
  misc_feature: MA Experiment 20000072 PARAMETER Experiment Name: At_100uM_ABA_Mutants_cDNA_P Parameter: Plant Line Value: CS8105
  misc_feature: MA Experiment 20000072 PARAMETER Experiment Name: At_100uM_ABA_Mutants_cDNA_P Parameter: Timepoint (hr) Value: 6
  misc_feature: MA Experiment 20000072 PARAMETER Experiment Name: At_100uM_ABA_Mutants_cDNA_P Parameter: Tissue Value: Aerial
  misc_feature: MA Experiment 20000072 PARAMETER Experiment Name: At_100uM_ABA_Mutants_cDNA_P Parameter: Treatment Value: 100uM ABA vs. No Treatment
gggagaaacagagagaaaatggaagatggtgtgacgcctccgcttctgatcacagagaaagacacgacgatgattcgtgtgaaggaggaggtgaagaagcagctatggctttctgctccactcattggtgttagccttcttcaatactctctccaagtcatctccgtcatgttcgttggctatcttggctctcttcctctctctgccgcctctatcgccacctcctttgcctccgttaccggcttcaccttcctcttgggaacagcaagtgcattggagactctatgtggccaagcttacggagcaaaactatatggaaaattgggaattcaaatgcagagagcaatgtttgtacttcttatactctctgttcctctctcaatcatttgggctaacacagaacagattctcgtattggtccatcaagacaagtccattgcaagtgttgctggctcctacgctaaatacatgatcccgagcctcttcgcctacggactgcttcaatgtatcaacaggttcttgcaagcgcagaacaatgtgttccctgtctttgtctgctctggtatcactacatgtcttcatttgcttctctgttggttgtttgtgttgaagactggtttaggatacagaggagctgctcttgctatttcggtctcttactggttcaacgtcattctcctctcgtgttatgtcaagttttcgccttcttgctcgcatagttggaccgggttttcgaaagaggcttttcaagaactttatgatttctctaaaattgcttttccttcagcagtcatggtctgtttggagctttggtccttcgagcttctggttcttgcctcaggccttcttcctaacccggttttagaaacttcggtgctttcaatctgtctaaatacttccctaacaatctggcagatttcggttggtcttggtggcgctgcaagcataagggtctcaaacgagttaggagcagggaatccacaagtggcaaaactggctgtatatgtcattgtaggcatagcagtagccgagggaattgtggttgtaacagttttgttgtcgattcggaagatcttaggtcatgcttttagcagcgacccgaaaatcatcgcatatgccgcatcaatgataccgattgttgcatgtggaaacttccttgatggcttacaatgcgtactctcaggggttgctagaggatgtgtatggcagaaaattggagcatgtgtgaatcttggatcatattatcttgttggagttccattaggattgttacttggtttccatttccacattggtggtcgggggctttggctgggaatcgtaacagcattgtctgttcaagtgttgtgtctttccttagtcactatattcacaaactgggataaagaggcaaagaaagctacgaacagagtcggatcttcagatgacaaagatggtgacgtccaatgatcaataaacgtcctgaggaaaaagcagttgcaaatgagcttaatgagtgctttattcttgtatgcccatatgaacttattgggaatttctaattgatgtggccgtacattggtctttagaaaactttaccattgttacatagttattgaaattccttggatgtgtttccattctc

SEQ ID NO: 42016 - protein, 482 aa, Arabidopsis thaliana
  peptide (1)..(482): Ceres Seq. ID no. 12328465
  misc_feature (30)..(471): Homolog of NCBI NO: 15218070 NR Description: hypothetical protein; protein id: At1g15170.1
  misc_feature (30)..(474): Homolog of NCBI NO: 37533148 NR Description: putative transmembrane protein
  misc_feature (5)..(474): Homolog of NCBI NO: 37533146 NR Description: putative integral membrane protein
  misc_feature (29)..(481): Homolog of NCBI NO: 16797803 NR Description: hypothetical membrane protein-1 [Marchantia
  misc_feature (27)..(471): Homolog of NCBI NO: 22138480 NR Description: hypothetical protein [Oryza sativa (japonica
  misc_feature (22)..(474): Homolog of NCBI NO: 38346676 NR Description: OSJNBa0069D17.7 [Oryza sativa (japonica
  misc_feature (4)..(465): Homolog of NCBI NO: 15226290 NR Description: hypothetical protein; protein id: At2g34360.1
  misc_feature (3)..(478): Homolog of NCBI NO: 15237158 NR Description: MATE efflux family protein, putative
  misc_feature (7)..(482): Homolog of NCBI NO: 15219524 NR Description: putative integral membrane protein
  misc_feature (7)..(482): Homolog of NCBI NO: 21537267 NR Description: putative integral membrane protein [Arabidopsis
GRNREKMEDGVTPPLLITEKDTTMIRVKEEVKKQLWLSAPLIGVSLLQYSLQVISVMFVGYLGSLPLSAASIATSFASVTGFTFLLGTASALETLCGQAYGAKLYGKLGIQMQRAMFVLLILSVPLSIIWANTEQILVLVHQDKSIASVAGSYAKYMIPSLFAYGLLQCINRFLQAQNNVFPVFVCSGITTCLHLLLCWLFVLKTGLGYRGAALAISVSYWFNVILLSCYVKFSPSCSHSWTGFSKEAFQELYDFSKIAFPSAVMVCLELWSFELLVLASGLLPNPVLETSVLSICLNTSLTIWQISVGLGGAASIRVSNELGAGNPQVAKLAVYVIVGIAVAEGIVVVTVLLSIRKILGHAFSSDPKIIAYAASMIPIVACGNFLDGLQCVLSGVARGCVWQKIGACVNLGSYYLVGVPLGLLLGFHFHIGGRGLWLGIVTALSVQVLCLSLVTIFTNWDKEAKKATNRVGSSDDKDGDVQ

SEQ ID NO: 42017 - protein, 476 aa, Arabidopsis thaliana
  peptide (1)..(476): Ceres Seq. ID no. 12328466
  misc_feature (24)..(465): Homolog of NCBI NO: 15218070 NR Description: hypothetical protein; protein id: At1g15170.1
  misc_feature (24)..(468): Homolog of NCBI NO: 37533148 NR Description: putative transmembrane protein
  misc_feature (1)..(468): Homolog of NCBI NO: 37533146 NR Description: putative integral membrane protein
  misc_feature (23)..(475): Homolog of NCBI NO: 16797803 NR Description: hypothetical membrane protein-1 [Marchantia
  misc_feature (21)..(465): Homolog of NCBI NO: 22138480 NR Description: hypothetical protein [Oryza sativa (japonica
  misc_feature (16)..(468): Homolog of NCBI NO: 38346676 NR Description: OSJNBa0069D17.7 [Oryza sativa (japonica
  misc_feature (1)..(459): Homolog of NCBI NO: 15226290 NR Description: hypothetical protein; protein id: At2g34360.1
  misc_feature (1)..(472): Homolog of NCBI NO: 15237158 NR Description: MATE efflux family protein, putative
  misc_feature (1)..(476): Homolog of NCBI NO: 15219524 NR Description: putative integral membrane protein
  misc_feature (1)..(476): Homolog of NCBI NO: 21537267 NR Description: putative integral membrane protein [Arabidopsis
MEDGVTPPLLITEKDTTMIRVKEEVKKQLWLSAPLIGVSLLQYSLQVISVMFVGYLGSLPLSAASIATSFASVTGFTFLLGTASALETLCGQAYGAKLYGKLGIQMQRAMFVLLILSVPLSIIWANTEQILVLVHQDKSIASVAGSYAKYMIPSLFAYGLLQCINRFLQAQNNVFPVFVCSGITTCLHLLLCWLFVLKTGLGYRGAALAISVSYWFNVILLSCYVKFSPSCSHSWTGFSKEAFQELYDFSKIAFPSAVMVCLELWSFELLVLASGLLPNPVLETSVLSICLNTSLTIWQISVGLGGAASIRVSNELGAGNPQVAKLAVYVIVGIAVAEGIVVVTVLLSIRKILGHAFSSDPKIIAYAASMIPIVACGNFLDGLQCVLSGVARGCVWQKIGACVNLGSYYLVGVPLGLLLGFHFHIGGRGLWLGIVTALSVQVLCLSLVTIFTNWDKEAKKATNRVGSSDDKDGDVQ

SEQ ID NO: 42018 - protein, 459 aa, Arabidopsis thaliana
  peptide (1)..(459): Ceres Seq. ID no. 12328467
  misc_feature (7)..(448): Homolog of NCBI NO: 15218070 NR Description: hypothetical protein; protein id: At1g15170.1
  misc_feature (7)..(451): Homolog of NCBI NO: 37533148 NR Description: putative transmembrane protein
  misc_feature (1)..(451): Homolog of NCBI NO: 37533146 NR Description: putative integral membrane protein
  misc_feature (6)..(458): Homolog of NCBI NO: 16797803 NR Description: hypothetical membrane protein-1 [Marchantia
  misc_feature (4)..(448): Homolog of NCBI NO: 22138480 NR Description: hypothetical protein [Oryza sativa (japonica
  misc_feature (1)..(451): Homolog of NCBI NO: 38346676 NR Description: OSJNBa0069D17.7 [Oryza sativa (japonica
  misc_feature (1)..(442): Homolog of NCBI NO: 15226290 NR Description: hypothetical protein; protein id: At2g34360.1
  misc_feature (1)..(455): Homolog of NCBI NO: 15237158 NR Description: MATE efflux family protein, putative
  misc_feature (1)..(459): Homolog of NCBI NO: 15219524 NR Description: putative integral membrane protein
  misc_feature (1)..(459): Homolog of NCBI NO: 21537267 NR Description: putative integral membrane protein [Arabidopsis
MIRVKEEVKKQLWLSAPLIGVSLLQYSLQVISVMFVGYLGSLPLSAASIATSFASVTGFTFLLGTASALETLCGQAYGAKLYGKLGIQMQRAMFVLLILSVPLSIIWANTEQILVLVHQDKSIASVAGSYAKYMIPSLFAYGLLQCINRFLQAQNNVFPVFVCSGITTCLHLLLCWLFVLKTGLGYRGAALAISVSYWFNVILLSCYVKFSPSCSHSWTGFSKEAFQELYDFSKIAFPSAVMVCLELWSFELLVLASGLLPNPVLETSVLSICLNTSLTIWQISVGLGGAASIRVSNELGAGNPQVAKLAVYVIVGIAVAEGIVVVTVLLSIRKILGHAFSSDPKIIAYAASMIPIVACGNFLDGLQCVLSGVARGCVWQKIGACVNLGSYYLVGVPLGLLLGFHFHIGGRGLWLGIVTALSVQVLCLSLVTIFTNWDKEAKKATNRVGSSDDKDGDVQ

SEQ ID NO: 42019 - DNA, 1620 bp, Arabidopsis thaliana; identical to SEQ ID NO: 26344
  misc_feature (1)..(1620): Ceres Seq. ID no. 12325289
  misc_feature: MA Experiment ID: 20000234 Result: Down-regulated in Transcription
  misc_feature: MA Experiment 20000234 PARAMETER Experiment Name: At_Siliques_P Parameter: Age (day) Value: 21
  misc_feature: MA Experiment 20000234 PARAMETER Experiment Name: At_Siliques_P Parameter: Organism Value: A. thaliana
  misc_feature: MA Experiment 20000234 PARAMETER Experiment Name: At_Siliques_P Parameter: Plant Line Value: WS
  misc_feature: MA Experiment 20000234 PARAMETER Experiment Name: At_Siliques_P Parameter: Tissue Value: Less Than 5mm Siliques vs. Whole Plant
  misc_feature: MA Experiment ID: 20000235 Result: Down-regulated in Transcription
  misc_feature: MA Experiment 20000235 PARAMETER Experiment Name: At_Siliques_P Parameter: Age (day) Value: 21
  misc_feature: MA Experiment 20000235 PARAMETER Experiment Name: At_Siliques_P Parameter: Organism Value: A. thaliana
  misc_feature: MA Experiment 20000235 PARAMETER Experiment Name: At_Siliques_P Parameter: Plant Line Value: WS
  misc_feature: MA Experiment 20000235 PARAMETER Experiment Name: At_Siliques_P Parameter: Tissue Value: 5-10mm Siliques vs. Whole Plant
  misc_feature: MA Experiment ID: 20000574 Result: Down-regulated in Transcription
  misc_feature: MA Experiment 20000574 PARAMETER Experiment Name: At_100uM_ABA_Mutants__P Parameter: Organism Value: A. thaliana
  misc_feature: MA Experiment 20000574 PARAMETER Experiment Name: At_100uM_ABA_Mutants__P Parameter: Plant Line Value: CS23 vs. Ler wt
  misc_feature: MA Experiment 20000574 PARAMETER Experiment Name: At_100uM_ABA_Mutants__P Parameter: Timepoint (hr) Value: N/A
  misc_feature: MA Experiment 20000574 PARAMETER Experiment Name: At_100uM_ABA_Mutants__P Parameter: Tissue Value: Whole Plant
  misc_feature: MA Experiment 20000574 PARAMETER Experiment Name: At_100uM_ABA_Mutants__P Parameter: Treatment Value: None
  misc_feature: MA Experiment ID: 20001247 Result: Up-regulated in Transcription
  misc_feature: MA Experiment 20001247 PARAMETER Experiment Name: At_Far-red-induction_P Parameter: Age (day) Value: 7
  misc_feature: MA Experiment 20001247 PARAMETER Experiment Name: At_Far-red-induction_P Parameter: Light Value: Far-red vs. White
  misc_feature: MA Experiment 20001247 PARAMETER Experiment Name: At_Far-red-induction_P Parameter: Organism Value: A. thaliana
  misc_feature: MA Experiment 20001247 PARAMETER Experiment Name: At_Far-red-induction_P Parameter: Plant Line Value: Columbia
  misc_feature: MA Experiment 20001247 PARAMETER Experiment Name: At_Far-red-induction_P Parameter: Timepoint (hr) Value: 1
  misc_feature: MA Experiment 20001247 PARAMETER Experiment Name: At_Far-red-induction_P Parameter: Tissue Value: Whole Plant
  misc_feature: MA Experiment ID: 20001450 Result: Up-regulated in Transcription
  misc_feature: MA Experiment 20001450 PARAMETER Experiment Name: At_Far-red-induction_P Parameter: Age (day) Value: 7
  misc_feature: MA Experiment 20001450 PARAMETER Experiment Name: At_Far-red-induction_P Parameter: Light Value: Far-red vs. White
  misc_feature: MA Experiment 20001450 PARAMETER Experiment Name: At_Far-red-induction_P Parameter: Organism Value: A. thaliana
  misc_feature: MA Experiment 20001450 PARAMETER Experiment Name: At_Far-red-induction_P Parameter: Plant Line Value: Columbia
  misc_feature: MA Experiment 20001450 PARAMETER Experiment Name: At_Far-red-induction_P Parameter: Timepoint (hr) Value: 8
  misc_feature: MA Experiment 20001450 PARAMETER Experiment Name: At_Far-red-induction_P Parameter: Tissue Value: Whole Plant
  misc_feature: MA Experiment ID: 20001560 Result: Down-regulated in Transcription
  misc_feature: MA Experiment 20001560 PARAMETER Experiment Name: At_Drought_Soil_Dry_P Parameter: Age (day) Value: 28
  misc_feature: MA Experiment 20001560 PARAMETER Experiment Name: At_Drought_Soil_Dry_P Parameter: Organism Value: A. thaliana
  misc_feature: MA Experiment 20001560 PARAMETER Experiment Name: At_Drought_Soil_Dry_P Parameter: Plant Line Value: WS
  misc_feature: MA Experiment 20001560 PARAMETER Experiment Name: At_Drought_Soil_Dry_P Parameter: Post Timepoint (hr) Value: None
  misc_feature: MA Experiment 20001560 PARAMETER Experiment Name: At_Drought_Soil_Dry_P Parameter: Post-Treatment Value: None
  misc_feature: MA Experiment 20001560 PARAMETER Experiment Name: At_Drought_Soil_Dry_P Parameter: Timepoint (day) Value: 14
  misc_feature: MA Experiment 20001560 PARAMETER Experiment Name: At_Drought_Soil_Dry_P Parameter: Treatment Value: Drought vs. No Drought

SEQ ID NO: 42020 - protein, 414 aa, Arabidopsis thaliana; identical to SEQ ID NO: 26345
  peptide (1)..(414): Ceres Seq. ID no. 12325290
  misc_feature (11)..(281): Homolog of NCBI NO: 40539064 NR Description: expressed protein [Oryza sativa (japonica
  misc_feature (57)..(412): Homolog of NCBI NO: 22093613 NR Description: hypothetical protein~similar to Arabidopsis
  misc_feature (289)..(407): Homolog of NCBI NO: 14475940 NR Description: unknown protein [Arabidopsis thaliana]
  misc_feature (1)..(299): Homolog of NCBI NO: 14475940 NR Description: unknown protein [Arabidopsis thaliana]
  misc_feature (289)..(414): Homolog of NCBI NO: 18406365 NR Description: expressed protein
  misc_feature (1)..(299): Homolog of NCBI NO: 18406365 NR Description: expressed protein
  misc_feature (289)..(414): Homolog of NCBI NO: 21553547 NR Description: unknown [Arabidopsis thaliana]
  misc_feature (1)..(299): Homolog of NCBI NO: 21553547 NR Description: unknown [Arabidopsis thaliana]
  misc_feature (1)..(414): Homolog of NCBI NO: 18391117 NR Description: expressed protein
  misc_feature (1)..(414): Homolog of NCBI NO: 21554418 NR Description: unknown [Arabidopsis thaliana]
  misc_feature (11)..(281): Homolog of NCBI NO: 40539064 NR Description: expressed protein [Oryza sativa (japonica
  misc_feature (57)..(412): Homolog of NCBI NO: 22093613 NR Description: hypothetical protein~similar to Arabidopsis
  misc_feature (289)..(407): Homolog of NCBI NO: 14475940 NR Description: unknown protein [Arabidopsis thaliana]
  misc_feature (1)..(299): Homolog of NCBI NO: 14475940 NR Description: unknown protein [Arabidopsis thaliana]
  misc_feature (289)..(414): Homolog of NCBI NO: 18406365 NR Description: expressed protein
  misc_feature (1)..(299): Homolog of NCBI NO: 18406365 NR Description: expressed protein
  misc_feature (289)..(414): Homolog of NCBI NO: 21553547 NR Description: unknown [Arabidopsis thaliana]
  misc_feature (1)..(299): Homolog of NCBI NO: 21553547 NR Description: unknown [Arabidopsis thaliana]
  misc_feature (1)..(414): Homolog of NCBI NO: 18391117 NR Description: expressed protein
  misc_feature (1)..(414): Homolog of NCBI NO: 21554418 NR Description: unknown [Arabidopsis thaliana]

SEQ ID NO: 42021 - protein, 391 aa, Arabidopsis thaliana; identical to SEQ ID NO: 26346
  peptide (1)..(391): Ceres Seq. ID no. 12325291
  misc_feature (1)..(258): Homolog of NCBI NO: 40539064 NR Description: expressed protein [Oryza sativa (japonica
  misc_feature (34)..(389): Homolog of NCBI NO: 22093613 NR Description: hypothetical protein~similar to Arabidopsis
  misc_feature (266)..(384): Homolog of NCBI NO: 14475940 NR Description: unknown protein [Arabidopsis thaliana]
  misc_feature (1)..(276): Homolog of NCBI NO: 14475940 NR Description: unknown protein [Arabidopsis thaliana]
  misc_feature (266)..(391): Homolog of NCBI NO: 18406365 NR Description: expressed protein
  misc_feature (1)..(276): Homolog of NCBI NO: 18406365 NR Description: expressed protein
  misc_feature (266)..(391): Homolog of NCBI NO: 21553547 NR Description: unknown [Arabidopsis thaliana]
  misc_feature (1)..(276): Homolog of NCBI NO: 21553547 NR Description: unknown [Arabidopsis thaliana]
  misc_feature (1)..(391): Homolog of NCBI NO: 18391117 NR Description: expressed protein
  misc_feature (1)..(391): Homolog of NCBI NO: 21554418 NR Description: unknown [Arabidopsis thaliana]
  misc_feature (1)..(258): Homolog of NCBI NO: 40539064 NR Description: expressed protein [Oryza sativa (japonica
  misc_feature (34)..(389): Homolog of NCBI NO: 22093613 NR Description: hypothetical protein~similar to Arabidopsis
  misc_feature (266)..(384): Homolog of NCBI NO: 14475940 NR Description: unknown protein [Arabidopsis thaliana]
  misc_feature (1)..(276): Homolog of NCBI NO: 14475940 NR Description: unknown protein [Arabidopsis thaliana]
  misc_feature (266)..(391): Homolog of NCBI NO: 18406365 NR Description: expressed protein
  misc_feature (1)..(276): Homolog of NCBI NO: 18406365 NR Description: expressed protein
  misc_feature (266)..(391): Homolog of NCBI NO: 21553547 NR Description: unknown [Arabidopsis thaliana]
  misc_feature (1)..(276): Homolog of NCBI NO: 21553547 NR Description: unknown [Arabidopsis thaliana]
  misc_feature (1)..(391): Homolog of NCBI NO: 18391117 NR Description: expressed protein
  misc_feature (1)..(391): Homolog of NCBI NO: 21554418 NR Description: unknown [Arabidopsis thaliana]

SEQ ID NO: 42022 - protein, 342 aa, Arabidopsis thaliana; identical to SEQ ID NO: 26347
  peptide (1)..(342): Ceres Seq. ID no. 12325292
  misc_feature (1)..(209): Homolog of NCBI NO: 40539064 NR Description: expressed protein [Oryza sativa (japonica
  misc_feature (1)..(340): Homolog of NCBI NO: 22093613 NR Description: hypothetical protein~similar to Arabidopsis
  misc_feature (217)..(335): Homolog of NCBI NO: 14475940 NR Description: unknown protein [Arabidopsis thaliana]
  misc_feature (1)..(227): Homolog of NCBI NO: 14475940 NR Description: unknown protein [Arabidopsis thaliana]
  misc_feature (217)..(342): Homolog of NCBI NO: 18406365 NR Description: expressed protein
  misc_feature (1)..(227): Homolog of NCBI NO: 18406365 NR Description: expressed protein
  misc_feature (217)..(342): Homolog of NCBI NO: 21553547 NR Description: unknown [Arabidopsis thaliana]
  misc_feature (1)..(227): Homolog of NCBI NO: 21553547 NR Description: unknown [Arabidopsis thaliana]
  misc_feature (1)..(342): Homolog of NCBI NO: 18391117 NR Description: expressed protein
  misc_feature (1)..(342): Homolog of NCBI NO: 21554418 NR Description: unknown [Arabidopsis thaliana]
  misc_feature (1)..(209): Homolog of NCBI NO: 40539064 NR Description: expressed protein [Oryza sativa (japonica
  misc_feature (1)..(340): Homolog of NCBI NO: 22093613 NR Description: hypothetical protein~similar to Arabidopsis
  misc_feature (217)..(335): Homolog of NCBI NO: 14475940 NR Description: unknown protein [Arabidopsis thaliana]
  misc_feature (1)..(227): Homolog of NCBI NO: 14475940 NR Description: unknown protein [Arabidopsis thaliana]
  misc_feature (217)..(342): Homolog of NCBI NO: 18406365 NR Description: expressed protein
  misc_feature (1)..(227): Homolog of NCBI NO: 18406365 NR Description: expressed protein
  misc_feature (217)..(342): Homolog of NCBI NO: 21553547 NR Description: unknown [Arabidopsis thaliana]
  misc_feature (1)..(227): Homolog of NCBI NO: 21553547 NR Description: unknown [Arabidopsis thaliana]
  misc_feature (1)..(342): Homolog of NCBI NO: 18391117 NR Description: expressed protein
  misc_feature (1)..(342): Homolog of NCBI NO: 21554418 NR Description: unknown [Arabidopsis thaliana]

SEQ ID NO: 42023 - DNA, 1589 bp, Arabidopsis thaliana
  misc_feature (1)..(1589): Ceres Seq. ID no. 13488782
  misc_feature: MA Experiment ID: 108463 Result: Down-regulated in Transcription
  misc_feature: MA Experiment 108463 PARAMETER Experiment Name: At_Germinating_Seeds_cDNA_P Parameter: Age (day) Value: 3 vs. 0
  misc_feature: MA Experiment 108463 PARAMETER Experiment Name: At_Germinating_Seeds_cDNA_P Parameter: Tissue Value: Germinating Seeds
  misc_feature: MA Experiment ID: 108464 Result: Down-regulated in Transcription
  misc_feature: MA Experiment 108464 PARAMETER Experiment Name: At_Germinating_Seeds_cDNA_P Parameter: Age (day) Value: 4 vs. 0
  misc_feature: MA Experiment 108464 PARAMETER Experiment Name: At_Germinating_Seeds_cDNA_P Parameter: Tissue Value: Germinating Seeds
  misc_feature: MA Experiment ID: 108569 Result: Up-regulated in Transcription
  misc_feature: MA Experiment 108569 PARAMETER Experiment Name: At_0.001%_MeJA__cDNA_P Parameter: Timepoint (hr) Value: 6
  misc_feature: MA Experiment 108569 PARAMETER Experiment Name: At_0.001%_MeJA__cDNA_P Parameter: Tissue Value: Aerial
  misc_feature: MA Experiment 108569 PARAMETER Experiment Name: At_0.001%_MeJA__cDNA_P Parameter: Treatment Value: 0.001% MeJA vs. No Treatment
  misc_feature: MA Experiment ID: 108573 Result: Up-regulated in Transcription
  misc_feature: MA Experiment 108573 PARAMETER Experiment Name: At_Drought_cDNA_P Parameter: Timepoint (hr) Value: 6
  misc_feature: MA Experiment 108573 PARAMETER Experiment Name: At_Drought_cDNA_P Parameter: Tissue Value: Aerial
  misc_feature: MA Experiment 108573 PARAMETER Experiment Name: At_Drought_cDNA_P Parameter: Treatment Value: Drought vs. No Drought
  misc_feature: MA Experiment ID: 108595 Result: Down-regulated in Transcription
  misc_feature: MA Experiment 108595 PARAMETER Experiment Name: At_Ler-pi_Ovule_cDNA_P Parameter: Plant Line Value: null
  misc_feature: MA Experiment ID: 20000072 Result: Up-regulated in Transcription
  misc_feature: MA Experiment 20000072 PARAMETER Experiment Name: At_100uM_ABA_Mutants_cDNA_P Parameter: Plant Line Value: CS8105
  misc_feature: MA Experiment 20000072 PARAMETER Experiment Name: At_100uM_ABA_Mutants_cDNA_P Parameter: Timepoint (hr) Value: 6
  misc_feature: MA Experiment 20000072 PARAMETER Experiment Name: At_100uM_ABA_Mutants_cDNA_P Parameter: Tissue Value: Aerial
  misc_feature: MA Experiment 20000072 PARAMETER Experiment Name: At_100uM_ABA_Mutants_cDNA_P Parameter: Treatment Value: 100uM ABA vs. No Treatment
  misc_feature: MA Experiment ID: 20000086 Result: Up-regulated in Transcription
  misc_feature: MA Experiment 20000086 PARAMETER Experiment Name: At_100uM_ABA_Mutants_cDNA_P Parameter: Plant Line Value: CS22
  misc_feature: MA Experiment 20000086 PARAMETER Experiment Name: At_100uM_ABA_Mutants_cDNA_P Parameter: Timepoint (hr) Value: 6
  misc_feature: MA Experiment 20000086 PARAMETER Experiment Name: At_100uM_ABA_Mutants_cDNA_P Parameter: Tissue Value: Aerial
  misc_feature: MA Experiment 20000086 PARAMETER Experiment Name: At_100uM_ABA_Mutants_cDNA_P Parameter: Treatment Value: 100uM ABA vs. No Treatment
  misc_feature: MA Experiment ID: 20000088 Result: Up-regulated in Transcription
  misc_feature: MA Experiment 20000088 PARAMETER Experiment Name: At_100uM_ABA_Mutants_cDNA_P Parameter: Plant Line Value: Landsberg
  misc_feature: MA Experiment 20000088 PARAMETER Experiment Name: At_100uM_ABA_Mutants_cDNA_P Parameter: Timepoint (hr) Value: 6
  misc_feature: MA Experiment 20000088 PARAMETER Experiment Name: At_100uM_ABA_Mutants_cDNA_P Parameter: Tissue Value: Aerial
  misc_feature: MA Experiment 20000088 PARAMETER Experiment Name: At_100uM_ABA_Mutants_cDNA_P Parameter: Treatment Value: 100uM ABA vs. No Treatment
  misc_feature: MA Experiment ID: 20000794 Result: Up-regulated in Transcription
  misc_feature: MA Experiment 20000794 PARAMETER Experiment Name: At_Petals_P Parameter: Age (day) Value: 23-25 days
  misc_feature: MA Experiment 20000794 PARAMETER Experiment Name: At_Petals_P Parameter: Plant Line Value: WS
  misc_feature: MA Experiment 20000794 PARAMETER Experiment Name: At_Petals_P Parameter: Tissue Value: Petals vs. Whole plant
  misc_feature: MA Experiment ID: 20001248 Result: Down-regulated in Transcription
  misc_feature: MA Experiment 20001248 PARAMETER Experiment Name: At_Far-red-induction_P Parameter: Age (day) Value: 7
  misc_feature: MA Experiment 20001248 PARAMETER Experiment Name: At_Far-red-induction_P Parameter: Light Value: Far-red vs. White
  misc_feature: MA Experiment 20001248 PARAMETER Experiment Name: At_Far-red-induction_P Parameter: Organism Value: A. thaliana
  misc_feature: MA Experiment 20001248 PARAMETER Experiment Name: At_Far-red-induction_P Parameter: Plant Line Value: Columbia
  misc_feature: MA Experiment 20001248 PARAMETER Experiment Name: At_Far-red-induction_P Parameter: Timepoint (hr) Value: 4
  misc_feature: MA Experiment 20001248 PARAMETER Experiment Name: At_Far-red-induction_P Parameter: Tissue Value: Whole Plant
  misc_feature: MA Experiment ID: 20001450 Result: Down-regulated in Transcription
  misc_feature: MA Experiment 20001450 PARAMETER Experiment Name: At_Far-red-induction_P Parameter: Age (day) Value: 7
  misc_feature: MA Experiment 20001450 PARAMETER Experiment Name: At_Far-red-induction_P Parameter: Light Value: Far-red vs. White
  misc_feature: MA Experiment 20001450 PARAMETER Experiment Name: At_Far-red-induction_P Parameter: Organism Value: A. thaliana
  misc_feature: MA Experiment 20001450 PARAMETER Experiment Name: At_Far-red-induction_P Parameter: Plant Line Value: Columbia
  misc_feature: MA Experiment 20001450 PARAMETER Experiment Name: At_Far-red-induction_P Parameter: Timepoint (hr) Value: 8
  misc_feature: MA Experiment 20001450 PARAMETER Experiment Name: At_Far-red-induction_P Parameter: Tissue Value: Whole Plant
agtttgggcttcaaaataatcaaacgaaaacaatggaaaaagcaacggagagacaaaggatactgcttcgtcatcttcaaccttcgtcatcttccgacgcctctctctctgcctcagcttgcttgtccaaagacagtgctgcatatcaatatggagatgatgttgtcattgtcgcggcacaaaggactgcactttgcaaggcaaaacgtggcagcttcaaggatacatttccagacgagttgcttgcctctgtattgagagcattgatagagaaaactaatgtaaacccaagtgaagttggtgacattgtagtgggtactgttttgggaccaggatctcagagagccagtgaatgcaggatggctgcgttctatgctggtttccccgaaactgttcccatcagaaccgtgaacagacagtgttcatctgggcttcaggctgttgctgatgttgccgctgccataaaagctggtttttatgacattggtattggagctgggctggagtccatgacaactaatccaaggggatggaaaggatcagtcaacccaaatgtgaagaagtttgaacaagctcacaattgccttcttccaatgggtattacttcagaaaatgtagcacaccggtttaatgtttcaagggaggagcaggatcaagctgctgttgattctcacagaaaggctgcttctgctactgcttccggaaagtttaaggatgagataacccctgtaaaaaccaagattgttgacccaaagacaggtgatgagaaacccataacagtttctgtggatgatgggattcgacctaacacaaccctttccggacttgcaaagctgaagccagtgtttaaggaagacggaaccacaactgctgggaattctagccaattaagtgacggtgctggagctgttctccttatgaggagaaatgtcgcaatgcagaaaggccttcccattcttggtgtattcaggacattttctgcagttggtgtggacccagccatcatgggggttgggccagccgttgccattcctgctgcagtcaaggcagctggtttagaactcaatgacgtcgacttgtttgagattaacgaggcatttgcatctcagtttgtttattgtcggaacaagctcgggctagacgcggaaaagatcaatgtcaatggaggagccatagccattggacatcccttgggcgctacaggagccagatgcgttgcgacgctgctgcatgagatgaaacgacgtggtaaagactgtcgttttggcgtagtgtcaatgtgtataggttcgggaatgggagcagccgctgtgtttgagagaggaggcggtgtggatgagctctgtgatgtccggaaagtctaatgacaataaggccttttgaccaaggaccctagctaaggaccaaattagaacacagtactacaaataaacattatcacaaataaatgcgttctagatgaataaatcataacgatagtacaatacatgagggaaaacttcttgttattttttaactctcttttgttatatggttggaatatatacagatactctttgagaacatatcataatctatttggtttgtct

SEQ ID NO: 42024 - protein, 453 aa, Arabidopsis thaliana
  peptide (1)..(453): Ceres Seq. ID no. 13488783
  misc_feature (51)..(309): Pfam Name: Thiolase, N-terminal domain Pfam Description: Thiolase, N-terminal domain
  misc_feature (11)..(428): Homolog of NCBI NO: 7433645 NR Description: acetyl-CoA C-acyltransferase (EC 2.3.1.16) B
  misc_feature (11)..(428): Homolog of NCBI NO: 1129145 NR Description: 3-ketoacyl-CoA thiolase B; acetyl-CoA
  misc_feature (28)..(453): Homolog of NCBI NO: 25528365 NR Description: hypothetical protein [imported] - Arabidopsis
  misc_feature (11)..(453): Homolog of NCBI NO: 421810 NR Description: acetyl-CoA C-acyltransferase (EC 2.3.1.16)
  misc_feature (11)..(453): Homolog of NCBI NO: 7433647 NR Description: acetyl-CoA C-acyltransferase (EC 2.3.1.16)
  misc_feature (11)..(453): Homolog of NCBI NO: 393707 NR Description: 3-ketoacyl-CoA thiolase; acetyl-CoA
  misc_feature (11)..(453): Homolog of NCBI NO: 7433644 NR Description: acetyl-CoA C-acyltransferase (EC 2.3.1.16)
  misc_feature (11)..(453): Homolog of NCBI NO: 15225798 NR Description: acetyl-CoA C-acyltransferase (3-ketoacyl-CoA
  misc_feature (11)..(453): Homolog of NCBI NO: 21537268 NR Description: putative acetyl-CoA acyltransferase [Arabidopsis
  misc_feature (11)..(453): Homolog of NCBI NO: 15219797 NR Description: acetyl-CoA C-acyltransferase (3-ketoacyl-CoA
FGLQNNQTKTMEKATERQRILLRHLQPSSSSDASLSASACLSKDSAAYQYGDDVVIVAAQRTALCKAKRGSFKDTFPDELLASVLRALIEKTNVNPSEVGDIVVGTVLGPGSQRASECRMAAFYAGFPETVPIRTVNRQCSSGLQAVADVAAAIKAGFYDIGIGAGLESMTTNPRGWKGSVNPNVKKFEQAHNCLLPMGITSENVAHRFNVSREEQDQAAVDSHRKAASATASGKFKDEITPVKTKIVDPKTGDEKPITVSVDDGIRPNTTLSGLAKLKPVFKEDGTTTAGNSSQLSDGAGAVLLMRRNVAMQKGLPILGVFRTFSAVGVDPAIMGVGPAVAIPAAVKAAGLELNDVDLFEINEAFASQFVYCRNKLGLDAEKINVNGGAIAIGHPLGATGARCVATLLHEMKRRGKDCRFGVVSMCIGSGMGAAAVFERGGGVDELCDVRKV

SEQ ID NO: 42025 - protein, 443 aa, Arabidopsis thaliana
  peptide (1)..(443): Ceres Seq. ID no. 13488784
  misc_feature (41)..(299): Pfam Name: Thiolase, N-terminal domain Pfam Description: Thiolase, N-terminal domain
  misc_feature (1)..(418): Homolog of NCBI NO: 7433645 NR Description: acetyl-CoA C-acyltransferase (EC 2.3.1.16) B
  misc_feature (1)..(418): Homolog of NCBI NO: 1129145 NR Description: 3-ketoacyl-CoA thiolase B; acetyl-CoA
  misc_feature (18)..(443): Homolog of NCBI NO: 25528365 NR Description: hypothetical protein [imported] - Arabidopsis
  misc_feature (1)..(443): Homolog of NCBI NO: 421810 NR Description: acetyl-CoA C-acyltransferase (EC 2.3.1.16)
  misc_feature (1)..(443): Homolog of NCBI NO: 7433647 NR Description: acetyl-CoA C-acyltransferase (EC 2.3.1.16)
  misc_feature (1)..(443): Homolog of NCBI NO: 393707 NR Description: 3-ketoacyl-CoA thiolase; acetyl-CoA
  misc_feature (1)..(443): Homolog of NCBI NO: 7433644 NR Description: acetyl-CoA C-acyltransferase (EC 2.3.1.16)
  misc_feature (1)..(443): Homolog of NCBI NO: 15225798 NR Description: acetyl-CoA C-acyltransferase (3-ketoacyl-CoA
  misc_feature (1)..(443): Homolog of NCBI NO: 21537268 NR Description: putative acetyl-CoA acyltransferase [Arabidopsis
  misc_feature (1)..(443): Homolog of NCBI NO: 15219797 NR Description: acetyl-CoA C-acyltransferase (3-ketoacyl-CoA
MEKATERQRILLRHLQPSSSSDASLSASACLSKDSAAYQYGDDVVIVAAQRTALCKAKRGSFKDTFPDELLASVLRALIEKTNVNPSEVGDIVVGTVLGPGSQRASECRMAAFYAGFPETVPIRTVNRQCSSGLQAVADVAAAIKAGFYDIGIGAGLESMTTNPRGWKGSVNPNVKKFEQAHNCLLPMGITSENVAHRFNVSREEQDQAAVDSHRKAASATASGKFKDEITPVKTKIVDPKTGDEKPITVSVDDGIRPNTTLSGLAKLKPVFKEDGTTTAGNSSQLSDGAGAVLLMRRNVAMQKGLPILGVFRTFSAVGVDPAIMGVGPAVAIPAAVKAAGLELNDVDLFEINEAFASQFVYCRNKLGLDAEKINVNGGAIAIGHPLGATGARCVATLLHEMKRRGKDCRFGVVSMCIGSGMGAAAVFERGGGVDELCDVRKV

SEQ ID NO: 42026 - protein, 334 aa, Arabidopsis thaliana
  peptide (1)..(334): Ceres Seq. ID no. 13488785
  misc_feature (1)..(190): Pfam Name: Thiolase, N-terminal domain Pfam Description: Thiolase, N-terminal domain
  misc_feature (1)..(309): Homolog of NCBI NO: 7433645 NR Description: acetyl-CoA C-acyltransferase (EC 2.3.1.16) B
  misc_feature (1)..(309): Homolog of NCBI NO: 1129145 NR Description: 3-ketoacyl-CoA thiolase B; acetyl-CoA
  misc_feature (1)..(334): Homolog of NCBI NO: 25528365 NR Description: hypothetical protein [imported] - Arabidopsis
  misc_feature (1)..(334): Homolog of NCBI NO: 421810 NR Description: acetyl-CoA C-acyltransferase (EC 2.3.1.16)
  misc_feature (1)..(334): Homolog of NCBI NO: 7433647 NR Description: acetyl-CoA C-acyltransferase (EC 2.3.1.16)
  misc_feature (1)..(334): Homolog of NCBI NO: 393707 NR Description: 3-ketoacyl-CoA thiolase; acetyl-CoA
  misc_feature (1)..(334): Homolog of NCBI NO: 7433644 NR Description: acetyl-CoA C-acyltransferase (EC 2.3.1.16)
  misc_feature (1)..(334): Homolog of NCBI NO: 15225798 NR Description: acetyl-CoA C-acyltransferase (3-ketoacyl-CoA
  misc_feature (1)..(334): Homolog of NCBI NO: 21537268 NR Description: putative acetyl-CoA acyltransferase [Arabidopsis
  misc_feature (1)..(334): Homolog of NCBI NO: 15219797 NR Description: acetyl-CoA C-acyltransferase (3-ketoacyl-CoA
MAAFYAGFPETVPIRTVNRQCSSGLQAVADVAAAIKAGFYDIGIGAGLESMTTNPRGWKGSVNPNVKKFEQAHNCLLPMGITSENVAHRFNVSREEQDQAAVDSHRKAASATASGKFKDEITPVKTKIVDPKTGDEKPITVSVDDGIRPNTTLSGLAKLKPVFKEDGTTTAGNSSQLSDGAGAVLLMRRNVAMQKGLPILGVFRTFSAVGVDPAIMGVGPAVAIPAAVKAAGLELNDVDLFEINEAFASQFVYCRNKLGLDAEKINVNGGAIAIGHPLGATGARCVATLLHEMKRRGKDCRFGVVSMCIGSGMGAAAVFERGGGVDELCDVRKV

SEQ ID NO: 42027 - DNA, 2425 bp, Arabidopsis thaliana
  misc_feature (1)..(2425): Ceres Seq. ID no. 13488766
  misc_feature: MA Experiment ID: 108501 Result: Up-regulated in Transcription
  misc_feature: MA Experiment 108501 PARAMETER Experiment Name: At_ap2_floral_buds_cDNA_P Parameter: Plant Line Value: ap2 (Ler.)
  misc_feature: MA Experiment 108501 PARAMETER Experiment Name: At_ap2_floral_buds_cDNA_P Parameter: Tissue Value: Closed Flower
  misc_feature: MA Experiment ID: 108595 Result: Up-regulated in Transcription
  misc_feature: MA Experiment 108595 PARAMETER Experiment Name: At_Ler-pi_Ovule_cDNA_P Parameter: Plant Line Value: null
  misc_feature: MA Experiment ID: 20000184 Result: Down-regulated in Transcription
  misc_feature: MA Experiment 20000184 PARAMETER Experiment Name: At_Shoots__P Parameter: Age (day) Value: 7
  misc_feature: MA Experiment 20000184 PARAMETER Experiment Name: At_Shoots__P Parameter: Tissue Value: Shoots vs. Whole Plant
  misc_feature: MA Experiment ID: 20000185 Result: Down-regulated in Transcription
  misc_feature: MA Experiment 20000185 PARAMETER Experiment Name: At_Roots__P Parameter: Age (day) Value: 7 vs. 21
  misc_feature: MA Experiment 20000185 PARAMETER Experiment Name: At_Roots__P Parameter: Organism Value: A. thaliana
  misc_feature: MA Experiment 20000185 PARAMETER Experiment Name: At_Roots__P Parameter: Tissue Value: Roots vs. Whole Plant
  misc_feature: MA Experiment ID: 20000234 Result: Up-regulated in Transcription
  misc_feature: MA Experiment 20000234 PARAMETER Experiment Name: At_Siliques_P Parameter: Age (day) Value: 21
  misc_feature: MA Experiment 20000234 PARAMETER Experiment Name: At_Siliques_P Parameter: Organism Value: A. thaliana
  misc_feature: MA Experiment 20000234 PARAMETER Experiment Name: At_Siliques_P Parameter: Plant Line Value: WS
  misc_feature: MA Experiment 20000234 PARAMETER Experiment Name: At_Siliques_P Parameter: Tissue Value: Less Than 5mm Siliques vs. Whole Plant
  misc_feature: MA Experiment ID: 20000264 Result: Up-regulated in Transcription
  misc_feature: MA Experiment 20000264 PARAMETER Experiment Name: At_Open_Flower_P Parameter: Age (day) Value: 21
  misc_feature: MA Experiment 20000264 PARAMETER Experiment Name: At_Open_Flower_P Parameter: Plant Line Value: WS
  misc_feature: MA Experiment 20000264 PARAMETER Experiment Name: At_Open_Flower_P Parameter: Tissue Value: Open Flower vs. Whole Plant
  misc_feature: MA Experiment ID: 20000265 Result: Up-regulated in Transcription
  misc_feature: MA Experiment 20000265 PARAMETER Experiment Name: At_Open_Flower_P Parameter: Age (day) Value: 21
  misc_feature: MA Experiment 20000265 PARAMETER Experiment Name: At_Open_Flower_P Parameter: Plant Line Value: WS
  misc_feature: MA Experiment 20000265 PARAMETER Experiment Name: At_Open_Flower_P Parameter: Tissue Value: Closed Flower vs. Whole Plant
  misc_feature: MA Experiment ID: 20000286 Result: Up-regulated in Transcription
  misc_feature: MA Experiment 20000286 PARAMETER Experiment Name: At_Open_Flower_P Parameter: Age (day) Value: 21
  misc_feature: MA Experiment 20000286 PARAMETER Experiment Name: At_Open_Flower_P Parameter: Plant Line Value: WS
  misc_feature: MA Experiment 20000286 PARAMETER Experiment Name: At_Open_Flower_P Parameter: Tissue Value: Half Open vs. Whole Plant
  misc_feature: MA Experiment ID: 20000438 Result: Down-regulated in Transcription
  misc_feature: MA Experiment 20000438 PARAMETER Experiment Name: At_Shoots__P Parameter: Age (day) Value: 14
  misc_feature: MA Experiment 20000438 PARAMETER Experiment Name: At_Shoots__P Parameter: Tissue Value: Shoots vs. Whole Plant
  misc_feature: MA Experiment ID: 20000495 Result: Up-regulated in Transcription
  misc_feature: MA Experiment 20000495 PARAMETER Experiment Name: At_Guard_Cells_P Parameter: Harvest Date Value: 8/2/2002
  misc_feature: MA Experiment 20000495 PARAMETER Experiment Name: At_Guard_Cells_P Parameter: Organism Value: A. thaliana
  misc_feature: MA Experiment 20000495 PARAMETER Experiment Name: At_Guard_Cells_P Parameter: Tissue Value: Guard Cells vs. Leaves
gacaaaccacaacaaaaaatctcgagacaaagatacaatggcgagccgaaacagagcactcttctctgtttccactcttttcctctgtttcatcgtctgcatctccgagcaatcgaacaatcagtcttctccagtcttcgcctgtgacgtcaccggaaacccttctcttgccgggcttagattctgcaacgcggggttgagtatcaaagcccgagtcaccgatcttgtcggaagattgacgttggaggagaaaatcgggtttttgaccagcaaagctatcggcgttagccgccttgggattccgtcttacaaatggtggtcggaggcacttcatggcgtctctaacgtcggaggtggtagtcggttcaccggtcaagtccctggcgccactagcttcccacaagttatactcacggccgcttctttcaatgtgtctttgttccaagccattggcaaggttgtatcgacagaggcgagggcaatgtacaatgtgggatcagccggtttaacgttttggtcacctaatgtgaacatattccgggacccgagatggggaagaggacaagagactcccggtgaggacccaacactctcaagcaaatacgcagtggcctacgttaaaggtcttcaggagactgacggtggagatcctaaccgtctcaaagtcgctgcttgctgcaaacactacaccgcctatgatattgacaattggagaaatgtcaatcgtctcactttcaacgctgtggtaaaccaacaagatctggctgatacgtttcaaccaccgttcaagagctgtgtggttgatgggcatgttgctagtgtcatgtgttcttacaaccaagttaacggtaaaccaacatgtgccgatcctgatctgctttccggtgtgatccgcggacaatggcagctcaacggatacattgtttcggattgtgattcggtagatgtgttgttcagaaaacaacactatgctaagactccagaagaagctgtggccaaatctctattggcaggtttggatttgaattgtgatcatttcaatggtcaacacgcgatgggagcggtcaaggcgggtttggtaaacgaaacagctattgacaaagcgatttcaaacaatttcgcgactctgatgcgtttagggttcttcgatggagaccctaagaagcagctctacggtggtcttggtcctaaggatgtttgcaccgctgataaccaagaactcgcaagagatggcgcaagacaaggcattgtcttgcttaagaactctgctggttcgcttccgctctcaccttccgcaatcaaaacattagccgtgatcggaccaaacgccaatgccacagaaacaatgatcggaaactaccacggtgtaccatgcaagtacacaacgccgcttcagggattggcagaaacggtgtcgtctacctatcaactgggatgtaacgtggcttgcgtagatgcggatataggctcagccgtggatctggctgcttctgcggatgctgttgtgctcgtggtgggcgcagaccaatcaattgagagggagggccatgaccgagtcgacctgtatcttcctggaaagcagcaagagcttgtgactcgagttgctatggcagcaagaggaccggtggtgctagttatcatgtccggtggaggatttgacattacattcgccaagaatgataaaaagatcacaagcataatgtgggtcggataccctggtgaagccggtggtctcgccattgctgacgttatcttcggacgtcataatccgagtggaaatttgccgatgacgtggtatcctcaatcgtacgtggaaaaagttccgatgtcaaatatgaacatgagacccgacaaatcaaaggggtatccgggtcggagttacaggttttacaccggagaaaccgtatacgccttcgcagacgcgcttacctacactaaattcgaccatcagctaatcaaagcgccaagactcgtctctctcagtctcgacgagaaccacccttgccgatcatcggagtgccaatctttggacgcgatcggacctcactgcgagaacgccgttgagggaggatcggatttcgaggttcatttgaatgtaaagaacaccggagacagagcgggaagccacacggtgtttctgttcacgacgtcgccgcaagtacacggatctccgattaagcaactactaggatttgagaagattcgtctgggaaagagtgaagaagcggtggttaggtttaacgtcaatgtgtgtaaggatctgagtgtggttgatgagaccgggaagaggaaaatcgcgttaggtcatcatcttctccatgtaggaagcttgaaacactctttgaacattagtgtttgattcgacggctcgttttgtttttaacttaagatattaattatggtaataaaatgagatagcaatttt

SEQ ID NO: 42028 - protein, 785 aa, Arabidopsis thaliana
  peptide (1)..(785): Ceres Seq. ID no. 13488767
  misc_feature (416)..(646): Pfam Name: Glycosyl hydrolase family 3 C terminal domain Pfam Description: Glycosyl hydrolase family 3 C terminal domain
  misc_feature (416)..(646): Pfam Name: Glycosyl hydrolase family 3 C terminal domain Pfam Description: Glycosyl hydrolase family 3 C terminal domain
  misc_feature (13)..(782): Homolog of NCBI NO: 18025342 NR Description: beta-D-xylosidase [Hordeum vulgare]
  misc_feature (17)..(211): Homolog of NCBI NO: 15238197 NR Description: glycosyl hydrolase family 3 [Arabidopsis
  misc_feature (213)..(783): Homolog of NCBI NO: 15238197 NR Description: glycosyl hydrolase family 3 [Arabidopsis
  misc_feature (28)..(783): Homolog of NCBI NO: 25518461 NR Description: hypothetical protein T14P4.8 - Arabidopsis
  misc_feature (28)..(783): Homolog of NCBI NO: 18378991 NR Description: glycosyl hydrolase family 3 [Arabidopsis
  misc_feature (13)..(782): Homolog of NCBI NO: 18025342 NR Description: beta-D-xylosidase [Hordeum vulgare]
  misc_feature (213)..(783): Homolog of NCBI NO: 15238197 NR Description: glycosyl hydrolase family 3 [Arabidopsis
  misc_feature (28)..(783): Homolog of NCBI NO: 18378991 NR Description: glycosyl hydrolase family 3 [Arabidopsis
  misc_feature (43)..(785): Homolog of NCBI NO: 18025340 NR Description: alpha-L-arabinofuranosidase/beta-D-xylosidase
  misc_feature (27)..(785): Homolog of NCBI NO: 32481073 NR Description: auxin-induced beta-glucosidase [Chenopodium
  misc_feature (13)..(781): Homolog of NCBI NO: 15239867 NR Description: glycosyl hydrolase family 3 [Arabidopsis
  misc_feature (26)..(783): Homolog of NCBI NO: 15230897 NR Description: glycosyl hydrolase family 3 [Arabidopsis thaliana]
  misc_feature (26)..(783): Homolog of NCBI NO: 25453520 NR Description: beta-1,4-xylosidase [imported] - Arabidopsis
  misc_feature (28)..(783): Homolog of NCBI NO: 25518461 NR Description: hypothetical protein T14P4.8 - Arabidopsis
  misc_feature (17)..(211): Homolog of NCBI NO: 15238197 NR Description: glycosyl hydrolase family 3 [Arabidopsis
  misc_feature (26)..(783): Homolog of NCBI NO: 25453520 NR Description: beta-1,4-xylosidase [imported] - Arabidopsis
  misc_feature (26)..(783): Homolog of NCBI NO: 15230897 NR Description: glycosyl hydrolase family 3 [Arabidopsis thaliana]
  misc_feature (13)..(781): Homolog of NCBI NO: 15239867 NR Description: glycosyl hydrolase family 3 [Arabidopsis
  misc_feature (27)..(785): Homolog of NCBI NO: 32481073 NR Description: auxin-induced beta-glucosidase [Chenopodium
  misc_feature (43)..(785): Homolog of NCBI NO: 18025340 NR Description: alpha-L-arabinofuranosidase/beta-D-xylosidase
TNHNKKSRDKDTMASRNRALFSVSTLFLCFIVCISEQSNNQSSPVFACDVTGNPSLAGLRFCNAGLSIKARVTDLVGRLTLEEKIGFLTSKAIGVSRLGIPSYKWWSEALHGVSNVGGGSRFTGQVPGATSFPQVILTAASFNVSLFQAIGKVVSTEARAMYNVGSAGLTFWSPNVNIFRDPRWGRGQETPGEDPTLSSKYAVAYVKGLQETDGGDPNRLKVAACCKHYTAYDIDNWRNVNRLTFNAVVNQQDLADTFQPPFKSCVVDGHVASVMCSYNQVNGKPTCADPDLLSGVIRGQWQLNGYIVSDCDSVDVLFRKQHYAKTPEEAVAKSLLAGLDLNCDHFNGQHAMGAVKAGLVNETAIDKAISNNFATLMRLGFFDGDPKKQLYGGLGPKDVCTADNQELARDGARQGIVLLKNSAGSLPLSPSAIKTLAVIGPNANATETMIGNYHGVPCKYTTPLQGLAETVSSTYQLGCNVACVDADIGSAVDLAASADAVVLVVGADQSIEREGHDRVDLYLPGKQQELVTRVAMAARGPVVLVIMSGGGFDITFAKNDKKITSIMWVGYPGEAGGLAIADVIFGRHNPSGNLPMTWYPQSYVEKVPMSNMNMRPDKSKGYPGRSYRFYTGETVYAFADALTYTKFDHQLIKAPRLVSLSLDENHPCRSSECQSLDAIGPHCENAVEGGSDFEVHLNVKNTGDRAGSHTVFLFTTSPQVHGSPIKQLLGFEKIRLGKSEEAVVRFNVNVCKDLSVVDETGKRKIALGHHLLHVGSLKHSLNISV

SEQ ID NO: 42029 - protein, 773 aa, Arabidopsis thaliana
  peptide (1)..(773): Ceres Seq. ID no. 13488768
  misc_feature (404)..(634): Pfam Name: Glycosyl hydrolase family 3 C terminal domain Pfam Description: Glycosyl hydrolase family 3 C terminal domain
  misc_feature (404)..(634): Pfam Name: Glycosyl hydrolase family 3 C terminal domain Pfam Description: Glycosyl hydrolase family 3 C terminal domain
  misc_feature (1)..(770): Homolog of NCBI NO: 18025342 NR Description: beta-D-xylosidase [Hordeum vulgare]
  misc_feature (5)..(199): Homolog of NCBI NO: 15238197 NR Description: glycosyl hydrolase family 3 [Arabidopsis
  misc_feature (201)..(771): Homolog of NCBI NO: 15238197 NR Description: glycosyl hydrolase family 3 [Arabidopsis
  misc_feature (16)..(771): Homolog of NCBI NO: 25518461 NR Description: hypothetical protein T14P4.8 - Arabidopsis
  misc_feature (16)..(771): Homolog of NCBI NO: 18378991 NR Description: glycosyl hydrolase family 3 [Arabidopsis
  misc_feature (1)..(770): Homolog of NCBI NO: 18025342 NR Description: beta-D-xylosidase [Hordeum vulgare]
  misc_feature (201)..(771): Homolog of NCBI NO: 15238197 NR Description: glycosyl hydrolase family 3 [Arabidopsis
  misc_feature (16)..(771): Homolog of NCBI NO: 18378991 NR Description: glycosyl hydrolase family 3 [Arabidopsis
  misc_feature (31)..(773): Homolog of NCBI NO: 18025340 NR Description: alpha-L-arabinofuranosidase/beta-D-xylosidase
  misc_feature (15)..(773): Homolog of NCBI NO: 32481073 NR Description: auxin-induced beta-glucosidase [Chenopodium
  misc_feature (1)..(769): Homolog of NCBI NO: 15239867 NR Description: glycosyl hydrolase family 3 [Arabidopsis
  misc_feature (14)..(771): Homolog of NCBI NO: 15230897 NR Description: glycosyl hydrolase family 3 [Arabidopsis thaliana]
  misc_feature (14)..(771): Homolog of NCBI NO: 25453520 NR Description: beta-1,4-xylosidase [imported] - Arabidopsis
  misc_feature (16)..(771): Homolog of NCBI NO: 25518461 NR Description: hypothetical protein T14P4.8 - Arabidopsis
  misc_feature (5)..(199): Homolog of NCBI NO: 15238197 NR Description: glycosyl hydrolase family 3 [Arabidopsis
  misc_feature (14)..(771): Homolog of NCBI NO: 25453520 NR Description: beta-1,4-xylosidase [imported] - Arabidopsis
  misc_feature (14)..(771): Homolog of NCBI NO: 15230897 NR Description: glycosyl hydrolase family 3 [Arabidopsis thaliana]
  misc_feature (1)..(769): Homolog of NCBI NO: 15239867 NR Description: glycosyl hydrolase family 3 [Arabidopsis
  misc_feature (15)..(773): Homolog of NCBI NO: 32481073 NR Description: auxin-induced beta-glucosidase [Chenopodium
  misc_feature (31)..(773): Homolog of NCBI NO: 18025340 NR Description: alpha-L-arabinofuranosidase/beta-D-xylosidase
MASRNRALFSVSTLFLCFIVCISEQSNNQSSPVFACDVTGNPSLAGLRFCNAGLSIKARVTDLVGRLTLEEKIGFLTSKAIGVSRLGIPSYKWWSEALHGVSNVGGGSRFTGQVPGATSFPQVILTAASFNVSLFQAIGKVVSTEARAMYNVGSAGLTFWSPNVNIFRDPRWGRGQETPGEDPTLSSKYAVAYVKGLQETDGGDPNRLKVAACCKHYTAYDIDNWRNVNRLTFNAVVNQQDLADTFQPPFKSCVVDGHVASVMCSYNQVNGKPTCADPDLLSGVIRGQWQLNGYIVSDCDSVDVLFRKQHYAKTPEEAVAKSLLAGLDLNCDHFNGQHAMGAVKAGLVNETAIDKAISNNFATLMRLGFFDGDPKKQLYGGLGPKDVCTADNQELARDGARQGIVLLKNSAGSLPLSPSAIKTLAVIGPNANATETMIGNYHGVPCKYTTPLQGLAETVSSTYQLGCNVACVDADIGSAVDLAASADAVVLVVGADQSIEREGHDRVDLYLPGKQQELVTRVAMAARGPVVLVIMSGGGFDITFAKNDKKITSIMWVGYPGEAGGLAIADVIFGRHNPSGNLPMTWYPQSYVEKVPMSNMNMRPDKSKGYPGRSYRFYTGETVYAFADALTYTKFDHQLIKAPRLVSLSLDENHPCRSSECQSLDAIGPHCENAVEGGSDFEVHLNVKNTGDRAGSHTVFLFTTSPQVHGSPIKQLLGFEKIRLGKSEEAVVRFNVNVCKDLSVVDETGKRKIALGHHLLHVGSLKHSLNISV

SEQ ID NO: 42030 - protein, 625 aa, Arabidopsis thaliana
  peptide (1)..(625): Ceres Seq. ID no. 13488769
  misc_feature (256)..(486): Pfam Name: Glycosyl hydrolase family 3 C terminal domain Pfam Description: Glycosyl hydrolase family 3 C terminal domain
  misc_feature (256)..(486): Pfam Name: Glycosyl hydrolase family 3 C terminal domain Pfam Description: Glycosyl hydrolase family 3 C terminal domain
  misc_feature (1)..(622): Homolog of NCBI NO: 18025342 NR Description: beta-D-xylosidase [Hordeum vulgare]
  misc_feature (1)..(51): Homolog of NCBI NO: 15238197 NR Description: glycosyl hydrolase family 3 [Arabidopsis
  misc_feature (53)..(623): Homolog of NCBI NO: 15238197 NR Description: glycosyl hydrolase family 3 [Arabidopsis
  misc_feature (1)..(623): Homolog of NCBI NO: 25518461 NR Description: hypothetical protein T14P4.8 - Arabidopsis
  misc_feature (1)..(623): Homolog of NCBI NO: 18378991 NR Description: glycosyl hydrolase family 3 [Arabidopsis
  misc_feature (1)..(622): Homolog of NCBI NO: 18025342 NR Description: beta-D-xylosidase [Hordeum vulgare]
  misc_feature (53)..(623): Homolog of NCBI NO: 15238197 NR Description: glycosyl hydrolase family 3 [Arabidopsis
  misc_feature (1)..(623): Homolog of NCBI NO: 18378991 NR Description: glycosyl hydrolase family 3 [Arabidopsis
  misc_feature (1)..(625): Homolog of NCBI NO: 18025340 NR Description: alpha-L-arabinofuranosidase/beta-D-xylosidase
  misc_feature (1)..(625): Homolog of NCBI NO: 32481073 NR Description: auxin-induced beta-glucosidase [Chenopodium
  misc_feature (1)..(621): Homolog of NCBI NO: 15239867 NR Description: glycosyl hydrolase family 3 [Arabidopsis
  misc_feature (1)..(623): Homolog of NCBI NO: 15230897 NR Description: glycosyl hydrolase family 3 [Arabidopsis thaliana]
  misc_feature (1)..(623): Homolog of NCBI NO: 25453520 NR Description: beta-1,4-xylosidase [imported] - Arabidopsis
  misc_feature (1)..(623): Homolog of NCBI NO: 25518461 NR Description: hypothetical protein T14P4.8 - Arabidopsis
  misc_feature (1)..(51): Homolog of NCBI NO: 15238197 NR Description: glycosyl hydrolase family 3 [Arabidopsis
  misc_feature (1)..(623): Homolog of NCBI NO: 25453520 NR Description: beta-1,4-xylosidase [imported] - Arabidopsis
  misc_feature (1)..(623): Homolog of NCBI NO: 15230897 NR Description: glycosyl hydrolase family 3 [Arabidopsis thaliana]
  misc_feature (1)..(621): Homolog of NCBI NO: 15239867 NR Description: glycosyl hydrolase family 3 [Arabidopsis
  misc_feature (1)..(625): Homolog of NCBI NO: 32481073 NR Description: auxin-induced beta-glucosidase [Chenopodium
  misc_feature (1)..(625): Homolog of NCBI NO: 18025340 NR Description: alpha-L-arabinofuranosidase/beta-D-xylosidase
MYNVGSAGLTFWSPNVNIFRDPRWGRGQETPGEDPTLSSKYAVAYVKGLQETDGGDPNRLKVAACCKHYTAYDIDNWRNVNRLTFNAVVNQQDLADTFQPPFKSCVVDGHVASVMCSYNQVNGKPTCADPDLLSGVIRGQWQLNGYIVSDCDSVDVLFRKQHYAKTPEEAVAKSLLAGLDLNCDHFNGQHAMGAVKAGLVNETAIDKAISNNFATLMRLGFFDGDPKKQLYGGLGPKDVCTADNQELARDGARQGIVLLKNSAGSLPLSPSAIKTLAVIGPNANATETMIGNYHGVPCKYTTPLQGLAETVSSTYQLGCNVACVDADIGSAVDLAASADAVVLVVGADQSIEREGHDRVDLYLPGKQQELVTRVAMAARGPVVLVIMSGGGFDITFAKNDKKITSIMWVGYPGEAGGLAIADVIFGRHNPSGNLPMTWYPQSYVEKVPMSNMNMRPDKSKGYPGRSYRFYTGETVYAFADALTYTKFDHQLIKAPRLVSLSLDENHPCRSSECQSLDAIGPHCENAVEGGSDFEVHLNVKNTGDRAGSHTVFLFTTSPQVHGSPIKQLLGFEKIRLGKSEEAVVRFNVNVCKDLSVVDETGKRKIALGHHLLHVGSLKHSLNISV

SEQ ID NO: 42031 - DNA, 874 bp, Arabidopsis thaliana
  misc_feature (1)..(874): Ceres Seq. ID no. 12337723
  misc_feature: MA Experiment ID: 108462 Result: Up-regulated in Transcription
  misc_feature: MA Experiment 108462 PARAMETER Experiment Name: At_Germinating_Seeds_cDNA_P Parameter: Age (day) Value: 2 vs. 0
  misc_feature: MA Experiment 108462 PARAMETER Experiment Name: At_Germinating_Seeds_cDNA_P Parameter: Tissue Value: Germinating Seeds
  misc_feature: MA Experiment ID: 108464 Result: Up-regulated in Transcription
  misc_feature: MA Experiment 108464 PARAMETER Experiment Name: At_Germinating_Seeds_cDNA_P Parameter: Age (day) Value: 4 vs. 0
  misc_feature: MA Experiment 108464 PARAMETER Experiment Name: At_Germinating_Seeds_cDNA_P Parameter: Tissue Value: Germinating Seeds
  misc_feature: MA Experiment ID: 108569 Result: Down-regulated in Transcription
  misc_feature: MA Experiment 108569 PARAMETER Experiment Name: At_0.001%_MeJA__cDNA_P Parameter: Timepoint (hr) Value: 6
  misc_feature: MA Experiment 108569 PARAMETER Experiment Name: At_0.001%_MeJA__cDNA_P Parameter: Tissue Value: Aerial
  misc_feature: MA Experiment 108569 PARAMETER Experiment Name: At_0.001%_MeJA__cDNA_P Parameter: Treatment Value: 0.001% MeJA vs. No Treatment
  misc_feature: MA Experiment ID: 108594 Result: Down-regulated in Transcription
  misc_feature: MA Experiment 108594 PARAMETER Experiment Name: At_Ler-rhl_Root_cDNA_P Parameter: Plant Line Value: null
  misc_feature: MA Experiment ID: 108667 Result: Down-regulated in Transcription
  misc_feature: MA Experiment 108667 PARAMETER Experiment Name: At_2mM_SA_cDNA_P Parameter: Plant Line Value: WS
  misc_feature: MA Experiment 108667 PARAMETER Experiment Name: At_2mM_SA_cDNA_P Parameter: Timepoint (hr) Value: 1
  misc_feature: MA Experiment 108667 PARAMETER Experiment Name: At_2mM_SA_cDNA_P Parameter: Treatment Value: 2mM SA vs. No Treatment
  misc_feature: MA Experiment ID: 20000030 Result: Up-regulated in Transcription
  misc_feature: MA Experiment 20000030 PARAMETER Experiment Name: At_CS6630_Roots_cDNA_P Parameter: Plant Line Value: CS6630 vs. WS
  misc_feature: MA Experiment 20000030 PARAMETER Experiment Name: At_CS6630_Roots_cDNA_P Parameter: Tissue Value: Roots
  misc_feature: MA Experiment ID: 20000111 Result: Down-regulated in Transcription
  misc_feature: MA Experiment 20000111 PARAMETER Experiment Name: At_42deg_Heat_cDNA_P Parameter: Temperature (deg C) Value: 42 vs. 22
  misc_feature: MA Experiment 20000111 PARAMETER Experiment Name: At_42deg_Heat_cDNA_P Parameter: Timepoint (hr) Value: 6
  misc_feature: MA Experiment 20000111 PARAMETER Experiment Name: At_42deg_Heat_cDNA_P Parameter: Tissue Value: Aerial
  misc_feature: MA Experiment ID: 20000113 Result: Down-regulated in Transcription
  misc_feature: MA Experiment 20000113 PARAMETER Experiment Name: At_42deg_Heat_cDNA_P Parameter: Temperature (deg C) Value: 42 vs. 22
  misc_feature: MA Experiment 20000113 PARAMETER Experiment Name: At_42deg_Heat_cDNA_P Parameter: Timepoint (hr) Value: 8
  misc_feature: MA Experiment 20000113 PARAMETER Experiment Name: At_42deg_Heat_cDNA_P Parameter: Tissue Value: Aerial
  misc_feature: MA Experiment ID: 20000144 Result: Down-regulated in Transcription
  misc_feature: MA Experiment 20000144 PARAMETER Experiment Name: At_42deg_Heat_cDNA_P Parameter: Temperature (deg C) Value: 42 vs. 22
  misc_feature: MA Experiment 20000144 PARAMETER Experiment Name: At_42deg_Heat_cDNA_P Parameter: Timepoint (hr) Value: 1
  misc_feature: MA Experiment 20000144 PARAMETER Experiment Name: At_42deg_Heat_cDNA_P Parameter: Tissue Value: Aerial
  misc_feature: MA Experiment ID: 20000171 Result: Down-regulated in Transcription
  misc_feature: MA Experiment 20000171 PARAMETER Experiment Name: At_42deg_Heat_P Parameter: Age (day) Value: 14
  misc_feature: MA Experiment 20000171 PARAMETER Experiment Name: At_42deg_Heat_P Parameter: Organism Value: A. thaliana
  misc_feature: MA Experiment 20000171 PARAMETER Experiment Name: At_42deg_Heat_P Parameter: Plant Line Value: WS
  misc_feature: MA Experiment 20000171 PARAMETER Experiment Name: At_42deg_Heat_P Parameter: Temperature (deg C) Value: 42 vs. 22
  misc_feature: MA Experiment 20000171 PARAMETER Experiment Name: At_42deg_Heat_P Parameter: Timepoint (hr) Value: 1
  misc_feature: MA Experiment 20000171 PARAMETER Experiment Name: At_42deg_Heat_P Parameter: Tissue Value: Aerial
  misc_feature: MA Experiment ID: 20000173 Result: Down-regulated in Transcription
  misc_feature: MA Experiment 20000173 PARAMETER Experiment Name: At_42deg_Heat_P Parameter: Age (day) Value: 14
  misc_feature: MA Experiment 20000173 PARAMETER Experiment Name: At_42deg_Heat_P Parameter: Organism Value: A. thaliana
  misc_feature: MA Experiment 20000173 PARAMETER Experiment Name: At_42deg_Heat_P Parameter: Plant Line Value: WS
  misc_feature: MA Experiment 20000173 PARAMETER Experiment Name: At_42deg_Heat_P Parameter: Temperature (deg C) Value: 42 vs. 22
  misc_feature: MA Experiment 20000173 PARAMETER Experiment Name: At_42deg_Heat_P Parameter: Timepoint (hr) Value: 6
  misc_feature: MA Experiment 20000173 PARAMETER Experiment Name: At_42deg_Heat_P Parameter: Tissue Value: Aerial
  misc_feature: MA Experiment ID: 20000184 Result: Down-regulated in Transcription
  misc_feature: MA Experiment 20000184 PARAMETER Experiment Name: At_Shoots__P Parameter: Age (day) Value: 7
  misc_feature: MA Experiment 20000184 PARAMETER Experiment Name: At_Shoots__P Parameter: Tissue Value: Shoots vs. Whole Plant
  misc_feature: MA Experiment ID: 20000185 Result: Down-regulated in Transcription
  misc_feature: MA Experiment 20000185 PARAMETER Experiment Name: At_Roots__P Parameter: Age (day) Value: 7 vs. 21
  misc_feature: MA Experiment 20000185 PARAMETER Experiment Name: At_Roots__P Parameter: Organism Value: A. thaliana
  misc_feature: MA Experiment 20000185 PARAMETER Experiment Name: At_Roots__P Parameter: Tissue Value: Roots vs. Whole Plant
  misc_feature: MA Experiment ID: 20000227 Result: Down-regulated in Transcription
  misc_feature: MA Experiment 20000227 PARAMETER Experiment Name: At_Root-Tips-vs-Tops_P Parameter: Tissue Value: Root Tips vs. Root Tops
  misc_feature: MA Experiment ID: 20000234 Result: Down-regulated in Transcription
  misc_feature: MA Experiment 20000234 PARAMETER Experiment Name: At_Siliques_P Parameter: Age (day) Value: 21
  misc_feature: MA Experiment 20000234 PARAMETER Experiment Name: At_Siliques_P Parameter: Organism Value: A. thaliana
  misc_feature: MA Experiment 20000234 PARAMETER Experiment Name: At_Siliques_P Parameter: Plant Line Value: WS
  misc_feature: MA Experiment 20000234 PARAMETER Experiment Name: At_Siliques_P Parameter: Tissue Value: Less Than 5mm Siliques vs. Whole Plant
  misc_feature: MA Experiment ID: 20000235 Result: Down-regulated in Transcription
  misc_feature: MA Experiment 20000235 PARAMETER Experiment Name: At_Siliques_P Parameter: Age (day) Value: 21
  misc_feature: MA Experiment 20000235 PARAMETER Experiment Name: At_Siliques_P Parameter: Organism Value: A. thaliana
  misc_feature: MA Experiment 20000235 PARAMETER Experiment Name: At_Siliques_P Parameter: Plant Line Value: WS
  misc_feature: MA Experiment 20000235 PARAMETER Experiment Name: At_Siliques_P Parameter: Tissue Value: 5-10mm Siliques vs. Whole Plant
  misc_feature: MA Experiment ID: 20000264 Result: Down-regulated in Transcription
  misc_feature: MA Experiment 20000264 PARAMETER Experiment Name: At_Open_Flower_P Parameter: Age (day) Value: 21
  misc_feature: MA Experiment 20000264 PARAMETER Experiment Name: At_Open_Flower_P Parameter: Plant Line Value: WS
  misc_feature: MA Experiment 20000264 PARAMETER Experiment Name: At_Open_Flower_P Parameter: Tissue Value: Open Flower vs. Whole Plant
  misc_feature: MA Experiment ID: 20000265 Result: Down-regulated in Transcription
  misc_feature: MA Experiment 20000265 PARAMETER Experiment Name: At_Open_Flower_P Parameter: Age (day) Value: 21
  misc_feature: MA Experiment 20000265 PARAMETER Experiment Name: At_Open_Flower_P Parameter: Plant Line Value: WS
  misc_feature: MA Experiment 20000265 PARAMETER Experiment Name: At_Open_Flower_P Parameter: Tissue Value: Closed Flower vs. Whole Plant
  misc_feature: MA Experiment ID: 20000286 Result: Down-regulated in Transcription
  misc_feature: MA Experiment 20000286 PARAMETER Experiment Name: At_Open_Flower_P Parameter: Age (day) Value: 21
  misc_feature: MA Experiment 20000286 PARAMETER Experiment Name: At_Open_Flower_P Parameter: Plant Line Value: WS
  misc_feature: MA Experiment 20000286 PARAMETER Experiment Name: At_Open_Flower_P Parameter: Tissue Value: Half Open vs. Whole Plant
  misc_feature: MA Experiment ID: 20000438 Result: Down-regulated in Transcription
  misc_feature: MA Experiment 20000438 PARAMETER Experiment Name: At_Shoots__P Parameter: Age (day) Value: 14
  misc_feature: MA Experiment 20000438 PARAMETER Experiment Name: At_Shoots__P Parameter: Tissue Value: Shoots vs. Whole Plant
  misc_feature: MA Experiment ID: 20000439 Result: Down-regulated in Transcription
  misc_feature: MA Experiment 20000439 PARAMETER Experiment Name: At_Roots__P Parameter: Age (day) Value: 14 vs. 21
  misc_feature: MA Experiment 20000439 PARAMETER Experiment Name: At_Roots__P Parameter: Organism Value: A. thaliana
  misc_feature: MA Experiment 20000439 PARAMETER Experiment Name: At_Roots__P Parameter: Tissue Value: Roots vs. Whole Plant
  misc_feature: MA Experiment ID: 20000441 Result: Up-regulated in Transcription
  misc_feature: MA Experiment 20000441 PARAMETER Experiment Name: At_1uM_BR-BRZ__P Parameter: Tissue Value: Shoot Apices
  misc_feature: MA Experiment 20000441 PARAMETER Experiment Name: At_1uM_BR-BRZ__P Parameter: Treatment Value: 1uM BR vs. No Treatment
  misc_feature: MA Experiment ID: 20000443 Result: Up-regulated in Transcription
  misc_feature: MA Experiment 20000443 PARAMETER Experiment Name: At_1uM_BR-BRZ__P Parameter: Tissue Value: Shoot Apices
  misc_feature: MA Experiment 20000443 PARAMETER Experiment Name: At_1uM_BR-BRZ__P Parameter: Treatment Value: 1uM BRZ vs. No Treatment
  misc_feature: MA Experiment ID: 20000495 Result: Down-regulated in Transcription
  misc_feature: MA Experiment 20000495 PARAMETER Experiment Name: At_Guard_Cells_P Parameter: Harvest Date Value: 8/2/2002
  misc_feature: MA Experiment 20000495 PARAMETER Experiment Name: At_Guard_Cells_P Parameter: Organism Value: A. thaliana
  misc_feature: MA Experiment 20000495 PARAMETER Experiment Name: At_Guard_Cells_P Parameter: Tissue Value: Guard Cells vs. Leaves
  misc_feature: MA Experiment ID: 20000573 Result: Down-regulated in Transcription
  misc_feature: MA Experiment 20000573 PARAMETER Experiment Name: At_100uM_ABA_Mutants__P Parameter: Organism Value: A. thaliana
  misc_feature: MA Experiment 20000573 PARAMETER Experiment Name: At_100uM_ABA_Mutants__P Parameter: Plant Line Value: CS22 vs. Ler wt
  misc_feature: MA Experiment 20000573 PARAMETER Experiment Name: At_100uM_ABA_Mutants__P Parameter: Timepoint (hr) Value: N/A
  misc_feature: MA Experiment 20000573 PARAMETER Experiment Name: At_100uM_ABA_Mutants__P Parameter: Tissue Value: Whole Plant
  misc_feature: MA Experiment 20000573 PARAMETER Experiment Name: At_100uM_ABA_Mutants__P Parameter: Treatment Value: None
  misc_feature: MA Experiment ID: 20000574 Result: Down-regulated in Transcription
  misc_feature: MA Experiment 20000574 PARAMETER Experiment Name: At_100uM_ABA_Mutants__P Parameter: Organism Value: A. thaliana
  misc_feature: MA Experiment 20000574 PARAMETER Experiment Name: At_100uM_ABA_Mutants__P Parameter: Plant Line Value: CS23 vs. Ler wt
  misc_feature: MA Experiment 20000574 PARAMETER Experiment Name: At_100uM_ABA_Mutants__P Parameter: Timepoint (hr) Value: N/A
  misc_feature: MA Experiment 20000574 PARAMETER Experiment Name: At_100uM_ABA_Mutants__P Parameter: Tissue Value: Whole Plant
  misc_feature: MA Experiment 20000574 PARAMETER Experiment Name: At_100uM_ABA_Mutants__P Parameter: Treatment Value: None
  misc_feature: MA Experiment ID: 20000794 Result: Down-regulated in Transcription
  misc_feature: MA Experiment 20000794 PARAMETER Experiment Name: At_Petals_P Parameter: Age (day) Value: 23-25 days
  misc_feature: MA Experiment 20000794 PARAMETER Experiment Name: At_Petals_P Parameter: Plant Line Value: WS
  misc_feature: MA Experiment 20000794 PARAMETER Experiment Name: At_Petals_P Parameter: Tissue Value: Petals vs. Whole plant
  misc_feature: MA Experiment ID: 20001556 Result: Down-regulated in Transcription
  misc_feature: MA Experiment 20001556 PARAMETER Experiment Name: At_Drought_Soil_Dry_P Parameter: Age (day) Value: 26
  misc_feature: MA Experiment 20001556 PARAMETER Experiment Name: At_Drought_Soil_Dry_P Parameter: Organism Value: A. thaliana
  misc_feature: MA Experiment 20001556 PARAMETER Experiment Name: At_Drought_Soil_Dry_P Parameter: Plant Line Value: WS
  misc_feature: MA Experiment 20001556 PARAMETER Experiment Name: At_Drought_Soil_Dry_P Parameter: Post Timepoint (hr) Value: None
  misc_feature: MA Experiment 20001556 PARAMETER Experiment Name: At_Drought_Soil_Dry_P Parameter: Post-Treatment Value: None
  misc_feature: MA Experiment 20001556 PARAMETER Experiment Name: At_Drought_Soil_Dry_P Parameter: Timepoint (day) Value: 12
  misc_feature: MA Experiment 20001556 PARAMETER Experiment Name: At_Drought_Soil_Dry_P Parameter: Treatment Value: Drought vs. No Drought
  misc_feature: MA Experiment ID: 20001557 Result: Down-regulated in Transcription
  misc_feature: MA Experiment 20001557 PARAMETER Experiment Name: At_Drought_Soil_Dry_P Parameter: Age (day) Value: 27
  misc_feature: MA Experiment 20001557 PARAMETER Experiment Name: At_Drought_Soil_Dry_P Parameter: Organism Value: A. thaliana
  misc_feature: MA Experiment 20001557 PARAMETER Experiment Name: At_Drought_Soil_Dry_P Parameter: Plant Line Value: WS
  misc_feature: MA Experiment 20001557 PARAMETER Experiment Name: At_Drought_Soil_Dry_P Parameter: Post Timepoint (hr) Value: 3
  misc_feature: MA Experiment 20001557 PARAMETER Experiment Name: At_Drought_Soil_Dry_P Parameter: Post-Treatment Value: Re-Water vs. No Drought
  misc_feature: MA Experiment 20001557 PARAMETER Experiment Name: At_Drought_Soil_Dry_P Parameter: Timepoint (day) Value: 13
  misc_feature: MA Experiment 20001557 PARAMETER Experiment Name: At_Drought_Soil_Dry_P Parameter: Treatment Value: Drought vs. No Drought
  misc_feature: MA Experiment ID: 20001558 Result: Down-regulated in Transcription
  misc_feature: MA Experiment 20001558 PARAMETER Experiment Name: At_Drought_Soil_Dry_P Parameter: Age (day) Value: 27
  misc_feature: MA Experiment 20001558 PARAMETER Experiment Name: At_Drought_Soil_Dry_P Parameter: Organism Value: A. thaliana
  misc_feature: MA Experiment 20001558 PARAMETER Experiment Name: At_Drought_Soil_Dry_P Parameter: Plant Line Value: WS
  misc_feature: MA Experiment 20001558 PARAMETER Experiment Name: At_Drought_Soil_Dry_P Parameter: Post Timepoint (hr) Value: 6
  misc_feature: MA Experiment 20001558 PARAMETER Experiment Name: At_Drought_Soil_Dry_P Parameter: Post-Treatment Value: Re-Water vs. No Drought
  misc_feature: MA Experiment 20001558 PARAMETER Experiment Name: At_Drought_Soil_Dry_P Parameter: Timepoint (day) Value: 13
  misc_feature: MA Experiment 20001558 PARAMETER Experiment Name: At_Drought_Soil_Dry_P Parameter: Treatment Value: Drought vs. No Drought
  misc_feature: MA Experiment ID: 20001559 Result: Down-regulated in Transcription
  misc_feature: MA Experiment 20001559 PARAMETER Experiment Name: At_Drought_Soil_Dry_P Parameter: Age (day) Value: 28
  misc_feature: MA Experiment 20001559 PARAMETER Experiment Name: At_Drought_Soil_Dry_P Parameter: Organism Value: A. thaliana
  misc_feature: MA Experiment 20001559 PARAMETER Experiment Name: At_Drought_Soil_Dry_P Parameter: Plant Line Value: WS
  misc_feature: MA Experiment 20001559 PARAMETER Experiment Name: At_Drought_Soil_Dry_P Parameter: Post Timepoint (hr) Value: 29
  misc_feature: MA Experiment 20001559 PARAMETER Experiment Name: At_Drought_Soil_Dry_P Parameter: Post-Treatment Value: Re-Water vs. No Drought
  misc_feature: MA Experiment 20001559 PARAMETER Experiment Name: At_Drought_Soil_Dry_P Parameter: Timepoint (day) Value: 14
  misc_feature: MA Experiment 20001559 PARAMETER Experiment Name: At_Drought_Soil_Dry_P Parameter: Treatment Value: Drought vs. No Drought
  misc_feature: MA Experiment ID: 20001560 Result: Down-regulated in Transcription
  misc_feature: MA Experiment 20001560 PARAMETER Experiment Name: At_Drought_Soil_Dry_P Parameter: Age (day) Value: 28
  misc_feature: MA Experiment 20001560 PARAMETER Experiment Name: At_Drought_Soil_Dry_P Parameter: Organism Value: A. thaliana
  misc_feature: MA Experiment 20001560 PARAMETER Experiment Name: At_Drought_Soil_Dry_P Parameter: Plant Line Value: WS
  misc_feature: MA Experiment 20001560 PARAMETER Experiment Name: At_Drought_Soil_Dry_P Parameter: Post Timepoint (hr) Value: None
  misc_feature: MA Experiment 20001560 PARAMETER Experiment Name: At_Drought_Soil_Dry_P Parameter: Post-Treatment Value: None
  misc_feature: MA Experiment 20001560 PARAMETER Experiment Name: At_Drought_Soil_Dry_P Parameter: Timepoint (day) Value: 14
  misc_feature: MA Experiment 20001560 PARAMETER Experiment Name: At_Drought_Soil_Dry_P Parameter: Treatment Value: Drought vs. No Drought
  misc_feature: MA Experiment ID: 20001904 Result: Down-regulated in Transcription
  misc_feature: MA Experiment 20001904 PARAMETER Experiment Name: At_Drought_Reproduction_P Parameter: Age (day) Value: 37
  misc_feature: MA Experiment 20001904 PARAMETER Experiment Name: At_Drought_Reproduction_P Parameter: Organism Value: A. thaliana
  misc_feature: MA Experiment 20001904 PARAMETER Experiment Name: At_Drought_Reproduction_P Parameter: Plant Line Value: WS
  misc_feature: MA Experiment 20001904 PARAMETER Experiment Name: At_Drought_Reproduction_P Parameter: Timepoint (day) Value: 7
  misc_feature: MA Experiment 20001904 PARAMETER Experiment Name: At_Drought_Reproduction_P Parameter: Tissue Value: Rosettes
  misc_feature: MA Experiment 20001904 PARAMETER Experiment Name: At_Drought_Reproduction_P Parameter: Treatment Value: Drought vs. No Drought
aaacaaaaacagagcaaagtttttcaaaaaaaaaaaaaacagagccacgaagaaatttacagaaaattcaaaaccatcgataaagatgggagatgtgattttgttcattgatgatacgaaatcgaaagtgagaatcacgcgttgcagaatttgccatgaagaagaagaagaaagtttcttcgaagttccatgtgcttgttcaggcaccgttaagttcgcacatagaaactgcatacaacgttggtgtaatgaaaaaggaaacacaacttgtgaaatctgtcttcaggtgtataaagatggatatacagcagttttaaaacaatcgaaattgattgaacaagaagtcacaatcagagtaaatggacgaagaagaagaagaagtagaagattagtgtctatagctgaatccgatatttctcagtgtaattctgttgctgatagaggagcttcgttttgcagatcattaacttttactctttcagtatttttgctgatgaaacatacattcgatgtgatttacggaaccgaagaatatccattctctgtatttacggtactaacattaaaggccattgggatactattgccaatgttcattataattcgaacaatctcaactattcagaaaactcttcgtcgtcgtcatcaatatcctgaatctgaagaagaagataggttgagctctgacgacgacgatgacttggaagaagaagatgaagagcaacaacaacatttggcttaaaccttcaaattaacgaacttaacgaaattttttctttctttctttctaattctttctttttttaaacgaaaagcatctatttgatgctcatggtcatttttactcacaaagtcaaataaaaaacgtaaattt

SEQ ID NO: 42032 - protein, 246 aa, Arabidopsis thaliana
  peptide (1)..(246): Ceres Seq. ID no. 12337724
  misc_feature (48)..(93): Pfam Name: Zinc finger, C3HC4 type (RING finger) Pfam Description: Zinc finger, C3HC4 type (RING finger)
  misc_feature (37)..(216): Homolog of NCBI NO: 26451292 NR Description: unknown protein [Arabidopsis thaliana]
  misc_feature (37)..(216): Homolog of NCBI NO: 18424590 NR Description: expressed protein
  misc_feature (37)..(216): Homolog of NCBI NO: 15223693 NR Description: nucleoside triphosphatase, putative
  misc_feature (37)..(216): Homolog of NCBI NO: 15227065 NR Description: unknown protein
  misc_feature (45)..(238): Homolog of NCBI NO: 22325409 NR Description: similar to nucleoside triphosphatase, putative
  misc_feature (37)..(244): Homolog of NCBI NO: 34905532 NR Description: B1146F03.23 [Oryza sativa (japonica
  misc_feature (29)..(95): Homolog of NCBI NO: 15217818 NR Description: hypothetical protein; protein id: At1g02610.1
  misc_feature (146)..(246): Homolog of NCBI NO: 15217818 NR Description: hypothetical protein; protein id: At1g02610.1
  misc_feature (29)..(246): Homolog of NCBI NO: 25518349 NR Description: hypothetical protein T14P4.10 - Arabidopsis
  misc_feature (29)..(246): Homolog of NCBI NO: 18411826 NR Description: Expressed protein
NKNRAKFFKKKKNRATKKFTENSKPSIKMGDVILFIDDTKSKVRITRCRICHEEEEESFFEVPCACSGTVKFAHRNCIQRWCNEKGNTTCEICLQVYKDGYTAVLKQSKLIEQEVTIRVNGRRRRRSRRLVSIAESDISQCNSVADRGASFCRSLTFTLSVFLLMKHTFDVIYGTEEYPFSVFTVLTLKAIGILLPMFIIIRTISTIQKTLRRRHQYPESEEEDRLSSDDDDDLEEEDEEQQQHLA

SEQ ID NO: 42033 - protein, 218 aa, Arabidopsis thaliana
  peptide (1)..(218): Ceres Seq. ID no. 12337725
  misc_feature (20)..(65): Pfam Name: Zinc finger, C3HC4 type (RING finger) Pfam Description: Zinc finger, C3HC4 type (RING finger)
  misc_feature (9)..(188): Homolog of NCBI NO: 26451292 NR Description: unknown protein [Arabidopsis thaliana]
  misc_feature (9)..(188): Homolog of NCBI NO: 18424590 NR Description: expressed protein
  misc_feature (9)..(188): Homolog of NCBI NO: 15223693 NR Description: nucleoside triphosphatase, putative
  misc_feature (9)..(188): Homolog of NCBI NO: 15227065 NR Description: unknown protein
  misc_feature (17)..(210): Homolog of NCBI NO: 22325409 NR Description: similar to nucleoside triphosphatase, putative
  misc_feature (9)..(216): Homolog of NCBI NO: 34905532 NR Description: B1146F03.23 [Oryza sativa (japonica
  misc_feature (1)..(67): Homolog of NCBI NO: 15217818 NR Description: hypothetical protein; protein id: At1g02610.1
  misc_feature (118)..(218): Homolog of NCBI NO: 15217818 NR Description: hypothetical protein; protein id: At1g02610.1
  misc_feature (1)..(218): Homolog of NCBI NO: 25518349 NR Description: hypothetical protein T14P4.10 - Arabidopsis
  misc_feature (1)..(218): Homolog of NCBI NO: 18411826 NR Description: Expressed protein
MGDVILFIDDTKSKVRITRCRICHEEEEESFFEVPCACSGTVKFAHRNCIQRWCNEKGNTTCEICLQVYKDGYTAVLKQSKLIEQEVTIRVNGRRRRRSRRLVSIAESDISQCNSVADRGASFCRSLTFTLSVFLLMKHTFDVIYGTEEYPFSVFTVLTLKAIGILLPMFIIIRTISTIQKTLRRRHQYPESEEEDRLSSDDDDDLEEEDEEQQQHLA

SEQ ID NO: 42034 - DNA, 703 bp, Arabidopsis thaliana
  misc_feature (1)..(703): Ceres Seq. ID no. 12325894
  misc_feature: MA Experiment ID: 20000213 Result: Up-regulated in Transcription
  misc_feature: MA Experiment 20000213 PARAMETER Experiment Name: At_4deg_Cold_P Parameter: Timepoint (hr) Value: 2
  misc_feature: MA Experiment ID: 20000437 Result: Up-regulated in Transcription
  misc_feature: MA Experiment 20000437 PARAMETER Experiment Name: At_Drought_P Parameter: Age (day) Value: 8
  misc_feature: MA Experiment 20000437 PARAMETER Experiment Name: At_Drought_P Parameter: Organism Value: A. thaliana
  misc_feature: MA Experiment 20000437 PARAMETER Experiment Name: At_Drought_P Parameter: Plant Line Value: WS
  misc_feature: MA Experiment 20000437 PARAMETER Experiment Name: At_Drought_P Parameter: Timepoint (hr) Value: 24
  misc_feature: MA Experiment 20000437 PARAMETER Experiment Name: At_Drought_P Parameter: Tissue Value: Whole Plant
  misc_feature: MA Experiment 20000437 PARAMETER Experiment Name: At_Drought_P Parameter: Treatment Value: Drought vs. No Drought
  misc_feature: MA Experiment ID: 20000438 Result: Down-regulated in Transcription
  misc_feature: MA Experiment 20000438 PARAMETER Experiment Name: At_Shoots__P Parameter: Age (day) Value: 14
  misc_feature: MA Experiment 20000438 PARAMETER Experiment Name: At_Shoots__P Parameter: Tissue Value: Shoots vs. Whole Plant
  misc_feature: MA Experiment ID: 20001451 Result: Up-regulated in Transcription
  misc_feature: MA Experiment 20001451 PARAMETER Experiment Name: At_Far-red-induction_P Parameter: Age (day) Value: 7
  misc_feature: MA Experiment 20001451 PARAMETER Experiment Name: At_Far-red-induction_P Parameter: Light Value: Far-red vs. White
  misc_feature: MA Experiment 20001451 PARAMETER Experiment Name: At_Far-red-induction_P Parameter: Organism Value: A. thaliana
  misc_feature: MA Experiment 20001451 PARAMETER Experiment Name: At_Far-red-induction_P Parameter: Plant Line Value: Columbia
  misc_feature: MA Experiment 20001451 PARAMETER Experiment Name: At_Far-red-induction_P Parameter: Timepoint (hr) Value: 24
  misc_feature: MA Experiment 20001451 PARAMETER Experiment Name: At_Far-red-induction_P Parameter: Tissue Value: Whole Plant
  misc_feature: MA Experiment ID: 20001557 Result: Up-regulated in Transcription
  misc_feature: MA Experiment 20001557 PARAMETER Experiment Name: At_Drought_Soil_Dry_P Parameter: Age (day) Value: 27
  misc_feature: MA Experiment 20001557 PARAMETER Experiment Name: At_Drought_Soil_Dry_P Parameter: Organism Value: A. thaliana
  misc_feature: MA Experiment 20001557 PARAMETER Experiment Name: At_Drought_Soil_Dry_P Parameter: Plant Line Value: WS
  misc_feature: MA Experiment 20001557 PARAMETER Experiment Name: At_Drought_Soil_Dry_P Parameter: Post Timepoint (hr) Value: 3
  misc_feature: MA Experiment 20001557 PARAMETER Experiment Name: At_Drought_Soil_Dry_P Parameter: Post-Treatment Value: Re-Water vs. No Drought
  misc_feature: MA Experiment 20001557 PARAMETER Experiment Name: At_Drought_Soil_Dry_P Parameter: Timepoint (day) Value: 13
  misc_feature: MA Experiment 20001557 PARAMETER Experiment Name: At_Drought_Soil_Dry_P Parameter: Treatment Value: Drought vs. No Drought
acacatctcactgctcactactctcactgtaatcccttagatcttcttttcaaatttcaatggcgtccggtgatgttgagtatcggtgcttcgttggaggtctagcatgggccactgatgacagagctcttgagactgccttcgctcaatacggcgacgttattgattccaagatcattaacgatcgtgagactggaagatcaaggggattcggattcgtcaccttcaaggatgagaaagccatgaaggatgcgattgagggaatgaacggacaagatctcgatggccgtagcatcactgttaacgaggctcagtcacgaggaagcggtggcggcggaggccaccgtggaggtggtggcggtggataccgcagcggcggtggtggaggttactccggtggaggaagacgtgagggaggaggaggatacggtggtggtgaaggaggaggttacggaggaagcggtggtggtggaggatggtaattcctttaattaggtttgggattaccaatgaatgttctctctctcgcttgttatgcttctacttggttttgtgtgttctctattttgttctggttctgctttagatttgatgtaacagttcgtgattaggtattttggtatctggaaacgtaatgttaagtcacttgtcattctctaaataacaaatttcttcggagatattatctctgttgattgattct

SEQ ID NO: 42035 - protein, 140 aa, Arabidopsis thaliana
  peptide (1)..(140): Ceres Seq. ID no. 12325895
  misc_feature (10)..(81): Pfam Name: RNA recognition motif. (a.k.a. RRM, RBD, or RNP domain) Pfam Description: RNA recognition motif. (a.k.a. RRM, RBD, or RNP
  misc_feature (5)..(138): Homolog of NCBI NO: 2119042 NR Description: glycine-rich RNA-binding protein RGP-1a - wood
  misc_feature (5)..(139): Homolog of NCBI NO: 15235002 NR Description: glycine-rich RNA-binding protein 8 (GRP8)
  misc_feature (1)..(139): Homolog of NCBI NO: 34851124 NR Description: putative glycine-rich RNA-binding protein [Prunus
  misc_feature (5)..(139): Homolog of NCBI NO: 544426 NR Description: Glycine-rich RNA-binding protein
  misc_feature (1)..(138): Homolog of NCBI NO: 2267567 NR Description: glycine-rich RNA binding protein 1 [Pelargonium x
  misc_feature (1)..(139): Homolog of NCBI NO: 1346181 NR Description: Glycine-rich RNA-binding protein GRP2A
  misc_feature (1)..(139): Homolog of NCBI NO: 1346180 NR Description: Glycine-rich RNA-binding protein GRP1A
  misc_feature (1)..(139): Homolog of NCBI NO: 21553354 NR Description: glycine-rich RNA binding protein 7 [Arabidopsis
  misc_feature (1)..(139): Homolog of NCBI NO: 15226605 NR Description: glycine-rich RNA binding protein AtGRP7
  misc_feature (1)..(140): Homolog of NCBI NO: 30681492 NR Description: glycine-rich RNA-binding protein (AtGRP7)
MASGDVEYRCFVGGLAWATDDRALETAFAQYGDVIDSKIINDRETGRSRGFGFVTFKDEKAMKDAIEGMNGQDLDGRSITVNEAQSRGSGGGGGHRGGGGGGYRSGGGGGYSGGGRREGGGGYGGGEGGGYGGSGGGGGW

SEQ ID NO: 42036 - protein, 79 aa, Arabidopsis thaliana
  peptide (1)..(79): Ceres Seq. ID no. 12325896
  misc_feature (15)..(78): Pfam Name: Herpesvirus large structural phosphoprotein UL32 Pfam Description: Herpesvirus large structural phosphoprotein UL32
  misc_feature (1)..(77): Homolog of NCBI NO: 2119042 NR Description: glycine-rich RNA-binding protein RGP-1a - wood
  misc_feature (1)..(78): Homolog of NCBI NO: 15235002 NR Description: glycine-rich RNA-binding protein 8 (GRP8)
  misc_feature (1)..(78): Homolog of NCBI NO: 34851124 NR Description: putative glycine-rich RNA-binding protein [Prunus
  misc_feature (1)..(78): Homolog of NCBI NO: 544426 NR Description: Glycine-rich RNA-binding protein
  misc_feature (1)..(77): Homolog of NCBI NO: 2267567 NR Description: glycine-rich RNA binding protein 1 [Pelargonium x
  misc_feature (1)..(78): Homolog of NCBI NO: 1346181 NR Description: Glycine-rich RNA-binding protein GRP2A
  misc_feature (1)..(78): Homolog of NCBI NO: 1346180 NR Description: Glycine-rich RNA-binding protein GRP1A
  misc_feature (1)..(78): Homolog of NCBI NO: 21553354 NR Description: glycine-rich RNA binding protein 7 [Arabidopsis
  misc_feature (1)..(78): Homolog of NCBI NO: 15226605 NR Description: glycine-rich RNA binding protein AtGRP7
  misc_feature (1)..(79): Homolog of NCBI NO: 30681492 NR Description: glycine-rich RNA-binding protein (AtGRP7)
MKDAIEGMNGQDLDGRSITVNEAQSRGSGGGGGHRGGGGGGYRSGGGGGYSGGGRREGGGGYGGGEGGGYGGSGGGGGW

SEQ ID NO: 42037 - protein, 72 aa, Arabidopsis thaliana
  peptide (1)..(72): Ceres Seq. ID no. 12325897
  misc_feature (8)..(71): Pfam Name: Herpesvirus large structural phosphoprotein UL32 Pfam Description: Herpesvirus large structural phosphoprotein UL32
  misc_feature (1)..(70): Homolog of NCBI NO: 2119042 NR Description: glycine-rich RNA-binding protein RGP-1a - wood
  misc_feature (1)..(71): Homolog of NCBI NO: 15235002 NR Description: glycine-rich RNA-binding protein 8 (GRP8)
  misc_feature (1)..(71): Homolog of NCBI NO: 34851124 NR Description: putative glycine-rich RNA-binding protein [Prunus
  misc_feature (1)..(71): Homolog of NCBI NO: 544426 NR Description: Glycine-rich RNA-binding protein
  misc_feature (1)..(70): Homolog of NCBI NO: 2267567 NR Description: glycine-rich RNA binding protein 1 [Pelargonium x
  misc_feature (1)..(71): Homolog of NCBI NO: 1346181 NR Description: Glycine-rich RNA-binding protein GRP2A
  misc_feature (1)..(71): Homolog of NCBI NO: 1346180 NR Description: Glycine-rich RNA-binding protein GRP1A
  misc_feature (1)..(71): Homolog of NCBI NO: 21553354 NR Description: glycine-rich RNA binding protein 7 [Arabidopsis
  misc_feature (1)..(71): Homolog of NCBI NO: 15226605 NR Description: glycine-rich RNA binding protein AtGRP7
  misc_feature (1)..(72): Homolog of NCBI NO: 30681492 NR Description: glycine-rich RNA-binding protein (AtGRP7)
MNGQDLDGRSITVNEAQSRGSGGGGGHRGGGGGGYRSGGGGGYSGGGRREGGGGYGGGEGGGYGGSGGGGGW

SEQ ID NO: 42038 - DNA, 1630 bp, Arabidopsis thaliana; identical to SEQ ID NO: 21124
  misc_feature (1)..(1630): Ceres Seq. ID no. 13495859
  misc_feature: MA Experiment ID: 108435 Result: Down-regulated in Transcription
  misc_feature: MA Experiment 108435 PARAMETER Experiment Name: At_stm_Mutants_cDNA_P Parameter: Plant Line Value: wt Landsburg vs stm
  misc_feature: MA Experiment 108435 PARAMETER Experiment Name: At_stm_Mutants_cDNA_P Parameter: Tissue Value: Shoot Apical Meristem Region
  misc_feature: MA Experiment ID: 108462 Result: Up-regulated in Transcription
  misc_feature: MA Experiment 108462 PARAMETER Experiment Name: At_Germinating_Seeds_cDNA_P Parameter: Age (day) Value: 2 vs. 0
  misc_feature: MA Experiment 108462 PARAMETER Experiment Name: At_Germinating_Seeds_cDNA_P Parameter: Tissue Value: Germinating Seeds
  misc_feature: MA Experiment ID: 108464 Result: Up-regulated in Transcription
  misc_feature: MA Experiment 108464 PARAMETER Experiment Name: At_Germinating_Seeds_cDNA_P Parameter: Age (day) Value: 4 vs. 0
  misc_feature: MA Experiment 108464 PARAMETER Experiment Name: At_Germinating_Seeds_cDNA_P Parameter: Tissue Value: Germinating Seeds
  misc_feature: MA Experiment ID: 108577 Result: Up-regulated in Transcription
  misc_feature: MA Experiment 108577 PARAMETER Experiment Name: At_42deg_Heat_cDNA_P Parameter: Temperature (deg C) Value: 42 vs. 22
  misc_feature: MA Experiment 108577 PARAMETER Experiment Name: At_42deg_Heat_cDNA_P Parameter: Timepoint (hr) Value: 6
  misc_feature: MA Experiment 108577 PARAMETER Experiment Name: At_42deg_Heat_cDNA_P Parameter: Tissue Value: Aerial
  misc_feature: MA Experiment ID: 108594 Result: Up-regulated in Transcription
  misc_feature: MA Experiment 108594 PARAMETER Experiment Name: At_Ler-rhl_Root_cDNA_P Parameter: Plant Line Value: null
  misc_feature: MA Experiment ID: 108595 Result: Down-regulated in Transcription
  misc_feature: MA Experiment 108595 PARAMETER Experiment Name: At_Ler-pi_Ovule_cDNA_P Parameter: Plant Line Value: null
  misc_feature: MA Experiment ID: 20000071 Result: Down-regulated in Transcription
  misc_feature: MA Experiment 20000071 PARAMETER Experiment Name: At_100uM_ABA_Mutants_cDNA_P Parameter: Plant Line Value: CS8104
  misc_feature: MA Experiment 20000071 PARAMETER Experiment Name: At_100uM_ABA_Mutants_cDNA_P Parameter: Timepoint (hr) Value: 6
  misc_feature: MA Experiment 20000071 PARAMETER Experiment Name: At_100uM_ABA_Mutants_cDNA_P Parameter: Tissue Value: Aerial
  misc_feature: MA Experiment 20000071 PARAMETER Experiment Name: At_100uM_ABA_Mutants_cDNA_P Parameter: Treatment Value: 100uM ABA vs. No Treatment
  misc_feature: MA Experiment ID: 20000086 Result: Down-regulated in Transcription
  misc_feature: MA Experiment 20000086 PARAMETER Experiment Name: At_100uM_ABA_Mutants_cDNA_P Parameter: Plant Line Value: CS22
  misc_feature: MA Experiment 20000086 PARAMETER Experiment Name: At_100uM_ABA_Mutants_cDNA_P Parameter: Timepoint (hr) Value: 6
  misc_feature: MA Experiment 20000086 PARAMETER Experiment Name: At_100uM_ABA_Mutants_cDNA_P Parameter: Tissue Value: Aerial
  misc_feature: MA Experiment 20000086 PARAMETER Experiment Name: At_100uM_ABA_Mutants_cDNA_P Parameter: Treatment Value: 100uM ABA vs. No Treatment
  misc_feature: MA Experiment ID: 20000089 Result: Down-regulated in Transcription
  misc_feature: MA Experiment ID: 20000090 Result: Down-regulated in Transcription
  misc_feature: MA Experiment ID: 20000113 Result: Up-regulated in Transcription
  misc_feature: MA Experiment 20000113 PARAMETER Experiment Name: At_42deg_Heat_cDNA_P Parameter: Temperature (deg C) Value: 42 vs. 22
  misc_feature: MA Experiment 20000113 PARAMETER Experiment Name: At_42deg_Heat_cDNA_P Parameter: Timepoint (hr) Value: 8
  misc_feature: MA Experiment 20000113 PARAMETER Experiment Name: At_42deg_Heat_cDNA_P Parameter: Tissue Value: Aerial
  misc_feature: MA Experiment ID: 20000117 Result: Down-regulated in Transcription
  misc_feature: MA Experiment 20000117 PARAMETER Experiment Name: At_100uM_ABA_Mutants_cDNA_P Parameter: Plant Line Value: Columbia
  misc_feature: MA Experiment 20000117 PARAMETER Experiment Name: At_100uM_ABA_Mutants_cDNA_P Parameter: Timepoint (hr) Value: 6
  misc_feature: MA Experiment 20000117 PARAMETER Experiment Name: At_100uM_ABA_Mutants_cDNA_P Parameter: Tissue Value: Aerial
  misc_feature: MA Experiment 20000117 PARAMETER Experiment Name: At_100uM_ABA_Mutants_cDNA_P Parameter: Treatment Value: 100uM ABA vs. No Treatment
  misc_feature: MA Experiment ID: 20000438 Result: Up-regulated in Transcription
  misc_feature: MA Experiment 20000438 PARAMETER Experiment Name: At_Shoots__P Parameter: Age (day) Value: 14
  misc_feature: MA Experiment 20000438 PARAMETER Experiment Name: At_Shoots__P Parameter: Tissue Value: Shoots vs. Whole Plant
  misc_feature: MA Experiment ID: 20001247 Result: Up-regulated in Transcription
  misc_feature: MA Experiment 20001247 PARAMETER Experiment Name: At_Far-red-induction_P Parameter: Age (day) Value: 7
  misc_feature: MA Experiment 20001247 PARAMETER Experiment Name: At_Far-red-induction_P Parameter: Light Value: Far-red vs. White
  misc_feature: MA Experiment 20001247 PARAMETER Experiment Name: At_Far-red-induction_P Parameter: Organism Value: A. thaliana
  misc_feature: MA Experiment 20001247 PARAMETER Experiment Name: At_Far-red-induction_P Parameter: Plant Line Value: Columbia
  misc_feature: MA Experiment 20001247 PARAMETER Experiment Name: At_Far-red-induction_P Parameter: Timepoint (hr) Value: 1
  misc_feature: MA Experiment 20001247 PARAMETER Experiment Name: At_Far-red-induction_P Parameter: Tissue Value: Whole Plant
  misc_feature: MA Experiment ID: 20001248 Result: Down-regulated in Transcription
  misc_feature: MA Experiment 20001248 PARAMETER Experiment Name: At_Far-red-induction_P Parameter: Age (day) Value: 7
  misc_feature: MA Experiment 20001248 PARAMETER Experiment Name: At_Far-red-induction_P Parameter: Light Value: Far-red vs. White
  misc_feature: MA Experiment 20001248 PARAMETER Experiment Name: At_Far-red-induction_P Parameter: Organism Value: A. thaliana
  misc_feature: MA Experiment 20001248 PARAMETER Experiment Name: At_Far-red-induction_P Parameter: Plant Line Value: Columbia
  misc_feature: MA Experiment 20001248 PARAMETER Experiment Name: At_Far-red-induction_P Parameter: Timepoint (hr) Value: 4
  misc_feature: MA Experiment 20001248 PARAMETER Experiment Name: At_Far-red-induction_P Parameter: Tissue Value: Whole Plant
  misc_feature: MA Experiment ID: 20001911 Result: Up-regulated in Transcription
  misc_feature: MA Experiment 20001911 PARAMETER Experiment Name: At_Drought_Reproduction_P Parameter: Age (day) Value: 40
  misc_feature: MA Experiment 20001911 PARAMETER Experiment Name: At_Drought_Reproduction_P Parameter: Organism Value: A. thaliana
  misc_feature: MA Experiment 20001911 PARAMETER Experiment Name: At_Drought_Reproduction_P Parameter: Plant Line Value: WS
  misc_feature: MA Experiment 20001911 PARAMETER Experiment Name: At_Drought_Reproduction_P Parameter: Timepoint (day) Value: 10
  misc_feature: MA Experiment 20001911 PARAMETER Experiment Name: At_Drought_Reproduction_P Parameter: Tissue Value: Flowers
  misc_feature: MA Experiment 20001911 PARAMETER Experiment Name: At_Drought_Reproduction_P Parameter: Treatment Value: Drought vs. No Drought

SEQ ID NO: 42039 - protein, 466 aa, Arabidopsis thaliana; identical to SEQ ID NO: 21125
  peptide (1)..(466): Ceres Seq. ID no. 13495860
  misc_feature (113)..(457): Pfam Name: LytB protein Pfam Description: LytB protein
  misc_feature (113)..(457): Pfam Name: LytB protein Pfam Description: LytB protein
  misc_feature (58)..(463): Homolog of NCBI NO: 33239748 NR Description: 4-hydroxy-3-methylbut-2-enyl diphosphate
  misc_feature (86)..(466): Homolog of NCBI NO: 8928192 NR Description: IspH protein
  misc_feature (58)..(458): Homolog of NCBI NO: 23040062 NR Description: hypothetical protein [Trichodesmium erythraeum
  misc_feature (58)..(458): Homolog of NCBI NO: 23128578 NR Description: hypothetical protein [Nostoc punctiforme]
  misc_feature (58)..(466): Homolog of NCBI NO: 16331361 NR Description: hypothetical protein [Synechocystis sp. PCC 6803]
  misc_feature (58)..(463): Homolog of NCBI NO: 33239748 NR Description: 4-hydroxy-3-methylbut-2-enyl diphosphate
  misc_feature (58)..(458): Homolog of NCBI NO: 23040062 NR Description: hypothetical protein [Trichodesmium erythraeum
  misc_feature (58)..(466): Homolog of NCBI NO: 16331361 NR Description: hypothetical protein [Synechocystis sp. PCC 6803]
  misc_feature (1)..(466): Homolog of NCBI NO: 18418433 NR Description: ISPH [Arabidopsis thaliana]
  misc_feature (1)..(466): Homolog of NCBI NO: 7485313 NR Description: hypothetical protein F10M10.120 - Arabidopsis
  misc_feature (1)..(466): Homolog of NCBI NO: 10716963 NR Description: LYTB-like protein precursor [Adonis palaestina]
  misc_feature (58)..(458): Homolog of NCBI NO: 17228480 NR Description: hypothetical protein [Nostoc sp. PCC 7120]
  misc_feature (58)..(458): Homolog of NCBI NO: 22298585 NR Description: ORF_ID:tlr1041~penicillin tolerance protein LytB
  misc_feature (58)..(458): Homolog of NCBI NO: 23128578 NR Description: hypothetical protein [Nostoc punctiforme]
  misc_feature (86)..(466): Homolog of NCBI NO: 8928192 NR Description: IspH protein
  misc_feature (58)..(458): Homolog of NCBI NO: 22298585 NR Description: ORF_ID:tlr1041~penicillin tolerance protein LytB
  misc_feature (58)..(458): Homolog of NCBI NO: 17228480 NR Description: hypothetical protein [Nostoc sp. PCC 7120]
  misc_feature (1)..(466): Homolog of NCBI NO: 10716963 NR Description: LYTB-like protein precursor [Adonis palaestina]
  misc_feature (1)..(466): Homolog of NCBI NO: 7485313 NR Description: hypothetical protein F10M10.120 - Arabidopsis
  misc_feature (1)..(466): Homolog of NCBI NO: 18418433 NR Description: ISPH [Arabidopsis thaliana]

SEQ ID NO: 42040 - protein, 414 aa, Arabidopsis thaliana; identical to SEQ ID NO: 21126
  peptide (1)..(414): Ceres Seq. ID no. 13495861
  misc_feature (61)..(405): Pfam Name: LytB protein Pfam Description: LytB protein
  misc_feature (61)..(405): Pfam Name: LytB protein Pfam Description: LytB protein
  misc_feature (6)..(411): Homolog of NCBI NO: 33239748 NR Description: 4-hydroxy-3-methylbut-2-enyl diphosphate
  misc_feature (34)..(414): Homolog of NCBI NO: 8928192 NR Description: IspH protein
  misc_feature (6)..(406): Homolog of NCBI NO: 23040062 NR Description: hypothetical protein [Trichodesmium erythraeum
  misc_feature (6)..(406): Homolog of NCBI NO: 23128578 NR Description: hypothetical protein [Nostoc punctiforme]
  misc_feature (6)..(414): Homolog of NCBI NO: 16331361 NR Description: hypothetical protein [Synechocystis sp. PCC 6803]
  misc_feature (6)..(411): Homolog of NCBI NO: 33239748 NR Description: 4-hydroxy-3-methylbut-2-enyl diphosphate
  misc_feature (6)..(406): Homolog of NCBI NO: 23040062 NR Description: hypothetical protein [Trichodesmium erythraeum
  misc_feature (6)..(414): Homolog of NCBI NO: 16331361 NR Description: hypothetical protein [Synechocystis sp. PCC 6803]
  misc_feature (1)..(414): Homolog of NCBI NO: 18418433 NR Description: ISPH [Arabidopsis thaliana]
  misc_feature (1)..(414): Homolog of NCBI NO: 7485313 NR Description: hypothetical protein F10M10.120 - Arabidopsis
  misc_feature (1)..(414): Homolog of NCBI NO: 10716963 NR Description: LYTB-like protein precursor [Adonis palaestina]
  misc_feature (6)..(406): Homolog of NCBI NO: 17228480 NR Description: hypothetical protein [Nostoc sp. PCC 7120]
  misc_feature (6)..(406): Homolog of NCBI NO: 22298585 NR Description: ORF_ID:tlr1041~penicillin tolerance protein LytB
  misc_feature (6)..(406): Homolog of NCBI NO: 23128578 NR Description: hypothetical protein [Nostoc punctiforme]
  misc_feature (34)..(414): Homolog of NCBI NO: 8928192 NR Description: IspH protein
  misc_feature (6)..(406): Homolog of NCBI NO: 22298585 NR Description: ORF_ID:tlr1041~penicillin tolerance protein LytB
  misc_feature (6)..(406): Homolog of NCBI NO: 17228480 NR Description: hypothetical protein [Nostoc sp. PCC 7120]
  misc_feature (1)..(414): Homolog of NCBI NO: 10716963 NR Description: LYTB-like protein precursor [Adonis palaestina]
  misc_feature (1)..(414): Homolog of NCBI NO: 7485313 NR Description: hypothetical protein F10M10.120 - Arabidopsis
  misc_feature (1)..(414): Homolog of NCBI NO: 18418433 NR Description: ISPH [Arabidopsis thaliana]

SEQ ID NO: 42041 - protein, 380 aa, Arabidopsis thaliana; identical to SEQ ID NO: 21127
  peptide (1)..(380): Ceres Seq. ID no. 13495862
  misc_feature (27)..(371): Pfam Name: LytB protein Pfam Description: LytB protein
  misc_feature (27)..(371): Pfam Name: LytB protein Pfam Description: LytB protein
  misc_feature (1)..(377): Homolog of NCBI NO: 33239748 NR Description: 4-hydroxy-3-methylbut-2-enyl diphosphate
  misc_feature (1)..(380): Homolog of NCBI NO: 8928192 NR Description: IspH protein
  misc_feature (1)..(372): Homolog of NCBI NO: 23040062 NR Description: hypothetical protein [Trichodesmium erythraeum
  misc_feature (1)..(372): Homolog of NCBI NO: 23128578 NR Description: hypothetical protein [Nostoc punctiforme]
  misc_feature (1)..(380): Homolog of NCBI NO: 16331361 NR Description: hypothetical protein [Synechocystis sp. PCC 6803]
  misc_feature (1)..(377): Homolog of NCBI NO: 33239748 NR Description: 4-hydroxy-3-methylbut-2-enyl diphosphate
  misc_feature (1)..(372): Homolog of NCBI NO: 23040062 NR Description: hypothetical protein [Trichodesmium erythraeum
  misc_feature (1)..(380): Homolog of NCBI NO: 16331361 NR Description: hypothetical protein [Synechocystis sp. PCC 6803]
  misc_feature (1)..(380): Homolog of NCBI NO: 18418433 NR Description: ISPH [Arabidopsis thaliana]
  misc_feature (1)..(380): Homolog of NCBI NO: 7485313 NR Description: hypothetical protein F10M10.120 - Arabidopsis
  misc_feature (1)..(380): Homolog of NCBI NO: 10716963 NR Description: LYTB-like protein precursor [Adonis palaestina]
  misc_feature (1)..(372): Homolog of NCBI NO: 17228480 NR Description: hypothetical protein [Nostoc sp. PCC 7120]
  misc_feature (1)..(372): Homolog of NCBI NO: 22298585 NR Description: ORF_ID:tlr1041~penicillin tolerance protein LytB
  misc_feature (1)..(372): Homolog of NCBI NO: 23128578 NR Description: hypothetical protein [Nostoc punctiforme]
  misc_feature (1)..(380): Homolog of NCBI NO: 8928192 NR Description: IspH protein
  misc_feature (1)..(372): Homolog of NCBI NO: 22298585 NR Description: ORF_ID:tlr1041~penicillin tolerance protein LytB
  misc_feature (1)..(372): Homolog of NCBI NO: 17228480 NR Description: hypothetical protein [Nostoc sp. PCC 7120]
  misc_feature (1)..(380): Homolog of NCBI NO: 10716963 NR Description: LYTB-like protein precursor [Adonis palaestina]
  misc_feature (1)..(380): Homolog of NCBI NO: 7485313 NR Description: hypothetical protein F10M10.120 - Arabidopsis
  misc_feature (1)..(380): Homolog of NCBI NO: 18418433 NR Description: ISPH [Arabidopsis thaliana]

SEQ ID NO: 42042 - DNA, 948 bp, Arabidopsis thaliana
  misc_feature (1)..(948): Ceres Seq. ID no. 12357544
  misc_feature: MA Experiment ID: 108433 Result: Up-regulated in Transcription
  misc_feature: MA Experiment 108433 PARAMETER Experiment Name: At_rhl_Mutant2_cDNA_P Parameter: Age (day) Value: 7
  misc_feature: MA Experiment 108433 PARAMETER Experiment Name: At_rhl_Mutant2_cDNA_P Parameter: Organism Value: A. thaliana
  misc_feature: MA Experiment 108433 PARAMETER Experiment Name: At_rhl_Mutant2_cDNA_P Parameter: Plant Line Value: rhl Mutant vs. wt landsburg
  misc_feature: MA Experiment 108433 PARAMETER Experiment Name: At_rhl_Mutant2_cDNA_P Parameter: Tissue Value: Roots
  misc_feature: MA Experiment ID: 108434 Result: Down-regulated in Transcription
  misc_feature: MA Experiment 108434 PARAMETER Experiment Name: At_Root_Tips_cDNA_P Parameter: Tissue Value: Root Tips
  misc_feature: MA Experiment ID: 108462 Result: Up-regulated in Transcription
  misc_feature: MA Experiment 108462 PARAMETER Experiment Name: At_Germinating_Seeds_cDNA_P Parameter: Age (day) Value: 2 vs. 0
  misc_feature: MA Experiment 108462 PARAMETER Experiment Name: At_Germinating_Seeds_cDNA_P Parameter: Tissue Value: Germinating Seeds
  misc_feature: MA Experiment ID: 108463 Result: Up-regulated in Transcription
  misc_feature: MA Experiment 108463 PARAMETER Experiment Name: At_Germinating_Seeds_cDNA_P Parameter: Age (day) Value: 3 vs. 0
  misc_feature: MA Experiment 108463 PARAMETER Experiment Name: At_Germinating_Seeds_cDNA_P Parameter: Tissue Value: Germinating Seeds
  misc_feature: MA Experiment ID: 108464 Result: Up-regulated in Transcription
  misc_feature: MA Experiment 108464 PARAMETER Experiment Name: At_Germinating_Seeds_cDNA_P Parameter: Age (day) Value: 4 vs. 0
  misc_feature: MA Experiment 108464 PARAMETER Experiment Name: At_Germinating_Seeds_cDNA_P Parameter: Tissue Value: Germinating Seeds
  misc_feature: MA Experiment ID: 108488 Result: Up-regulated in Transcription
  misc_feature: MA Experiment ID: 108569 Result: Up-regulated in Transcription
  misc_feature: MA Experiment 108569 PARAMETER Experiment Name: At_0.001%_MeJA__cDNA_P Parameter: Timepoint (hr) Value: 6
  misc_feature: MA Experiment 108569 PARAMETER Experiment Name: At_0.001%_MeJA__cDNA_P Parameter: Tissue Value: Aerial
  misc_feature: MA Experiment 108569 PARAMETER Experiment Name: At_0.001%_MeJA__cDNA_P Parameter: Treatment Value: 0.001% MeJA vs. No Treatment
  misc_feature: MA Experiment ID: 108572 Result: Up-regulated in Transcription
  misc_feature: MA Experiment 108572 PARAMETER Experiment Name: At_Drought_cDNA_P Parameter: Timepoint (hr) Value: 1
  misc_feature: MA Experiment 108572 PARAMETER Experiment Name: At_Drought_cDNA_P Parameter: Tissue Value: Aerial
  misc_feature: MA Experiment 108572 PARAMETER Experiment Name: At_Drought_cDNA_P Parameter: Treatment Value: Drought vs. No Drought
  misc_feature: MA Experiment ID: 108573 Result: Up-regulated in Transcription
  misc_feature: MA Experiment 108573 PARAMETER Experiment Name: At_Drought_cDNA_P Parameter: Timepoint (hr) Value: 6
  misc_feature: MA Experiment 108573 PARAMETER Experiment Name: At_Drought_cDNA_P Parameter: Tissue Value: Aerial
  misc_feature: MA Experiment 108573 PARAMETER Experiment Name: At_Drought_cDNA_P Parameter: Treatment Value: Drought vs. No Drought
  misc_feature: MA Experiment ID: 108574 Result: Up-regulated in Transcription
  misc_feature: MA Experiment 108574 PARAMETER Experiment Name: At_Wounding__cDNA_P Parameter: Timepoint (hr) Value: 1
  misc_feature: MA Experiment 108574 PARAMETER Experiment Name: At_Wounding__cDNA_P Parameter: Tissue Value: Aerial
  misc_feature: MA Experiment 108574 PARAMETER Experiment Name: At_Wounding__cDNA_P Parameter: Treatment Value: Wounding vs. No Wounding
  misc_feature: MA Experiment ID: 108594 Result: Down-regulated in Transcription
  misc_feature: MA Experiment 108594 PARAMETER Experiment Name: At_Ler-rhl_Root_cDNA_P Parameter: Plant Line Value: null
  misc_feature: MA Experiment ID: 108595 Result: Up-regulated in Transcription
  misc_feature: MA Experiment 108595 PARAMETER Experiment Name: At_Ler-pi_Ovule_cDNA_P Parameter: Plant Line Value: null
  misc_feature: MA Experiment ID: 108605 Result: Up-regulated in Transcription
  misc_feature: MA Experiment 108605 PARAMETER Experiment Name: At_100uM_ABA_cDNA_P Parameter: Timepoint (hr) Value: 6
  misc_feature: MA Experiment 108605 PARAMETER Experiment Name: At_100uM_ABA_cDNA_P Parameter: Tissue Value: Aerial
  misc_feature: MA Experiment 108605 PARAMETER Experiment Name: At_100uM_ABA_cDNA_P Parameter: Treatment Value: 100uM ABA vs. No Treatment
  misc_feature: MA Experiment ID: 108607 Result: Up-regulated in Transcription
  misc_feature: MA Experiment 108607 PARAMETER Experiment Name: At_100uM_ABA_cDNA_P Parameter: Timepoint (hr) Value: 4
  misc_feature: MA Experiment 108607 PARAMETER Experiment Name: At_100uM_ABA_cDNA_P Parameter: Tissue Value: Aerial
  misc_feature: MA Experiment 108607 PARAMETER Experiment Name: At_100uM_ABA_cDNA_P Parameter: Treatment Value: 100uM ABA vs. No Treatment
  misc_feature: MA Experiment ID: 108608 Result: Up-regulated in Transcription
  misc_feature: MA Experiment 108608 PARAMETER Experiment Name: At_100uM_ABA_cDNA_P Parameter: Timepoint (hr) Value: 1
  misc_feature: MA Experiment 108608 PARAMETER Experiment Name: At_100uM_ABA_cDNA_P Parameter: Tissue Value: Aerial
  misc_feature: MA Experiment 108608 PARAMETER Experiment Name: At_100uM_ABA_cDNA_P Parameter: Treatment Value: 100uM ABA vs. No Treatment
  misc_feature: MA Experiment ID: 108609 Result: Up-regulated in Transcription
  misc_feature: MA Experiment 108609 PARAMETER Experiment Name: At_100uM_ABA_cDNA_P Parameter: Timepoint (hr) Value: 24
  misc_feature: MA Experiment 108609 PARAMETER Experiment Name: At_100uM_ABA_cDNA_P Parameter: Tissue Value: Aerial
  misc_feature: MA Experiment 108609 PARAMETER Experiment Name: At_100uM_ABA_cDNA_P Parameter: Treatment Value: 100uM ABA vs. No Treatment
  misc_feature: MA Experiment ID: 20000030 Result: Down-regulated in Transcription
  misc_feature: MA Experiment 20000030 PARAMETER Experiment Name: At_CS6630_Roots_cDNA_P Parameter: Plant Line Value: CS6630 vs. WS
  misc_feature: MA Experiment 20000030 PARAMETER Experiment Name: At_CS6630_Roots_cDNA_P Parameter: Tissue Value: Roots
  misc_feature: MA Experiment ID: 20000068 Result: Up-regulated in Transcription
  misc_feature: MA Experiment ID: 20000069 Result: Up-regulated in Transcription
  misc_feature: MA Experiment 20000069 PARAMETER Experiment Name: At_100uM_ABA_Mutants_cDNA_P Parameter: Plant Line Value: CS23
  misc_feature: MA Experiment 20000069 PARAMETER Experiment Name: At_100uM_ABA_Mutants_cDNA_P Parameter: Timepoint (hr) Value: 6
  misc_feature: MA Experiment 20000069 PARAMETER Experiment Name: At_100uM_ABA_Mutants_cDNA_P Parameter: Tissue Value: Aerial
  misc_feature: MA Experiment 20000069 PARAMETER Experiment Name: At_100uM_ABA_Mutants_cDNA_P Parameter: Treatment Value: 100uM ABA vs. No Treatment
  misc_feature: MA Experiment ID: 20000070 Result: Up-regulated in Transcription
  misc_feature: MA Experiment 20000070 PARAMETER Experiment Name: At_100uM_ABA_Mutants_cDNA_P Parameter: Plant Line Value: CS24
  misc_feature: MA Experiment 20000070 PARAMETER Experiment Name: At_100uM_ABA_Mutants_cDNA_P Parameter: Timepoint (hr) Value: 6
  misc_feature: MA Experiment 20000070 PARAMETER Experiment Name: At_100uM_ABA_Mutants_cDNA_P Parameter: Tissue Value: Aerial
  misc_feature: MA Experiment 20000070 PARAMETER Experiment Name: At_100uM_ABA_Mutants_cDNA_P Parameter: Treatment Value: 100uM ABA vs. No Treatment
  misc_feature: MA Experiment ID: 20000071 Result: Up-regulated in Transcription
  misc_feature: MA Experiment 20000071 PARAMETER Experiment Name: At_100uM_ABA_Mutants_cDNA_P Parameter: Plant Line Value: CS8104
  misc_feature: MA Experiment 20000071 PARAMETER Experiment Name: At_100uM_ABA_Mutants_cDNA_P Parameter: Timepoint (hr) Value: 6
  misc_feature: MA Experiment 20000071 PARAMETER Experiment Name: At_100uM_ABA_Mutants_cDNA_P Parameter: Tissue Value: Aerial
  misc_feature: MA Experiment 20000071 PARAMETER Experiment Name: At_100uM_ABA_Mutants_cDNA_P Parameter: Treatment Value: 100uM ABA vs. No Treatment
  misc_feature: MA Experiment ID: 20000072 Result: Up-regulated in Transcription
  misc_feature: MA Experiment 20000072 PARAMETER Experiment Name: At_100uM_ABA_Mutants_cDNA_P Parameter: Plant Line Value: CS8105
  misc_feature: MA Experiment 20000072 PARAMETER Experiment Name: At_100uM_ABA_Mutants_cDNA_P Parameter: Timepoint (hr) Value: 6
  misc_feature: MA Experiment 20000072 PARAMETER Experiment Name: At_100uM_ABA_Mutants_cDNA_P Parameter: Tissue Value: Aerial
  misc_feature: MA Experiment 20000072 PARAMETER Experiment Name: At_100uM_ABA_Mutants_cDNA_P Parameter: Treatment Value: 100uM ABA vs. No Treatment
  misc_feature: MA Experiment ID: 20000086 Result: Up-regulated in Transcription
  misc_feature: MA Experiment 20000086 PARAMETER Experiment Name: At_100uM_ABA_Mutants_cDNA_P Parameter: Plant Line Value: CS22
  misc_feature: MA Experiment 20000086 PARAMETER Experiment Name: At_100uM_ABA_Mutants_cDNA_P Parameter: Timepoint (hr) Value: 6
  misc_feature: MA Experiment 20000086 PARAMETER Experiment Name: At_100uM_ABA_Mutants_cDNA_P Parameter: Tissue Value: Aerial
  misc_feature: MA Experiment 20000086 PARAMETER Experiment Name: At_100uM_ABA_Mutants_cDNA_P Parameter: Treatment Value: 100uM ABA vs. No Treatment
  misc_feature: MA Experiment ID: 20000087 Result: Up-regulated in Transcription
  misc_feature: MA Experiment 20000087 PARAMETER Experiment Name: At_100uM_ABA_Mutants_cDNA_P Parameter: Plant Line Value: WS
  misc_feature: MA Experiment 20000087 PARAMETER Experiment Name: At_100uM_ABA_Mutants_cDNA_P Parameter: Timepoint (hr) Value: 6
  misc_feature: MA Experiment 20000087 PARAMETER Experiment Name: At_100uM_ABA_Mutants_cDNA_P Parameter: Tissue Value: Aerial
  misc_feature: MA Experiment 20000087 PARAMETER Experiment Name: At_100uM_ABA_Mutants_cDNA_P Parameter: Treatment Value: 100uM ABA vs. No Treatment
  misc_feature: MA Experiment ID: 20000088 Result: Up-regulated in Transcription
  misc_feature: MA Experiment 20000088 PARAMETER Experiment Name: At_100uM_ABA_Mutants_cDNA_P Parameter: Plant Line Value: Landsberg
  misc_feature: MA Experiment 20000088 PARAMETER Experiment Name: At_100uM_ABA_Mutants_cDNA_P Parameter: Timepoint (hr) Value: 6
  misc_feature: MA Experiment 20000088 PARAMETER Experiment Name: At_100uM_ABA_Mutants_cDNA_P Parameter: Tissue Value: Aerial
  misc_feature: MA Experiment 20000088 PARAMETER Experiment Name: At_100uM_ABA_Mutants_cDNA_P Parameter: Treatment Value: 100uM ABA vs. No Treatment
  misc_feature: MA Experiment ID: 20000089 Result: Up-regulated in Transcription
  misc_feature: MA Experiment ID: 20000112 Result: Down-regulated in Transcription
  misc_feature: MA Experiment 20000112 PARAMETER Experiment Name: At_42deg_Heat_cDNA_P Parameter: Temperature (deg C) Value: 42 vs. 22
  misc_feature: MA Experiment 20000112 PARAMETER Experiment Name: At_42deg_Heat_cDNA_P Parameter: Timepoint (hr) Value: 2
  misc_feature: MA Experiment 20000112 PARAMETER Experiment Name: At_42deg_Heat_cDNA_P Parameter: Tissue Value: Aerial
  misc_feature: MA Experiment ID: 20000117 Result: Up-regulated in Transcription
  misc_feature: MA Experiment 20000117 PARAMETER Experiment Name: At_100uM_ABA_Mutants_cDNA_P Parameter: Plant Line Value: Columbia
  misc_feature: MA Experiment 20000117 PARAMETER Experiment Name: At_100uM_ABA_Mutants_cDNA_P Parameter: Timepoint (hr) Value: 6
  misc_feature: MA Experiment 20000117 PARAMETER Experiment Name: At_100uM_ABA_Mutants_cDNA_P Parameter: Tissue Value: Aerial
  misc_feature: MA Experiment 20000117 PARAMETER Experiment Name: At_100uM_ABA_Mutants_cDNA_P Parameter: Treatment Value: 100uM ABA vs. No Treatment
  misc_feature: MA Experiment ID: 20000144 Result: Down-regulated in Transcription
  misc_feature: MA Experiment 20000144 PARAMETER Experiment Name: At_42deg_Heat_cDNA_P Parameter: Temperature (deg C) Value: 42 vs. 22
  misc_feature: MA Experiment 20000144 PARAMETER Experiment Name: At_42deg_Heat_cDNA_P Parameter: Timepoint (hr) Value: 1
  misc_feature: MA Experiment 20000144 PARAMETER Experiment Name: At_42deg_Heat_cDNA_P Parameter: Tissue Value: Aerial
  misc_feature: MA Experiment ID: 20000224 Result: Up-regulated in Transcription
  misc_feature: MA Experiment ID: 20000314 Result: Down-regulated in Transcription
  misc_feature: MA Experiment 20000314 PARAMETER Experiment Name: At_14day_Shoots-Roots_Sub_P Parameter: Age (day) Value: 14
  misc_feature: MA Experiment 20000314 PARAMETER Experiment Name: At_14day_Shoots-Roots_Sub_P Parameter: Organism Value: A. thaliana
  misc_feature: MA Experiment 20000314 PARAMETER Experiment Name: At_14day_Shoots-Roots_Sub_P Parameter: Plant Line Value: WS
  misc_feature: MA Experiment 20000314 PARAMETER Experiment Name: At_14day_Shoots-Roots_Sub_P Parameter: Tissue Value: Roots vs. Whole Plant
  misc_feature: MA Experiment ID: 20000315 Result: Down-regulated in Transcription
  misc_feature: MA Experiment 20000315 PARAMETER Experiment Name: At_14day_Shoots-Roots_Sub_P Parameter: Age (day) Value: 14
  misc_feature: MA Experiment 20000315 PARAMETER Experiment Name: At_14day_Shoots-Roots_Sub_P Parameter: Organism Value: A. thaliana
  misc_feature: MA Experiment 20000315 PARAMETER Experiment Name: At_14day_Shoots-Roots_Sub_P Parameter: Plant Line Value: WS
  misc_feature: MA Experiment 20000315 PARAMETER Experiment Name: At_14day_Shoots-Roots_Sub_P Parameter: Tissue Value: Shoots vs. Whole Plant
  misc_feature: MA Experiment ID: 20000348 Result: Up-regulated in Transcription
  misc_feature: MA Experiment 20000348 PARAMETER Experiment Name: At_100uM_ABA_Sub_P Parameter: Age (day) Value: 14
  misc_feature: MA Experiment 20000348 PARAMETER Experiment Name: At_100uM_ABA_Sub_P Parameter: Organism Value: A. thaliana
  misc_feature: MA Experiment 20000348 PARAMETER Experiment Name: At_100uM_ABA_Sub_P Parameter: Plant Line Value: WS
  misc_feature: MA Experiment 20000348 PARAMETER Experiment Name: At_100uM_ABA_Sub_P Parameter: Timepoint (hr) Value: 1
  misc_feature: MA Experiment 20000348 PARAMETER Experiment Name: At_100uM_ABA_Sub_P Parameter: Tissue Value: Aerial
  misc_feature: MA Experiment 20000348 PARAMETER Experiment Name: At_100uM_ABA_Sub_P Parameter: Treatment Value: 100uM ABA vs. No Treatment
  misc_feature: MA Experiment ID: 20000349 Result: Up-regulated in Transcription
  misc_feature: MA Experiment 20000349 PARAMETER Experiment Name: At_100uM_ABA_Sub_P Parameter: Age (day) Value: 14
  misc_feature: MA Experiment 20000349 PARAMETER Experiment Name: At_100uM_ABA_Sub_P Parameter: Organism Value: A. thaliana
  misc_feature: MA Experiment 20000349 PARAMETER Experiment Name: At_100uM_ABA_Sub_P Parameter: Plant Line Value: WS
  misc_feature: MA Experiment 20000349 PARAMETER Experiment Name: At_100uM_ABA_Sub_P Parameter: Timepoint (hr) Value: 6
  misc_feature: MA Experiment 20000349 PARAMETER Experiment Name: At_100uM_ABA_Sub_P Parameter: Tissue Value: Aerial
  misc_feature: MA Experiment 20000349 PARAMETER Experiment Name: At_100uM_ABA_Sub_P Parameter: Treatment Value: 100uM ABA vs. No Treatment
  misc_feature: MA Experiment ID: 20000355 Result: Up-regulated in Transcription
  misc_feature: MA Experiment 20000355 PARAMETER Experiment Name: At_Siliques_Sub_P Parameter: Age (day) Value: 21
  misc_feature: MA Experiment 20000355 PARAMETER Experiment Name: At_Siliques_Sub_P Parameter: Organism Value: A. thaliana
  misc_feature: MA Experiment 20000355 PARAMETER Experiment Name: At_Siliques_Sub_P Parameter: Plant Line Value: WS
  misc_feature: MA Experiment 20000355 PARAMETER Experiment Name: At_Siliques_Sub_P Parameter: Tissue Value: Less Than 5mm Siliques vs. Whole Plant
  misc_feature: MA Experiment ID: 20000440 Result: Up-regulated in Transcription
  misc_feature: MA Experiment 20000440 PARAMETER Experiment Name: At_Closed-Flower__Sub_P Parameter: Tissue Value: Closed Flower vs. Whole Plant
aaaacaccataaactaaacaataaaccatacaaaaaaatatgaaaatcctctcactttcactactcttgctcttggccgctacggtctcccacgtccagtcttcggcatccgttccagggctcatcgaactcctcgaccgaactcttagagaaagagggactgtccatcaactaccccaactgcagaagctggcaccttggtgttgagacctctaacatcataaacttcgacacggtgcccgcaaattgcaaagcctatgttgaagactacttgatcacttccaaacagtaccaatacgactccaaaactgtaaacaaagaggcatatttctacgccaaaggacttgccctaaagaacgataccatcaatgtttggatctttgacctagacgacactctcctctctagtattccctactacgccaaatatggatatgggaccgagaacacagccccgggggcgtactggtcgtggttagagtccggagaatcaacaccaggactcccggagaccttgcatctatacgaaaacctcttggaactcgggattgaacccatcataatctctgaccgatggaaaaagttgtcagaaatcactatcgagaatctcaaggctgttggtgtgacaaaatggaagcatctcatactcaagccaaacggatcgaagttgacgcaagtggtgtacaagtcaaaggtgaggaatagccttgtgaagaaaggatacaacatcgttggcaatattggagaccaatgggctgatttggttgaggatactcctggaagggtttttaagctcccaaatccactctactacgtaccttcttaattaagcatatatcttcatggcattgtccccttgtatccatttcaaatctatgtcgtttcgtttatctttgtagccgttttggcaccactgcttgaataaaatgccaatcctagattcctatc

SEQ ID NO: 42043 - protein, 55 aa, Arabidopsis thaliana
  peptide (1)..(55): Ceres Seq. ID no. 12357545
  misc_feature (3)..(33): Homolog of NCBI NO: 629583 NR Description: vegetative storage protein, 30K - Arabidopsis
  misc_feature (1)..(33): Homolog of NCBI NO: 2373397 NR Description: vegetative storage protein [Arabidopsis thaliana]
  misc_feature (1)..(33): Homolog of NCBI NO: 18420838 NR Description: vegetative storage protein Vsp1
  misc_feature (1)..(33): Homolog of NCBI NO: 18206363 NR Description: Vegetative storage protein 1 precursor
MKILSLSLLLLLAATVSHVQSSASVPGLIELLDRTLRERGTVHQLPQLQKLAPWC

SEQ ID NO: 42044 - protein, 43 aa, Arabidopsis thaliana
  peptide (1)..(43): Ceres Seq. ID no. 12357546
MEKVVRNHYRESQGCWCDKMEASHTQAKRIEVDASGVQVKGEE

SEQ ID NO: 42045 - DNA, 1407 bp, Arabidopsis thaliana
  misc_feature (1)..(1407): Ceres Seq. ID no. 12371453
  misc_feature: MA Experiment ID: 108461 Result: Up-regulated in Transcription
  misc_feature: MA Experiment 108461 PARAMETER Experiment Name: At_Germinating_Seeds_cDNA_P Parameter: Age (day) Value: 1 vs. 0
  misc_feature: MA Experiment 108461 PARAMETER Experiment Name: At_Germinating_Seeds_cDNA_P Parameter: Tissue Value: Germinating Seeds
  misc_feature: MA Experiment ID: 108462 Result: Up-regulated in Transcription
  misc_feature: MA Experiment 108462 PARAMETER Experiment Name: At_Germinating_Seeds_cDNA_P Parameter: Age (day) Value: 2 vs. 0
  misc_feature: MA Experiment 108462 PARAMETER Experiment Name: At_Germinating_Seeds_cDNA_P Parameter: Tissue Value: Germinating Seeds
  misc_feature: MA Experiment ID: 20000111 Result: Up-regulated in Transcription
  misc_feature: MA Experiment 20000111 PARAMETER Experiment Name: At_42deg_Heat_cDNA_P Parameter: Temperature (deg C) Value: 42 vs. 22
  misc_feature: MA Experiment 20000111 PARAMETER Experiment Name: At_42deg_Heat_cDNA_P Parameter: Timepoint (hr) Value: 6
  misc_feature: MA Experiment 20000111 PARAMETER Experiment Name: At_42deg_Heat_cDNA_P Parameter: Tissue Value: Aerial
  misc_feature: MA Experiment ID: 20000180 Result: Up-regulated in Transcription
  misc_feature: MA Experiment 20000180 PARAMETER Experiment Name: At_Germinating_Seeds_P Parameter: Age (hr) Value: 24 vs. 0
  misc_feature: MA Experiment 20000180 PARAMETER Experiment Name: At_Germinating_Seeds_P Parameter: Tissue Value: Germinating Seeds
  misc_feature: MA Experiment ID: 20000224 Result: Up-regulated in Transcription
  misc_feature: MA Experiment ID: 20000234 Result: Down-regulated in Transcription
  misc_feature: MA Experiment 20000234 PARAMETER Experiment Name: At_Siliques_P Parameter: Age (day) Value: 21
  misc_feature: MA Experiment 20000234 PARAMETER Experiment Name: At_Siliques_P Parameter: Organism Value: A. thaliana
  misc_feature: MA Experiment 20000234 PARAMETER Experiment Name: At_Siliques_P Parameter: Plant Line Value: WS
  misc_feature: MA Experiment 20000234 PARAMETER Experiment Name: At_Siliques_P Parameter: Tissue Value: Less Than 5mm Siliques vs. Whole Plant
  misc_feature: MA Experiment ID: 20000264 Result: Down-regulated in Transcription
  misc_feature: MA Experiment 20000264 PARAMETER Experiment Name: At_Open_Flower_P Parameter: Age (day) Value: 21
  misc_feature: MA Experiment 20000264 PARAMETER Experiment Name: At_Open_Flower_P Parameter: Plant Line Value: WS
  misc_feature: MA Experiment 20000264 PARAMETER Experiment Name: At_Open_Flower_P Parameter: Tissue Value: Open Flower vs. Whole Plant
  misc_feature: MA Experiment ID: 20000265 Result: Down-regulated in Transcription
  misc_feature: MA Experiment 20000265 PARAMETER Experiment Name: At_Open_Flower_P Parameter: Age (day) Value: 21
  misc_feature: MA Experiment 20000265 PARAMETER Experiment Name: At_Open_Flower_P Parameter: Plant Line Value: WS
  misc_feature: MA Experiment 20000265 PARAMETER Experiment Name: At_Open_Flower_P Parameter: Tissue Value: Closed Flower vs. Whole Plant
  misc_feature: MA Experiment ID: 20000286 Result: Down-regulated in Transcription
  misc_feature: MA Experiment 20000286 PARAMETER Experiment Name: At_Open_Flower_P Parameter: Age (day) Value: 21
  misc_feature: MA Experiment 20000286 PARAMETER Experiment Name: At_Open_Flower_P Parameter: Plant Line Value: WS
  misc_feature: MA Experiment 20000286 PARAMETER Experiment Name: At_Open_Flower_P Parameter: Tissue Value: Half Open vs. Whole Plant
attatttacaggagtgcgataatattctttgaagcttcaacattgttgcgaagaccagactctcagactcagactcgggagtgatttcacttcaactttctgctcagatggcagtccactactggacagccctgtttctattgctgtcatgccttttctgtatttcaaatgctagtgctggcgatgctgatccagattacaggacatgtgtttcagaatgtgagataagcggttgtgttggaccactttgctttcctcagtgcaattcttcatccgatggtggtccatggtacatccaagaacctctgtatttacaatggaaaaaatggggttgtcaaggtgattgccgttatcaatgtatggttaatagagagagtgaacgggaaactctcggtcaagccccagtcaagtaccatggtaaatggcccttcaagcgtgtacttgggattcaggagcctgcttctgttgctttctctgtactcaacctagcaatgcatttccatggttggctttcctttttcatcatgatctactataagttacctctgaaacaagataggacagcgtactatgaatacgtcggtttgtggcatatctacggtctcctgtccatgaactcttggttctggagtgctgttttccacagccgggatgttgaccttacagagaggttggactactcatccgcagtagcgattctcggattctcactcatcttagccattttacgaacatttgatattcgggtcgaggctgcaagggtcatggtatccgctccaatactagcttttgtaaccacccacatactctacataaacttctacaaactcgactatggctggaacatgattgtgtgtgtggcaatgggagtctcacagcttttcctatgggcaagatgggccgctgtctcaagccacccttctaattggaaactttgggtggttgtgatagctggaggattagccatgcttctagagatatatgattttcctncatatgaaggctacttcgatgctcactcgatctggcacgctgccacaattcccttaaccattctctggtggagcttcattagagacgatgctgagttcagaacttccagcctcctcaagaaaactaagacgaaggcaaagtgagtctctttgctaagttttacaaggatttttattcgaccatacaagtatgcagacacgagggaaaaacaaaaagtggaaatggatttaaacatcacgaagaaggcagagtcttttgtttaaagctagctggtttatggattcacaggtttcttcagtttttttttttttttttttttttattgttacataaactgtggaatttgctttgagcctttcagtgtttttctttggccttacttttggttaagaaagatttcgatatcatttactc

SEQ ID NO: 42046 - protein, 342 aa, Arabidopsis thaliana
  peptide (1)..(342): Ceres Seq. ID no. 12371454
  misc_feature (64)..(334): Pfam Name: Per1-like Pfam Description: Per1-like
  misc_feature (164)..(342): Homolog of NCBI NO: 22761646 NR Description: unnamed protein product [Homo sapiens]
  misc_feature (8)..(342): Homolog of NCBI NO: 28372501 NR Description: CAB2 [Homo sapiens]
  misc_feature (7)..(341): Homolog of NCBI NO: 19921698 NR Description: CG3271-PB [Drosophila melanogaster]
  misc_feature (22)..(327): Homolog of NCBI NO: 32418510 NR Description: hypothetical protein [Neurospora crassa]
  misc_feature (48)..(342): Homolog of NCBI NO: 32949296 NR Description: CAB2 protein [Homo sapiens]
  misc_feature (35)..(181): Homolog of NCBI NO: 20260110 NR Description: unknown protein [Arabidopsis thaliana]
  misc_feature (63)..(338): Homolog of NCBI NO: 10176931 NR Description: gene_id:MTG10.16~unknown protein [Arabidopsis
  misc_feature (6)..(338): Homolog of NCBI NO: 37536224 NR Description: unknown protein [Oryza sativa (japonica
  misc_feature (6)..(338): Homolog of NCBI NO: 18424554 NR Description: putative protein
  misc_feature (1)..(342): Homolog of NCBI NO: 15219283 NR Description: unknown protein; protein id: At1g16560.1
  misc_feature (296)..(296): Xaa is any aa, unknown or other
MAVHYWTALFLLLSCLFCISNASAGDADPDYRTCVSECEISGCVGPLCFPQCNSSSDGGPWYIQEPLYLQWKKWGCQGDCRYQCMVNRESERETLGQAPVKYHGKWPFKRVLGIQEPASVAFSVLNLAMHFHGWLSFFIMIYYKLPLKQDRTAYYEYVGLWHIYGLLSMNSWFWSAVFHSRDVDLTERLDYSSAVAILGFSLILAILRTFDIRVEAARVMVSAPILAFVTTHILYINFYKLDYGWNMIVCVAMGVSQLFLWARWAAVSSHPSNWKLWVVVIAGGLAMLLEIYDFPXYEGYFDAHSIWHAATIPLTILWWSFIRDDAEFRTSSLLKKTKTKAK

SEQ ID NO: 42047 - protein, 258 aa, Arabidopsis thaliana
  peptide (1)..(258): Ceres Seq. ID no. 12371455
  misc_feature (1)..(250): Pfam Name: Per1-like Pfam Description: Per1-like
  misc_feature (80)..(258): Homolog of NCBI NO: 22761646 NR Description: unnamed protein product [Homo sapiens]
  misc_feature (1)..(258): Homolog of NCBI NO: 28372501 NR Description: CAB2 [Homo sapiens]
  misc_feature (1)..(257): Homolog of NCBI NO: 19921698 NR Description: CG3271-PB [Drosophila melanogaster]
  misc_feature (1)..(243): Homolog of NCBI NO: 32418510 NR Description: hypothetical protein [Neurospora crassa]
  misc_feature (1)..(258): Homolog of NCBI NO: 32949296 NR Description: CAB2 protein [Homo sapiens]
  misc_feature (1)..(97): Homolog of NCBI NO: 20260110 NR Description: unknown protein [Arabidopsis thaliana]
  misc_feature (1)..(254): Homolog of NCBI NO: 10176931 NR Description: gene_id:MTG10.16~unknown protein [Arabidopsis
  misc_feature (1)..(254): Homolog of NCBI NO: 37536224 NR Description: unknown protein [Oryza sativa (japonica
  misc_feature (1)..(254): Homolog of NCBI NO: 18424554 NR Description: putative protein
  misc_feature (1)..(258): Homolog of NCBI NO: 15219283 NR Description: unknown protein; protein id: At1g16560.1
  misc_feature (212)..(212): Xaa is any aa, unknown or other
MVNRESERETLGQAPVKYHGKWPFKRVLGIQEPASVAFSVLNLAMHFHGWLSFFIMIYYKLPLKQDRTAYYEYVGLWHIYGLLSMNSWFWSAVFHSRDVDLTERLDYSSAVAILGFSLILAILRTFDIRVEAARVMVSAPILAFVTTHILYINFYKLDYGWNMIVCVAMGVSQLFLWARWAAVSSHPSNWKLWVVVIAGGLAMLLEIYDFPXYEGYFDAHSIWHAATIPLTILWWSFIRDDAEFRTSSLLKKTKTKAK

SEQ ID NO: 42048 - protein, 214 aa, Arabidopsis thaliana
  peptide (1)..(214): Ceres Seq. ID no. 12371456
  misc_feature (1)..(206): Pfam Name: Per1-like Pfam Description: Per1-like
  misc_feature (36)..(214): Homolog of NCBI NO: 22761646 NR Description: unnamed protein product [Homo sapiens]
  misc_feature (1)..(214): Homolog of NCBI NO: 28372501 NR Description: CAB2 [Homo sapiens]
  misc_feature (1)..(213): Homolog of NCBI NO: 19921698 NR Description: CG3271-PB [Drosophila melanogaster]
  misc_feature (1)..(199): Homolog of NCBI NO: 32418510 NR Description: hypothetical protein [Neurospora crassa]
  misc_feature (1)..(214): Homolog of NCBI NO: 32949296 NR Description: CAB2 protein [Homo sapiens]
  misc_feature (1)..(53): Homolog of NCBI NO: 20260110 NR Description: unknown protein [Arabidopsis thaliana]
  misc_feature (1)..(210): Homolog of NCBI NO: 10176931 NR Description: gene_id:MTG10.16~unknown protein [Arabidopsis
  misc_feature (1)..(210): Homolog of NCBI NO: 37536224 NR Description: unknown protein [Oryza sativa (japonica
  misc_feature (1)..(210): Homolog of NCBI NO: 18424554 NR Description: putative protein
  misc_feature (1)..(214): Homolog of NCBI NO: 15219283 NR Description: unknown protein; protein id: At1g16560.1
  misc_feature (168)..(168): Xaa is any aa, unknown or other
MHFHGWLSFFIMIYYKLPLKQDRTAYYEYVGLWHIYGLLSMNSWFWSAVFHSRDVDLTERLDYSSAVAILGFSLILAILRTFDIRVEAARVMVSAPILAFVTTHILYINFYKLDYGWNMIVCVAMGVSQLFLWARWAAVSSHPSNWKLWVVVIAGGLAMLLEIYDFPXYEGYFDAHSIWHAATIPLTILWWSFIRDDAEFRTSSLLKKTKTKAK

SEQ ID NO: 42049 - DNA, 1248 bp, Arabidopsis thaliana
  misc_feature (1)..(1248): Ceres Seq. ID no. 12330974
  misc_feature: MA Experiment ID: 20000451 Result: Up-regulated in Transcription
  misc_feature: MA Experiment 20000451 PARAMETER Experiment Name: At_CS6879_Shoots-Roots_P Parameter: Age (day) Value: 14
  misc_feature: MA Experiment 20000451 PARAMETER Experiment Name: At_CS6879_Shoots-Roots_P Parameter: Organism Value: A. thaliana
  misc_feature: MA Experiment 20000451 PARAMETER Experiment Name: At_CS6879_Shoots-Roots_P Parameter: Plant Line Value: CS6879 vs. WS
  misc_feature: MA Experiment 20000451 PARAMETER Experiment Name: At_CS6879_Shoots-Roots_P Parameter: Tissue Value: Roots
  misc_feature: MA Experiment ID: 20000573 Result: Down-regulated in Transcription
  misc_feature: MA Experiment 20000573 PARAMETER Experiment Name: At_100uM_ABA_Mutants__P Parameter: Organism Value: A. thaliana
  misc_feature: MA Experiment 20000573 PARAMETER Experiment Name: At_100uM_ABA_Mutants__P Parameter: Plant Line Value: CS22 vs. Ler wt
  misc_feature: MA Experiment 20000573 PARAMETER Experiment Name: At_100uM_ABA_Mutants__P Parameter: Timepoint (hr) Value: N/A
  misc_feature: MA Experiment 20000573 PARAMETER Experiment Name: At_100uM_ABA_Mutants__P Parameter: Tissue Value: Whole Plant
  misc_feature: MA Experiment 20000573 PARAMETER Experiment Name: At_100uM_ABA_Mutants__P Parameter: Treatment Value: None
atatctcctaccatcacaaagtcatctccttcttctttcttgatctagctagcggaaaatttgacaatggcaagaatcggaagctttctcattattctttacctcatttacgctcttactctctgcatctgcgacgacgacgagagtaactatggcggcgacaaagggaacctcttcccaggtttctacagaagctcgtgccctagagccgaggagatcgtgaggtcagttgtagccaaagctgttgcaagggagactcgtatggctgcttctctcatgaggctccatttccacgattgtttcgttcagggttgtgatggatcgttgcttctagacaccagtgggagtatagttactgagaagaactctaacccgaacagcagatcggctcgcgggtttgaagttgttgacgagatcaaggcagcattagagaacgaatgccctaacactgtttcttgtgctgatgccttaactctagccgctagagactcctctgttcttactggtggaccaagctggatggttcctttgggaagaagagattcgacaagtgcaagcttgagtggatcaaacaacaacattcctgcacccaacaacactttcaacacaattgtcacgagatttaacaaccaaggtctcgatctcaccgacgttgttgctctctccgggagccacaccattggattttcaagatgcactagtttcagacagagactgtacaaccaatccggaaacggaagtcccgacagaaccttagagcaatcctacgctgctaacttgcgccaaaggtgccctagatcgggtggggaccagaacctgtcagagcttgacatcaacagcgctggaagatttgataacagctacttcaagaacttgatcgagaacatgggactgttgaattccgacgaggtcttgttctctagcaatgagcaatcaagagagctcgtcaagaagtatgcagaggatcaagaagagttcttcgagcagttcgcggagtcgatgatcaagatggggaatatctctcccttgacaggttcgagtggtgagatcagaaagaattgcaggaaaattaataactcttgatttcctagtatcggatgggagaaatagaaatgtgacatgttttggaggaaggaatttatgtttatgtttttttttatattgtatgagtctgtatttctttgtgtcaagaatttgaattttgtaagtttaaatgattgaaactatctataattaaaatgttattat

SEQ ID NO: 42050 - protein, 338 aa, Arabidopsis thaliana
  peptide (1)..(338): Ceres Seq. ID no. 12330975
  misc_feature (52)..(300): Pfam Name: Peroxidase Pfam Description: Peroxidase
  misc_feature (4)..(336): Homolog of NCBI NO: 7453853 NR Description: peroxidase prx14 precursor [Spinacia oleracea]
  misc_feature (1)..(336): Homolog of NCBI NO: 7453855 NR Description: peroxidase prx15 precursor [Spinacia oleracea]
  misc_feature (8)..(337): Homolog of NCBI NO: 34903044 NR Description: unnamed protein product [Oryza sativa (japonica
  misc_feature (8)..(337): Homolog of NCBI NO: 7658147 NR Description: peroxidase [Asparagus officinalis]
  misc_feature (1)..(338): Homolog of NCBI NO: 1402918 NR Description: peroxidase [Arabidopsis thaliana]
  misc_feature (1)..(338): Homolog of NCBI NO: 15239370 NR Description: peroxidase, putative; protein id: At5g66390.1
  misc_feature (1)..(337): Homolog of NCBI NO: 15234394 NR Description: peroxidase, putative
  misc_feature (1)..(338): Homolog of NCBI NO: 15224114 NR Description: peroxidase, putative; protein id: At2g18140.1
  misc_feature (1)..(338): Homolog of NCBI NO: 21537275 NR Description: putative peroxidase [Arabidopsis thaliana]
  misc_feature (1)..(338): Homolog of NCBI NO: 15224116 NR Description: peroxidase, putative
MARIGSFLIILYLIYALTLCICDDDESNYGGDKGNLFPGFYRSSCPRAEEIVRSVVAKAVARETRMAASLMRLHFHDCFVQGCDGSLLLDTSGSIVTEKNSNPNSRSARGFEVVDEIKAALENECPNTVSCADALTLAARDSSVLTGGPSWMVPLGRRDSTSASLSGSNNNIPAPNNTFNTIVTRFNNQGLDLTDVVALSGSHTIGFSRCTSFRQRLYNQSGNGSPDRTLEQSYAANLRQRCPRSGGDQNLSELDINSAGRFDNSYFKNLIENMGLLNSDEVLFSSNEQSRELVKKYAEDQEEFFEQFAESMIKMGNISPLTGSSGEIRKNCRKINNS

SEQ ID NO: 42051 - protein, 273 aa, Arabidopsis thaliana
  peptide (1)..(273): Ceres Seq. ID no. 12330976
  misc_feature (1)..(235): Pfam Name: Peroxidase Pfam Description: Peroxidase
  misc_feature (1)..(271): Homolog of NCBI NO: 7453853 NR Description: peroxidase prx14 precursor [Spinacia oleracea]
  misc_feature (1)..(271): Homolog of NCBI NO: 7453855 NR Description: peroxidase prx15 precursor [Spinacia oleracea]
  misc_feature (1)..(272): Homolog of NCBI NO: 34903044 NR Description: unnamed protein product [Oryza sativa (japonica
  misc_feature (1)..(272): Homolog of NCBI NO: 7658147 NR Description: peroxidase [Asparagus officinalis]
  misc_feature (1)..(273): Homolog of NCBI NO: 1402918 NR Description: peroxidase [Arabidopsis thaliana]
  misc_feature (1)..(273): Homolog of NCBI NO: 15239370 NR Description: peroxidase, putative; protein id: At5g66390.1
  misc_feature (1)..(272): Homolog of NCBI NO: 15234394 NR Description: peroxidase, putative
  misc_feature (1)..(273): Homolog of NCBI NO: 15224114 NR Description: peroxidase, putative; protein id: At2g18140.1
  misc_feature (1)..(273): Homolog of NCBI NO: 21537275 NR Description: putative peroxidase [Arabidopsis thaliana]
  misc_feature (1)..(273): Homolog of NCBI NO: 15224116 NR Description: peroxidase, putative
MAASLMRLHFHDCFVQGCDGSLLLDTSGSIVTEKNSNPNSRSARGFEVVDEIKAALENECPNTVSCADALTLAARDSSVLTGGPSWMVPLGRRDSTSASLSGSNNNIPAPNNTFNTIVTRFNNQGLDLTDVVALSGSHTIGFSRCTSFRQRLYNQSGNGSPDRTLEQSYAANLRQRCPRSGGDQNLSELDINSAGRFDNSYFKNLIENMGLLNSDEVLFSSNEQSRELVKKYAEDQEEFFEQFAESMIKMGNISPLTGSSGEIRKNCRKINNS

SEQ ID NO: 42052 - protein, 268 aa, Arabidopsis thaliana
  peptide (1)..(268): Ceres Seq. ID no. 12330977
  misc_feature (1)..(230): Pfam Name: Peroxidase Pfam Description: Peroxidase
  misc_feature (1)..(266): Homolog of NCBI NO: 7453853 NR Description: peroxidase prx14 precursor [Spinacia oleracea]
  misc_feature (1)..(266): Homolog of NCBI NO: 7453855 NR Description: peroxidase prx15 precursor [Spinacia oleracea]
  misc_feature (1)..(267): Homolog of NCBI NO: 34903044 NR Description: unnamed protein product [Oryza sativa (japonica
  misc_feature (1)..(267): Homolog of NCBI NO: 7658147 NR Description: peroxidase [Asparagus officinalis]
  misc_feature (1)..(268): Homolog of NCBI NO: 1402918 NR Description: peroxidase [Arabidopsis thaliana]
  misc_feature (1)..(268): Homolog of NCBI NO: 15239370 NR Description: peroxidase, putative; protein id: At5g66390.1
  misc_feature (1)..(267): Homolog of NCBI NO: 15234394 NR Description: peroxidase, putative
  misc_feature (1)..(268): Homolog of NCBI NO: 15224114 NR Description: peroxidase, putative; protein id: At2g18140.1
  misc_feature (1)..(268): Homolog of NCBI NO: 21537275 NR Description: putative peroxidase [Arabidopsis thaliana]
  misc_feature (1)..(268): Homolog of NCBI NO: 15224116 NR Description: peroxidase, putative
MRLHFHDCFVQGCDGSLLLDTSGSIVTEKNSNPNSRSARGFEVVDEIKAALENECPNTVSCADALTLAARDSSVLTGGPSWMVPLGRRDSTSASLSGSNNNIPAPNNTFNTIVTRFNNQGLDLTDVVALSGSHTIGFSRCTSFRQRLYNQSGNGSPDRTLEQSYAANLRQRCPRSGGDQNLSELDINSAGRFDNSYFKNLIENMGLLNSDEVLFSSNEQSRELVKKYAEDQEEFFEQFAESMIKMGNISPLTGSSGEIRKNCRKINNS

SEQ ID NO: 42053 - DNA, 1231 bp, Arabidopsis thaliana
  misc_feature (1)..(1231): Ceres Seq. ID no. 12325874
  misc_feature: MA Experiment ID: 20000184 Result: Up-regulated in Transcription
  misc_feature: MA Experiment 20000184 PARAMETER Experiment Name: At_Shoots__P Parameter: Age (day) Value: 7
  misc_feature: MA Experiment 20000184 PARAMETER Experiment Name: At_Shoots__P Parameter: Tissue Value: Shoots vs. Whole Plant
  misc_feature: MA Experiment ID: 20000234 Result: Up-regulated in Transcription
  misc_feature: MA Experiment 20000234 PARAMETER Experiment Name: At_Siliques_P Parameter: Age (day) Value: 21
  misc_feature: MA Experiment 20000234 PARAMETER Experiment Name: At_Siliques_P Parameter: Organism Value: A. thaliana
  misc_feature: MA Experiment 20000234 PARAMETER Experiment Name: At_Siliques_P Parameter: Plant Line Value: WS
  misc_feature: MA Experiment 20000234 PARAMETER Experiment Name: At_Siliques_P Parameter: Tissue Value: Less Than 5mm Siliques vs. Whole Plant
  misc_feature: MA Experiment ID: 20000264 Result: Up-regulated in Transcription
  misc_feature: MA Experiment 20000264 PARAMETER Experiment Name: At_Open_Flower_P Parameter: Age (day) Value: 21
  misc_feature: MA Experiment 20000264 PARAMETER Experiment Name: At_Open_Flower_P Parameter: Plant Line Value: WS
  misc_feature: MA Experiment 20000264 PARAMETER Experiment Name: At_Open_Flower_P Parameter: Tissue Value: Open Flower vs. Whole Plant
  misc_feature: MA Experiment ID: 20000286 Result: Up-regulated in Transcription
  misc_feature: MA Experiment 20000286 PARAMETER Experiment Name: At_Open_Flower_P Parameter: Age (day) Value: 21
  misc_feature: MA Experiment 20000286 PARAMETER Experiment Name: At_Open_Flower_P Parameter: Plant Line Value: WS
  misc_feature: MA Experiment 20000286 PARAMETER Experiment Name: At_Open_Flower_P Parameter: Tissue Value: Half Open vs. Whole Plant
  misc_feature: MA Experiment ID: 20000437 Result: Down-regulated in Transcription
  misc_feature: MA Experiment 20000437 PARAMETER Experiment Name: At_Drought_P Parameter: Age (day) Value: 8
  misc_feature: MA Experiment 20000437 PARAMETER Experiment Name: At_Drought_P Parameter: Organism Value: A. thaliana
  misc_feature: MA Experiment 20000437 PARAMETER Experiment Name: At_Drought_P Parameter: Plant Line Value: WS
  misc_feature: MA Experiment 20000437 PARAMETER Experiment Name: At_Drought_P Parameter: Timepoint (hr) Value: 24
  misc_feature: MA Experiment 20000437 PARAMETER Experiment Name: At_Drought_P Parameter: Tissue Value: Whole Plant
  misc_feature: MA Experiment 20000437 PARAMETER Experiment Name: At_Drought_P Parameter: Treatment Value: Drought vs. No Drought
  misc_feature: MA Experiment ID: 20000445 Result: Down-regulated in Transcription
  misc_feature: MA Experiment 20000445 PARAMETER Experiment Name: At_100uM_NAA__P Parameter: Age (day) Value: 14
  misc_feature: MA Experiment 20000445 PARAMETER Experiment Name: At_100uM_NAA__P Parameter: Organism Value: A. thaliana
  misc_feature: MA Experiment 20000445 PARAMETER Experiment Name: At_100uM_NAA__P Parameter: Plant Line Value: WS
  misc_feature: MA Experiment 20000445 PARAMETER Experiment Name: At_100uM_NAA__P Parameter: Timepoint (hr) Value: 6
  misc_feature: MA Experiment 20000445 PARAMETER Experiment Name: At_100uM_NAA__P Parameter: Tissue Value: Aerial
  misc_feature: MA Experiment 20000445 PARAMETER Experiment Name: At_100uM_NAA__P Parameter: Treatment Value: 100uM NAA vs. No Treatment
  misc_feature: MA Experiment ID: 20000460 Result: Up-regulated in Transcription
  misc_feature: MA Experiment 20000460 PARAMETER Experiment Name: At_10percent_PEG_P Parameter: Age (day) Value: 12
  misc_feature: MA Experiment 20000460 PARAMETER Experiment Name: At_10percent_PEG_P Parameter: Organism Value: A. thaliana
  misc_feature: MA Experiment 20000460 PARAMETER Experiment Name: At_10percent_PEG_P Parameter: Plant Line Value: WS
  misc_feature: MA Experiment 20000460 PARAMETER Experiment Name: At_10percent_PEG_P Parameter: Timepoint (day) Value: 12
  misc_feature: MA Experiment 20000460 PARAMETER Experiment Name: At_10percent_PEG_P Parameter: Tissue Value: Whole Plant
  misc_feature: MA Experiment 20000460 PARAMETER Experiment Name: At_10percent_PEG_P Parameter: Treatment Value: 10percent PEG vs. No Treatment
  misc_feature: MA Experiment ID: 20000527 Result: Up-regulated in Transcription
  misc_feature: MA Experiment 20000527 PARAMETER Experiment Name: At_10percent_PEG_P Parameter: Age (day) Value: 20
  misc_feature: MA Experiment 20000527 PARAMETER Experiment Name: At_10percent_PEG_P Parameter: Organism Value: A. thaliana
  misc_feature: MA Experiment 20000527 PARAMETER Experiment Name: At_10percent_PEG_P Parameter: Plant Line Value: WS
  misc_feature: MA Experiment 20000527 PARAMETER Experiment Name: At_10percent_PEG_P Parameter: Timepoint (day) Value: 20
  misc_feature: MA Experiment 20000527 PARAMETER Experiment Name: At_10percent_PEG_P Parameter: Tissue Value: Whole Plant
  misc_feature: MA Experiment 20000527 PARAMETER Experiment Name: At_10percent_PEG_P Parameter: Treatment Value: 10percent PEG vs. No Treatment
  misc_feature: MA Experiment ID: 20001248 Result: Down-regulated in Transcription
  misc_feature: MA Experiment 20001248 PARAMETER Experiment Name: At_Far-red-induction_P Parameter: Age (day) Value: 7
  misc_feature: MA Experiment 20001248 PARAMETER Experiment Name: At_Far-red-induction_P Parameter: Light Value: Far-red vs. White
  misc_feature: MA Experiment 20001248 PARAMETER Experiment Name: At_Far-red-induction_P Parameter: Organism Value: A. thaliana
  misc_feature: MA Experiment 20001248 PARAMETER Experiment Name: At_Far-red-induction_P Parameter: Plant Line Value: Columbia
  misc_feature: MA Experiment 20001248 PARAMETER Experiment Name: At_Far-red-induction_P Parameter: Timepoint (hr) Value: 4
  misc_feature: MA Experiment 20001248 PARAMETER Experiment Name: At_Far-red-induction_P Parameter: Tissue Value: Whole Plant
  misc_feature: MA Experiment ID: 20001450 Result: Down-regulated in Transcription
  misc_feature: MA Experiment 20001450 PARAMETER Experiment Name: At_Far-red-induction_P Parameter: Age (day) Value: 7
  misc_feature: MA Experiment 20001450 PARAMETER Experiment Name: At_Far-red-induction_P Parameter: Light Value: Far-red vs. White
  misc_feature: MA Experiment 20001450 PARAMETER Experiment Name: At_Far-red-induction_P Parameter: Organism Value: A. thaliana
  misc_feature: MA Experiment 20001450 PARAMETER Experiment Name: At_Far-red-induction_P Parameter: Plant Line Value: Columbia
  misc_feature: MA Experiment 20001450 PARAMETER Experiment Name: At_Far-red-induction_P Parameter: Timepoint (hr) Value: 8
  misc_feature: MA Experiment 20001450 PARAMETER Experiment Name: At_Far-red-induction_P Parameter: Tissue Value: Whole Plant
  misc_feature: MA Experiment ID: 20001451 Result: Down-regulated in Transcription
  misc_feature: MA Experiment 20001451 PARAMETER Experiment Name: At_Far-red-induction_P Parameter: Age (day) Value: 7
  misc_feature: MA Experiment 20001451 PARAMETER Experiment Name: At_Far-red-induction_P Parameter: Light Value: Far-red vs. White
  misc_feature: MA Experiment 20001451 PARAMETER Experiment Name: At_Far-red-induction_P Parameter: Organism Value: A. thaliana
  misc_feature: MA Experiment 20001451 PARAMETER Experiment Name: At_Far-red-induction_P Parameter: Plant Line Value: Columbia
  misc_feature: MA Experiment 20001451 PARAMETER Experiment Name: At_Far-red-induction_P Parameter: Timepoint (hr) Value: 24
  misc_feature: MA Experiment 20001451 PARAMETER Experiment Name: At_Far-red-induction_P Parameter: Tissue Value: Whole Plant
  misc_feature: MA Experiment ID: 20001554 Result: Down-regulated in Transcription
  misc_feature: MA Experiment 20001554 PARAMETER Experiment Name: At_Drought_Soil_Dry_P Parameter: Age (day) Value: 21
  misc_feature: MA Experiment 20001554 PARAMETER Experiment Name: At_Drought_Soil_Dry_P Parameter: Organism Value: A. thaliana
  misc_feature: MA Experiment 20001554 PARAMETER Experiment Name: At_Drought_Soil_Dry_P Parameter: Plant Line Value: WS
  misc_feature: MA Experiment 20001554 PARAMETER Experiment Name: At_Drought_Soil_Dry_P Parameter: Post Timepoint (hr) Value: None
  misc_feature: MA Experiment 20001554 PARAMETER Experiment Name: At_Drought_Soil_Dry_P Parameter: Post-Treatment Value: None
  misc_feature: MA Experiment 20001554 PARAMETER Experiment Name: At_Drought_Soil_Dry_P Parameter: Timepoint (day) Value: 7
  misc_feature: MA Experiment 20001554 PARAMETER Experiment Name: At_Drought_Soil_Dry_P Parameter: Treatment Value: Drought vs. No Drought
  misc_feature: MA Experiment ID: 20001555 Result: Down-regulated in Transcription
  misc_feature: MA Experiment 20001555 PARAMETER Experiment Name: At_Drought_Soil_Dry_P Parameter: Age (day) Value: 24
  misc_feature: MA Experiment 20001555 PARAMETER Experiment Name: At_Drought_Soil_Dry_P Parameter: Organism Value: A. thaliana
  misc_feature: MA Experiment 20001555 PARAMETER Experiment Name: At_Drought_Soil_Dry_P Parameter: Plant Line Value: WS
  misc_feature: MA Experiment 20001555 PARAMETER Experiment Name: At_Drought_Soil_Dry_P Parameter: Post Timepoint (hr) Value: None
  misc_feature: MA Experiment 20001555 PARAMETER Experiment Name: At_Drought_Soil_Dry_P Parameter: Post-Treatment Value: None
  misc_feature: MA Experiment 20001555 PARAMETER Experiment Name: At_Drought_Soil_Dry_P Parameter: Timepoint (day) Value: 10
  misc_feature: MA Experiment 20001555 PARAMETER Experiment Name: At_Drought_Soil_Dry_P Parameter: Treatment Value: Drought vs. No Drought
  misc_feature: MA Experiment ID: 20001556 Result: Down-regulated in Transcription
  misc_feature: MA Experiment 20001556 PARAMETER Experiment Name: At_Drought_Soil_Dry_P Parameter: Age (day) Value: 26
  misc_feature: MA Experiment 20001556 PARAMETER Experiment Name: At_Drought_Soil_Dry_P Parameter: Organism Value: A. thaliana
  misc_feature: MA Experiment 20001556 PARAMETER Experiment Name: At_Drought_Soil_Dry_P Parameter: Plant Line Value: WS
  misc_feature: MA Experiment 20001556 PARAMETER Experiment Name: At_Drought_Soil_Dry_P Parameter: Post Timepoint (hr) Value: None
  misc_feature: MA Experiment 20001556 PARAMETER Experiment Name: At_Drought_Soil_Dry_P Parameter: Post-Treatment Value: None
  misc_feature: MA Experiment 20001556 PARAMETER Experiment Name: At_Drought_Soil_Dry_P Parameter: Timepoint (day) Value: 12
  misc_feature: MA Experiment 20001556 PARAMETER Experiment Name: At_Drought_Soil_Dry_P Parameter: Treatment Value: Drought vs. No Drought
  misc_feature: MA Experiment ID: 20001557 Result: Down-regulated in Transcription
  misc_feature: MA Experiment 20001557 PARAMETER Experiment Name: At_Drought_Soil_Dry_P Parameter: Age (day) Value: 27
  misc_feature: MA Experiment 20001557 PARAMETER Experiment Name: At_Drought_Soil_Dry_P Parameter: Organism Value: A. thaliana
  misc_feature: MA Experiment 20001557 PARAMETER Experiment Name: At_Drought_Soil_Dry_P Parameter: Plant Line Value: WS
  misc_feature: MA Experiment 20001557 PARAMETER Experiment Name: At_Drought_Soil_Dry_P Parameter: Post Timepoint (hr) Value: 3
  misc_feature: MA Experiment 20001557 PARAMETER Experiment Name: At_Drought_Soil_Dry_P Parameter: Post-Treatment Value: Re-Water vs. No Drought
  misc_feature: MA Experiment 20001557 PARAMETER Experiment Name: At_Drought_Soil_Dry_P Parameter: Timepoint (day) Value: 13
  misc_feature: MA Experiment 20001557 PARAMETER Experiment Name: At_Drought_Soil_Dry_P Parameter: Treatment Value: Drought vs. No Drought
  misc_feature: MA Experiment ID: 20001558 Result: Down-regulated in Transcription
  misc_feature: MA Experiment 20001558 PARAMETER Experiment Name: At_Drought_Soil_Dry_P Parameter: Age (day) Value: 27
  misc_feature: MA Experiment 20001558 PARAMETER Experiment Name: At_Drought_Soil_Dry_P Parameter: Organism Value: A. thaliana
  misc_feature: MA Experiment 20001558 PARAMETER Experiment Name: At_Drought_Soil_Dry_P Parameter: Plant Line Value: WS
  misc_feature: MA Experiment 20001558 PARAMETER Experiment Name: At_Drought_Soil_Dry_P Parameter: Post Timepoint (hr) Value: 6
  misc_feature: MA Experiment 20001558 PARAMETER Experiment Name: At_Drought_Soil_Dry_P Parameter: Post-Treatment Value: Re-Water vs. No Drought
  misc_feature: MA Experiment 20001558 PARAMETER Experiment Name: At_Drought_Soil_Dry_P Parameter: Timepoint (day) Value: 13
  misc_feature: MA Experiment 20001558 PARAMETER Experiment Name: At_Drought_Soil_Dry_P Parameter: Treatment Value: Drought vs. No Drought
  misc_feature: MA Experiment ID: 20001559 Result: Down-regulated in Transcription
  misc_feature: MA Experiment 20001559 PARAMETER Experiment Name: At_Drought_Soil_Dry_P Parameter: Age (day) Value: 28
  misc_feature: MA Experiment 20001559 PARAMETER Experiment Name: At_Drought_Soil_Dry_P Parameter: Organism Value: A. thaliana
  misc_feature: MA Experiment 20001559 PARAMETER Experiment Name: At_Drought_Soil_Dry_P Parameter: Plant Line Value: WS
  misc_feature: MA Experiment 20001559 PARAMETER Experiment Name: At_Drought_Soil_Dry_P Parameter: Post Timepoint (hr) Value: 29
  misc_feature: MA Experiment 20001559 PARAMETER Experiment Name: At_Drought_Soil_Dry_P Parameter: Post-Treatment Value: Re-Water vs. No Drought
  misc_feature: MA Experiment 20001559 PARAMETER Experiment Name: At_Drought_Soil_Dry_P Parameter: Timepoint (day) Value: 14
  misc_feature: MA Experiment 20001559 PARAMETER Experiment Name: At_Drought_Soil_Dry_P Parameter: Treatment Value: Drought vs. No Drought
  misc_feature: MA Experiment ID: 20001560 Result: Up-regulated in Transcription
  misc_feature: MA Experiment 20001560 PARAMETER Experiment Name: At_Drought_Soil_Dry_P Parameter: Age (day) Value: 28
  misc_feature: MA Experiment 20001560 PARAMETER Experiment Name: At_Drought_Soil_Dry_P Parameter: Organism Value: A. thaliana
  misc_feature: MA Experiment 20001560 PARAMETER Experiment Name: At_Drought_Soil_Dry_P Parameter: Plant Line Value: WS
  misc_feature: MA Experiment 20001560 PARAMETER Experiment Name: At_Drought_Soil_Dry_P Parameter: Post Timepoint (hr) Value: None
  misc_feature: MA Experiment 20001560 PARAMETER Experiment Name: At_Drought_Soil_Dry_P Parameter: Post-Treatment Value: None
  misc_feature: MA Experiment 20001560 PARAMETER Experiment Name: At_Drought_Soil_Dry_P Parameter: Timepoint (day) Value: 14
  misc_feature: MA Experiment 20001560 PARAMETER Experiment Name: At_Drought_Soil_Dry_P Parameter: Treatment Value: Drought vs. No Drought
acgtcaaaaattcaaaaaccccaaaaccctataatctcctatataaatattcagccctagatcttataattcatcaatcaaacaatctcttcaatcaaatctcttcttcaatcaaatcttcaaatcccttcaaagatgccttcaatgccagaagagccgctcctaacaccaaccccagacagattctgtatgttcccaattcactacccacagatctgggaaatgtacaaaaaagccgaagcatcattctggaccgccgaagaagtagatctatcacaagacaaccgcgactgggaaaacagtctcaacgacggtgaacgtcacttcatcaaacacgtcctcgctttcttcgctgcatctgacggaatcgtactagagaatctcgcttctcgcttcatgtccgatgttcaagtctctgaggcgcgtgctttctacggtttccagatcgcgattgaaaacatccactcggagatgtatagtctccttctcgatacttatatcaaagataacaaagagagagatcatctctttcgtgccattgaaacaatcccttgcgtcgccaagaaagctcaatgggctatgaaatggatcgacggttctcagactttcgccgaacgaatcatcgctttcgcttgcgtcgaaggtatcttcttctccggaagcttttgttcaatcttctggctgaagaaacgaggactcatgcctggattaacattctcaaacgaattgatctcacgtgacgaaggtttacactgtgatttcgcttgtctactctacacgctactcaaaacaaagcttagcgaagaacgcgtgaaatcaatcgtctgcgacgcggtcgaaatcgagagagagtttgtgtgcgacgcgcttccgtgcgcgttggttgggatgaaccgtgatttgatgagtcagtatattgagtttgttgcggataggcttttgggtgcgcttgggtacgggaaggtgtacggtgttactaatccgttcgattggatggaacttatttcacttcaagggaaaacgaatttcttcgagaaacgtgttggtgattaccaaaaggcttccgttatgtctagcgttaatggtaacggcgcgtttgataaccatgtcttctctctcgacgaagatttttaaagagcgtttgttttgatgctataattacgattctactcttgtattattaccgtgtattatccttggtttttgaattaatgaataattagttgctttt

SEQ ID NO: 42054 - protein, 332 aa, Arabidopsis thaliana; identical to SEQ ID NO: 25519
  peptide (1)..(332): Ceres Seq. ID no. 12325875
  misc_feature (7)..(288): Pfam Name: Ribonucleotide reductase, small chain Pfam Description: Ribonucleotide reductase, small chain
  misc_feature (6)..(332): Homolog of NCBI NO: 34898038 NR Description: putative ribonucleoside-diphosphate reductase
  misc_feature (1)..(332): Homolog of NCBI NO: 1710401 NR Description: RIBONUCLEOSIDE-DIPHOSPHATE REDUCTASE SMALL CHAIN
  misc_feature (1)..(332): Homolog of NCBI NO: 15232077 NR Description: ribonucleotide reductase small subunit, putative

SEQ ID NO: 42055 - protein, 329 aa, Arabidopsis thaliana; identical to SEQ ID NO: 25520
  peptide (1)..(329): Ceres Seq. ID no. 12325876
  misc_feature (4)..(285): Pfam Name: Ribonucleotide reductase, small chain Pfam Description: Ribonucleotide reductase, small chain
  misc_feature (3)..(329): Homolog of NCBI NO: 34898038 NR Description: putative ribonucleoside-diphosphate reductase
  misc_feature (1)..(329): Homolog of NCBI NO: 1710401 NR Description: RIBONUCLEOSIDE-DIPHOSPHATE REDUCTASE SMALL CHAIN
  misc_feature (1)..(329): Homolog of NCBI NO: 15232077 NR Description: ribonucleotide reductase small subunit, putative

SEQ ID NO: 42056 - protein, 314 aa, Arabidopsis thaliana
  peptide (1)..(314): Ceres Seq. ID no. 12325877
  misc_feature (1)..(270): Pfam Name: Ribonucleotide reductase, small chain Pfam Description: Ribonucleotide reductase, small chain
  misc_feature (1)..(314): Homolog of NCBI NO: 34898038 NR Description: putative ribonucleoside-diphosphate reductase
  misc_feature (1)..(314): Homolog of NCBI NO: 1710401 NR Description: RIBONUCLEOSIDE-DIPHOSPHATE REDUCTASE SMALL CHAIN
  misc_feature (1)..(314): Homolog of NCBI NO: 15232077 NR Description: ribonucleotide reductase small subunit, putative
MFPIHYPQIWEMYKKAEASFWTAEEVDLSQDNRDWENSLNDGERHFIKHVLAFFAASDGIVLENLASRFMSDVQVSEARAFYGFQIAIENIHSEMYSLLLDTYIKDNKERDHLFRAIETIPCVAKKAQWAMKWIDGSQTFAERIIAFACVEGIFFSGSFCSIFWLKKRGLMPGLTFSNELISRDEGLHCDFACLLYTLLKTKLSEERVKSIVCDAVEIEREFVCDALPCALVGMNRDLMSQYIEFVADRLLGALGYGKVYGVTNPFDWMELISLQGKTNFFEKRVGDYQKASVMSSVNGNGAFDNHVFSLDEDF

SEQ ID NO: 42057 - DNA, 1374 bp, Arabidopsis thaliana
  misc_feature (1)..(1374): Ceres Seq. ID no. 13499634
  misc_feature: MA Experiment ID: 108433 Result: Up-regulated in Transcription
  misc_feature: MA Experiment 108433 PARAMETER Experiment Name: At_rhl_Mutant2_cDNA_P Parameter: Age (day) Value: 7
  misc_feature: MA Experiment 108433 PARAMETER Experiment Name: At_rhl_Mutant2_cDNA_P Parameter: Organism Value: A. thaliana
  misc_feature: MA Experiment 108433 PARAMETER Experiment Name: At_rhl_Mutant2_cDNA_P Parameter: Plant Line Value: rhl Mutant vs. wt landsburg
  misc_feature: MA Experiment 108433 PARAMETER Experiment Name: At_rhl_Mutant2_cDNA_P Parameter: Tissue Value: Roots
  misc_feature: MA Experiment ID: 108461 Result: Down-regulated in Transcription
  misc_feature: MA Experiment 108461 PARAMETER Experiment Name: At_Germinating_Seeds_cDNA_P Parameter: Age (day) Value: 1 vs. 0
  misc_feature: MA Experiment 108461 PARAMETER Experiment Name: At_Germinating_Seeds_cDNA_P Parameter: Tissue Value: Germinating Seeds
  misc_feature: MA Experiment ID: 108462 Result: Down-regulated in Transcription
  misc_feature: MA Experiment 108462 PARAMETER Experiment Name: At_Germinating_Seeds_cDNA_P Parameter: Age (day) Value: 2 vs. 0
  misc_feature: MA Experiment 108462 PARAMETER Experiment Name: At_Germinating_Seeds_cDNA_P Parameter: Tissue Value: Germinating Seeds
  misc_feature: MA Experiment ID: 108572 Result: Up-regulated in Transcription
  misc_feature: MA Experiment 108572 PARAMETER Experiment Name: At_Drought_cDNA_P Parameter: Timepoint (hr) Value: 1
  misc_feature: MA Experiment 108572 PARAMETER Experiment Name: At_Drought_cDNA_P Parameter: Tissue Value: Aerial
  misc_feature: MA Experiment 108572 PARAMETER Experiment Name: At_Drought_cDNA_P Parameter: Treatment Value: Drought vs. No Drought
  misc_feature: MA Experiment ID: 108573 Result: Up-regulated in Transcription
  misc_feature: MA Experiment 108573 PARAMETER Experiment Name: At_Drought_cDNA_P Parameter: Timepoint (hr) Value: 6
  misc_feature: MA Experiment 108573 PARAMETER Experiment Name: At_Drought_cDNA_P Parameter: Tissue Value: Aerial
  misc_feature: MA Experiment 108573 PARAMETER Experiment Name: At_Drought_cDNA_P Parameter: Treatment Value: Drought vs. No Drought
  misc_feature: MA Experiment ID: 108577 Result: Down-regulated in Transcription
  misc_feature: MA Experiment 108577 PARAMETER Experiment Name: At_42deg_Heat_cDNA_P Parameter: Temperature (deg C) Value: 42 vs. 22
  misc_feature: MA Experiment 108577 PARAMETER Experiment Name: At_42deg_Heat_cDNA_P Parameter: Timepoint (hr) Value: 6
  misc_feature: MA Experiment 108577 PARAMETER Experiment Name: At_42deg_Heat_cDNA_P Parameter: Tissue Value: Aerial
  misc_feature: MA Experiment ID: 108585 Result: Down-regulated in Transcription
  misc_feature: MA Experiment 108585 PARAMETER Experiment Name: At_5mM_NaNP_cDNA_P Parameter: Timepoint (hr) Value: 6
  misc_feature: MA Experiment 108585 PARAMETER Experiment Name: At_5mM_NaNP_cDNA_P Parameter: Tissue Value: Aerial
  misc_feature: MA Experiment 108585 PARAMETER Experiment Name: At_5mM_NaNP_cDNA_P Parameter: Treatment Value: null
  misc_feature: MA Experiment ID: 108594 Result: Down-regulated in Transcription
  misc_feature: MA Experiment 108594 PARAMETER Experiment Name: At_Ler-rhl_Root_cDNA_P Parameter: Plant Line Value: null
  misc_feature: MA Experiment ID: 108595 Result: Down-regulated in Transcription
  misc_feature: MA Experiment 108595 PARAMETER Experiment Name: At_Ler-pi_Ovule_cDNA_P Parameter: Plant Line Value: null
  misc_feature: MA Experiment ID: 108605 Result: Up-regulated in Transcription
  misc_feature: MA Experiment 108605 PARAMETER Experiment Name: At_100uM_ABA_cDNA_P Parameter: Timepoint (hr) Value: 6
  misc_feature: MA Experiment 108605 PARAMETER Experiment Name: At_100uM_ABA_cDNA_P Parameter: Tissue Value: Aerial
  misc_feature: MA Experiment 108605 PARAMETER Experiment Name: At_100uM_ABA_cDNA_P Parameter: Treatment Value: 100uM ABA vs. No Treatment
  misc_feature: MA Experiment ID: 20000111 Result: Down-regulated in Transcription
  misc_feature: MA Experiment 20000111 PARAMETER Experiment Name: At_42deg_Heat_cDNA_P Parameter: Temperature (deg C) Value: 42 vs. 22
  misc_feature: MA Experiment 20000111 PARAMETER Experiment Name: At_42deg_Heat_cDNA_P Parameter: Timepoint (hr) Value: 6
  misc_feature: MA Experiment 20000111 PARAMETER Experiment Name: At_42deg_Heat_cDNA_P Parameter: Tissue Value: Aerial
  misc_feature: MA Experiment ID: 20000113 Result: Down-regulated in Transcription
  misc_feature: MA Experiment 20000113 PARAMETER Experiment Name: At_42deg_Heat_cDNA_P Parameter: Temperature (deg C) Value: 42 vs. 22
  misc_feature: MA Experiment 20000113 PARAMETER Experiment Name: At_42deg_Heat_cDNA_P Parameter: Timepoint (hr) Value: 8
  misc_feature: MA Experiment 20000113 PARAMETER Experiment Name: At_42deg_Heat_cDNA_P Parameter: Tissue Value: Aerial
  misc_feature: MA Experiment ID: 20000169 Result: Up-regulated in Transcription
  misc_feature: MA Experiment 20000169 PARAMETER Experiment Name: At_100uM_ABA_P Parameter: Age (day) Value: 14
  misc_feature: MA Experiment 20000169 PARAMETER Experiment Name: At_100uM_ABA_P Parameter: Organism Value: A. thaliana
  misc_feature: MA Experiment 20000169 PARAMETER Experiment Name: At_100uM_ABA_P Parameter: Plant Line Value: WS
  misc_feature: MA Experiment 20000169 PARAMETER Experiment Name: At_100uM_ABA_P Parameter: Timepoint (hr) Value: 6
  misc_feature: MA Experiment 20000169 PARAMETER Experiment Name: At_100uM_ABA_P Parameter: Tissue Value: Aerial
  misc_feature: MA Experiment 20000169 PARAMETER Experiment Name: At_100uM_ABA_P Parameter: Treatment Value: 100uM ABA vs. No Treatment
  misc_feature: MA Experiment ID: 20000173 Result: Down-regulated in Transcription
  misc_feature: MA Experiment 20000173 PARAMETER Experiment Name: At_42deg_Heat_P Parameter: Age (day) Value: 14
  misc_feature: MA Experiment 20000173 PARAMETER Experiment Name: At_42deg_Heat_P Parameter: Organism Value: A. thaliana
  misc_feature: MA Experiment 20000173 PARAMETER Experiment Name: At_42deg_Heat_P Parameter: Plant Line Value: WS
  misc_feature: MA Experiment 20000173 PARAMETER Experiment Name: At_42deg_Heat_P Parameter: Temperature (deg C) Value: 42 vs. 22
  misc_feature: MA Experiment 20000173 PARAMETER Experiment Name: At_42deg_Heat_P Parameter: Timepoint (hr) Value: 6
  misc_feature: MA Experiment 20000173 PARAMETER Experiment Name: At_42deg_Heat_P Parameter: Tissue Value: Aerial
  misc_feature: MA Experiment ID: 20000184 Result: Down-regulated in Transcription
  misc_feature: MA Experiment 20000184 PARAMETER Experiment Name: At_Shoots__P Parameter: Age (day) Value: 7
  misc_feature: MA Experiment 20000184 PARAMETER Experiment Name: At_Shoots__P Parameter: Tissue Value: Shoots vs. Whole Plant
  misc_feature: MA Experiment ID: 20000227 Result: Down-regulated in Transcription
  misc_feature: MA Experiment 20000227 PARAMETER Experiment Name: At_Root-Tips-vs-Tops_P Parameter: Tissue Value: Root Tips vs. Root Tops
  misc_feature: MA Experiment ID: 20000234 Result: Down-regulated in Transcription
  misc_feature: MA Experiment 20000234 PARAMETER Experiment Name: At_Siliques_P Parameter: Age (day) Value: 21
  misc_feature: MA Experiment 20000234 PARAMETER Experiment Name: At_Siliques_P Parameter: Organism Value: A. thaliana
  misc_feature: MA Experiment 20000234 PARAMETER Experiment Name: At_Siliques_P Parameter: Plant Line Value: WS
  misc_feature: MA Experiment 20000234 PARAMETER Experiment Name: At_Siliques_P Parameter: Tissue Value: Less Than 5mm Siliques vs. Whole Plant
  misc_feature: MA Experiment ID: 20000235 Result: Down-regulated in Transcription
  misc_feature: MA Experiment 20000235 PARAMETER Experiment Name: At_Siliques_P Parameter: Age (day) Value: 21
  misc_feature: MA Experiment 20000235 PARAMETER Experiment Name: At_Siliques_P Parameter: Organism Value: A. thaliana
  misc_feature: MA Experiment 20000235 PARAMETER Experiment Name: At_Siliques_P Parameter: Plant Line Value: WS
  misc_feature: MA Experiment 20000235 PARAMETER Experiment Name: At_Siliques_P Parameter: Tissue Value: 5-10mm Siliques vs. Whole Plant
  misc_feature: MA Experiment ID: 20000265 Result: Down-regulated in Transcription
  misc_feature: MA Experiment 20000265 PARAMETER Experiment Name: At_Open_Flower_P Parameter: Age (day) Value: 21
  misc_feature: MA Experiment 20000265 PARAMETER Experiment Name: At_Open_Flower_P Parameter: Plant Line Value: WS
  misc_feature: MA Experiment 20000265 PARAMETER Experiment Name: At_Open_Flower_P Parameter: Tissue Value: Closed Flower vs. Whole Plant
  misc_feature: MA Experiment ID: 20000286 Result: Down-regulated in Transcription
  misc_feature: MA Experiment 20000286 PARAMETER Experiment Name: At_Open_Flower_P Parameter: Age (day) Value: 21
  misc_feature: MA Experiment 20000286 PARAMETER Experiment Name: At_Open_Flower_P Parameter: Plant Line Value: WS
  misc_feature: MA Experiment 20000286 PARAMETER Experiment Name: At_Open_Flower_P Parameter: Tissue Value: Half Open vs. Whole Plant
  misc_feature: MA Experiment ID: 20000436 Result: Up-regulated in Transcription
  misc_feature: MA Experiment 20000436 PARAMETER Experiment Name: At_Drought_P Parameter: Age (day) Value: 7
  misc_feature: MA Experiment 20000436 PARAMETER Experiment Name: At_Drought_P Parameter: Organism Value: A. thaliana
  misc_feature: MA Experiment 20000436 PARAMETER Experiment Name: At_Drought_P Parameter: Plant Line Value: WS
  misc_feature: MA Experiment 20000436 PARAMETER Experiment Name: At_Drought_P Parameter: Timepoint (hr) Value: 12
  misc_feature: MA Experiment 20000436 PARAMETER Experiment Name: At_Drought_P Parameter: Tissue Value: Whole Plant
  misc_feature: MA Experiment 20000436 PARAMETER Experiment Name: At_Drought_P Parameter: Treatment Value: Drought vs. No Drought
  misc_feature: MA Experiment ID: 20000437 Result: Up-regulated in Transcription
  misc_feature: MA Experiment 20000437 PARAMETER Experiment Name: At_Drought_P Parameter: Age (day) Value: 8
  misc_feature: MA Experiment 20000437 PARAMETER Experiment Name: At_Drought_P Parameter: Organism Value: A. thaliana
  misc_feature: MA Experiment 20000437 PARAMETER Experiment Name: At_Drought_P Parameter: Plant Line Value: WS
  misc_feature: MA Experiment 20000437 PARAMETER Experiment Name: At_Drought_P Parameter: Timepoint (hr) Value: 24
  misc_feature: MA Experiment 20000437 PARAMETER Experiment Name: At_Drought_P Parameter: Tissue Value: Whole Plant
  misc_feature: MA Experiment 20000437 PARAMETER Experiment Name: At_Drought_P Parameter: Treatment Value: Drought vs. No Drought
  misc_feature: MA Experiment ID: 20000573 Result: Down-regulated in Transcription
  misc_feature: MA Experiment 20000573 PARAMETER Experiment Name: At_100uM_ABA_Mutants__P Parameter: Organism Value: A. thaliana
  misc_feature: MA Experiment 20000573 PARAMETER Experiment Name: At_100uM_ABA_Mutants__P Parameter: Plant Line Value: CS22 vs. Ler wt
  misc_feature: MA Experiment 20000573 PARAMETER Experiment Name: At_100uM_ABA_Mutants__P Parameter: Timepoint (hr) Value: N/A
  misc_feature: MA Experiment 20000573 PARAMETER Experiment Name: At_100uM_ABA_Mutants__P Parameter: Tissue Value: Whole Plant
  misc_feature: MA Experiment 20000573 PARAMETER Experiment Name: At_100uM_ABA_Mutants__P Parameter: Treatment Value: None
  misc_feature: MA Experiment ID: 20000574 Result: Down-regulated in Transcription
  misc_feature: MA Experiment 20000574 PARAMETER Experiment Name: At_100uM_ABA_Mutants__P Parameter: Organism Value: A. thaliana
  misc_feature: MA Experiment 20000574 PARAMETER Experiment Name: At_100uM_ABA_Mutants__P Parameter: Plant Line Value: CS23 vs. Ler wt
  misc_feature: MA Experiment 20000574 PARAMETER Experiment Name: At_100uM_ABA_Mutants__P Parameter: Timepoint (hr) Value: N/A
  misc_feature: MA Experiment 20000574 PARAMETER Experiment Name: At_100uM_ABA_Mutants__P Parameter: Tissue Value: Whole Plant
  misc_feature: MA Experiment 20000574 PARAMETER Experiment Name: At_100uM_ABA_Mutants__P Parameter: Treatment Value: None
  misc_feature: MA Experiment ID: 20000794 Result: Up-regulated in Transcription
  misc_feature: MA Experiment 20000794 PARAMETER Experiment Name: At_Petals_P Parameter: Age (day) Value: 23-25 days
  misc_feature: MA Experiment 20000794 PARAMETER Experiment Name: At_Petals_P Parameter: Plant Line Value: WS
  misc_feature: MA Experiment 20000794 PARAMETER Experiment Name: At_Petals_P Parameter: Tissue Value: Petals vs. Whole plant
  misc_feature: MA Experiment ID: 20001557 Result: Down-regulated in Transcription
  misc_feature: MA Experiment 20001557 PARAMETER Experiment Name: At_Drought_Soil_Dry_P Parameter: Age (day) Value: 27
  misc_feature: MA Experiment 20001557 PARAMETER Experiment Name: At_Drought_Soil_Dry_P Parameter: Organism Value: A. thaliana
  misc_feature: MA Experiment 20001557 PARAMETER Experiment Name: At_Drought_Soil_Dry_P Parameter: Plant Line Value: WS
  misc_feature: MA Experiment 20001557 PARAMETER Experiment Name: At_Drought_Soil_Dry_P Parameter: Post Timepoint (hr) Value: 3
  misc_feature: MA Experiment 20001557 PARAMETER Experiment Name: At_Drought_Soil_Dry_P Parameter: Post-Treatment Value: Re-Water vs. No Drought
  misc_feature: MA Experiment 20001557 PARAMETER Experiment Name: At_Drought_Soil_Dry_P Parameter: Timepoint (day) Value: 13
  misc_feature: MA Experiment 20001557 PARAMETER Experiment Name: At_Drought_Soil_Dry_P Parameter: Treatment Value: Drought vs. No Drought
  misc_feature: MA Experiment ID: 20001558 Result: Down-regulated in Transcription
  misc_feature: MA Experiment 20001558 PARAMETER Experiment Name: At_Drought_Soil_Dry_P Parameter: Age (day) Value: 27
  misc_feature: MA Experiment 20001558 PARAMETER Experiment Name: At_Drought_Soil_Dry_P Parameter: Organism Value: A. thaliana
  misc_feature: MA Experiment 20001558 PARAMETER Experiment Name: At_Drought_Soil_Dry_P Parameter: Plant Line Value: WS
  misc_feature: MA Experiment 20001558 PARAMETER Experiment Name: At_Drought_Soil_Dry_P Parameter: Post Timepoint (hr) Value: 6
  misc_feature: MA Experiment 20001558 PARAMETER Experiment Name: At_Drought_Soil_Dry_P Parameter: Post-Treatment Value: Re-Water vs. No Drought
  misc_feature: MA Experiment 20001558 PARAMETER Experiment Name: At_Drought_Soil_Dry_P Parameter: Timepoint (day) Value: 13
  misc_feature: MA Experiment 20001558 PARAMETER Experiment Name: At_Drought_Soil_Dry_P Parameter: Treatment Value: Drought vs. No Drought
  misc_feature: MA Experiment ID: 20001560 Result: Down-regulated in Transcription
  misc_feature: MA Experiment 20001560 PARAMETER Experiment Name: At_Drought_Soil_Dry_P Parameter: Age (day) Value: 28
  misc_feature: MA Experiment 20001560 PARAMETER Experiment Name: At_Drought_Soil_Dry_P Parameter: Organism Value: A. thaliana
  misc_feature: MA Experiment 20001560 PARAMETER Experiment Name: At_Drought_Soil_Dry_P Parameter: Plant Line Value: WS
  misc_feature: MA Experiment 20001560 PARAMETER Experiment Name: At_Drought_Soil_Dry_P Parameter: Post Timepoint (hr) Value: None
  misc_feature: MA Experiment 20001560 PARAMETER Experiment Name: At_Drought_Soil_Dry_P Parameter: Post-Treatment Value: None
  misc_feature: MA Experiment 20001560 PARAMETER Experiment Name: At_Drought_Soil_Dry_P Parameter: Timepoint (day) Value: 14
  misc_feature: MA Experiment 20001560 PARAMETER Experiment Name: At_Drought_Soil_Dry_P Parameter: Treatment Value: Drought vs. No Drought
  misc_feature: MA Experiment ID: 20001911 Result: Up-regulated in Transcription
  misc_feature: MA Experiment 20001911 PARAMETER Experiment Name: At_Drought_Reproduction_P Parameter: Age (day) Value: 40
  misc_feature: MA Experiment 20001911 PARAMETER Experiment Name: At_Drought_Reproduction_P Parameter: Organism Value: A. thaliana
  misc_feature: MA Experiment 20001911 PARAMETER Experiment Name: At_Drought_Reproduction_P Parameter: Plant Line Value: WS
  misc_feature: MA Experiment 20001911 PARAMETER Experiment Name: At_Drought_Reproduction_P Parameter: Timepoint (day) Value: 10
  misc_feature: MA Experiment 20001911 PARAMETER Experiment Name: At_Drought_Reproduction_P Parameter: Tissue Value: Flowers
  misc_feature: MA Experiment 20001911 PARAMETER Experiment Name: At_Drought_Reproduction_P Parameter: Treatment Value: Drought vs. No Drought
ctctctcacactcaccatgcaatttttctttccttgtgaccaagacttctctccaactctaaaccaaaaaacacccagattttttctctctgatttcaagattccccaaaactttttctccaagaccctctacaactttcttgatggcggtaggaatctttggattgatcccaagctcatcaccagacgagctaaggaagattcttcaagcgctttcgacgaaatggggaggtagttgaggattttgagagtcttgaagtgaagccaatgaaaggagcgatgactaacgaagtgttcatggttagttggcctagaaaagaaacgaatcttcgatgtaggaagcttcttgttcgtgtttatggtgaaggtgttgagcttttcttcaatagagacgatgagattcgtacttttgagtatgttgctcgtcatggtcacggtcctacacttcttggtcgcttcgccggcggtagagtcgaagagtttatccatgcccggacactatcggcaaccgatcttcgtgatccgaacatatcagctcttgttgcatctaagctaagaagatttcacagcatacacattcctggagatagaattatgctcatctgggacaggatgaggacttgggtaggacaagccaagaatctatgttcaaatgaacattcaacagagtttggtctagacgacattgaagatgaaatcaacctgctggagcaagaagtgaacaatgaacaagagattggcttctgtcacaatgacttgcagtatggtaacatcatgattgatgaagaaaccaatgcaattactatcattgattatgagtatgcaagttataatccgatcgcttacgacatagcaaatcatttctgtgaaatggcggcagattatcattcaaacactcctcatatcttggactacactctatatccaggggaagaagaaaggaggagattcatatgtaactacttaacctcttcaggtgaagaagcaagagaagaagacatagaacaacttttggatgatattgagaagtatacattggcaagccatctcttctggggtttatggggaatcatatctggttatgtgaacaagattgagtttgattatatcgagtattcgaggcagagattcaaacagtattggcttcgcaagccaaagcttttatctttcttcccatcctaataagtaaattctctgtttacttatgtttactctttgcgaataacgcggtaaaaacccgatgatggatccatgatatagctatgccaaagctaaaactatgtgtaattcttctgttctgaacttctgatactatgtaataagtaaaagatataaatattccatactataatatttccacaataatgagaaaag

SEQ ID NO: 42058 - protein, 304 aa, Arabidopsis thaliana
  peptide (1)..(304): Ceres Seq. ID no. 13499635
  misc_feature (22)..(293): Pfam Name: Choline/ethanolamine kinase Pfam Description: Choline/ethanolamine kinase
  misc_feature (1)..(299): Homolog of NCBI NO: 7488654 NR Description: choline kinase (EC 2.7.1.32) CK3 - soybean
  misc_feature (1)..(300): Homolog of NCBI NO: 25348157 NR Description: protein choline kinase F1O17.1 [imported] -
  misc_feature (1)..(300): Homolog of NCBI NO: 22330627 NR Description: choline kinase -related [Arabidopsis thaliana]
  misc_feature (1)..(299): Homolog of NCBI NO: 7488652 NR Description: choline kinase (EC 2.7.1.32) CK1 - soybean
  misc_feature (1)..(299): Homolog of NCBI NO: 12311795 NR Description: choline kinase [Pisum sativum]
  misc_feature (1)..(299): Homolog of NCBI NO: 15217543 NR Description: choline kinase -related [Arabidopsis thaliana]
  misc_feature (1)..(299): Homolog of NCBI NO: 7488653 NR Description: choline kinase (EC 2.7.1.32) CK2 - soybean
  misc_feature (1)..(304): Homolog of NCBI NO: 21537276 NR Description: choline kinase GmCK2p-like protein [Arabidopsis
  misc_feature (1)..(304): Homolog of NCBI NO: 21594823 NR Description: choline kinase GmCK2p-like protein [Arabidopsis
  misc_feature (1)..(304): Homolog of NCBI NO: 15234032 NR Description: choline kinase GmCK2p -related protein
MKGAMTNEVFMVSWPRKETNLRCRKLLVRVYGEGVELFFNRDDEIRTFEYVARHGHGPTLLGRFAGGRVEEFIHARTLSATDLRDPNISALVASKLRRFHSIHIPGDRIMLIWDRMRTWVGQAKNLCSNEHSTEFGLDDIEDEINLLEQEVNNEQEIGFCHNDLQYGNIMIDEETNAITIIDYEYASYNPIAYDIANHFCEMAADYHSNTPHILDYTLYPGEEERRRFICNYLTSSGEEAREEDIEQLLDDIEKYTLASHLFWGLWGIISGYVNKIEFDYIEYSRQRFKQYWLRKPKLLSFFPS

SEQ ID NO: 42059 - protein, 300 aa, Arabidopsis thaliana
  peptide (1)..(300): Ceres Seq. ID no. 13499636
  misc_feature (18)..(289): Pfam Name: Choline/ethanolamine kinase Pfam Description: Choline/ethanolamine kinase
  misc_feature (1)..(295): Homolog of NCBI NO: 7488654 NR Description: choline kinase (EC 2.7.1.32) CK3 - soybean
  misc_feature (1)..(296): Homolog of NCBI NO: 25348157 NR Description: protein choline kinase F1O17.1 [imported] -
  misc_feature (1)..(296): Homolog of NCBI NO: 22330627 NR Description: choline kinase -related [Arabidopsis thaliana]
  misc_feature (1)..(295): Homolog of NCBI NO: 7488652 NR Description: choline kinase (EC 2.7.1.32) CK1 - soybean
  misc_feature (1)..(295): Homolog of NCBI NO: 12311795 NR Description: choline kinase [Pisum sativum]
  misc_feature (1)..(295): Homolog of NCBI NO: 15217543 NR Description: choline kinase -related [Arabidopsis thaliana]
  misc_feature (1)..(295): Homolog of NCBI NO: 7488653 NR Description: choline kinase (EC 2.7.1.32) CK2 - soybean
  misc_feature (1)..(300): Homolog of NCBI NO: 21537276 NR Description: choline kinase GmCK2p-like protein [Arabidopsis
  misc_feature (1)..(300): Homolog of NCBI NO: 21594823 NR Description: choline kinase GmCK2p-like protein [Arabidopsis
  misc_feature (1)..(300): Homolog of NCBI NO: 15234032 NR Description: choline kinase GmCK2p -related protein
MTNEVFMVSWPRKETNLRCRKLLVRVYGEGVELFFNRDDEIRTFEYVARHGHGPTLLGRFAGGRVEEFIHARTLSATDLRDPNISALVASKLRRFHSIHIPGDRIMLIWDRMRTWVGQAKNLCSNEHSTEFGLDDIEDEINLLEQEVNNEQEIGFCHNDLQYGNIMIDEETNAITIIDYEYASYNPIAYDIANHFCEMAADYHSNTPHILDYTLYPGEEERRRFICNYLTSSGEEAREEDIEQLLDDIEKYTLASHLFWGLWGIISGYVNKIEFDYIEYSRQRFKQYWLRKPKLLSFFPS

SEQ ID NO: 42060 - protein, 294 aa, Arabidopsis thaliana
  peptide (1)..(294): Ceres Seq. ID no. 13499637
  misc_feature (12)..(283): Pfam Name: Choline/ethanolamine kinase Pfam Description: Choline/ethanolamine kinase
  misc_feature (1)..(289): Homolog of NCBI NO: 7488654 NR Description: choline kinase (EC 2.7.1.32) CK3 - soybean
  misc_feature (1)..(290): Homolog of NCBI NO: 25348157 NR Description: protein choline kinase F1O17.1 [imported] -
  misc_feature (1)..(290): Homolog of NCBI NO: 22330627 NR Description: choline kinase -related [Arabidopsis thaliana]
  misc_feature (1)..(289): Homolog of NCBI NO: 7488652 NR Description: choline kinase (EC 2.7.1.32) CK1 - soybean
  misc_feature (1)..(289): Homolog of NCBI NO: 12311795 NR Description: choline kinase [Pisum sativum]
  misc_feature (1)..(289): Homolog of NCBI NO: 15217543 NR Description: choline kinase -related [Arabidopsis thaliana]
  misc_feature (1)..(289): Homolog of NCBI NO: 7488653 NR Description: choline kinase (EC 2.7.1.32) CK2 - soybean
  misc_feature (1)..(294): Homolog of NCBI NO: 21537276 NR Description: choline kinase GmCK2p-like protein [Arabidopsis
  misc_feature (1)..(294): Homolog of NCBI NO: 21594823 NR Description: choline kinase GmCK2p-like protein [Arabidopsis
  misc_feature (1)..(294): Homolog of NCBI NO: 15234032 NR Description: choline kinase GmCK2p -related protein
MVSWPRKETNLRCRKLLVRVYGEGVELFFNRDDEIRTFEYVARHGHGPTLLGRFAGGRVEEFIHARTLSATDLRDPNISALVASKLRRFHSIHIPGDRIMLIWDRMRTWVGQAKNLCSNEHSTEFGLDDIEDEINLLEQEVNNEQEIGFCHNDLQYGNIMIDEETNAITIIDYEYASYNPIAYDIANHFCEMAADYHSNTPHILDYTLYPGEEERRRFICNYLTSSGEEAREEDIEQLLDDIEKYTLASHLFWGLWGIISGYVNKIEFDYIEYSRQRFKQYWLRKPKLLSFFPS

SEQ ID NO: 42061 - DNA, 1440 bp, Arabidopsis thaliana
  misc_feature (1)..(1440): Ceres Seq. ID no. 13499630
  misc_feature: MA Experiment ID: 108569 Result: Up-regulated in Transcription
  misc_feature: MA Experiment 108569 PARAMETER Experiment Name: At_0.001%_MeJA__cDNA_P Parameter: Timepoint (hr) Value: 6
  misc_feature: MA Experiment 108569 PARAMETER Experiment Name: At_0.001%_MeJA__cDNA_P Parameter: Tissue Value: Aerial
  misc_feature: MA Experiment 108569 PARAMETER Experiment Name: At_0.001%_MeJA__cDNA_P Parameter: Treatment Value: 0.001% MeJA vs. No Treatment
  misc_feature: MA Experiment ID: 108573 Result: Up-regulated in Transcription
  misc_feature: MA Experiment 108573 PARAMETER Experiment Name: At_Drought_cDNA_P Parameter: Timepoint (hr) Value: 6
  misc_feature: MA Experiment 108573 PARAMETER Experiment Name: At_Drought_cDNA_P Parameter: Tissue Value: Aerial
  misc_feature: MA Experiment 108573 PARAMETER Experiment Name: At_Drought_cDNA_P Parameter: Treatment Value: Drought vs. No Drought
  misc_feature: MA Experiment ID: 108576 Result: Down-regulated in Transcription
  misc_feature: MA Experiment 108576 PARAMETER Experiment Name: At_42deg_Heat_cDNA_P Parameter: Temperature (deg C) Value: 42 vs. 22
  misc_feature: MA Experiment 108576 PARAMETER Experiment Name: At_42deg_Heat_cDNA_P Parameter: Timepoint (hr) Value: 1
  misc_feature: MA Experiment 108576 PARAMETER Experiment Name: At_42deg_Heat_cDNA_P Parameter: Tissue Value: Aerial
  misc_feature: MA Experiment ID: 108577 Result: Down-regulated in Transcription
  misc_feature: MA Experiment 108577 PARAMETER Experiment Name: At_42deg_Heat_cDNA_P Parameter: Temperature (deg C) Value: 42 vs. 22
  misc_feature: MA Experiment 108577 PARAMETER Experiment Name: At_42deg_Heat_cDNA_P Parameter: Timepoint (hr) Value: 6
  misc_feature: MA Experiment 108577 PARAMETER Experiment Name: At_42deg_Heat_cDNA_P Parameter: Tissue Value: Aerial
  misc_feature: MA Experiment ID: 108595 Result: Down-regulated in Transcription
  misc_feature: MA Experiment 108595 PARAMETER Experiment Name: At_Ler-pi_Ovule_cDNA_P Parameter: Plant Line Value: null
  misc_feature: MA Experiment ID: 20000173 Result: Down-regulated in Transcription
  misc_feature: MA Experiment 20000173 PARAMETER Experiment Name: At_42deg_Heat_P Parameter: Age (day) Value: 14
  misc_feature: MA Experiment 20000173 PARAMETER Experiment Name: At_42deg_Heat_P Parameter: Organism Value: A. thaliana
  misc_feature: MA Experiment 20000173 PARAMETER Experiment Name: At_42deg_Heat_P Parameter: Plant Line Value: WS
  misc_feature: MA Experiment 20000173 PARAMETER Experiment Name: At_42deg_Heat_P Parameter: Temperature (deg C) Value: 42 vs. 22
  misc_feature: MA Experiment 20000173 PARAMETER Experiment Name: At_42deg_Heat_P Parameter: Timepoint (hr) Value: 6
  misc_feature: MA Experiment 20000173 PARAMETER Experiment Name: At_42deg_Heat_P Parameter: Tissue Value: Aerial
  misc_feature: MA Experiment ID: 20000224 Result: Down-regulated in Transcription
gaacctctcattctctctttcatctcctcctcttacgtaaccctaacgaagtcgaagattctctggtagatctatctcgattcgattcgattcctcttttttcccagaaaagtcgctattgaaatcgaacgaaagtgttgaagattttaccagtcagaggtatatatatatagagagagagttatggatttggatcaatggatttccaaggttaaagatggtcagcatctctccgaagacgagcttcagcttctctgcgaatacgtgaaagagattctgattgaggagtcaaacgtacagcctgtaaacagtccagtcaccgtatgtggtgatatccatggccagtttcatgatcttatgaagctttttcagaccggaggtcatgttcccgacaccaattacatttttatgggggacttcgtggatagaggttacaacagccttgaagtcttcactattcttttacttcttaaagctagatatccagccaatattacacttttgcgcggaaatcatgaaagtaggcagctaacgcaggtgtatggtttctatgacgaatgccagaggaagtatggtaacgctaatgcgtggcgatattgcacagatgtttttgactatcttaccctgtcagctattatagatggcacagttctatgtgttcacggtggcctttccccggatgtccggacaattgatcagataagactgatcgagcgaaattgcgaaattcctcatgaagggcccttttgcgatcttatgtggagtgatcctgaagatattgaaacatgggcggttagtccacgtggagctggttggcttttcggatccagggttaccactgagtttaaccatatcaacaagctggatctagtatgccgcgcgcaccaacttgtacaagaaggtcttaagtacatgttccaagataaaggccttgtaactgtatggtctgcacctaattactgttaccgctgtgggaatgtcgcttctatattgagtttcaatgacaacatggaaagggaagtgaagttcttcacagagacagaagagaacaatcaaatgagagggccaaggactggagttccgtatttcctatgaagaatcacacttattatatttgctgtgatgatgaagccattgctgccattggcaatatgttcagttcaatgtggaaaaggttaatatatgattatatatattatctactgatgggtttcgcttactatcattatttttgtcctttaggttacatttcccttgtgaaagttacaagtcaaacactttggtaatagtcttagtcattttgattctctgctctcttttctttcccccaatctttcttctgtaatgttatttttttcattgttcacttgtactgtttcctctgtttttgttgttgttgttgtgaagatgacattaattctaaaataatcaaacatcgtt

SEQ ID NO: 42062 - protein, 303 aa, Arabidopsis thaliana
  peptide (1)..(303): Ceres Seq. ID no. 13499631
  misc_feature (43)..(238): Pfam Name: Calcineurin-like phosphoesterase Pfam Description: Calcineurin-like phosphoesterase
  misc_feature (1)..(303): Homolog of NCBI NO: 1071868 NR Description: phosphoprotein phosphatase (EC 3.1.3.16) PPV - rat
  misc_feature (1)..(303): Homolog of NCBI NO: 4506029 NR Description: protein phosphatase 6, catalytic subunit
  misc_feature (1)..(303): Homolog of NCBI NO: 21312758 NR Description: protein phosphatase 6, catalytic subunit [Mus
  misc_feature (1)..(302): Homolog of NCBI NO: 28829192 NR Description: similar to Dictyostelium discoideum (Slime mold). phosphatase 6 catalytic subunit (EC 3.1.3.16) (Serine/threonine
  misc_feature (1)..(302): Homolog of NCBI NO: 5759301 NR Description: protein phosphatase 6 catalytic subunit
  misc_feature (1)..(303): Homolog of NCBI NO: 34911376 NR Description: putative Ser/Thr protein phosphatase
  misc_feature (1)..(303): Homolog of NCBI NO: 20385063 NR Description: serine/threonine protein phosphatase 2A [Pisum
  misc_feature (1)..(303): Homolog of NCBI NO: 7488629 NR Description: phosphoprotein phosphatase (EC 3.1.3.16) - apple
  misc_feature (1)..(303): Homolog of NCBI NO: 15222945 NR Description: serine/threonine protein phosphatase [Arabidopsis
  misc_feature (1)..(303): Homolog of NCBI NO: 15231006 NR Description: protein phosphatase [Arabidopsis thaliana]
MDLDQWISKVKDGQHLSEDELQLLCEYVKEILIEESNVQPVNSPVTVCGDIHGQFHDLMKLFQTGGHVPDTNYIFMGDFVDRGYNSLEVFTILLLLKARYPANITLLRGNHESRQLTQVYGFYDECQRKYGNANAWRYCTDVFDYLTLSAIIDGTVLCVHGGLSPDVRTIDQIRLIERNCEIPHEGPFCDLMWSDPEDIETWAVSPRGAGWLFGSRVTTEFNHINKLDLVCRAHQLVQEGLKYMFQDKGLVTVWSAPNYCYRCGNVASILSFNDNMEREVKFFTETEENNQMRGPRTGVPYFL

SEQ ID NO: 42063 - protein, 245 aa, Arabidopsis thaliana
  peptide (1)..(245): Ceres Seq. ID no. 13499632
  misc_feature (1)..(180): Pfam Name: Calcineurin-like phosphoesterase Pfam Description: Calcineurin-like phosphoesterase
  misc_feature (1)..(245): Homolog of NCBI NO: 1071868 NR Description: phosphoprotein phosphatase (EC 3.1.3.16) PPV - rat
  misc_feature (1)..(245): Homolog of NCBI NO: 4506029 NR Description: protein phosphatase 6, catalytic subunit
  misc_feature (1)..(245): Homolog of NCBI NO: 21312758 NR Description: protein phosphatase 6, catalytic subunit [Mus
  misc_feature (1)..(244): Homolog of NCBI NO: 28829192 NR Description: similar to Dictyostelium discoideum (Slime mold). phosphatase 6 catalytic subunit (EC 3.1.3.16) (Serine/threonine
  misc_feature (1)..(244): Homolog of NCBI NO: 5759301 NR Description: protein phosphatase 6 catalytic subunit
  misc_feature (1)..(245): Homolog of NCBI NO: 34911376 NR Description: putative Ser/Thr protein phosphatase
  misc_feature (1)..(245): Homolog of NCBI NO: 20385063 NR Description: serine/threonine protein phosphatase 2A [Pisum
  misc_feature (1)..(245): Homolog of NCBI NO: 7488629 NR Description: phosphoprotein phosphatase (EC 3.1.3.16) - apple
  misc_feature (1)..(245): Homolog of NCBI NO: 15222945 NR Description: serine/threonine protein phosphatase [Arabidopsis
  misc_feature (1)..(245): Homolog of NCBI NO: 15231006 NR Description: protein phosphatase [Arabidopsis thaliana]
MKLFQTGGHVPDTNYIFMGDFVDRGYNSLEVFTILLLLKARYPANITLLRGNHESRQLTQVYGFYDECQRKYGNANAWRYCTDVFDYLTLSAIIDGTVLCVHGGLSPDVRTIDQIRLIERNCEIPHEGPFCDLMWSDPEDIETWAVSPRGAGWLFGSRVTTEFNHINKLDLVCRAHQLVQEGLKYMFQDKGLVTVWSAPNYCYRCGNVASILSFNDNMEREVKFFTETEENNQMRGPRTGVPYFL

SEQ ID NO: 42064 - protein, 228 aa, Arabidopsis thaliana
  peptide (1)..(228): Ceres Seq. ID no. 13499633
  misc_feature (1)..(163): Pfam Name: Calcineurin-like phosphoesterase Pfam Description: Calcineurin-like phosphoesterase
  misc_feature (1)..(228): Homolog of NCBI NO: 1071868 NR Description: phosphoprotein phosphatase (EC 3.1.3.16) PPV - rat
  misc_feature (1)..(228): Homolog of NCBI NO: 4506029 NR Description: protein phosphatase 6, catalytic subunit
  misc_feature (1)..(228): Homolog of NCBI NO: 21312758 NR Description: protein phosphatase 6, catalytic subunit [Mus
  misc_feature (1)..(227): Homolog of NCBI NO: 28829192 NR Description: similar to Dictyostelium discoideum (Slime mold). phosphatase 6 catalytic subunit (EC 3.1.3.16) (Serine/threonine
  misc_feature (1)..(227): Homolog of NCBI NO: 5759301 NR Description: protein phosphatase 6 catalytic subunit
  misc_feature (1)..(228): Homolog of NCBI NO: 34911376 NR Description: putative Ser/Thr protein phosphatase
  misc_feature (1)..(228): Homolog of NCBI NO: 20385063 NR Description: serine/threonine protein phosphatase 2A [Pisum
  misc_feature (1)..(228): Homolog of NCBI NO: 7488629 NR Description: phosphoprotein phosphatase (EC 3.1.3.16) - apple
  misc_feature (1)..(228): Homolog of NCBI NO: 15222945 NR Description: serine/threonine protein phosphatase [Arabidopsis
  misc_feature (1)..(228): Homolog of NCBI NO: 15231006 NR Description: protein phosphatase [Arabidopsis thaliana]
MGDFVDRGYNSLEVFTILLLLKARYPANITLLRGNHESRQLTQVYGFYDECQRKYGNANAWRYCTDVFDYLTLSAIIDGTVLCVHGGLSPDVRTIDQIRLIERNCEIPHEGPFCDLMWSDPEDIETWAVSPRGAGWLFGSRVTTEFNHINKLDLVCRAHQLVQEGLKYMFQDKGLVTVWSAPNYCYRCGNVASILSFNDNMEREVKFFTETEENNQMRGPRTGVPYFL

SEQ ID NO: 42065 - DNA, 1213 bp, Arabidopsis thaliana
  misc_feature (1)..(1213): Ceres Seq. ID no. 12562379
  misc_feature: MA Experiment ID: 108434 Result: Down-regulated in Transcription
  misc_feature: MA Experiment 108434 PARAMETER Experiment Name: At_Root_Tips_cDNA_P Parameter: Tissue Value: Root Tips
  misc_feature: MA Experiment ID: 108461 Result: Up-regulated in Transcription
  misc_feature: MA Experiment 108461 PARAMETER Experiment Name: At_Germinating_Seeds_cDNA_P Parameter: Age (day) Value: 1 vs. 0
  misc_feature: MA Experiment 108461 PARAMETER Experiment Name: At_Germinating_Seeds_cDNA_P Parameter: Tissue Value: Germinating Seeds
  misc_feature: MA Experiment ID: 108462 Result: Up-regulated in Transcription
  misc_feature: MA Experiment 108462 PARAMETER Experiment Name: At_Germinating_Seeds_cDNA_P Parameter: Age (day) Value: 2 vs. 0
  misc_feature: MA Experiment 108462 PARAMETER Experiment Name: At_Germinating_Seeds_cDNA_P Parameter: Tissue Value: Germinating Seeds
  misc_feature: MA Experiment ID: 108463 Result: Up-regulated in Transcription
  misc_feature: MA Experiment 108463 PARAMETER Experiment Name: At_Germinating_Seeds_cDNA_P Parameter: Age (day) Value: 3 vs. 0
  misc_feature: MA Experiment 108463 PARAMETER Experiment Name: At_Germinating_Seeds_cDNA_P Parameter: Tissue Value: Germinating Seeds
  misc_feature: MA Experiment ID: 108464 Result: Up-regulated in Transcription
  misc_feature: MA Experiment 108464 PARAMETER Experiment Name: At_Germinating_Seeds_cDNA_P Parameter: Age (day) Value: 4 vs. 0
  misc_feature: MA Experiment 108464 PARAMETER Experiment Name: At_Germinating_Seeds_cDNA_P Parameter: Tissue Value: Germinating Seeds
  misc_feature: MA Experiment ID: 108605 Result: Down-regulated in Transcription
  misc_feature: MA Experiment 108605 PARAMETER Experiment Name: At_100uM_ABA_cDNA_P Parameter: Timepoint (hr) Value: 6
  misc_feature: MA Experiment 108605 PARAMETER Experiment Name: At_100uM_ABA_cDNA_P Parameter: Tissue Value: Aerial
  misc_feature: MA Experiment 108605 PARAMETER Experiment Name: At_100uM_ABA_cDNA_P Parameter: Treatment Value: 100uM ABA vs. No Treatment
  misc_feature: MA Experiment ID: 108607 Result: Down-regulated in Transcription
  misc_feature: MA Experiment 108607 PARAMETER Experiment Name: At_100uM_ABA_cDNA_P Parameter: Timepoint (hr) Value: 4
  misc_feature: MA Experiment 108607 PARAMETER Experiment Name: At_100uM_ABA_cDNA_P Parameter: Tissue Value: Aerial
  misc_feature: MA Experiment 108607 PARAMETER Experiment Name: At_100uM_ABA_cDNA_P Parameter: Treatment Value: 100uM ABA vs. No Treatment
  misc_feature: MA Experiment ID: 20000071 Result: Down-regulated in Transcription
  misc_feature: MA Experiment 20000071 PARAMETER Experiment Name: At_100uM_ABA_Mutants_cDNA_P Parameter: Plant Line Value: CS8104
  misc_feature: MA Experiment 20000071 PARAMETER Experiment Name: At_100uM_ABA_Mutants_cDNA_P Parameter: Timepoint (hr) Value: 6
  misc_feature: MA Experiment 20000071 PARAMETER Experiment Name: At_100uM_ABA_Mutants_cDNA_P Parameter: Tissue Value: Aerial
  misc_feature: MA Experiment 20000071 PARAMETER Experiment Name: At_100uM_ABA_Mutants_cDNA_P Parameter: Treatment Value: 100uM ABA vs. No Treatment
  misc_feature: MA Experiment ID: 20000117 Result: Down-regulated in Transcription
  misc_feature: MA Experiment 20000117 PARAMETER Experiment Name: At_100uM_ABA_Mutants_cDNA_P Parameter: Plant Line Value: Columbia
  misc_feature: MA Experiment 20000117 PARAMETER Experiment Name: At_100uM_ABA_Mutants_cDNA_P Parameter: Timepoint (hr) Value: 6
  misc_feature: MA Experiment 20000117 PARAMETER Experiment Name: At_100uM_ABA_Mutants_cDNA_P Parameter: Tissue Value: Aerial
  misc_feature: MA Experiment 20000117 PARAMETER Experiment Name: At_100uM_ABA_Mutants_cDNA_P Parameter: Treatment Value: 100uM ABA vs. No Treatment
  misc_feature: MA Experiment ID: 20000169 Result: Down-regulated in Transcription
  misc_feature: MA Experiment 20000169 PARAMETER Experiment Name: At_100uM_ABA_P Parameter: Age (day) Value: 14
  misc_feature: MA Experiment 20000169 PARAMETER Experiment Name: At_100uM_ABA_P Parameter: Organism Value: A. thaliana
  misc_feature: MA Experiment 20000169 PARAMETER Experiment Name: At_100uM_ABA_P Parameter: Plant Line Value: WS
  misc_feature: MA Experiment 20000169 PARAMETER Experiment Name: At_100uM_ABA_P Parameter: Timepoint (hr) Value: 6
  misc_feature: MA Experiment 20000169 PARAMETER Experiment Name: At_100uM_ABA_P Parameter: Tissue Value: Aerial
  misc_feature: MA Experiment 20000169 PARAMETER Experiment Name: At_100uM_ABA_P Parameter: Treatment Value: 100uM ABA vs. No Treatment
  misc_feature: MA Experiment ID: 20000180 Result: Up-regulated in Transcription
  misc_feature: MA Experiment 20000180 PARAMETER Experiment Name: At_Germinating_Seeds_P Parameter: Age (hr) Value: 24 vs. 0
  misc_feature: MA Experiment 20000180 PARAMETER Experiment Name: At_Germinating_Seeds_P Parameter: Tissue Value: Germinating Seeds
  misc_feature: MA Experiment ID: 20000224 Result: Up-regulated in Transcription
  misc_feature: MA Experiment ID: 20000264 Result: Up-regulated in Transcription
  misc_feature: MA Experiment 20000264 PARAMETER Experiment Name: At_Open_Flower_P Parameter: Age (day) Value: 21
  misc_feature: MA Experiment 20000264 PARAMETER Experiment Name: At_Open_Flower_P Parameter: Plant Line Value: WS
  misc_feature: MA Experiment 20000264 PARAMETER Experiment Name: At_Open_Flower_P Parameter: Tissue Value: Open Flower vs. Whole Plant
  misc_feature: MA Experiment ID: 20000267 Result: Down-regulated in Transcription
  misc_feature: MA Experiment 20000267 PARAMETER Experiment Name: At_Drought_P Parameter: Age (day) Value: 7
  misc_feature: MA Experiment 20000267 PARAMETER Experiment Name: At_Drought_P Parameter: Organism Value: A. thaliana
  misc_feature: MA Experiment 20000267 PARAMETER Experiment Name: At_Drought_P Parameter: Plant Line Value: WS
  misc_feature: MA Experiment 20000267 PARAMETER Experiment Name: At_Drought_P Parameter: Timepoint (hr) Value: 6
  misc_feature: MA Experiment 20000267 PARAMETER Experiment Name: At_Drought_P Parameter: Tissue Value: Whole Plant
  misc_feature: MA Experiment 20000267 PARAMETER Experiment Name: At_Drought_P Parameter: Treatment Value: Drought vs. No Drought
  misc_feature: MA Experiment ID: 20000436 Result: Down-regulated in Transcription
  misc_feature: MA Experiment 20000436 PARAMETER Experiment Name: At_Drought_P Parameter: Age (day) Value: 7
  misc_feature: MA Experiment 20000436 PARAMETER Experiment Name: At_Drought_P Parameter: Organism Value: A. thaliana
  misc_feature: MA Experiment 20000436 PARAMETER Experiment Name: At_Drought_P Parameter: Plant Line Value: WS
  misc_feature: MA Experiment 20000436 PARAMETER Experiment Name: At_Drought_P Parameter: Timepoint (hr) Value: 12
  misc_feature: MA Experiment 20000436 PARAMETER Experiment Name: At_Drought_P Parameter: Tissue Value: Whole Plant
  misc_feature: MA Experiment 20000436 PARAMETER Experiment Name: At_Drought_P Parameter: Treatment Value: Drought vs. No Drought
  misc_feature: MA Experiment ID: 20000437 Result: Down-regulated in Transcription
  misc_feature: MA Experiment 20000437 PARAMETER Experiment Name: At_Drought_P Parameter: Age (day) Value: 8
  misc_feature: MA Experiment 20000437 PARAMETER Experiment Name: At_Drought_P Parameter: Organism Value: A. thaliana
  misc_feature: MA Experiment 20000437 PARAMETER Experiment Name: At_Drought_P Parameter: Plant Line Value: WS
  misc_feature: MA Experiment 20000437 PARAMETER Experiment Name: At_Drought_P Parameter: Timepoint (hr) Value: 24
  misc_feature: MA Experiment 20000437 PARAMETER Experiment Name: At_Drought_P Parameter: Tissue Value: Whole Plant
  misc_feature: MA Experiment 20000437 PARAMETER Experiment Name: At_Drought_P Parameter: Treatment Value: Drought vs. No Drought
  misc_feature: MA Experiment ID: 20000438 Result: Up-regulated in Transcription
  misc_feature: MA Experiment 20000438 PARAMETER Experiment Name: At_Shoots__P Parameter: Age (day) Value: 14
  misc_feature: MA Experiment 20000438 PARAMETER Experiment Name: At_Shoots__P Parameter: Tissue Value: Shoots vs. Whole Plant
  misc_feature: MA Experiment ID: 20000441 Result: Up-regulated in Transcription
  misc_feature: MA Experiment 20000441 PARAMETER Experiment Name: At_1uM_BR-BRZ__P Parameter: Tissue Value: Shoot Apices
  misc_feature: MA Experiment 20000441 PARAMETER Experiment Name: At_1uM_BR-BRZ__P Parameter: Treatment Value: 1uM BR vs. No Treatment
  misc_feature: MA Experiment ID: 20000443 Result: Up-regulated in Transcription
  misc_feature: MA Experiment 20000443 PARAMETER Experiment Name: At_1uM_BR-BRZ__P Parameter: Tissue Value: Shoot Apices
  misc_feature: MA Experiment 20000443 PARAMETER Experiment Name: At_1uM_BR-BRZ__P Parameter: Treatment Value: 1uM BRZ vs. No Treatment
  misc_feature: MA Experiment ID: 20000496 Result: Down-regulated in Transcription
  misc_feature: MA Experiment 20000496 PARAMETER Experiment Name: At_Guard_Cells_P Parameter: Harvest Date Value: 7/19/2002
  misc_feature: MA Experiment 20000496 PARAMETER Experiment Name: At_Guard_Cells_P Parameter: Organism Value: Canola
  misc_feature: MA Experiment 20000496 PARAMETER Experiment Name: At_Guard_Cells_P Parameter: Tissue Value: Guard Cells vs. Leaves
  misc_feature: MA Experiment ID: 20000794 Result: Up-regulated in Transcription
  misc_feature: MA Experiment 20000794 PARAMETER Experiment Name: At_Petals_P Parameter: Age (day) Value: 23-25 days
  misc_feature: MA Experiment 20000794 PARAMETER Experiment Name: At_Petals_P Parameter: Plant Line Value: WS
  misc_feature: MA Experiment 20000794 PARAMETER Experiment Name: At_Petals_P Parameter: Tissue Value: Petals vs. Whole plant
  misc_feature: MA Experiment ID: 20001451 Result: Down-regulated in Transcription
  misc_feature: MA Experiment 20001451 PARAMETER Experiment Name: At_Far-red-induction_P Parameter: Age (day) Value: 7
  misc_feature: MA Experiment 20001451 PARAMETER Experiment Name: At_Far-red-induction_P Parameter: Light Value: Far-red vs. White
  misc_feature: MA Experiment 20001451 PARAMETER Experiment Name: At_Far-red-induction_P Parameter: Organism Value: A. thaliana
  misc_feature: MA Experiment 20001451 PARAMETER Experiment Name: At_Far-red-induction_P Parameter: Plant Line Value: Columbia
  misc_feature: MA Experiment 20001451 PARAMETER Experiment Name: At_Far-red-induction_P Parameter: Timepoint (hr) Value: 24
  misc_feature: MA Experiment 20001451 PARAMETER Experiment Name: At_Far-red-induction_P Parameter: Tissue Value: Whole Plant
  misc_feature: MA Experiment ID: 20001554 Result: Down-regulated in Transcription
  misc_feature: MA Experiment 20001554 PARAMETER Experiment Name: At_Drought_Soil_Dry_P Parameter: Age (day) Value: 21
  misc_feature: MA Experiment 20001554 PARAMETER Experiment Name: At_Drought_Soil_Dry_P Parameter: Organism Value: A. thaliana
  misc_feature: MA Experiment 20001554 PARAMETER Experiment Name: At_Drought_Soil_Dry_P Parameter: Plant Line Value: WS
  misc_feature: MA Experiment 20001554 PARAMETER Experiment Name: At_Drought_Soil_Dry_P Parameter: Post Timepoint (hr) Value: None
  misc_feature: MA Experiment 20001554 PARAMETER Experiment Name: At_Drought_Soil_Dry_P Parameter: Post-Treatment Value: None
  misc_feature: MA Experiment 20001554 PARAMETER Experiment Name: At_Drought_Soil_Dry_P Parameter: Timepoint (day) Value: 7
  misc_feature: MA Experiment 20001554 PARAMETER Experiment Name: At_Drought_Soil_Dry_P Parameter: Treatment Value: Drought vs. No Drought
  misc_feature: MA Experiment ID: 20001555 Result: Down-regulated in Transcription
  misc_feature: MA Experiment 20001555 PARAMETER Experiment Name: At_Drought_Soil_Dry_P Parameter: Age (day) Value: 24
  misc_feature: MA Experiment 20001555 PARAMETER Experiment Name: At_Drought_Soil_Dry_P Parameter: Organism Value: A. thaliana
  misc_feature: MA Experiment 20001555 PARAMETER Experiment Name: At_Drought_Soil_Dry_P Parameter: Plant Line Value: WS
  misc_feature: MA Experiment 20001555 PARAMETER Experiment Name: At_Drought_Soil_Dry_P Parameter: Post Timepoint (hr) Value: None
  misc_feature: MA Experiment 20001555 PARAMETER Experiment Name: At_Drought_Soil_Dry_P Parameter: Post-Treatment Value: None
  misc_feature: MA Experiment 20001555 PARAMETER Experiment Name: At_Drought_Soil_Dry_P Parameter: Timepoint (day) Value: 10
  misc_feature: MA Experiment 20001555 PARAMETER Experiment Name: At_Drought_Soil_Dry_P Parameter: Treatment Value: Drought vs. No Drought
  misc_feature: MA Experiment ID: 20001556 Result: Down-regulated in Transcription
  misc_feature: MA Experiment 20001556 PARAMETER Experiment Name: At_Drought_Soil_Dry_P Parameter: Age (day) Value: 26
  misc_feature: MA Experiment 20001556 PARAMETER Experiment Name: At_Drought_Soil_Dry_P Parameter: Organism Value: A. thaliana
  misc_feature: MA Experiment 20001556 PARAMETER Experiment Name: At_Drought_Soil_Dry_P Parameter: Plant Line Value: WS
  misc_feature: MA Experiment 20001556 PARAMETER Experiment Name: At_Drought_Soil_Dry_P Parameter: Post Timepoint (hr) Value: None
  misc_feature: MA Experiment 20001556 PARAMETER Experiment Name: At_Drought_Soil_Dry_P Parameter: Post-Treatment Value: None
  misc_feature: MA Experiment 20001556 PARAMETER Experiment Name: At_Drought_Soil_Dry_P Parameter: Timepoint (day) Value: 12
  misc_feature: MA Experiment 20001556 PARAMETER Experiment Name: At_Drought_Soil_Dry_P Parameter: Treatment Value: Drought vs. No Drought
  misc_feature: MA Experiment ID: 20001559 Result: Down-regulated in Transcription
  misc_feature: MA Experiment 20001559 PARAMETER Experiment Name: At_Drought_Soil_Dry_P Parameter: Age (day) Value: 28
  misc_feature: MA Experiment 20001559 PARAMETER Experiment Name: At_Drought_Soil_Dry_P Parameter: Organism Value: A. thaliana
  misc_feature: MA Experiment 20001559 PARAMETER Experiment Name: At_Drought_Soil_Dry_P Parameter: Plant Line Value: WS
  misc_feature: MA Experiment 20001559 PARAMETER Experiment Name: At_Drought_Soil_Dry_P Parameter: Post Timepoint (hr) Value: 29
  misc_feature: MA Experiment 20001559 PARAMETER Experiment Name: At_Drought_Soil_Dry_P Parameter: Post-Treatment Value: Re-Water vs. No Drought
  misc_feature: MA Experiment 20001559 PARAMETER Experiment Name: At_Drought_Soil_Dry_P Parameter: Timepoint (day) Value: 14
  misc_feature: MA Experiment 20001559 PARAMETER Experiment Name: At_Drought_Soil_Dry_P Parameter: Treatment Value: Drought vs. No Drought
  misc_feature: MA Experiment ID: 20001771 Result: Up-regulated in Transcription
  misc_feature: MA Experiment 20001771 PARAMETER Experiment Name: At_Far-red-enriched-adult_P Parameter: Age (day) Value: 28
  misc_feature: MA Experiment 20001771 PARAMETER Experiment Name: At_Far-red-enriched-adult_P Parameter: Light Value: Far-red enriched vs. White
  misc_feature: MA Experiment 20001771 PARAMETER Experiment Name: At_Far-red-enriched-adult_P Parameter: Organism Value: A. thaliana
  misc_feature: MA Experiment 20001771 PARAMETER Experiment Name: At_Far-red-enriched-adult_P Parameter: Plant Line Value: Columbia
  misc_feature: MA Experiment 20001771 PARAMETER Experiment Name: At_Far-red-enriched-adult_P Parameter: Timepoint (hr) Value: 16
  misc_feature: MA Experiment 20001771 PARAMETER Experiment Name: At_Far-red-enriched-adult_P Parameter: Tissue Value: Aerial
  misc_feature: MA Experiment ID: 20001905 Result: Up-regulated in Transcription
  misc_feature: MA Experiment 20001905 PARAMETER Experiment Name: At_Drought_Reproduction_P Parameter: Age (day) Value: 40
  misc_feature: MA Experiment 20001905 PARAMETER Experiment Name: At_Drought_Reproduction_P Parameter: Organism Value: A. thaliana
  misc_feature: MA Experiment 20001905 PARAMETER Experiment Name: At_Drought_Reproduction_P Parameter: Plant Line Value: WS
  misc_feature: MA Experiment 20001905 PARAMETER Experiment Name: At_Drought_Reproduction_P Parameter: Timepoint (day) Value: 10
  misc_feature: MA Experiment 20001905 PARAMETER Experiment Name: At_Drought_Reproduction_P Parameter: Tissue Value: Rosettes
  misc_feature: MA Experiment 20001905 PARAMETER Experiment Name: At_Drought_Reproduction_P Parameter: Treatment Value: Drought vs. No Drought
  misc_feature: MA Experiment ID: 20001911 Result: Down-regulated in Transcription
  misc_feature: MA Experiment 20001911 PARAMETER Experiment Name: At_Drought_Reproduction_P Parameter: Age (day) Value: 40
  misc_feature: MA Experiment 20001911 PARAMETER Experiment Name: At_Drought_Reproduction_P Parameter: Organism Value: A. thaliana
  misc_feature: MA Experiment 20001911 PARAMETER Experiment Name: At_Drought_Reproduction_P Parameter: Plant Line Value: WS
  misc_feature: MA Experiment 20001911 PARAMETER Experiment Name: At_Drought_Reproduction_P Parameter: Timepoint (day) Value: 10
  misc_feature: MA Experiment 20001911 PARAMETER Experiment Name: At_Drought_Reproduction_P Parameter: Tissue Value: Flowers
  misc_feature: MA Experiment 20001911 PARAMETER Experiment Name: At_Drought_Reproduction_P Parameter: Treatment Value: Drought vs. No Drought
acatcaaagcaattaacaaatacacaacttgtaacttcaaatagattactttcaaagaagagagagagaaagaaagatggagaagaacatgaagtttccagtagtagacttgtccaagctcaatggggaagagagagaccaaaccatggctctaatcaatgaagcttgtgagaattggggcttctttgagatagtgaaccatggattaccacatgacttaatggacaagatcgagaagatgacaaaggaccattacaagacatgccaagaacaaaagttcaatgacatgctcaagtccaaaggtttggataatcttgagacagaagtcgaagatgtcgattgggaaagcactttctacgttcgtcacctccctcaatccaatctcaatgacatttcagatgtgtctgatgaatacgacggccatgaaagactttggtaagagactggagaatcttgctgaggatttgttggatctactgtgtgagaatctagggttagagaaagggtatttgaagaaagtgtttcatggaacaaaaggcccaacctttgggacaaaggtgagcaattatccaccatgtcctaaaccagagatgatcaaaggtcttagggcccacactgatgcaggaggcatcatcttgttgtttcaagacgacaaggtcagtggtctccagcttcttaaagatggtgactggattgatgttcctcctctcaaccactctattgtcatcaatcttggtgaccaacttgaggtgataaccaacgggaagtataagagtgtgctgcaccgtgtggtgactcaacaagaaggaaacaggatgtcggttgcatcgttttacaacccgggaagcgatgcggagatctcaccagctacttcgcttgtcgagaaagattccgagtacccgagtttcgtctttgatgactacatgaagctttatgcaggggtcaagtttcagcccaaggagccacggttcgcagcaatgaagaatgcttctgcagttacagaactgaatcctacagcagccgtagagactttctaaaaatggatttgagattcaagtgaagcagagaaagaaagatgagtttgtgttgtgtgttatggcaataagttaaaacttgtattagtgttgattaattgttggtcaattggtgtgttttaaagtgtggggtgtttatgtttatggaagatgataataattataaaaatctaaattct

SEQ ID NO: 42066 - protein, 251 aa, Arabidopsis thaliana
  peptide (1)..(251): Ceres Seq. ID no. 12562380
  misc_feature (87)..(187): Pfam Name: 2OG-Fe(II) oxygenase superfamily Pfam Description: 2OG-Fe(II) oxygenase superfamily
  misc_feature (48)..(246): Homolog of NCBI NO: 18496053 NR Description: ACC oxidase 1 [Fagus sylvatica]
  misc_feature (46)..(251): Homolog of NCBI NO: 14148975 NR Description: ACC oxidase [Brassica rapa subsp. rapa]
  misc_feature (46)..(251): Homolog of NCBI NO: 7433194 NR Description: probable 1-aminocyclopropane-1-carboxylate
  misc_feature (47)..(251): Homolog of NCBI NO: 7433206 NR Description: probable 1-aminocyclopropane-1-carboxylate
  misc_feature (47)..(251): Homolog of NCBI NO: 15221170 NR Description: putative amino-cyclopropane-carboxylic acid
  misc_feature (25)..(251): Homolog of NCBI NO: 7638440 NR Description: 1-aminocyclopropane-1-carboxylate oxidase
  misc_feature (46)..(251): Homolog of NCBI NO: 728780 NR Description: 1-aminocyclopropane-1-carboxylate oxidase (ACC
  misc_feature (46)..(251): Homolog of NCBI NO: 587086 NR Description: ACC oxidase [Brassica oleracea]
  misc_feature (46)..(251): Homolog of NCBI NO: 25285704 NR Description: 1-aminocyclopropane-1-carboxylate oxidase (EC
  misc_feature (46)..(251): Homolog of NCBI NO: 15220770 NR Description: ACC oxidase, putative
MTCSSPKVWIILRQKSKMSIGKALSTFVTSLNPISMTFQMCLMNTTAMKDFGKRLENLAEDLLDLLCENLGLEKGYLKKVFHGTKGPTFGTKVSNYPPCPKPEMIKGLRAHTDAGGIILLFQDDKVSGLQLLKDGDWIDVPPLNHSIVINLGDQLEVITNGKYKSVLHRVVTQQEGNRMSVASFYNPGSDAEISPATSLVEKDSEYPSFVFDDYMKLYAGVKFQPKEPRFAAMKNASAVTELNPTAAVETF

SEQ ID NO: 42067 - protein, 234 aa, Arabidopsis thaliana
  peptide (1)..(234): Ceres Seq. ID no. 12562381
  misc_feature (70)..(170): Pfam Name: 2OG-Fe(II) oxygenase superfamily Pfam Description: 2OG-Fe(II) oxygenase superfamily
  misc_feature (31)..(229): Homolog of NCBI NO: 18496053 NR Description: ACC oxidase 1 [Fagus sylvatica]
  misc_feature (29)..(234): Homolog of NCBI NO: 14148975 NR Description: ACC oxidase [Brassica rapa subsp. rapa]
  misc_feature (29)..(234): Homolog of NCBI NO: 7433194 NR Description: probable 1-aminocyclopropane-1-carboxylate
  misc_feature (30)..(234): Homolog of NCBI NO: 7433206 NR Description: probable 1-aminocyclopropane-1-carboxylate
  misc_feature (30)..(234): Homolog of NCBI NO: 15221170 NR Description: putative amino-cyclopropane-carboxylic acid
  misc_feature (8)..(234): Homolog of NCBI NO: 7638440 NR Description: 1-aminocyclopropane-1-carboxylate oxidase
  misc_feature (29)..(234): Homolog of NCBI NO: 728780 NR Description: 1-aminocyclopropane-1-carboxylate oxidase (ACC
  misc_feature (29)..(234): Homolog of NCBI NO: 587086 NR Description: ACC oxidase [Brassica oleracea]
  misc_feature (29)..(234): Homolog of NCBI NO: 25285704 NR Description: 1-aminocyclopropane-1-carboxylate oxidase (EC
  misc_feature (29)..(234): Homolog of NCBI NO: 15220770 NR Description: ACC oxidase, putative
MSIGKALSTFVTSLNPISMTFQMCLMNTTAMKDFGKRLENLAEDLLDLLCENLGLEKGYLKKVFHGTKGPTFGTKVSNYPPCPKPEMIKGLRAHTDAGGIILLFQDDKVSGLQLLKDGDWIDVPPLNHSIVINLGDQLEVITNGKYKSVLHRVVTQQEGNRMSVASFYNPGSDAEISPATSLVEKDSEYPSFVFDDYMKLYAGVKFQPKEPRFAAMKNASAVTELNPTAAVETF

SEQ ID NO: 42068 - protein, 216 aa, Arabidopsis thaliana
  peptide (1)..(216): Ceres Seq. ID no. 12562382
  misc_feature (52)..(152): Pfam Name: 2OG-Fe(II) oxygenase superfamily Pfam Description: 2OG-Fe(II) oxygenase superfamily
  misc_feature (13)..(211): Homolog of NCBI NO: 18496053 NR Description: ACC oxidase 1 [Fagus sylvatica]
  misc_feature (11)..(216): Homolog of NCBI NO: 14148975 NR Description: ACC oxidase [Brassica rapa subsp. rapa]
  misc_feature (11)..(216): Homolog of NCBI NO: 7433194 NR Description: probable 1-aminocyclopropane-1-carboxylate
  misc_feature (12)..(216): Homolog of NCBI NO: 7433206 NR Description: probable 1-aminocyclopropane-1-carboxylate
  misc_feature (12)..(216): Homolog of NCBI NO: 15221170 NR Description: putative amino-cyclopropane-carboxylic acid
  misc_feature (1)..(216): Homolog of NCBI NO: 7638440 NR Description: 1-aminocyclopropane-1-carboxylate oxidase
  misc_feature (11)..(216): Homolog of NCBI NO: 728780 NR Description: 1-aminocyclopropane-1-carboxylate oxidase (ACC
  misc_feature (11)..(216): Homolog of NCBI NO: 587086 NR Description: ACC oxidase [Brassica oleracea]
  misc_feature (11)..(216): Homolog of NCBI NO: 25285704 NR Description: 1-aminocyclopropane-1-carboxylate oxidase (EC
  misc_feature (11)..(216): Homolog of NCBI NO: 15220770 NR Description: ACC oxidase, putative
MTFQMCLMNTTAMKDFGKRLENLAEDLLDLLCENLGLEKGYLKKVFHGTKGPTFGTKVSNYPPCPKPEMIKGLRAHTDAGGIILLFQDDKVSGLQLLKDGDWIDVPPLNHSIVINLGDQLEVITNGKYKSVLHRVVTQQEGNRMSVASFYNPGSDAEISPATSLVEKDSEYPSFVFDDYMKLYAGVKFQPKEPRFAAMKNASAVTELNPTAAVETF

SEQ ID NO: 42069 - DNA, 1194 bp, Arabidopsis thaliana
  misc_feature (1)..(1194): Ceres Seq. ID no. 12328053
  misc_feature: MA Experiment ID: 108461 Result: Up-regulated in Transcription
  misc_feature: MA Experiment 108461 PARAMETER Experiment Name: At_Germinating_Seeds_cDNA_P Parameter: Age (day) Value: 1 vs. 0
  misc_feature: MA Experiment 108461 PARAMETER Experiment Name: At_Germinating_Seeds_cDNA_P Parameter: Tissue Value: Germinating Seeds
  misc_feature: MA Experiment ID: 108462 Result: Up-regulated in Transcription
  misc_feature: MA Experiment 108462 PARAMETER Experiment Name: At_Germinating_Seeds_cDNA_P Parameter: Age (day) Value: 2 vs. 0
  misc_feature: MA Experiment 108462 PARAMETER Experiment Name: At_Germinating_Seeds_cDNA_P Parameter: Tissue Value: Germinating Seeds
  misc_feature: MA Experiment ID: 108463 Result: Up-regulated in Transcription
  misc_feature: MA Experiment 108463 PARAMETER Experiment Name: At_Germinating_Seeds_cDNA_P Parameter: Age (day) Value: 3 vs. 0
  misc_feature: MA Experiment 108463 PARAMETER Experiment Name: At_Germinating_Seeds_cDNA_P Parameter: Tissue Value: Germinating Seeds
  misc_feature: MA Experiment ID: 108464 Result: Up-regulated in Transcription
  misc_feature: MA Experiment 108464 PARAMETER Experiment Name: At_Germinating_Seeds_cDNA_P Parameter: Age (day) Value: 4 vs. 0
  misc_feature: MA Experiment 108464 PARAMETER Experiment Name: At_Germinating_Seeds_cDNA_P Parameter: Tissue Value: Germinating Seeds
  misc_feature: MA Experiment ID: 108489 Result: Down-regulated in Transcription
  misc_feature: MA Experiment ID: 20000111 Result: Down-regulated in Transcription
  misc_feature: MA Experiment 20000111 PARAMETER Experiment Name: At_42deg_Heat_cDNA_P Parameter: Temperature (deg C) Value: 42 vs. 22
  misc_feature: MA Experiment 20000111 PARAMETER Experiment Name: At_42deg_Heat_cDNA_P Parameter: Timepoint (hr) Value: 6
  misc_feature: MA Experiment 20000111 PARAMETER Experiment Name: At_42deg_Heat_cDNA_P Parameter: Tissue Value: Aerial
  misc_feature: MA Experiment ID: 20000144 Result: Down-regulated in Transcription
  misc_feature: MA Experiment 20000144 PARAMETER Experiment Name: At_42deg_Heat_cDNA_P Parameter: Temperature (deg C) Value: 42 vs. 22
  misc_feature: MA Experiment 20000144 PARAMETER Experiment Name: At_42deg_Heat_cDNA_P Parameter: Timepoint (hr) Value: 1
  misc_feature: MA Experiment 20000144 PARAMETER Experiment Name: At_42deg_Heat_cDNA_P Parameter: Tissue Value: Aerial
  misc_feature: MA Experiment ID: 20000184 Result: Down-regulated in Transcription
  misc_feature: MA Experiment 20000184 PARAMETER Experiment Name: At_Shoots__P Parameter: Age (day) Value: 7
  misc_feature: MA Experiment 20000184 PARAMETER Experiment Name: At_Shoots__P Parameter: Tissue Value: Shoots vs. Whole Plant
  misc_feature: MA Experiment ID: 20000286 Result: Down-regulated in Transcription
  misc_feature: MA Experiment 20000286 PARAMETER Experiment Name: At_Open_Flower_P Parameter: Age (day) Value: 21
  misc_feature: MA Experiment 20000286 PARAMETER Experiment Name: At_Open_Flower_P Parameter: Plant Line Value: WS
  misc_feature: MA Experiment 20000286 PARAMETER Experiment Name: At_Open_Flower_P Parameter: Tissue Value: Half Open vs. Whole Plant
ttcttagcttcttctctctcaaccctcaaaagatcttcgtcatctctgtattcaacacatagtgatgaatcgagactaacaaaatcaaattctcttcactctgattcgcagtcatagtttaccaatttcttcttactcgcaagcaatggcttgccttggaagaaaattctccagaattggttgaattcgtttttttttcatttccagaaattttagtatgtttaagagatgcaattagtgcctagtgatgatgatgatgatagaaaggaacagattttattcgacgaatcaacatcctcaaacgaaatcgtagcagcggaaagaggagatcgtgttgtggaggaaggacaagtttcagaaatagctgagactgatgatgacgaaaccacacttcttgtttctggagatcaaccacaatgtcgaatttgccttgatgttggaggggaagatctgattgctccgtgcaattgtaaaggtactcaaaagcacgttcacagatcttgtctcgataattggcgctccaccaaggaaggttttgcattttcgcattgtacagagtgtagagcctttttcaaactccgagccaatgtgcctgctgatagatggtggttgagattgagatttcagctgctggttgctagagatcatgccttcatcttcatttctgtccagatgattgtagcattcttggggttactagtttacaagttctacggtgaagaactacgagaaatgtttggttatgaggaacatccttatgggttctacacattggctgttttggccattgtcttggtaggactgctatatggattcttcatcgccataatatgtggccaaaagatcaacgagcggcattaccatgttctcgccaaacaagaactcacaaaggaatatatagtggaagaccgcgactgcaagaatgttcctgagcttgatcagagtcatgtgatggaactaaaaatgttgggactttattgaacatatactacaagaaaagagcttgttggatctttactcttcatgtcacctgtaaattatattcttcattgatttatatggttgcttcaacgaacgattgtgtcatctccaagtggttttttgattttttttttttttttaaattgtatatcttctgatgaacatgtttatctgttcgagtatacatatcagaagtaaattggtttacaaagt

SEQ ID NO: 42070 - protein, 250 aa, Arabidopsis thaliana
  peptide (1)..(250): Ceres Seq. ID no. 12328054
  misc_feature (64)..(111): Pfam Name: Zinc finger, C3HC4 type (RING finger) Pfam Description: Zinc finger, C3HC4 type (RING finger)
  misc_feature (184)..(249): Homolog of NCBI NO: 34912564 NR Description: P0410E03.20 [Oryza sativa (japonica
  misc_feature (46)..(150): Homolog of NCBI NO: 34912564 NR Description: P0410E03.20 [Oryza sativa (japonica
  misc_feature (162)..(249): Homolog of NCBI NO: 25402638 NR Description: hypothetical protein [imported] - Arabidopsis
  misc_feature (1)..(182): Homolog of NCBI NO: 25402638 NR Description: hypothetical protein [imported] - Arabidopsis
  misc_feature (176)..(249): Homolog of NCBI NO: 15227153 NR Description: hypothetical protein; protein id: At2g22120.1
  misc_feature (59)..(154): Homolog of NCBI NO: 15227153 NR Description: hypothetical protein; protein id: At2g22120.1
  misc_feature (176)..(249): Homolog of NCBI NO: 28393273 NR Description: unknown protein [Arabidopsis thaliana]
  misc_feature (59)..(192): Homolog of NCBI NO: 28393273 NR Description: unknown protein [Arabidopsis thaliana]
  misc_feature (1)..(250): Homolog of NCBI NO: 26450547 NR Description: unknown protein [Arabidopsis thaliana]
  misc_feature (1)..(250): Homolog of NCBI NO: 18403075 NR Description: expressed protein
MQLVPSDDDDDRKEQILFDESTSSNEIVAAERGDRVVEEGQVSEIAETDDDETTLLVSGDQPQCRICLDVGGEDLIAPCNCKGTQKHVHRSCLDNWRSTKEGFAFSHCTECRAFFKLRANVPADRWWLRLRFQLLVARDHAFIFISVQMIVAFLGLLVYKFYGEELREMFGYEEHPYGFYTLAVLAIVLVGLLYGFFIAIICGQKINERHYHVLAKQELTKEYIVEDRDCKNVPELDQSHVMELKMLGLY

SEQ ID NO: 42071 - DNA, 1382 bp, Arabidopsis thaliana
  misc_feature (1)..(1382): Ceres Seq. ID no. 12371106
  misc_feature: MA Experiment ID: 108488 Result: Down-regulated in Transcription
  misc_feature: MA Experiment ID: 108573 Result: Up-regulated in Transcription
  misc_feature: MA Experiment 108573 PARAMETER Experiment Name: At_Drought_cDNA_P Parameter: Timepoint (hr) Value: 6
  misc_feature: MA Experiment 108573 PARAMETER Experiment Name: At_Drought_cDNA_P Parameter: Tissue Value: Aerial
  misc_feature: MA Experiment 108573 PARAMETER Experiment Name: At_Drought_cDNA_P Parameter: Treatment Value: Drought vs. No Drought
  misc_feature: MA Experiment ID: 20000171 Result: Up-regulated in Transcription
  misc_feature: MA Experiment 20000171 PARAMETER Experiment Name: At_42deg_Heat_P Parameter: Age (day) Value: 14
  misc_feature: MA Experiment 20000171 PARAMETER Experiment Name: At_42deg_Heat_P Parameter: Organism Value: A. thaliana
  misc_feature: MA Experiment 20000171 PARAMETER Experiment Name: At_42deg_Heat_P Parameter: Plant Line Value: WS
  misc_feature: MA Experiment 20000171 PARAMETER Experiment Name: At_42deg_Heat_P Parameter: Temperature (deg C) Value: 42 vs. 22
  misc_feature: MA Experiment 20000171 PARAMETER Experiment Name: At_42deg_Heat_P Parameter: Timepoint (hr) Value: 1
  misc_feature: MA Experiment 20000171 PARAMETER Experiment Name: At_42deg_Heat_P Parameter: Tissue Value: Aerial
  misc_feature: MA Experiment ID: 20000173 Result: Up-regulated in Transcription
  misc_feature: MA Experiment 20000173 PARAMETER Experiment Name: At_42deg_Heat_P Parameter: Age (day) Value: 14
  misc_feature: MA Experiment 20000173 PARAMETER Experiment Name: At_42deg_Heat_P Parameter: Organism Value: A. thaliana
  misc_feature: MA Experiment 20000173 PARAMETER Experiment Name: At_42deg_Heat_P Parameter: Plant Line Value: WS
  misc_feature: MA Experiment 20000173 PARAMETER Experiment Name: At_42deg_Heat_P Parameter: Temperature (deg C) Value: 42 vs. 22
  misc_feature: MA Experiment 20000173 PARAMETER Experiment Name: At_42deg_Heat_P Parameter: Timepoint (hr) Value: 6
  misc_feature: MA Experiment 20000173 PARAMETER Experiment Name: At_42deg_Heat_P Parameter: Tissue Value: Aerial
  misc_feature: MA Experiment ID: 20000224 Result: Down-regulated in Transcription
aaacctctctcctcgaccctttaatttctaatcaccgaccaaaattgatcggaaacctagagctcttcgtattgctccgccaccatgcatatccggcgccagatcttcgttaaatctcctgactgtcaaaaagtcgtcgctctgcaattggatcctgcgcaatctctattaactctttcgggtatcacttccttactcgaatcgtcgcagcgtatatcgttttcggcttgctcgattactctagatgggaagcttttgaatggctctacacggatccaagtatcgaagcttccttctgtatccatgctcactcttttccctcgcctccgtggaggtggaggagatggtggggcaacgggagccgagtctcgcgattgctatctcaatatgtacgcggagaagaaacctgacaaggttgatcctaatgagcagaggctctccaaatggttgaattgtgctttgtctaacgagcctttggctgagccgtgcgtgattgatctccttgggaatttgttcaataaagaagttttggtgcacgctttgttgtctaagaggttgcctaaacaattctcgtacattaagggtttgaaagatatggtgaatattaagcttacgcctgttgctggttctgatggttcatcgcaagatacgactagtgcacagtttcagtgtccggtctcagggcttgaattcaatggaaagtacaagtttttcgctttgaggggatgtggacatgtgatgagcgcaaaggcgttgaaggaagtgaagtcttcttcttgtttggtgtgtcatgcggatgtcaaagattctgataagattgtgatcaatggtactgaggaggaagtagatttgttgagggagaagatggaggaggagaaagctaagctgagagagaagaaaggtgtctcaaagaagagtaagaacggtgctgctgtggtggctgatacaggtgcgaaggtcgcaaagagacagatagaggatgggaatgtcaatggcaatggtataactgtgaagaaattcaaggcggcggataaagtgccggttaatgctactaaggaagtctatgcttctctctttacttcctctaagaagaagtctgatttcagggagacttactcttgcaggtcacttcctctcggcaggaattgatttgttggatcaatgttgtttacctgcttgcttcatttgctctgtaatctgttttgattatattgatatatcaacttgcttttgtaatttcgcctactggataatataatgtttttcttttccttttgcaattggtaaaaacagtaaacatgtttgcatccactatgctaaaactagtaaaagtgttgtatcataagctgcaattgtaacaagaggatatgtatgttgtttac

SEQ ID NO: 42072 - protein, 354 aa, Arabidopsis thaliana
  peptide (1)..(354): Ceres Seq. ID no. 12371107
  misc_feature (84)..(338): Pfam Name: Protein of unknown function, DUF602 Pfam Description: Protein of unknown function, DUF602
  misc_feature (106)..(284): Homolog of NCBI NO: 7020598 NR Description: unnamed protein product [Homo sapiens]
  misc_feature (106)..(283): Homolog of NCBI NO: 7705483 NR Description: chromosome 20 open reading frame 43 [Homo
  misc_feature (106)..(284): Homolog of NCBI NO: 23813888 NR Description: Protein C20orf43 (HSPC164/HSPC169) (AD-007)
  misc_feature (106)..(342): Homolog of NCBI NO: 28279530 NR Description: Similar to chromosome 20 open reading frame 43
  misc_feature (106)..(284): Homolog of NCBI NO: 6563236 NR Description: protein x 0001 [Homo sapiens]
  misc_feature (106)..(272): Homolog of NCBI NO: 27735473 NR Description: Similar to chromosome 20 open reading frame 43
  misc_feature (85)..(294): Homolog of NCBI NO: 31197425 NR Description: ENSANGP00000002198 [Anopheles gambiae]
  misc_feature (106)..(345): Homolog of NCBI NO: 32484231 NR Description: Unknown (protein for MGC:64388) [Xenopus laevis]
  misc_feature (74)..(354): Homolog of NCBI NO: 9759527 NR Description: gene_id:F2C19.3~ref|NP_057491.1~similar to
  misc_feature (1)..(354): Homolog of NCBI NO: 15242923 NR Description: putative protein; protein id: At5g58020.1
MHIRRQIFVKSPDCQKVVALQLDPAQSLLTLSGITSLLESSQRISFSACSITLDGKLLNGSTRIQVSKLPSVSMLTLFPRLRGGGGDGGATGAESRDCYLNMYAEKKPDKVDPNEQRLSKWLNCALSNEPLAEPCVIDLLGNLFNKEVLVHALLSKRLPKQFSYIKGLKDMVNIKLTPVAGSDGSSQDTTSAQFQCPVSGLEFNGKYKFFALRGCGHVMSAKALKEVKSSSCLVCHADVKDSDKIVINGTEEEVDLLREKMEEEKAKLREKKGVSKKSKNGAAVVADTGAKVAKRQIEDGNVNGNGITVKKFKAADKVPVNATKEVYASLFTSSKKKSDFRETYSCRSLPLGRN

SEQ ID NO: 42073 - protein, 281 aa, Arabidopsis thaliana
  peptide (1)..(281): Ceres Seq. ID no. 12371108
  misc_feature (11)..(265): Pfam Name: Protein of unknown function, DUF602 Pfam Description: Protein of unknown function, DUF602
  misc_feature (33)..(211): Homolog of NCBI NO: 7020598 NR Description: unnamed protein product [Homo sapiens]
  misc_feature (33)..(210): Homolog of NCBI NO: 7705483 NR Description: chromosome 20 open reading frame 43 [Homo
  misc_feature (33)..(211): Homolog of NCBI NO: 23813888 NR Description: Protein C20orf43 (HSPC164/HSPC169) (AD-007)
  misc_feature (33)..(269): Homolog of NCBI NO: 28279530 NR Description: Similar to chromosome 20 open reading frame 43
  misc_feature (33)..(211): Homolog of NCBI NO: 6563236 NR Description: protein x 0001 [Homo sapiens]
  misc_feature (33)..(199): Homolog of NCBI NO: 27735473 NR Description: Similar to chromosome 20 open reading frame 43
  misc_feature (12)..(221): Homolog of NCBI NO: 31197425 NR Description: ENSANGP00000002198 [Anopheles gambiae]
  misc_feature (33)..(272): Homolog of NCBI NO: 32484231 NR Description: Unknown (protein for MGC:64388) [Xenopus laevis]
  misc_feature (1)..(281): Homolog of NCBI NO: 9759527 NR Description: gene_id:F2C19.3~ref|NP_057491.1~similar to
  misc_feature (1)..(281): Homolog of NCBI NO: 15242923 NR Description: putative protein; protein id: At5g58020.1
MLTLFPRLRGGGGDGGATGAESRDCYLNMYAEKKPDKVDPNEQRLSKWLNCALSNEPLAEPCVIDLLGNLFNKEVLVHALLSKRLPKQFSYIKGLKDMVNIKLTPVAGSDGSSQDTTSAQFQCPVSGLEFNGKYKFFALRGCGHVMSAKALKEVKSSSCLVCHADVKDSDKIVINGTEEEVDLLREKMEEEKAKLREKKGVSKKSKNGAAVVADTGAKVAKRQIEDGNVNGNGITVKKFKAADKVPVNATKEVYASLFTSSKKKSDFRETYSCRSLPLGRN

SEQ ID NO: 42074 - protein, 253 aa, Arabidopsis thaliana
  peptide (1)..(253): Ceres Seq. ID no. 12371109
  misc_feature (1)..(237): Pfam Name: Protein of unknown function, DUF602 Pfam Description: Protein of unknown function, DUF602
  misc_feature (5)..(183): Homolog of NCBI NO: 7020598 NR Description: unnamed protein product [Homo sapiens]
  misc_feature (5)..(182): Homolog of NCBI NO: 7705483 NR Description: chromosome 20 open reading frame 43 [Homo
  misc_feature (5)..(183): Homolog of NCBI NO: 23813888 NR Description: Protein C20orf43 (HSPC164/HSPC169) (AD-007)
  misc_feature (5)..(241): Homolog of NCBI NO: 28279530 NR Description: Similar to chromosome 20 open reading frame 43
  misc_feature (5)..(183): Homolog of NCBI NO: 6563236 NR Description: protein x 0001 [Homo sapiens]
  misc_feature (5)..(171): Homolog of NCBI NO: 27735473 NR Description: Similar to chromosome 20 open reading frame 43
  misc_feature (1)..(193): Homolog of NCBI NO: 31197425 NR Description: ENSANGP00000002198 [Anopheles gambiae]
  misc_feature (5)..(244): Homolog of NCBI NO: 32484231 NR Description: Unknown (protein for MGC:64388) [Xenopus laevis]
  misc_feature (1)..(253): Homolog of NCBI NO: 9759527 NR Description: gene_id:F2C19.3~ref|NP_057491.1~similar to
  misc_feature (1)..(253): Homolog of NCBI NO: 15242923 NR Description: putative protein; protein id: At5g58020.1
MYAEKKPDKVDPNEQRLSKWLNCALSNEPLAEPCVIDLLGNLFNKEVLVHALLSKRLPKQFSYIKGLKDMVNIKLTPVAGSDGSSQDTTSAQFQCPVSGLEFNGKYKFFALRGCGHVMSAKALKEVKSSSCLVCHADVKDSDKIVINGTEEEVDLLREKMEEEKAKLREKKGVSKKSKNGAAVVADTGAKVAKRQIEDGNVNGNGITVKKFKAADKVPVNATKEVYASLFTSSKKKSDFRETYSCRSLPLGRN

SEQ ID NO: 42075 - DNA, 1569 bp, Arabidopsis thaliana
  misc_feature (1)..(1569): Ceres Seq. ID no. 12328306
  misc_feature: MA Experiment ID: 108573 Result: Down-regulated in Transcription
  misc_feature: MA Experiment 108573 PARAMETER Experiment Name: At_Drought_cDNA_P Parameter: Timepoint (hr) Value: 6
  misc_feature: MA Experiment 108573 PARAMETER Experiment Name: At_Drought_cDNA_P Parameter: Tissue Value: Aerial
  misc_feature: MA Experiment 108573 PARAMETER Experiment Name: At_Drought_cDNA_P Parameter: Treatment Value: Drought vs. No Drought
  misc_feature: MA Experiment ID: 20000185 Result: Up-regulated in Transcription
  misc_feature: MA Experiment 20000185 PARAMETER Experiment Name: At_Roots__P Parameter: Age (day) Value: 7 vs. 21
  misc_feature: MA Experiment 20000185 PARAMETER Experiment Name: At_Roots__P Parameter: Organism Value: A. thaliana
  misc_feature: MA Experiment 20000185 PARAMETER Experiment Name: At_Roots__P Parameter: Tissue Value: Roots vs. Whole Plant
  misc_feature: MA Experiment ID: 20000439 Result: Up-regulated in Transcription
  misc_feature: MA Experiment 20000439 PARAMETER Experiment Name: At_Roots__P Parameter: Age (day) Value: 14 vs. 21
  misc_feature: MA Experiment 20000439 PARAMETER Experiment Name: At_Roots__P Parameter: Organism Value: A. thaliana
  misc_feature: MA Experiment 20000439 PARAMETER Experiment Name: At_Roots__P Parameter: Tissue Value: Roots vs. Whole Plant
  misc_feature: MA Experiment ID: 20001248 Result: Down-regulated in Transcription
  misc_feature: MA Experiment 20001248 PARAMETER Experiment Name: At_Far-red-induction_P Parameter: Age (day) Value: 7
  misc_feature: MA Experiment 20001248 PARAMETER Experiment Name: At_Far-red-induction_P Parameter: Light Value: Far-red vs. White
  misc_feature: MA Experiment 20001248 PARAMETER Experiment Name: At_Far-red-induction_P Parameter: Organism Value: A. thaliana
  misc_feature: MA Experiment 20001248 PARAMETER Experiment Name: At_Far-red-induction_P Parameter: Plant Line Value: Columbia
  misc_feature: MA Experiment 20001248 PARAMETER Experiment Name: At_Far-red-induction_P Parameter: Timepoint (hr) Value: 4
  misc_feature: MA Experiment 20001248 PARAMETER Experiment Name: At_Far-red-induction_P Parameter: Tissue Value: Whole Plant
  misc_feature: MA Experiment ID: 20001451 Result: Down-regulated in Transcription
  misc_feature: MA Experiment 20001451 PARAMETER Experiment Name: At_Far-red-induction_P Parameter: Age (day) Value: 7
  misc_feature: MA Experiment 20001451 PARAMETER Experiment Name: At_Far-red-induction_P Parameter: Light Value: Far-red vs. White
  misc_feature: MA Experiment 20001451 PARAMETER Experiment Name: At_Far-red-induction_P Parameter: Organism Value: A. thaliana
  misc_feature: MA Experiment 20001451 PARAMETER Experiment Name: At_Far-red-induction_P Parameter: Plant Line Value: Columbia
  misc_feature: MA Experiment 20001451 PARAMETER Experiment Name: At_Far-red-induction_P Parameter: Timepoint (hr) Value: 24
  misc_feature: MA Experiment 20001451 PARAMETER Experiment Name: At_Far-red-induction_P Parameter: Tissue Value: Whole Plant
ataacagttacagaaaaaaataaataaagagatagaagatggagagacaaagaagtttctctgtgaagtccacaagagtcttagcattcatcatcacaataatctcttccgccattgttttcttcactttcttctcctcttccttactcaaatctaactcttctctttacccaacaccagaagctaacttccagatcgatttaagccctattgccgccatttccgattcttcagtttctcctcaagcaagtccgattctgatctctacccatttcaattcacccgaaaacacttccgggtcttcaaaaatttctgtttttgagcagaagattagcggcgagagtttggttaaggaagttagggaaattgctaatttaacttcgattaaagtgattgaacttccgagcaacaatggtgaagataagaagacagagaagagaatcgaagaatgtgatgttacgaaagggaagtgggtttacgatagtgattatccattgtacacaaatgcgtcttgtccttttatcgatgaaggatttggttgtcaaagcaatggaagattggatcttaattacatgaattggagatgggagcctcaggattgtcatgctcccaggttcaatgctacaaagatgctggaaatgattagaggcaagaggctagtgttcgttggagattcaattaataggaaccaatgggaatctatgctttgtttgttgtttcaagctgttaaagatcccaagagagtatacgaaacgcacaaccgaagaatcaccaaagagaaagggaattatagcttccgtttcgtggattataaatgcactgtggaattctatgttactcatttcttggttcgtgagggtagagcaagaataggaaagaagcgaagagaaacacttagaatcgatgctatggatcgaacctcttccagatggaaaggtgctaatatcttagtgttcaatacagctcattggtggtctcattacaaaaccaaatcaggggtcaactactaccaagaaggagacctgattcatcccaaactcgatgtatcaaccgcttttaagaaagctttgcagacttggtcatcatgggttgacaaaaatgtcgatccgaagaaaactcgcgttttctttagaagcgctgcaccttctcatttcagtggaggagaatggaactcaggaggtcattgcagagaagccaacatgccgttgaaccaaaccttcaaaccaagttactcgagcaaaaagtccattgttgaggacgtactgaagcaaatgagaacaccggtaaccctcttgaacgttagcggtttatctcagtacagaattgacgcccatccttctatttacggaacaaaacccgaaaaccggcgttcaagagctgtccaagattgcagccattggtgtctccctggtgttcctgatacttggaaccacttcctttacctccatttgctccataaacgataaatacagttacaaactaatcaaagctccagttacgtgttcaaaagtttgtttaatgtaggcattgctcgatccgatttaaccaaccaaaccaaaaccattttgg

SEQ ID NO: 42076 - protein, 475 aa, Arabidopsis thaliana
  peptide (1)..(475): Ceres Seq. ID no. 12328307
  misc_feature (312)..(471): Pfam Name: Arabidopsis proteins of unknown function Pfam Description: Arabidopsis proteins of unknown function
  misc_feature (124)..(475): Homolog of NCBI NO: 15239660 NR Description: putative protein; protein id: At5g19160.1
  misc_feature (116)..(468): Homolog of NCBI NO: 6862912 NR Description: unknown protein [Arabidopsis thaliana]
  misc_feature (163)..(474): Homolog of NCBI NO: 21618305 NR Description: unknown [Arabidopsis thaliana]
  misc_feature (61)..(472): Homolog of NCBI NO: 15239856 NR Description: putative protein; protein id: At5g49340.1
  misc_feature (117)..(474): Homolog of NCBI NO: 9759298 NR Description: emb|CAB82953.1~gene_id:MPH15.5~strong similarity
  misc_feature (121)..(472): Homolog of NCBI NO: 22330347 NR Description: hypothetical protein
  misc_feature (129)..(474): Homolog of NCBI NO: 15229945 NR Description: hypothetical protein; protein id: At3g12060.1
  misc_feature (1)..(472): Homolog of NCBI NO: 21592371 NR Description: unknown [Arabidopsis thaliana]
  misc_feature (1)..(472): Homolog of NCBI NO: 15242021 NR Description: putative protein
  misc_feature (1)..(475): Homolog of NCBI NO: 15228743 NR Description: putative protein
MERQRSFSVKSTRVLAFIITIISSAIVFFTFFSSSLLKSNSSLYPTPEANFQIDLSPIAAISDSSVSPQASPILISTHFNSPENTSGSSKISVFEQKISGESLVKEVREIANLTSIKVIELPSNNGEDKKTEKRIEECDVTKGKWVYDSDYPLYTNASCPFIDEGFGCQSNGRLDLNYMNWRWEPQDCHAPRFNATKMLEMIRGKRLVFVGDSINRNQWESMLCLLFQAVKDPKRVYETHNRRITKEKGNYSFRFVDYKCTVEFYVTHFLVREGRARIGKKRRETLRIDAMDRTSSRWKGANILVFNTAHWWSHYKTKSGVNYYQEGDLIHPKLDVSTAFKKALQTWSSWVDKNVDPKKTRVFFRSAAPSHFSGGEWNSGGHCREANMPLNQTFKPSYSSKKSIVEDVLKQMRTPVTLLNVSGLSQYRIDAHPSIYGTKPENRRSRAVQDCSHWCLPGVPDTWNHFLYLHLLHKR

SEQ ID NO: 42077 - protein, 297 aa, Arabidopsis thaliana
  peptide (1)..(297): Ceres Seq. ID no. 12328308
  misc_feature (134)..(293): Pfam Name: Arabidopsis proteins of unknown function Pfam Description: Arabidopsis proteins of unknown function
  misc_feature (1)..(297): Homolog of NCBI NO: 15239660 NR Description: putative protein; protein id: At5g19160.1
  misc_feature (1)..(290): Homolog of NCBI NO: 6862912 NR Description: unknown protein [Arabidopsis thaliana]
  misc_feature (1)..(296): Homolog of NCBI NO: 21618305 NR Description: unknown [Arabidopsis thaliana]
  misc_feature (1)..(294): Homolog of NCBI NO: 15239856 NR Description: putative protein; protein id: At5g49340.1
  misc_feature (1)..(296): Homolog of NCBI NO: 9759298 NR Description: emb|CAB82953.1~gene_id:MPH15.5~strong similarity
  misc_feature (1)..(294): Homolog of NCBI NO: 22330347 NR Description: hypothetical protein
  misc_feature (1)..(296): Homolog of NCBI NO: 15229945 NR Description: hypothetical protein; protein id: At3g12060.1
  misc_feature (1)..(294): Homolog of NCBI NO: 21592371 NR Description: unknown [Arabidopsis thaliana]
  misc_feature (1)..(294): Homolog of NCBI NO: 15242021 NR Description: putative protein
  misc_feature (1)..(297): Homolog of NCBI NO: 15228743 NR Description: putative protein
MNWRWEPQDCHAPRFNATKMLEMIRGKRLVFVGDSINRNQWESMLCLLFQAVKDPKRVYETHNRRITKEKGNYSFRFVDYKCTVEFYVTHFLVREGRARIGKKRRETLRIDAMDRTSSRWKGANILVFNTAHWWSHYKTKSGVNYYQEGDLIHPKLDVSTAFKKALQTWSSWVDKNVDPKKTRVFFRSAAPSHFSGGEWNSGGHCREANMPLNQTFKPSYSSKKSIVEDVLKQMRTPVTLLNVSGLSQYRIDAHPSIYGTKPENRRSRAVQDCSHWCLPGVPDTWNHFLYLHLLHKR

SEQ ID NO: 42078 - protein, 278 aa, Arabidopsis thaliana
  peptide (1)..(278): Ceres Seq. ID no. 12328309
  misc_feature (115)..(274): Pfam Name: Arabidopsis proteins of unknown function Pfam Description: Arabidopsis proteins of unknown function
  misc_feature (1)..(278): Homolog of NCBI NO: 15239660 NR Description: putative protein; protein id: At5g19160.1
  misc_feature (1)..(271): Homolog of NCBI NO: 6862912 NR Description: unknown protein [Arabidopsis thaliana]
  misc_feature (1)..(277): Homolog of NCBI NO: 21618305 NR Description: unknown [Arabidopsis thaliana]
  misc_feature (1)..(275): Homolog of NCBI NO: 15239856 NR Description: putative protein; protein id: At5g49340.1
  misc_feature (1)..(277): Homolog of NCBI NO: 9759298 NR Description: emb|CAB82953.1~gene_id:MPH15.5~strong similarity
  misc_feature (1)..(275): Homolog of NCBI NO: 22330347 NR Description: hypothetical protein
  misc_feature (1)..(277): Homolog of NCBI NO: 15229945 NR Description: hypothetical protein; protein id: At3g12060.1
  misc_feature (1)..(275): Homolog of NCBI NO: 21592371 NR Description: unknown [Arabidopsis thaliana]
  misc_feature (1)..(275): Homolog of NCBI NO: 15242021 NR Description: putative protein
  misc_feature (1)..(278): Homolog of NCBI NO: 15228743 NR Description: putative protein
MLEMIRGKRLVFVGDSINRNQWESMLCLLFQAVKDPKRVYETHNRRITKEKGNYSFRFVDYKCTVEFYVTHFLVREGRARIGKKRRETLRIDAMDRTSSRWKGANILVFNTAHWWSHYKTKSGVNYYQEGDLIHPKLDVSTAFKKALQTWSSWVDKNVDPKKTRVFFRSAAPSHFSGGEWNSGGHCREANMPLNQTFKPSYSSKKSIVEDVLKQMRTPVTLLNVSGLSQYRIDAHPSIYGTKPENRRSRAVQDCSHWCLPGVPDTWNHFLYLHLLHKR

SEQ ID NO: 42079 - DNA, 1840 bp, Arabidopsis thaliana
  misc_feature (1)..(1840): Ceres Seq. ID no. 13492433
  misc_feature: MA Experiment ID: 108434 Result: Down-regulated in Transcription
  misc_feature: MA Experiment 108434 PARAMETER Experiment Name: At_Root_Tips_cDNA_P Parameter: Tissue Value: Root Tips
  misc_feature: MA Experiment ID: 108463 Result: Down-regulated in Transcription
  misc_feature: MA Experiment 108463 PARAMETER Experiment Name: At_Germinating_Seeds_cDNA_P Parameter: Age (day) Value: 3 vs. 0
  misc_feature: MA Experiment 108463 PARAMETER Experiment Name: At_Germinating_Seeds_cDNA_P Parameter: Tissue Value: Germinating Seeds
  misc_feature: MA Experiment ID: 108464 Result: Down-regulated in Transcription
  misc_feature: MA Experiment 108464 PARAMETER Experiment Name: At_Germinating_Seeds_cDNA_P Parameter: Age (day) Value: 4 vs. 0
  misc_feature: MA Experiment 108464 PARAMETER Experiment Name: At_Germinating_Seeds_cDNA_P Parameter: Tissue Value: Germinating Seeds
  misc_feature: MA Experiment ID: 108573 Result: Up-regulated in Transcription
  misc_feature: MA Experiment 108573 PARAMETER Experiment Name: At_Drought_cDNA_P Parameter: Timepoint (hr) Value: 6
  misc_feature: MA Experiment 108573 PARAMETER Experiment Name: At_Drought_cDNA_P Parameter: Tissue Value: Aerial
  misc_feature: MA Experiment 108573 PARAMETER Experiment Name: At_Drought_cDNA_P Parameter: Treatment Value: Drought vs. No Drought
  misc_feature: MA Experiment ID: 108577 Result: Down-regulated in Transcription
  misc_feature: MA Experiment 108577 PARAMETER Experiment Name: At_42deg_Heat_cDNA_P Parameter: Temperature (deg C) Value: 42 vs. 22
  misc_feature: MA Experiment 108577 PARAMETER Experiment Name: At_42deg_Heat_cDNA_P Parameter: Timepoint (hr) Value: 6
  misc_feature: MA Experiment 108577 PARAMETER Experiment Name: At_42deg_Heat_cDNA_P Parameter: Tissue Value: Aerial
  misc_feature: MA Experiment ID: 20000069 Result: Up-regulated in Transcription
  misc_feature: MA Experiment 20000069 PARAMETER Experiment Name: At_100uM_ABA_Mutants_cDNA_P Parameter: Plant Line Value: CS23
  misc_feature: MA Experiment 20000069 PARAMETER Experiment Name: At_100uM_ABA_Mutants_cDNA_P Parameter: Timepoint (hr) Value: 6
  misc_feature: MA Experiment 20000069 PARAMETER Experiment Name: At_100uM_ABA_Mutants_cDNA_P Parameter: Tissue Value: Aerial
  misc_feature: MA Experiment 20000069 PARAMETER Experiment Name: At_100uM_ABA_Mutants_cDNA_P Parameter: Treatment Value: 100uM ABA vs. No Treatment
  misc_feature: MA Experiment ID: 20000070 Result: Up-regulated in Transcription
  misc_feature: MA Experiment 20000070 PARAMETER Experiment Name: At_100uM_ABA_Mutants_cDNA_P Parameter: Plant Line Value: CS24
  misc_feature: MA Experiment 20000070 PARAMETER Experiment Name: At_100uM_ABA_Mutants_cDNA_P Parameter: Timepoint (hr) Value: 6
  misc_feature: MA Experiment 20000070 PARAMETER Experiment Name: At_100uM_ABA_Mutants_cDNA_P Parameter: Tissue Value: Aerial
  misc_feature: MA Experiment 20000070 PARAMETER Experiment Name: At_100uM_ABA_Mutants_cDNA_P Parameter: Treatment Value: 100uM ABA vs. No Treatment
  misc_feature: MA Experiment ID: 20000072 Result: Up-regulated in Transcription
  misc_feature: MA Experiment 20000072 PARAMETER Experiment Name: At_100uM_ABA_Mutants_cDNA_P Parameter: Plant Line Value: CS8105
  misc_feature: MA Experiment 20000072 PARAMETER Experiment Name: At_100uM_ABA_Mutants_cDNA_P Parameter: Timepoint (hr) Value: 6
  misc_feature: MA Experiment 20000072 PARAMETER Experiment Name: At_100uM_ABA_Mutants_cDNA_P Parameter: Tissue Value: Aerial
  misc_feature: MA Experiment 20000072 PARAMETER Experiment Name: At_100uM_ABA_Mutants_cDNA_P Parameter: Treatment Value: 100uM ABA vs. No Treatment
  misc_feature: MA Experiment ID: 20000086 Result: Up-regulated in Transcription
  misc_feature: MA Experiment 20000086 PARAMETER Experiment Name: At_100uM_ABA_Mutants_cDNA_P Parameter: Plant Line Value: CS22
  misc_feature: MA Experiment 20000086 PARAMETER Experiment Name: At_100uM_ABA_Mutants_cDNA_P Parameter: Timepoint (hr) Value: 6
  misc_feature: MA Experiment 20000086 PARAMETER Experiment Name: At_100uM_ABA_Mutants_cDNA_P Parameter: Tissue Value: Aerial
  misc_feature: MA Experiment 20000086 PARAMETER Experiment Name: At_100uM_ABA_Mutants_cDNA_P Parameter: Treatment Value: 100uM ABA vs. No Treatment
  misc_feature: MA Experiment ID: 20000087 Result: Up-regulated in Transcription
  misc_feature: MA Experiment 20000087 PARAMETER Experiment Name: At_100uM_ABA_Mutants_cDNA_P Parameter: Plant Line Value: WS
  misc_feature: MA Experiment 20000087 PARAMETER Experiment Name: At_100uM_ABA_Mutants_cDNA_P Parameter: Timepoint (hr) Value: 6
  misc_feature: MA Experiment 20000087 PARAMETER Experiment Name: At_100uM_ABA_Mutants_cDNA_P Parameter: Tissue Value: Aerial
  misc_feature: MA Experiment 20000087 PARAMETER Experiment Name: At_100uM_ABA_Mutants_cDNA_P Parameter: Treatment Value: 100uM ABA vs. No Treatment
  misc_feature: MA Experiment ID: 20000088 Result: Up-regulated in Transcription
  misc_feature: MA Experiment 20000088 PARAMETER Experiment Name: At_100uM_ABA_Mutants_cDNA_P Parameter: Plant Line Value: Landsberg
  misc_feature: MA Experiment 20000088 PARAMETER Experiment Name: At_100uM_ABA_Mutants_cDNA_P Parameter: Timepoint (hr) Value: 6
  misc_feature: MA Experiment 20000088 PARAMETER Experiment Name: At_100uM_ABA_Mutants_cDNA_P Parameter: Tissue Value: Aerial
  misc_feature: MA Experiment 20000088 PARAMETER Experiment Name: At_100uM_ABA_Mutants_cDNA_P Parameter: Treatment Value: 100uM ABA vs. No Treatment
  misc_feature: MA Experiment ID: 20000111 Result: Down-regulated in Transcription
  misc_feature: MA Experiment 20000111 PARAMETER Experiment Name: At_42deg_Heat_cDNA_P Parameter: Temperature (deg C) Value: 42 vs. 22
  misc_feature: MA Experiment 20000111 PARAMETER Experiment Name: At_42deg_Heat_cDNA_P Parameter: Timepoint (hr) Value: 6
  misc_feature: MA Experiment 20000111 PARAMETER Experiment Name: At_42deg_Heat_cDNA_P Parameter: Tissue Value: Aerial
  misc_feature: MA Experiment ID: 20000185 Result: Up-regulated in Transcription
  misc_feature: MA Experiment 20000185 PARAMETER Experiment Name: At_Roots__P Parameter: Age (day) Value: 7 vs. 21
  misc_feature: MA Experiment 20000185 PARAMETER Experiment Name: At_Roots__P Parameter: Organism Value: A. thaliana
  misc_feature: MA Experiment 20000185 PARAMETER Experiment Name: At_Roots__P Parameter: Tissue Value: Roots vs. Whole Plant
  misc_feature: MA Experiment ID: 20000224 Result: Down-regulated in Transcription
  misc_feature: MA Experiment ID: 20000227 Result: Down-regulated in Transcription
  misc_feature: MA Experiment 20000227 PARAMETER Experiment Name: At_Root-Tips-vs-Tops_P Parameter: Tissue Value: Root Tips vs. Root Tops
  misc_feature: MA Experiment ID: 20000234 Result: Down-regulated in Transcription
  misc_feature: MA Experiment 20000234 PARAMETER Experiment Name: At_Siliques_P Parameter: Age (day) Value: 21
  misc_feature: MA Experiment 20000234 PARAMETER Experiment Name: At_Siliques_P Parameter: Organism Value: A. thaliana
  misc_feature: MA Experiment 20000234 PARAMETER Experiment Name: At_Siliques_P Parameter: Plant Line Value: WS
  misc_feature: MA Experiment 20000234 PARAMETER Experiment Name: At_Siliques_P Parameter: Tissue Value: Less Than 5mm Siliques vs. Whole Plant
  misc_feature: MA Experiment ID: 20000235 Result: Down-regulated in Transcription
  misc_feature: MA Experiment 20000235 PARAMETER Experiment Name: At_Siliques_P Parameter: Age (day) Value: 21
  misc_feature: MA Experiment 20000235 PARAMETER Experiment Name: At_Siliques_P Parameter: Organism Value: A. thaliana
  misc_feature: MA Experiment 20000235 PARAMETER Experiment Name: At_Siliques_P Parameter: Plant Line Value: WS
  misc_feature: MA Experiment 20000235 PARAMETER Experiment Name: At_Siliques_P Parameter: Tissue Value: 5-10mm Siliques vs. Whole Plant
  misc_feature: MA Experiment ID: 20000436 Result: Up-regulated in Transcription
  misc_feature: MA Experiment 20000436 PARAMETER Experiment Name: At_Drought_P Parameter: Age (day) Value: 7
  misc_feature: MA Experiment 20000436 PARAMETER Experiment Name: At_Drought_P Parameter: Organism Value: A. thaliana
  misc_feature: MA Experiment 20000436 PARAMETER Experiment Name: At_Drought_P Parameter: Plant Line Value: WS
  misc_feature: MA Experiment 20000436 PARAMETER Experiment Name: At_Drought_P Parameter: Timepoint (hr) Value: 12
  misc_feature: MA Experiment 20000436 PARAMETER Experiment Name: At_Drought_P Parameter: Tissue Value: Whole Plant
  misc_feature: MA Experiment 20000436 PARAMETER Experiment Name: At_Drought_P Parameter: Treatment Value: Drought vs. No Drought
  misc_feature: MA Experiment ID: 20000439 Result: Up-regulated in Transcription
  misc_feature: MA Experiment 20000439 PARAMETER Experiment Name: At_Roots__P Parameter: Age (day) Value: 14 vs. 21
  misc_feature: MA Experiment 20000439 PARAMETER Experiment Name: At_Roots__P Parameter: Organism Value: A. thaliana
  misc_feature: MA Experiment 20000439 PARAMETER Experiment Name: At_Roots__P Parameter: Tissue Value: Roots vs. Whole Plant
  misc_feature: MA Experiment ID: 20000453 Result: Up-regulated in Transcription
  misc_feature: MA Experiment 20000453 PARAMETER Experiment Name: At_100uM_ABA_P Parameter: Age (day) Value: 15
  misc_feature: MA Experiment 20000453 PARAMETER Experiment Name: At_100uM_ABA_P Parameter: Organism Value: A. thaliana
  misc_feature: MA Experiment 20000453 PARAMETER Experiment Name: At_100uM_ABA_P Parameter: Plant Line Value: WS
  misc_feature: MA Experiment 20000453 PARAMETER Experiment Name: At_100uM_ABA_P Parameter: Timepoint (hr) Value: 24
  misc_feature: MA Experiment 20000453 PARAMETER Experiment Name: At_100uM_ABA_P Parameter: Tissue Value: Aerial
  misc_feature: MA Experiment 20000453 PARAMETER Experiment Name: At_100uM_ABA_P Parameter: Treatment Value: 100uM ABA vs. No Treatment
  misc_feature: MA Experiment ID: 20000496 Result: Up-regulated in Transcription
  misc_feature: MA Experiment 20000496 PARAMETER Experiment Name: At_Guard_Cells_P Parameter: Harvest Date Value: 7/19/2002
  misc_feature: MA Experiment 20000496 PARAMETER Experiment Name: At_Guard_Cells_P Parameter: Organism Value: Canola
  misc_feature: MA Experiment 20000496 PARAMETER Experiment Name: At_Guard_Cells_P Parameter: Tissue Value: Guard Cells vs. Leaves
  misc_feature: MA Experiment ID: 20000794 Result: Up-regulated in Transcription
  misc_feature: MA Experiment 20000794 PARAMETER Experiment Name: At_Petals_P Parameter: Age (day) Value: 23-25 days
  misc_feature: MA Experiment 20000794 PARAMETER Experiment Name: At_Petals_P Parameter: Plant Line Value: WS
  misc_feature: MA Experiment 20000794 PARAMETER Experiment Name: At_Petals_P Parameter: Tissue Value: Petals vs. Whole plant
  misc_feature: MA Experiment ID: 20001555 Result: Up-regulated in Transcription
  misc_feature: MA Experiment 20001555 PARAMETER Experiment Name: At_Drought_Soil_Dry_P Parameter: Age (day) Value: 24
  misc_feature: MA Experiment 20001555 PARAMETER Experiment Name: At_Drought_Soil_Dry_P Parameter: Organism Value: A. thaliana
  misc_feature: MA Experiment 20001555 PARAMETER Experiment Name: At_Drought_Soil_Dry_P Parameter: Plant Line Value: WS
  misc_feature: MA Experiment 20001555 PARAMETER Experiment Name: At_Drought_Soil_Dry_P Parameter: Post Timepoint (hr) Value: None
  misc_feature: MA Experiment 20001555 PARAMETER Experiment Name: At_Drought_Soil_Dry_P Parameter: Post-Treatment Value: None
  misc_feature: MA Experiment 20001555 PARAMETER Experiment Name: At_Drought_Soil_Dry_P Parameter: Timepoint (day) Value: 10
  misc_feature: MA Experiment 20001555 PARAMETER Experiment Name: At_Drought_Soil_Dry_P Parameter: Treatment Value: Drought vs. No Drought
  misc_feature: MA Experiment ID: 20001757 Result: Down-regulated in Transcription
  misc_feature: MA Experiment 20001757 PARAMETER Experiment Name: At_50mM_NH4NO3_L-to-H_P Parameter: Timepoint (hr) Value: 6
  misc_feature: MA Experiment 20001757 PARAMETER Experiment Name: At_50mM_NH4NO3_L-to-H_P Parameter: Tissue Value: Leaf
  misc_feature: MA Experiment 20001757 PARAMETER Experiment Name: At_50mM_NH4NO3_L-to-H_P Parameter: Treatment Value: 50mM NH4NO3 vs 100mM Mannitol
  misc_feature: MA Experiment ID: 20001904 Result: Up-regulated in Transcription
  misc_feature: MA Experiment 20001904 PARAMETER Experiment Name: At_Drought_Reproduction_P Parameter: Age (day) Value: 37
  misc_feature: MA Experiment 20001904 PARAMETER Experiment Name: At_Drought_Reproduction_P Parameter: Organism Value: A. thaliana
  misc_feature: MA Experiment 20001904 PARAMETER Experiment Name: At_Drought_Reproduction_P Parameter: Plant Line Value: WS
  misc_feature: MA Experiment 20001904 PARAMETER Experiment Name: At_Drought_Reproduction_P Parameter: Timepoint (day) Value: 7
  misc_feature: MA Experiment 20001904 PARAMETER Experiment Name: At_Drought_Reproduction_P Parameter: Tissue Value: Rosettes
  misc_feature: MA Experiment 20001904 PARAMETER Experiment Name: At_Drought_Reproduction_P Parameter: Treatment Value: Drought vs. No Drought
  misc_feature: MA Experiment ID: 20001905 Result: Up-regulated in Transcription
  misc_feature: MA Experiment 20001905 PARAMETER Experiment Name: At_Drought_Reproduction_P Parameter: Age (day) Value: 40
  misc_feature: MA Experiment 20001905 PARAMETER Experiment Name: At_Drought_Reproduction_P Parameter: Organism Value: A. thaliana
  misc_feature: MA Experiment 20001905 PARAMETER Experiment Name: At_Drought_Reproduction_P Parameter: Plant Line Value: WS
  misc_feature: MA Experiment 20001905 PARAMETER Experiment Name: At_Drought_Reproduction_P Parameter: Timepoint (day) Value: 10
  misc_feature: MA Experiment 20001905 PARAMETER Experiment Name: At_Drought_Reproduction_P Parameter: Tissue Value: Rosettes
  misc_feature: MA Experiment 20001905 PARAMETER Experiment Name: At_Drought_Reproduction_P Parameter: Treatment Value: Drought vs. No Drought
  misc_feature: MA Experiment ID: 20001906 Result: Up-regulated in Transcription
  misc_feature: MA Experiment 20001906 PARAMETER Experiment Name: At_Drought_Reproduction_P Parameter: Age (day) Value: 35
  misc_feature: MA Experiment 20001906 PARAMETER Experiment Name: At_Drought_Reproduction_P Parameter: Organism Value: A. thaliana
  misc_feature: MA Experiment 20001906 PARAMETER Experiment Name: At_Drought_Reproduction_P Parameter: Plant Line Value: WS
  misc_feature: MA Experiment 20001906 PARAMETER Experiment Name: At_Drought_Reproduction_P Parameter: Timepoint (day) Value: 5
  misc_feature: MA Experiment 20001906 PARAMETER Experiment Name: At_Drought_Reproduction_P Parameter: Tissue Value: Siliques
  misc_feature: MA Experiment 20001906 PARAMETER Experiment Name: At_Drought_Reproduction_P Parameter: Treatment Value: Drought vs. No Drought
  misc_feature: MA Experiment ID: 20001908 Result: Up-regulated in Transcription
  misc_feature: MA Experiment 20001908 PARAMETER Experiment Name: At_Drought_Reproduction_P Parameter: Age (day) Value: 40
  misc_feature: MA Experiment 20001908 PARAMETER Experiment Name: At_Drought_Reproduction_P Parameter: Organism Value: A. thaliana
  misc_feature: MA Experiment 20001908 PARAMETER Experiment Name: At_Drought_Reproduction_P Parameter: Plant Line Value: WS
  misc_feature: MA Experiment 20001908 PARAMETER Experiment Name: At_Drought_Reproduction_P Parameter: Timepoint (day) Value: 10
  misc_feature: MA Experiment 20001908 PARAMETER Experiment Name: At_Drought_Reproduction_P Parameter: Tissue Value: Siliques
  misc_feature: MA Experiment 20001908 PARAMETER Experiment Name: At_Drought_Reproduction_P Parameter: Treatment Value: Drought vs. No Drought
gtagctactgtgtcacgcttttctctagcgaatactttgatgcttcttcatgactctttaacaagattattctgagcttttcctctggccttctaattattaaagtcttcctttttatctattgttaagtgatggctactgaagagaagcctcttaattctcttgatttaagccatgatgattcttcccctgcttcaaatcaggctgaaggatcatctgctataactgaagacacttctgcgaatgttcaacaatggaggcgaaagaatctctctttacagataccctctagagcagctggtctctctcctgaagattcggttgttatcaaaatgcctccaacgcctagtccaactccaagaagagtcaactttgctttgacttcgagttctccaggtcctactcctacttcttcttctgttcttcctcgtggcaaatcgtccctgaagaatctattgccaaaagctgggtgtaaaccaaaaacctctaacactgatatcgagaagggacaagggaatgcctgttctcctcctgcatcgcaggagaaggcttcgatatcgaggtcattatcactttcaaagctatttacacctaggatcaagagaacttcgtccctacctgtgactcctgttattctttcaaactcagagtcagctcacggaggaaccagtgttgctcctcaaactccaaacagaaaagggagtgtacacatagctcgctctcgctctgtgccccttaacgacaaggaattaagcctgaagggaatggattcatttttcagagtaattccttcgactcctcgtgttaaggaaggagacgttttctcaaatgcatcagaggctggtaatactgaaacaggtgatgctgatggagaagacatacctgaggatgaagcagtttgtaggatttgtttggtagagctctgtgaaggaggagaaaccttaaaaatggagtgtagttgcaaaggcgaacttgctcttgcccacaaagattgtgctcttaaatggttcaccataaagggtaacaagacttgtgaggtgtgtaaacaagaagttaagaacttacctgtaacactcttacgcatccaaagccttcgaaattctggtgttcctcagctagatgtctctggctatagggtgtggcaggaggtaccggttctagtaatcatcagcatgctcgcttacttctgcttcctcgagcagctcctggttgagaatatgggtacaggtgccatcgctatatcactgccgttttcttgtattcttggtcttcttgcatccatgaccgcatcaaccatggtaatgagaagatttgtctggatttacgcatctgtccagtttgcgttggtcgttctcttcgcccatatattttactctgtggtgaagttgcaaccagttctgtcagttcttctgtcaacatttgctggatttggtgtatgcatatgcggaagttcagtgatggttgagtttgtgagatggagacgaagatggcgagccagaaggctagagcaacagctgaaccatgctttgactctgtcacaaccgccgcaaccactggatccaacaacctctctgcatcattcaaatacctcatagagagccaagaagtggacagatgattttacatttatacagtgtagtttggttaatgtttatgtaatgatttgtataaaagaaaaagagaaagtgatccaaggaatgcttaaagattgttccttttgtttgttttacatacacatttgtattgttgtaagtttgtaactttgatttgctcaatctctgcaaatgaaatgtttgtagcagtattggtttctctgtataataaaaagatttaaaattgt

SEQ ID NO: 42080 - protein, 487 aa, Arabidopsis thaliana
  peptide (1)..(487): Ceres Seq. ID no. 13492434
  misc_feature (257)..(304): Pfam Name: Zinc finger, C3HC4 type (RING finger) Pfam Description: Zinc finger, C3HC4 type (RING finger)
  misc_feature (77)..(452): Homolog of NCBI NO: 21594296 NR Description: unknown [Arabidopsis thaliana]
  misc_feature (273)..(486): Homolog of NCBI NO: 6682253 NR Description: unknown protein [Arabidopsis thaliana]
  misc_feature (14)..(451): Homolog of NCBI NO: 11290062 NR Description: hypothetical protein F15A17.210 - Arabidopsis
  misc_feature (14)..(451): Homolog of NCBI NO: 18414148 NR Description: zinc finger (C3HC4-type RING finger) protein
  misc_feature (14)..(451): Homolog of NCBI NO: 9757769 NR Description: gene_id:MOK16.9~unknown protein [Arabidopsis
  misc_feature (82)..(480): Homolog of NCBI NO: 32489688 NR Description: OSJNBb0004G23.1 [Oryza sativa (japonica
  misc_feature (13)..(486): Homolog of NCBI NO: 18398630 NR Description: zinc finger (C3HC4-type RING finger) protein
  misc_feature (1)..(381): Homolog of NCBI NO: 13605863 NR Description: AT5g60580/muf9_230 [Arabidopsis thaliana]
  misc_feature (1)..(487): Homolog of NCBI NO: 30697388 NR Description: zinc finger (C3HC4-type RING finger) protein
  misc_feature (1)..(487): Homolog of NCBI NO: 18424371 NR Description: zinc finger (C3HC4-type RING finger) protein
MATEEKPLNSLDLSHDDSSPASNQAEGSSAITEDTSANVQQWRRKNLSLQIPSRAAGLSPEDSVVIKMPPTPSPTPRRVNFALTSSSPGPTPTSSSVLPRGKSSLKNLLPKAGCKPKTSNTDIEKGQGNACSPPASQEKASISRSLSLSKLFTPRIKRTSSLPVTPVILSNSESAHGGTSVAPQTPNRKGSVHIARSRSVPLNDKELSLKGMDSFFRVIPSTPRVKEGDVFSNASEAGNTETGDADGEDIPEDEAVCRICLVELCEGGETLKMECSCKGELALAHKDCALKWFTIKGNKTCEVCKQEVKNLPVTLLRIQSLRNSGVPQLDVSGYRVWQEVPVLVIISMLAYFCFLEQLLVENMGTGAIAISLPFSCILGLLASMTASTMVMRRFVWIYASVQFALVVLFAHIFYSVVKLQPVLSVLLSTFAGFGVCICGSSVMVEFVRWRRRWRARRLEQQLNHALTLSQPPQPLDPTTSLHHSNTS

SEQ ID NO: 42081 - protein, 420 aa, Arabidopsis thaliana
  peptide (1)..(420): Ceres Seq. ID no. 13492435
  misc_feature (190)..(237): Pfam Name: Zinc finger, C3HC4 type (RING finger) Pfam Description: Zinc finger, C3HC4 type (RING finger)
  misc_feature (10)..(385): Homolog of NCBI NO: 21594296 NR Description: unknown [Arabidopsis thaliana]
  misc_feature (206)..(419): Homolog of NCBI NO: 6682253 NR Description: unknown protein [Arabidopsis thaliana]
  misc_feature (1)..(384): Homolog of NCBI NO: 11290062 NR Description: hypothetical protein F15A17.210 - Arabidopsis
  misc_feature (1)..(384): Homolog of NCBI NO: 18414148 NR Description: zinc finger (C3HC4-type RING finger) protein
  misc_feature (1)..(384): Homolog of NCBI NO: 9757769 NR Description: gene_id:MOK16.9~unknown protein [Arabidopsis
  misc_feature (15)..(413): Homolog of NCBI NO: 32489688 NR Description: OSJNBb0004G23.1 [Oryza sativa (japonica
  misc_feature (1)..(419): Homolog of NCBI NO: 18398630 NR Description: zinc finger (C3HC4-type RING finger) protein
  misc_feature (1)..(314): Homolog of NCBI NO: 13605863 NR Description: AT5g60580/muf9_230 [Arabidopsis thaliana]
  misc_feature (1)..(420): Homolog of NCBI NO: 30697388 NR Description: zinc finger (C3HC4-type RING finger) protein
  misc_feature (1)..(420): Homolog of NCBI NO: 18424371 NR Description: zinc finger (C3HC4-type RING finger) protein
MPPTPSPTPRRVNFALTSSSPGPTPTSSSVLPRGKSSLKNLLPKAGCKPKTSNTDIEKGQGNACSPPASQEKASISRSLSLSKLFTPRIKRTSSLPVTPVILSNSESAHGGTSVAPQTPNRKGSVHIARSRSVPLNDKELSLKGMDSFFRVIPSTPRVKEGDVFSNASEAGNTETGDADGEDIPEDEAVCRICLVELCEGGETLKMECSCKGELALAHKDCALKWFTIKGNKTCEVCKQEVKNLPVTLLRIQSLRNSGVPQLDVSGYRVWQEVPVLVIISMLAYFCFLEQLLVENMGTGAIAISLPFSCILGLLASMTASTMVMRRFVWIYASVQFALVVLFAHIFYSVVKLQPVLSVLLSTFAGFGVCICGSSVMVEFVRWRRRWRARRLEQQLNHALTLSQPPQPLDPTTSLHHSNTS

SEQ ID NO: 42082 - protein, 276 aa, Arabidopsis thaliana
  peptide (1)..(276): Ceres Seq. ID no. 13492436
  misc_feature (46)..(93): Pfam Name: Zinc finger, C3HC4 type (RING finger) Pfam Description: Zinc finger, C3HC4 type (RING finger)
  misc_feature (1)..(241): Homolog of NCBI NO: 21594296 NR Description: unknown [Arabidopsis thaliana]
  misc_feature (62)..(275): Homolog of NCBI NO: 6682253 NR Description: unknown protein [Arabidopsis thaliana]
  misc_feature (1)..(240): Homolog of NCBI NO: 11290062 NR Description: hypothetical protein F15A17.210 - Arabidopsis
  misc_feature (1)..(240): Homolog of NCBI NO: 18414148 NR Description: zinc finger (C3HC4-type RING finger) protein
  misc_feature (1)..(240): Homolog of NCBI NO: 9757769 NR Description: gene_id:MOK16.9~unknown protein [Arabidopsis
  misc_feature (1)..(269): Homolog of NCBI NO: 32489688 NR Description: OSJNBb0004G23.1 [Oryza sativa (japonica
  misc_feature (1)..(275): Homolog of NCBI NO: 18398630 NR Description: zinc finger (C3HC4-type RING finger) protein
  misc_feature (1)..(170): Homolog of NCBI NO: 13605863 NR Description: AT5g60580/muf9_230 [Arabidopsis thaliana]
  misc_feature (1)..(276): Homolog of NCBI NO: 30697388 NR Description: zinc finger (C3HC4-type RING finger) protein
  misc_feature (1)..(276): Homolog of NCBI NO: 18424371 NR Description: zinc finger (C3HC4-type RING finger) protein
MDSFFRVIPSTPRVKEGDVFSNASEAGNTETGDADGEDIPEDEAVCRICLVELCEGGETLKMECSCKGELALAHKDCALKWFTIKGNKTCEVCKQEVKNLPVTLLRIQSLRNSGVPQLDVSGYRVWQEVPVLVIISMLAYFCFLEQLLVENMGTGAIAISLPFSCILGLLASMTASTMVMRRFVWIYASVQFALVVLFAHIFYSVVKLQPVLSVLLSTFAGFGVCICGSSVMVEFVRWRRRWRARRLEQQLNHALTLSQPPQPLDPTTSLHHSNTS

SEQ ID NO: 42083 - DNA, 1685 bp, Arabidopsis thaliana
  misc_feature (1)..(1685): Ceres Seq. ID no. 12370888
  misc_feature: MA Experiment ID: 20000166 Result: Up-regulated in Transcription
  misc_feature: MA Experiment 20000166 PARAMETER Experiment Name: At_100uM_ABA_P Parameter: Age (day) Value: 14
  misc_feature: MA Experiment 20000166 PARAMETER Experiment Name: At_100uM_ABA_P Parameter: Organism Value: A. thaliana
  misc_feature: MA Experiment 20000166 PARAMETER Experiment Name: At_100uM_ABA_P Parameter: Plant Line Value: WS
  misc_feature: MA Experiment 20000166 PARAMETER Experiment Name: At_100uM_ABA_P Parameter: Timepoint (hr) Value: 1
  misc_feature: MA Experiment 20000166 PARAMETER Experiment Name: At_100uM_ABA_P Parameter: Tissue Value: Aerial
  misc_feature: MA Experiment 20000166 PARAMETER Experiment Name: At_100uM_ABA_P Parameter: Treatment Value: 100uM ABA vs. No Treatment
  misc_feature: MA Experiment ID: 20000169 Result: Up-regulated in Transcription
  misc_feature: MA Experiment 20000169 PARAMETER Experiment Name: At_100uM_ABA_P Parameter: Age (day) Value: 14
  misc_feature: MA Experiment 20000169 PARAMETER Experiment Name: At_100uM_ABA_P Parameter: Organism Value: A. thaliana
  misc_feature: MA Experiment 20000169 PARAMETER Experiment Name: At_100uM_ABA_P Parameter: Plant Line Value: WS
  misc_feature: MA Experiment 20000169 PARAMETER Experiment Name: At_100uM_ABA_P Parameter: Timepoint (hr) Value: 6
  misc_feature: MA Experiment 20000169 PARAMETER Experiment Name: At_100uM_ABA_P Parameter: Tissue Value: Aerial
  misc_feature: MA Experiment 20000169 PARAMETER Experiment Name: At_100uM_ABA_P Parameter: Treatment Value: 100uM ABA vs. No Treatment
  misc_feature: MA Experiment ID: 20000171 Result: Up-regulated in Transcription
  misc_feature: MA Experiment 20000171 PARAMETER Experiment Name: At_42deg_Heat_P Parameter: Age (day) Value: 14
  misc_feature: MA Experiment 20000171 PARAMETER Experiment Name: At_42deg_Heat_P Parameter: Organism Value: A. thaliana
  misc_feature: MA Experiment 20000171 PARAMETER Experiment Name: At_42deg_Heat_P Parameter: Plant Line Value: WS
  misc_feature: MA Experiment 20000171 PARAMETER Experiment Name: At_42deg_Heat_P Parameter: Temperature (deg C) Value: 42 vs. 22
  misc_feature: MA Experiment 20000171 PARAMETER Experiment Name: At_42deg_Heat_P Parameter: Timepoint (hr) Value: 1
  misc_feature: MA Experiment 20000171 PARAMETER Experiment Name: At_42deg_Heat_P Parameter: Tissue Value: Aerial
  misc_feature: MA Experiment ID: 20000173 Result: Up-regulated in Transcription
  misc_feature: MA Experiment 20000173 PARAMETER Experiment Name: At_42deg_Heat_P Parameter: Age (day) Value: 14
  misc_feature: MA Experiment 20000173 PARAMETER Experiment Name: At_42deg_Heat_P Parameter: Organism Value: A. thaliana
  misc_feature: MA Experiment 20000173 PARAMETER Experiment Name: At_42deg_Heat_P Parameter: Plant Line Value: WS
  misc_feature: MA Experiment 20000173 PARAMETER Experiment Name: At_42deg_Heat_P Parameter: Temperature (deg C) Value: 42 vs. 22
  misc_feature: MA Experiment 20000173 PARAMETER Experiment Name: At_42deg_Heat_P Parameter: Timepoint (hr) Value: 6
  misc_feature: MA Experiment 20000173 PARAMETER Experiment Name: At_42deg_Heat_P Parameter: Tissue Value: Aerial
  misc_feature: MA Experiment ID: 20000182 Result: Up-regulated in Transcription
  misc_feature: MA Experiment 20000182 PARAMETER Experiment Name: At_2mM_SA_P Parameter: Age (day) Value: 14
  misc_feature: MA Experiment 20000182 PARAMETER Experiment Name: At_2mM_SA_P Parameter: Organism Value: A. thaliana
  misc_feature: MA Experiment 20000182 PARAMETER Experiment Name: At_2mM_SA_P Parameter: Plant Line Value: WS
  misc_feature: MA Experiment 20000182 PARAMETER Experiment Name: At_2mM_SA_P Parameter: Timepoint (hr) Value: 6
  misc_feature: MA Experiment 20000182 PARAMETER Experiment Name: At_2mM_SA_P Parameter: Tissue Value: Aerial
  misc_feature: MA Experiment 20000182 PARAMETER Experiment Name: At_2mM_SA_P Parameter: Treatment Value: 2mM SA vs. No Treatment
  misc_feature: MA Experiment ID: 20000264 Result: Up-regulated in Transcription
  misc_feature: MA Experiment 20000264 PARAMETER Experiment Name: At_Open_Flower_P Parameter: Age (day) Value: 21
  misc_feature: MA Experiment 20000264 PARAMETER Experiment Name: At_Open_Flower_P Parameter: Plant Line Value: WS
  misc_feature: MA Experiment 20000264 PARAMETER Experiment Name: At_Open_Flower_P Parameter: Tissue Value: Open Flower vs. Whole Plant
  misc_feature: MA Experiment ID: 20000438 Result: Up-regulated in Transcription
  misc_feature: MA Experiment 20000438 PARAMETER Experiment Name: At_Shoots__P Parameter: Age (day) Value: 14
  misc_feature: MA Experiment 20000438 PARAMETER Experiment Name: At_Shoots__P Parameter: Tissue Value: Shoots vs. Whole Plant
  misc_feature: MA Experiment ID: 20000453 Result: Up-regulated in Transcription
  misc_feature: MA Experiment 20000453 PARAMETER Experiment Name: At_100uM_ABA_P Parameter: Age (day) Value: 15
  misc_feature: MA Experiment 20000453 PARAMETER Experiment Name: At_100uM_ABA_P Parameter: Organism Value: A. thaliana
  misc_feature: MA Experiment 20000453 PARAMETER Experiment Name: At_100uM_ABA_P Parameter: Plant Line Value: WS
  misc_feature: MA Experiment 20000453 PARAMETER Experiment Name: At_100uM_ABA_P Parameter: Timepoint (hr) Value: 24
  misc_feature: MA Experiment 20000453 PARAMETER Experiment Name: At_100uM_ABA_P Parameter: Tissue Value: Aerial
  misc_feature: MA Experiment 20000453 PARAMETER Experiment Name: At_100uM_ABA_P Parameter: Treatment Value: 100uM ABA vs. No Treatment
  misc_feature: MA Experiment ID: 20000495 Result: Up-regulated in Transcription
  misc_feature: MA Experiment 20000495 PARAMETER Experiment Name: At_Guard_Cells_P Parameter: Harvest Date Value: 8/2/2002
  misc_feature: MA Experiment 20000495 PARAMETER Experiment Name: At_Guard_Cells_P Parameter: Organism Value: A. thaliana
  misc_feature: MA Experiment 20000495 PARAMETER Experiment Name: At_Guard_Cells_P Parameter: Tissue Value: Guard Cells vs. Leaves
  misc_feature: MA Experiment ID: 20000527 Result: Up-regulated in Transcription
  misc_feature: MA Experiment 20000527 PARAMETER Experiment Name: At_10percent_PEG_P Parameter: Age (day) Value: 20
  misc_feature: MA Experiment 20000527 PARAMETER Experiment Name: At_10percent_PEG_P Parameter: Organism Value: A. thaliana
  misc_feature: MA Experiment 20000527 PARAMETER Experiment Name: At_10percent_PEG_P Parameter: Plant Line Value: WS
  misc_feature: MA Experiment 20000527 PARAMETER Experiment Name: At_10percent_PEG_P Parameter: Timepoint (day) Value: 20
  misc_feature: MA Experiment 20000527 PARAMETER Experiment Name: At_10percent_PEG_P Parameter: Tissue Value: Whole Plant
  misc_feature: MA Experiment 20000527 PARAMETER Experiment Name: At_10percent_PEG_P Parameter: Treatment Value: 10percent PEG vs. No Treatment
  misc_feature: MA Experiment ID: 20000794 Result: Up-regulated in Transcription
  misc_feature: MA Experiment 20000794 PARAMETER Experiment Name: At_Petals_P Parameter: Age (day) Value: 23-25 days
  misc_feature: MA Experiment 20000794 PARAMETER Experiment Name: At_Petals_P Parameter: Plant Line Value: WS
  misc_feature: MA Experiment 20000794 PARAMETER Experiment Name: At_Petals_P Parameter: Tissue Value: Petals vs. Whole plant
  misc_feature: MA Experiment ID: 20001504 Result: Up-regulated in Transcription
  misc_feature: MA Experiment 20001504 PARAMETER Experiment Name: At_Far-red-enriched_P Parameter: Age (day) Value: 10
  misc_feature: MA Experiment 20001504 PARAMETER Experiment Name: At_Far-red-enriched_P Parameter: Light Value: Far-red enriched vs. White
  misc_feature: MA Experiment 20001504 PARAMETER Experiment Name: At_Far-red-enriched_P Parameter: Organism Value: A. thaliana
  misc_feature: MA Experiment 20001504 PARAMETER Experiment Name: At_Far-red-enriched_P Parameter: Plant Line Value: Columbia
  misc_feature: MA Experiment 20001504 PARAMETER Experiment Name: At_Far-red-enriched_P Parameter: Timepoint (day) Value: 6
  misc_feature: MA Experiment 20001504 PARAMETER Experiment Name: At_Far-red-enriched_P Parameter: Tissue Value: Whole Plant
  misc_feature: MA Experiment ID: 20001771 Result: Up-regulated in Transcription
  misc_feature: MA Experiment 20001771 PARAMETER Experiment Name: At_Far-red-enriched-adult_P Parameter: Age (day) Value: 28
  misc_feature: MA Experiment 20001771 PARAMETER Experiment Name: At_Far-red-enriched-adult_P Parameter: Light Value: Far-red enriched vs. White
  misc_feature: MA Experiment 20001771 PARAMETER Experiment Name: At_Far-red-enriched-adult_P Parameter: Organism Value: A. thaliana
  misc_feature: MA Experiment 20001771 PARAMETER Experiment Name: At_Far-red-enriched-adult_P Parameter: Plant Line Value: Columbia
  misc_feature: MA Experiment 20001771 PARAMETER Experiment Name: At_Far-red-enriched-adult_P Parameter: Timepoint (hr) Value: 16
  misc_feature: MA Experiment 20001771 PARAMETER Experiment Name: At_Far-red-enriched-adult_P Parameter: Tissue Value: Aerial
  misc_feature: MA Experiment ID: 20001910 Result: Up-regulated in Transcription
  misc_feature: MA Experiment 20001910 PARAMETER Experiment Name: At_Drought_Reproduction_P Parameter: Age (day) Value: 37
  misc_feature: MA Experiment 20001910 PARAMETER Experiment Name: At_Drought_Reproduction_P Parameter: Organism Value: A. thaliana
  misc_feature: MA Experiment 20001910 PARAMETER Experiment Name: At_Drought_Reproduction_P Parameter: Plant Line Value: WS
  misc_feature: MA Experiment 20001910 PARAMETER Experiment Name: At_Drought_Reproduction_P Parameter: Timepoint (day) Value: 7
  misc_feature: MA Experiment 20001910 PARAMETER Experiment Name: At_Drought_Reproduction_P Parameter: Tissue Value: Flowers
  misc_feature: MA Experiment 20001910 PARAMETER Experiment Name: At_Drought_Reproduction_P Parameter: Treatment Value: Drought vs. No Drought
gtatgtttttgttccctattatatcttctagcttctttcttcctcttcttccttaaaaattcatcctccaaaacattctatcatcaacgaaacatttcatattaaattaaataataatcgatggctgaaatttggttcttggttgtaccaatcctcatcttatgcttgcttttggtaagagtgattgtttcaaagaagaaaaagaacagtagaggtaagcttcctcctggttccatgggatggccttacttaggagagactctacaactctattcacaaaaccccaatgttttcttcacctccaagcaaaagagatatggagagatattcaaaacccgaatcctcggctatccatgcgtgatgttggctagccctgaggctgcgaggtttgtacttgtgactcatgcccatatgttcaaaccaacttatccgagaagcaaagagaagctgataggaccctctgcactctttttccaccaaggagattatcattcccatataaggaaacttgttcaatcctctttctaccctgaaaccatccgtaaactcatccctgatatcgagcacattgccctttcttccttacaatcttgggccaatatgccgattgtctccacctaccaggagatgaagaagttcgcctttgatgtgggtattctagccatatttggacatttggagagttcttacaaagagatcttgaaacataactacaatattgtggacaaaggctacaactctttccccatgagtctccccggaacatcttatcacaaagctctcatggcgagaaagcagctaaagacgatagtaagcgagattatatgcgaaagaagagagaaaagggccttgcaaacggactttcttggtcatctactcaacttcaagaacgaaaaaggtcgtgtgctaacccaagaacagattgcagacaacatcatcggagtccttttcgccgcacaggacacgacagctagttgcttaacttggattcttaagtacttacatgatgatcagaaacttctagaagctgttaaggctgagcaaaaggctatatatgaagaaaacagtagagagaagaaacctttaacatggagacaaacgaggaatatgccactgacacataaggttatagttgaaagcttgaggatggcaagcatcatatccttcacattcagagaagcagtggttgatgttgaatataagggatatttgatacctaagggatggaaagtgatgccactgtttcggaatattcatcacaatccgaaatatttttcaaaccctgaggttttcgacccatctagattcgaggtaaatccgaagccgaatacattcatgccttttggaagtggagttcatgcttgtcccgggaacgaactcgccaagttacaaattcttatatttctccaccatttagtttccaatttccgatgggaagtgaagggaggagagaaaggaatacagtacagtccatttccaatacctcaaaacggtcttcccgctacatttcgtcgacattctctttagttccttaaacctttgtagtaatctttgttgtagttagccaaatctaatccaaattcgatataaaaaatcccctttctatttttttttaaaatcattgttgtagtcttgagggggtttaacatgtaacaactatgatgaagtaaaatgtcgattccggt

SEQ ID NO: 42084 - protein, 468 aa, Arabidopsis thaliana
  peptide (1)..(468): Ceres Seq. ID no. 12370889
  misc_feature (35)..(437): Pfam Name: Cytochrome P450 Pfam Description: Cytochrome P450
  misc_feature (14)..(466): Homolog of NCBI NO: 5921933 NR Description: Cytochrome P450 85 (Dwarf protein)
  misc_feature (4)..(465): Homolog of NCBI NO: 13021856 NR Description: ent-kaurenoic acid hydroxylase [Arabidopsis
  misc_feature (4)..(465): Homolog of NCBI NO: 15225685 NR Description: ent-kaurenoic acid oxidase (cytochrome P450
  misc_feature (6)..(437): Homolog of NCBI NO: 30694744 NR Description: cytochrome P450 family [Arabidopsis thaliana]
  misc_feature (14)..(437): Homolog of NCBI NO: 7430728 NR Description: cytochrome P450 - Arabidopsis thaliana
  misc_feature (10)..(460): Homolog of NCBI NO: 15227033 NR Description: taxane 13-alpha-hydroxylase(cytochrome p450
  misc_feature (6)..(465): Homolog of NCBI NO: 30694740 NR Description: cytochrome P450 family [Arabidopsis thaliana]
  misc_feature (14)..(465): Homolog of NCBI NO: 18415271 NR Description: cytochrome p450 family
  misc_feature (1)..(438): Homolog of NCBI NO: 9294629 NR Description: cytochrome P450 [Arabidopsis thaliana]
  misc_feature (1)..(468): Homolog of NCBI NO: 18402179 NR Description: cytochrome P450, putative
MAEIWFLVVPILILCLLLVRVIVSKKKKNSRGKLPPGSMGWPYLGETLQLYSQNPNVFFTSKQKRYGEIFKTRILGYPCVMLASPEAARFVLVTHAHMFKPTYPRSKEKLIGPSALFFHQGDYHSHIRKLVQSSFYPETIRKLIPDIEHIALSSLQSWANMPIVSTYQEMKKFAFDVGILAIFGHLESSYKEILKHNYNIVDKGYNSFPMSLPGTSYHKALMARKQLKTIVSEIICERREKRALQTDFLGHLLNFKNEKGRVLTQEQIADNIIGVLFAAQDTTASCLTWILKYLHDDQKLLEAVKAEQKAIYEENSREKKPLTWRQTRNMPLTHKVIVESLRMASIISFTFREAVVDVEYKGYLIPKGWKVMPLFRNIHHNPKYFSNPEVFDPSRFEVNPKPNTFMPFGSGVHACPGNELAKLQILIFLHHLVSNFRWEVKGGEKGIQYSPFPIPQNGLPATFRRHSL

SEQ ID NO: 42085 - protein, 430 aa, Arabidopsis thaliana
  peptide (1)..(430): Ceres Seq. ID no. 12370890
  misc_feature (1)..(399): Pfam Name: Cytochrome P450 Pfam Description: Cytochrome P450
  misc_feature (1)..(428): Homolog of NCBI NO: 5921933 NR Description: Cytochrome P450 85 (Dwarf protein)
  misc_feature (1)..(427): Homolog of NCBI NO: 13021856 NR Description: ent-kaurenoic acid hydroxylase [Arabidopsis
  misc_feature (1)..(427): Homolog of NCBI NO: 15225685 NR Description: ent-kaurenoic acid oxidase (cytochrome P450
  misc_feature (1)..(399): Homolog of NCBI NO: 30694744 NR Description: cytochrome P450 family [Arabidopsis thaliana]
  misc_feature (1)..(399): Homolog of NCBI NO: 7430728 NR Description: cytochrome P450 - Arabidopsis thaliana
  misc_feature (1)..(422): Homolog of NCBI NO: 15227033 NR Description: taxane 13-alpha-hydroxylase(cytochrome p450
  misc_feature (1)..(427): Homolog of NCBI NO: 30694740 NR Description: cytochrome P450 family [Arabidopsis thaliana]
  misc_feature (1)..(427): Homolog of NCBI NO: 18415271 NR Description: cytochrome p450 family
  misc_feature (1)..(400): Homolog of NCBI NO: 9294629 NR Description: cytochrome P450 [Arabidopsis thaliana]
  misc_feature (1)..(430): Homolog of NCBI NO: 18402179 NR Description: cytochrome P450, putative
MGWPYLGETLQLYSQNPNVFFTSKQKRYGEIFKTRILGYPCVMLASPEAARFVLVTHAHMFKPTYPRSKEKLIGPSALFFHQGDYHSHIRKLVQSSFYPETIRKLIPDIEHIALSSLQSWANMPIVSTYQEMKKFAFDVGILAIFGHLESSYKEILKHNYNIVDKGYNSFPMSLPGTSYHKALMARKQLKTIVSEIICERREKRALQTDFLGHLLNFKNEKGRVLTQEQIADNIIGVLFAAQDTTASCLTWILKYLHDDQKLLEAVKAEQKAIYEENSREKKPLTWRQTRNMPLTHKVIVESLRMASIISFTFREAVVDVEYKGYLIPKGWKVMPLFRNIHHNPKYFSNPEVFDPSRFEVNPKPNTFMPFGSGVHACPGNELAKLQILIFLHHLVSNFRWEVKGGEKGIQYSPFPIPQNGLPATFRRHSL

SEQ ID NO: 42086 - protein, 388 aa, Arabidopsis thaliana
  peptide (1)..(388): Ceres Seq. ID no. 12370891
  misc_feature (1)..(357): Pfam Name: Cytochrome P450 Pfam Description: Cytochrome P450
  misc_feature (1)..(386): Homolog of NCBI NO: 5921933 NR Description: Cytochrome P450 85 (Dwarf protein)
  misc_feature (1)..(385): Homolog of NCBI NO: 13021856 NR Description: ent-kaurenoic acid hydroxylase [Arabidopsis
  misc_feature (1)..(385): Homolog of NCBI NO: 15225685 NR Description: ent-kaurenoic acid oxidase (cytochrome P450
  misc_feature (1)..(357): Homolog of NCBI NO: 30694744 NR Description: cytochrome P450 family [Arabidopsis thaliana]
  misc_feature (1)..(357): Homolog of NCBI NO: 7430728 NR Description: cytochrome P450 - Arabidopsis thaliana
  misc_feature (1)..(380): Homolog of NCBI NO: 15227033 NR Description: taxane 13-alpha-hydroxylase(cytochrome p450
  misc_feature (1)..(385): Homolog of NCBI NO: 30694740 NR Description: cytochrome P450 family [Arabidopsis thaliana]
  misc_feature (1)..(385): Homolog of NCBI NO: 18415271 NR Description: cytochrome p450 family
  misc_feature (1)..(358): Homolog of NCBI NO: 9294629 NR Description: cytochrome P450 [Arabidopsis thaliana]
  misc_feature (1)..(388): Homolog of NCBI NO: 18402179 NR Description: cytochrome P450, putative
MLASPEAARFVLVTHAHMFKPTYPRSKEKLIGPSALFFHQGDYHSHIRKLVQSSFYPETIRKLIPDIEHIALSSLQSWANMPIVSTYQEMKKFAFDVGILAIFGHLESSYKEILKHNYNIVDKGYNSFPMSLPGTSYHKALMARKQLKTIVSEIICERREKRALQTDFLGHLLNFKNEKGRVLTQEQIADNIIGVLFAAQDTTASCLTWILKYLHDDQKLLEAVKAEQKAIYEENSREKKPLTWRQTRNMPLTHKVIVESLRMASIISFTFREAVVDVEYKGYLIPKGWKVMPLFRNIHHNPKYFSNPEVFDPSRFEVNPKPNTFMPFGSGVHACPGNELAKLQILIFLHHLVSNFRWEVKGGEKGIQYSPFPIPQNGLPATFRRHSL

SEQ ID NO: 42087 - DNA, 1869 bp, Arabidopsis thaliana
  misc_feature (1)..(1869): Ceres Seq. ID no. 12422975
  misc_feature: MA Experiment ID: 108595 Result: Down-regulated in Transcription
  misc_feature: MA Experiment 108595 PARAMETER Experiment Name: At_Ler-pi_Ovule_cDNA_P Parameter: Plant Line Value: null
  misc_feature: MA Experiment ID: 20000224 Result: Up-regulated in Transcription
  misc_feature: MA Experiment ID: 20000306 Result: Up-regulated in Transcription
  misc_feature: MA Experiment 20000306 PARAMETER Experiment Name: At_Germinating_Seeds_Sub_P Parameter: Age (hr) Value: 6 vs. 0
  misc_feature: MA Experiment 20000306 PARAMETER Experiment Name: At_Germinating_Seeds_Sub_P Parameter: Organism Value: A. thaliana
  misc_feature: MA Experiment 20000306 PARAMETER Experiment Name: At_Germinating_Seeds_Sub_P Parameter: Plant Line Value: WS
  misc_feature: MA Experiment 20000306 PARAMETER Experiment Name: At_Germinating_Seeds_Sub_P Parameter: Tissue Value: Germinating Seeds
  misc_feature: MA Experiment ID: 20000307 Result: Up-regulated in Transcription
  misc_feature: MA Experiment 20000307 PARAMETER Experiment Name: At_Germinating_Seeds_Sub_P Parameter: Age (hr) Value: 24 vs. 0
  misc_feature: MA Experiment 20000307 PARAMETER Experiment Name: At_Germinating_Seeds_Sub_P Parameter: Organism Value: A. thaliana
  misc_feature: MA Experiment 20000307 PARAMETER Experiment Name: At_Germinating_Seeds_Sub_P Parameter: Plant Line Value: WS
  misc_feature: MA Experiment 20000307 PARAMETER Experiment Name: At_Germinating_Seeds_Sub_P Parameter: Tissue Value: Germinating Seeds
  misc_feature: MA Experiment ID: 20000315 Result: Down-regulated in Transcription
  misc_feature: MA Experiment 20000315 PARAMETER Experiment Name: At_14day_Shoots-Roots_Sub_P Parameter: Age (day) Value: 14
  misc_feature: MA Experiment 20000315 PARAMETER Experiment Name: At_14day_Shoots-Roots_Sub_P Parameter: Organism Value: A. thaliana
  misc_feature: MA Experiment 20000315 PARAMETER Experiment Name: At_14day_Shoots-Roots_Sub_P Parameter: Plant Line Value: WS
  misc_feature: MA Experiment 20000315 PARAMETER Experiment Name: At_14day_Shoots-Roots_Sub_P Parameter: Tissue Value: Shoots vs. Whole Plant
  misc_feature: MA Experiment ID: 20000327 Result: Down-regulated in Transcription
  misc_feature: MA Experiment 20000327 PARAMETER Experiment Name: At_42deg_Heat_Sub_P Parameter: Age (day) Value: 14
  misc_feature: MA Experiment 20000327 PARAMETER Experiment Name: At_42deg_Heat_Sub_P Parameter: Organism Value: A. thaliana
  misc_feature: MA Experiment 20000327 PARAMETER Experiment Name: At_42deg_Heat_Sub_P Parameter: Plant Line Value: WS
  misc_feature: MA Experiment 20000327 PARAMETER Experiment Name: At_42deg_Heat_Sub_P Parameter: Temperature (deg C) Value: 42 vs. 22
  misc_feature: MA Experiment 20000327 PARAMETER Experiment Name: At_42deg_Heat_Sub_P Parameter: Timepoint (hr) Value: 1
  misc_feature: MA Experiment 20000327 PARAMETER Experiment Name: At_42deg_Heat_Sub_P Parameter: Tissue Value: Aerial
  misc_feature: MA Experiment ID: 20000328 Result: Down-regulated in Transcription
  misc_feature: MA Experiment 20000328 PARAMETER Experiment Name: At_42deg_Heat_Sub_P Parameter: Age (day) Value: 14
  misc_feature: MA Experiment 20000328 PARAMETER Experiment Name: At_42deg_Heat_Sub_P Parameter: Organism Value: A. thaliana
  misc_feature: MA Experiment 20000328 PARAMETER Experiment Name: At_42deg_Heat_Sub_P Parameter: Plant Line Value: WS
  misc_feature: MA Experiment 20000328 PARAMETER Experiment Name: At_42deg_Heat_Sub_P Parameter: Temperature (deg C) Value: 42 vs. 22
  misc_feature: MA Experiment 20000328 PARAMETER Experiment Name: At_42deg_Heat_Sub_P Parameter: Timepoint (hr) Value: 6
  misc_feature: MA Experiment 20000328 PARAMETER Experiment Name: At_42deg_Heat_Sub_P Parameter: Tissue Value: Aerial
aaattaaaatagaattgagaaaaaaagtttgatcagccatcggaggagaagagagaatgatagataactggatcacgagaagtcacaaatctcaaagaagaagaaagaaaaccaaaatcaagaacaataacaacaattcgcaatgatttgagccaaatctaaaggatggagttgatgaaattgttcttctagatgtttgttttggggatatgaacaaagaagaatctgagtttaatacactatgtggaaacagattctgagtaagcttcctaagaagtcttcttctaagaaccattcttcttcatctagttccacttcaaaaagtagtgataatggcgccggtaaatcgggtaattctcaaaccaagaacgctcctcctgtaaaaccttctgctgattcagggtttaaagaagggaatttgaaaggaaatggtaacggtttcactccatatgaagcattgccaggtttcaaagatgttcctaatgcagagaaacagaacttgtttgtgagaaaactcagcttgtgctgtgttgttttcgatttctcggatccaacgaagaacgttaaggaaaaggatattaagcggcagacattgcttgagcttgtggattatgtagcttctcctaatggaaagtttagtgaaactgtgattcaagaagtggttagaatggtttctgttaacatattcagaaccttgaatcctcaaccgcgcgagaataaagttattgatgcgttagacttggaggaagaagagccttctatggatcctacttggcctcacttgcagcttgtctatgaaattctcctgcggcttattgcttcaccagagacagacaccaagctggctaagaaatacattgaccaatcttttgtctcaaggttacttgatttatttgattcagaggatcctagagaaagagattgtcttaagaccgttctacatcgcatctacggtaaatttatggttcatcgtcctttcataaggaaatccattaataacattttctatcggtttgttttcgagactgagaaacacaatgggattgctgagtttctagagattttgggaagtatcatcaatggatttgctctgccgcttaaagacgagcataaagtgtttttggttagagctttggtacctcttcacaaaccgaaaagcttgcaaatgtatcatcagcaattgtcttattgtatcacacagtttgtggaaaaagattgcaaactcgctgatacggttataaggggactactcaagtcttggcctgtcacaaatagttccaaagaagtcatgtttctaaacgagctagaggaagtattagaagcaactcaaccacctgaattccaacggtgtatggtcccattgtttcgccaagttgctcggtgtttaaacagtctccattttcaggttgcagaaagagctttgttcttatggaacaacgatcatatcgagaatctaataatgcagaaccggaaagttattcttccaatcatattccctgcattagagagaaacactcagaagcattggaaccaagctgttcatagcttgacgttgaatgtgcagaagatatttaatgacattgatgcagagttgtttaaggattgtcttgctaagtttagagaagatgaatcaaaagaagctgaaattggcgcaaaacgtgaggcaacgtggaaacggttggaagaaattggtaatcaaaagaaaaagagttcattgtaagattttttagttgtagagacagaggttttgttctgtattttctcgttttttactacattggaaaattgggtttgtttttcttactctccagaaaaacttcgtgagaaaaaagtttcagattcgttttctttgaagagattgcaaatatt

SEQ ID NO: 42088 - protein, 492 aa, Arabidopsis thaliana
  peptide (1)..(492): Ceres Seq. ID no. 12422976
  misc_feature (72)..(485): Pfam Name: Protein phosphatase 2A regulatory B subunit (B56 Pfam Description: Protein phosphatase 2A regulatory B subunit
  misc_feature (1)..(487): Homolog of NCBI NO: 11994401 NR Description: protein phosphatase 2A B' regulatory subunit
  misc_feature (1)..(490): Homolog of NCBI NO: 34394129 NR Description: putative protein phosphatase PP2A0 B' subunit
  misc_feature (1)..(491): Homolog of NCBI NO: 20147343 NR Description: AT4g15410/dl3750w [Arabidopsis thaliana]
  misc_feature (1)..(491): Homolog of NCBI NO: 18414444 NR Description: Expressed protein
  misc_feature (1)..(491): Homolog of NCBI NO: 7485149 NR Description: hypothetical protein - Arabidopsis thaliana
  misc_feature (1)..(491): Homolog of NCBI NO: 21530786 NR Description: putative protein phosphatase 2A B'teta subunit
  misc_feature (1)..(490): Homolog of NCBI NO: 21530784 NR Description: putative protein phosphatase 2A B'zeta subunit
  misc_feature (13)..(487): Homolog of NCBI NO: 15230961 NR Description: putative B regulatory subunit of protein
  misc_feature (1)..(492): Homolog of NCBI NO: 15222851 NR Description: B regulatory subunit of protein phosphatase 2A,
  misc_feature (1)..(492): Homolog of NCBI NO: 21537284 NR Description: B regulatory subunit of protein phosphatase 2A,
MWKQILSKLPKKSSSKNHSSSSSSTSKSSDNGAGKSGNSQTKNAPPVKPSADSGFKEGNLKGNGNGFTPYEALPGFKDVPNAEKQNLFVRKLSLCCVVFDFSDPTKNVKEKDIKRQTLLELVDYVASPNGKFSETVIQEVVRMVSVNIFRTLNPQPRENKVIDALDLEEEEPSMDPTWPHLQLVYEILLRLIASPETDTKLAKKYIDQSFVSRLLDLFDSEDPRERDCLKTVLHRIYGKFMVHRPFIRKSINNIFYRFVFETEKHNGIAEFLEILGSIINGFALPLKDEHKVFLVRALVPLHKPKSLQMYHQQLSYCITQFVEKDCKLADTVIRGLLKSWPVTNSSKEVMFLNELEEVLEATQPPEFQRCMVPLFRQVARCLNSLHFQVAERALFLWNNDHIENLIMQNRKVILPIIFPALERNTQKHWNQAVHSLTLNVQKIFNDIDAELFKDCLAKFREDESKEAEIGAKREATWKRLEEIGNQKKKSSL

SEQ ID NO: 42089 - protein, 350 aa, Arabidopsis thaliana
  peptide (1)..(350): Ceres Seq. ID no. 12422977
  misc_feature (1)..(343): Pfam Name: Protein phosphatase 2A regulatory B subunit (B56 Pfam Description: Protein phosphatase 2A regulatory B subunit
  misc_feature (1)..(345): Homolog of NCBI NO: 11994401 NR Description: protein phosphatase 2A B' regulatory subunit
  misc_feature (1)..(348): Homolog of NCBI NO: 34394129 NR Description: putative protein phosphatase PP2A0 B' subunit
  misc_feature (1)..(349): Homolog of NCBI NO: 20147343 NR Description: AT4g15410/dl3750w [Arabidopsis thaliana]
  misc_feature (1)..(349): Homolog of NCBI NO: 18414444 NR Description: Expressed protein
  misc_feature (1)..(349): Homolog of NCBI NO: 7485149 NR Description: hypothetical protein - Arabidopsis thaliana
  misc_feature (1)..(349): Homolog of NCBI NO: 21530786 NR Description: putative protein phosphatase 2A B'teta subunit
  misc_feature (1)..(348): Homolog of NCBI NO: 21530784 NR Description: putative protein phosphatase 2A B'zeta subunit
  misc_feature (1)..(345): Homolog of NCBI NO: 15230961 NR Description: putative B regulatory subunit of protein
  misc_feature (1)..(350): Homolog of NCBI NO: 15222851 NR Description: B regulatory subunit of protein phosphatase 2A,
  misc_feature (1)..(350): Homolog of NCBI NO: 21537284 NR Description: B regulatory subunit of protein phosphatase 2A,
MVSVNIFRTLNPQPRENKVIDALDLEEEEPSMDPTWPHLQLVYEILLRLIASPETDTKLAKKYIDQSFVSRLLDLFDSEDPRERDCLKTVLHRIYGKFMVHRPFIRKSINNIFYRFVFETEKHNGIAEFLEILGSIINGFALPLKDEHKVFLVRALVPLHKPKSLQMYHQQLSYCITQFVEKDCKLADTVIRGLLKSWPVTNSSKEVMFLNELEEVLEATQPPEFQRCMVPLFRQVARCLNSLHFQVAERALFLWNNDHIENLIMQNRKVILPIIFPALERNTQKHWNQAVHSLTLNVQKIFNDIDAELFKDCLAKFREDESKEAEIGAKREATWKRLEEIGNQKKKSSL

SEQ ID NO: 42090 - protein, 319 aa, Arabidopsis thaliana
  peptide (1)..(319): Ceres Seq. ID no. 12422978
  misc_feature (1)..(312): Pfam Name: Protein phosphatase 2A regulatory B subunit (B56 Pfam Description: Protein phosphatase 2A regulatory B subunit
  misc_feature (1)..(314): Homolog of NCBI NO: 11994401 NR Description: protein phosphatase 2A B' regulatory subunit
  misc_feature (1)..(317): Homolog of NCBI NO: 34394129 NR Description: putative protein phosphatase PP2A0 B' subunit
  misc_feature (1)..(318): Homolog of NCBI NO: 20147343 NR Description: AT4g15410/dl3750w [Arabidopsis thaliana]
  misc_feature (1)..(318): Homolog of NCBI NO: 18414444 NR Description: Expressed protein
  misc_feature (1)..(318): Homolog of NCBI NO: 7485149 NR Description: hypothetical protein - Arabidopsis thaliana
  misc_feature (1)..(318): Homolog of NCBI NO: 21530786 NR Description: putative protein phosphatase 2A B'teta subunit
  misc_feature (1)..(317): Homolog of NCBI NO: 21530784 NR Description: putative protein phosphatase 2A B'zeta subunit
  misc_feature (1)..(314): Homolog of NCBI NO: 15230961 NR Description: putative B regulatory subunit of protein
  misc_feature (1)..(319): Homolog of NCBI NO: 15222851 NR Description: B regulatory subunit of protein phosphatase 2A,
  misc_feature (1)..(319): Homolog of NCBI NO: 21537284 NR Description: B regulatory subunit of protein phosphatase 2A,
MDPTWPHLQLVYEILLRLIASPETDTKLAKKYIDQSFVSRLLDLFDSEDPRERDCLKTVLHRIYGKFMVHRPFIRKSINNIFYRFVFETEKHNGIAEFLEILGSIINGFALPLKDEHKVFLVRALVPLHKPKSLQMYHQQLSYCITQFVEKDCKLADTVIRGLLKSWPVTNSSKEVMFLNELEEVLEATQPPEFQRCMVPLFRQVARCLNSLHFQVAERALFLWNNDHIENLIMQNRKVILPIIFPALERNTQKHWNQAVHSLTLNVQKIFNDIDAELFKDCLAKFREDESKEAEIGAKREATWKRLEEIGNQKKKSSL

SEQ ID NO: 42091 - DNA, 1508 bp, Arabidopsis thaliana; identical to SEQ ID NO: 30648
  misc_feature (1)..(1508): Ceres Seq. ID no. 12388503
  misc_feature: MA Experiment ID: 108462 Result: Down-regulated in Transcription
  misc_feature: MA Experiment 108462 PARAMETER Experiment Name: At_Germinating_Seeds_cDNA_P Parameter: Age (day) Value: 2 vs. 0
  misc_feature: MA Experiment 108462 PARAMETER Experiment Name: At_Germinating_Seeds_cDNA_P Parameter: Tissue Value: Germinating Seeds
  misc_feature: MA Experiment ID: 108463 Result: Down-regulated in Transcription
  misc_feature: MA Experiment 108463 PARAMETER Experiment Name: At_Germinating_Seeds_cDNA_P Parameter: Age (day) Value: 3 vs. 0
  misc_feature: MA Experiment 108463 PARAMETER Experiment Name: At_Germinating_Seeds_cDNA_P Parameter: Tissue Value: Germinating Seeds
  misc_feature: MA Experiment ID: 108464 Result: Down-regulated in Transcription
  misc_feature: MA Experiment 108464 PARAMETER Experiment Name: At_Germinating_Seeds_cDNA_P Parameter: Age (day) Value: 4 vs. 0
  misc_feature: MA Experiment 108464 PARAMETER Experiment Name: At_Germinating_Seeds_cDNA_P Parameter: Tissue Value: Germinating Seeds
  misc_feature: MA Experiment ID: 108488 Result: Down-regulated in Transcription
  misc_feature: MA Experiment ID: 108573 Result: Up-regulated in Transcription
  misc_feature: MA Experiment 108573 PARAMETER Experiment Name: At_Drought_cDNA_P Parameter: Timepoint (hr) Value: 6
  misc_feature: MA Experiment 108573 PARAMETER Experiment Name: At_Drought_cDNA_P Parameter: Tissue Value: Aerial
  misc_feature: MA Experiment 108573 PARAMETER Experiment Name: At_Drought_cDNA_P Parameter: Treatment Value: Drought vs. No Drought
  misc_feature: MA Experiment ID: 20000071 Result: Up-regulated in Transcription
  misc_feature: MA Experiment 20000071 PARAMETER Experiment Name: At_100uM_ABA_Mutants_cDNA_P Parameter: Plant Line Value: CS8104
  misc_feature: MA Experiment 20000071 PARAMETER Experiment Name: At_100uM_ABA_Mutants_cDNA_P Parameter: Timepoint (hr) Value: 6
  misc_feature: MA Experiment 20000071 PARAMETER Experiment Name: At_100uM_ABA_Mutants_cDNA_P Parameter: Tissue Value: Aerial
  misc_feature: MA Experiment 20000071 PARAMETER Experiment Name: At_100uM_ABA_Mutants_cDNA_P Parameter: Treatment Value: 100uM ABA vs. No Treatment
  misc_feature: MA Experiment ID: 20000072 Result: Up-regulated in Transcription
  misc_feature: MA Experiment 20000072 PARAMETER Experiment Name: At_100uM_ABA_Mutants_cDNA_P Parameter: Plant Line Value: CS8105
  misc_feature: MA Experiment 20000072 PARAMETER Experiment Name: At_100uM_ABA_Mutants_cDNA_P Parameter: Timepoint (hr) Value: 6
  misc_feature: MA Experiment 20000072 PARAMETER Experiment Name: At_100uM_ABA_Mutants_cDNA_P Parameter: Tissue Value: Aerial
  misc_feature: MA Experiment 20000072 PARAMETER Experiment Name: At_100uM_ABA_Mutants_cDNA_P Parameter: Treatment Value: 100uM ABA vs. No Treatment
  misc_feature: MA Experiment ID: 20000117 Result: Up-regulated in Transcription
  misc_feature: MA Experiment 20000117 PARAMETER Experiment Name: At_100uM_ABA_Mutants_cDNA_P Parameter: Plant Line Value: Columbia
  misc_feature: MA Experiment 20000117 PARAMETER Experiment Name: At_100uM_ABA_Mutants_cDNA_P Parameter: Timepoint (hr) Value: 6
  misc_feature: MA Experiment 20000117 PARAMETER Experiment Name: At_100uM_ABA_Mutants_cDNA_P Parameter: Tissue Value: Aerial
  misc_feature: MA Experiment 20000117 PARAMETER Experiment Name: At_100uM_ABA_Mutants_cDNA_P Parameter: Treatment Value: 100uM ABA vs. No Treatment
  misc_feature: MA Experiment ID: 20000184 Result: Down-regulated in Transcription
  misc_feature: MA Experiment 20000184 PARAMETER Experiment Name: At_Shoots__P Parameter: Age (day) Value: 7
  misc_feature: MA Experiment 20000184 PARAMETER Experiment Name: At_Shoots__P Parameter: Tissue Value: Shoots vs. Whole Plant
  misc_feature: MA Experiment ID: 20000438 Result: Down-regulated in Transcription
  misc_feature: MA Experiment 20000438 PARAMETER Experiment Name: At_Shoots__P Parameter: Age (day) Value: 14
  misc_feature: MA Experiment 20000438 PARAMETER Experiment Name: At_Shoots__P Parameter: Tissue Value: Shoots vs. Whole Plant
  misc_feature: MA Experiment ID: 20001557 Result: Up-regulated in Transcription
  misc_feature: MA Experiment 20001557 PARAMETER Experiment Name: At_Drought_Soil_Dry_P Parameter: Age (day) Value: 27
  misc_feature: MA Experiment 20001557 PARAMETER Experiment Name: At_Drought_Soil_Dry_P Parameter: Organism Value: A. thaliana
  misc_feature: MA Experiment 20001557 PARAMETER Experiment Name: At_Drought_Soil_Dry_P Parameter: Plant Line Value: WS
  misc_feature: MA Experiment 20001557 PARAMETER Experiment Name: At_Drought_Soil_Dry_P Parameter: Post Timepoint (hr) Value: 3
  misc_feature: MA Experiment 20001557 PARAMETER Experiment Name: At_Drought_Soil_Dry_P Parameter: Post-Treatment Value: Re-Water vs. No Drought
  misc_feature: MA Experiment 20001557 PARAMETER Experiment Name: At_Drought_Soil_Dry_P Parameter: Timepoint (day) Value: 13
  misc_feature: MA Experiment 20001557 PARAMETER Experiment Name: At_Drought_Soil_Dry_P Parameter: Treatment Value: Drought vs. No Drought
  misc_feature: MA Experiment ID: 20001905 Result: Up-regulated in Transcription
  misc_feature: MA Experiment 20001905 PARAMETER Experiment Name: At_Drought_Reproduction_P Parameter: Age (day) Value: 40
  misc_feature: MA Experiment 20001905 PARAMETER Experiment Name: At_Drought_Reproduction_P Parameter: Organism Value: A. thaliana
  misc_feature: MA Experiment 20001905 PARAMETER Experiment Name: At_Drought_Reproduction_P Parameter: Plant Line Value: WS
  misc_feature: MA Experiment 20001905 PARAMETER Experiment Name: At_Drought_Reproduction_P Parameter: Timepoint (day) Value: 10
  misc_feature: MA Experiment 20001905 PARAMETER Experiment Name: At_Drought_Reproduction_P Parameter: Tissue Value: Rosettes
  misc_feature: MA Experiment 20001905 PARAMETER Experiment Name: At_Drought_Reproduction_P Parameter: Treatment Value: Drought vs. No Drought

SEQ ID NO: 42092 - protein, 323 aa, Arabidopsis thaliana; identical to SEQ ID NO: 30649
  peptide (1)..(323): Ceres Seq. ID no. 12388504
  misc_feature (1)..(318): Homolog of NCBI NO: 21594326 NR Description: mitochondrial carrier-like protein [Arabidopsis
  misc_feature (16)..(318): Homolog of NCBI NO: 37534064 NR Description: putative Tricarboxylate transport protein,
  misc_feature (71)..(318): Homolog of NCBI NO: 34894824 NR Description: P0554D10.15 [Oryza sativa (japonica
  misc_feature (1)..(214): Homolog of NCBI NO: 11358653 NR Description: probable mitochondrial carrier protein -
  misc_feature (1)..(323): Homolog of NCBI NO: 12278522 NR Description: putative mitochondrial carrier protein
  misc_feature (1)..(323): Homolog of NCBI NO: 18496651 NR Description: putative mitochondrial carrier protein [Triticum
  misc_feature (1)..(323): Homolog of NCBI NO: 12061241 NR Description: 36I5.1 [Oryza sativa (japonica cultivar-group)]
  misc_feature (1)..(323): Homolog of NCBI NO: 21326111 NR Description: putative mitochondrial carrier protein [Sorghum
  misc_feature (1)..(323): Homolog of NCBI NO: 21553961 NR Description: putative mitochondrial carrier protein
  misc_feature (1)..(323): Homolog of NCBI NO: 18417739 NR Description: mitochondrial carrier protein family
  misc_feature (1)..(318): Homolog of NCBI NO: 21594326 NR Description: mitochondrial carrier-like protein [Arabidopsis
  misc_feature (16)..(318): Homolog of NCBI NO: 37534064 NR Description: putative Tricarboxylate transport protein,
  misc_feature (71)..(318): Homolog of NCBI NO: 34894824 NR Description: P0554D10.15 [Oryza sativa (japonica
  misc_feature (1)..(214): Homolog of NCBI NO: 11358653 NR Description: probable mitochondrial carrier protein -
  misc_feature (1)..(323): Homolog of NCBI NO: 12278522 NR Description: putative mitochondrial carrier protein
  misc_feature (1)..(323): Homolog of NCBI NO: 18496651 NR Description: putative mitochondrial carrier protein [Triticum
  misc_feature (1)..(323): Homolog of NCBI NO: 12061241 NR Description: 36I5.1 [Oryza sativa (japonica cultivar-group)]
  misc_feature (1)..(323): Homolog of NCBI NO: 21326111 NR Description: putative mitochondrial carrier protein [Sorghum
  misc_feature (1)..(323): Homolog of NCBI NO: 21553961 NR Description: putative mitochondrial carrier protein
  misc_feature (1)..(323): Homolog of NCBI NO: 18417739 NR Description: mitochondrial carrier protein family

SEQ ID NO: 42093 - protein, 191 aa, Arabidopsis thaliana; identical to SEQ ID NO: 30650
  peptide (1)..(191): Ceres Seq. ID no. 12388505
  misc_feature (1)..(186): Homolog of NCBI NO: 21594326 NR Description: mitochondrial carrier-like protein [Arabidopsis
  misc_feature (1)..(186): Homolog of NCBI NO: 37534064 NR Description: putative Tricarboxylate transport protein,
  misc_feature (1)..(186): Homolog of NCBI NO: 34894824 NR Description: P0554D10.15 [Oryza sativa (japonica
  misc_feature (1)..(82): Homolog of NCBI NO: 11358653 NR Description: probable mitochondrial carrier protein -
  misc_feature (1)..(191): Homolog of NCBI NO: 12278522 NR Description: putative mitochondrial carrier protein
  misc_feature (1)..(191): Homolog of NCBI NO: 18496651 NR Description: putative mitochondrial carrier protein [Triticum
  misc_feature (1)..(191): Homolog of NCBI NO: 12061241 NR Description: 36I5.1 [Oryza sativa (japonica cultivar-group)]
  misc_feature (1)..(191): Homolog of NCBI NO: 21326111 NR Description: putative mitochondrial carrier protein [Sorghum
  misc_feature (1)..(191): Homolog of NCBI NO: 21553961 NR Description: putative mitochondrial carrier protein
  misc_feature (1)..(191): Homolog of NCBI NO: 18417739 NR Description: mitochondrial carrier protein family
  misc_feature (1)..(186): Homolog of NCBI NO: 21594326 NR Description: mitochondrial carrier-like protein [Arabidopsis
  misc_feature (1)..(186): Homolog of NCBI NO: 37534064 NR Description: putative Tricarboxylate transport protein,
  misc_feature (1)..(186): Homolog of NCBI NO: 34894824 NR Description: P0554D10.15 [Oryza sativa (japonica
  misc_feature (1)..(82): Homolog of NCBI NO: 11358653 NR Description: probable mitochondrial carrier protein -
  misc_feature (1)..(191): Homolog of NCBI NO: 12278522 NR Description: putative mitochondrial carrier protein
  misc_feature (1)..(191): Homolog of NCBI NO: 18496651 NR Description: putative mitochondrial carrier protein [Triticum
  misc_feature (1)..(191): Homolog of NCBI NO: 12061241 NR Description: 36I5.1 [Oryza sativa (japonica cultivar-group)]
  misc_feature (1)..(191): Homolog of NCBI NO: 21326111 NR Description: putative mitochondrial carrier protein [Sorghum
  misc_feature (1)..(191): Homolog of NCBI NO: 21553961 NR Description: putative mitochondrial carrier protein
  misc_feature (1)..(191): Homolog of NCBI NO: 18417739 NR Description: mitochondrial carrier protein family

SEQ ID NO: 42094 - protein, 170 aa, Arabidopsis thaliana; identical to SEQ ID NO: 30651
  peptide (1)..(170): Ceres Seq. ID no. 12388506
  misc_feature (1)..(165): Homolog of NCBI NO: 21594326 NR Description: mitochondrial carrier-like protein [Arabidopsis
  misc_feature (1)..(165): Homolog of NCBI NO: 37534064 NR Description: putative Tricarboxylate transport protein,
  misc_feature (1)..(165): Homolog of NCBI NO: 34894824 NR Description: P0554D10.15 [Oryza sativa (japonica
  misc_feature (1)..(61): Homolog of NCBI NO: 11358653 NR Description: probable mitochondrial carrier protein -
  misc_feature (1)..(170): Homolog of NCBI NO: 12278522 NR Description: putative mitochondrial carrier protein
  misc_feature (1)..(170): Homolog of NCBI NO: 18496651 NR Description: putative mitochondrial carrier protein [Triticum
  misc_feature (1)..(170): Homolog of NCBI NO: 12061241 NR Description: 36I5.1 [Oryza sativa (japonica cultivar-group)]
  misc_feature (1)..(170): Homolog of NCBI NO: 21326111 NR Description: putative mitochondrial carrier protein [Sorghum
  misc_feature (1)..(170): Homolog of NCBI NO: 21553961 NR Description: putative mitochondrial carrier protein
  misc_feature (1)..(170): Homolog of NCBI NO: 18417739 NR Description: mitochondrial carrier protein family
  misc_feature (1)..(165): Homolog of NCBI NO: 21594326 NR Description: mitochondrial carrier-like protein [Arabidopsis
  misc_feature (1)..(165): Homolog of NCBI NO: 37534064 NR Description: putative Tricarboxylate transport protein,
  misc_feature (1)..(165): Homolog of NCBI NO: 34894824 NR Description: P0554D10.15 [Oryza sativa (japonica
  misc_feature (1)..(61): Homolog of NCBI NO: 11358653 NR Description: probable mitochondrial carrier protein -
  misc_feature (1)..(170): Homolog of NCBI NO: 12278522 NR Description: putative mitochondrial carrier protein
  misc_feature (1)..(170): Homolog of NCBI NO: 18496651 NR Description: putative mitochondrial carrier protein [Triticum
  misc_feature (1)..(170): Homolog of NCBI NO: 12061241 NR Description: 36I5.1 [Oryza sativa (japonica cultivar-group)]
  misc_feature (1)..(170): Homolog of NCBI NO: 21326111 NR Description: putative mitochondrial carrier protein [Sorghum
  misc_feature (1)..(170): Homolog of NCBI NO: 21553961 NR Description: putative mitochondrial carrier protein
  misc_feature (1)..(170): Homolog of NCBI NO: 18417739 NR Description: mitochondrial carrier protein family

SEQ ID NO: 42095 - DNA, 1102 bp, Arabidopsis thaliana
  misc_feature (1)..(1102): Ceres Seq. ID no. 13497659
  misc_feature: MA Experiment ID: 108488 Result: Down-regulated in Transcription
  misc_feature: MA Experiment ID: 108573 Result: Up-regulated in Transcription
  misc_feature: MA Experiment 108573 PARAMETER Experiment Name: At_Drought_cDNA_P Parameter: Timepoint (hr) Value: 6
  misc_feature: MA Experiment 108573 PARAMETER Experiment Name: At_Drought_cDNA_P Parameter: Tissue Value: Aerial
  misc_feature: MA Experiment 108573 PARAMETER Experiment Name: At_Drought_cDNA_P Parameter: Treatment Value: Drought vs. No Drought
  misc_feature: MA Experiment ID: 20001905 Result: Up-regulated in Transcription
  misc_feature: MA Experiment 20001905 PARAMETER Experiment Name: At_Drought_Reproduction_P Parameter: Age (day) Value: 40
  misc_feature: MA Experiment 20001905 PARAMETER Experiment Name: At_Drought_Reproduction_P Parameter: Organism Value: A. thaliana
  misc_feature: MA Experiment 20001905 PARAMETER Experiment Name: At_Drought_Reproduction_P Parameter: Plant Line Value: WS
  misc_feature: MA Experiment 20001905 PARAMETER Experiment Name: At_Drought_Reproduction_P Parameter: Timepoint (day) Value: 10
  misc_feature: MA Experiment 20001905 PARAMETER Experiment Name: At_Drought_Reproduction_P Parameter: Tissue Value: Rosettes
  misc_feature: MA Experiment 20001905 PARAMETER Experiment Name: At_Drought_Reproduction_P Parameter: Treatment Value: Drought vs. No Drought
gtcgtcacttaaccgagaaagcaaaagagaagaagaagaaggaatcgaaaaatgaggactccgatccacgcggtttcgacatgggtgaggaggcagcctccaaaggtgaaagctttccttgccgtcgtatctggcatggcggctcttgttctcctcaaactcatcgttcacgatcacgacaatctcttcgttgccgccgaagctgttcattctattggaatctctgttcttatctataaactcatgaaggagaagacttgtgctggattgtcattgaaatctcaggagcttacggcgatatttctagctgtgaggctttattgcagttttgtaatggaatatgatatacataccattctggacttggctactttgggaacaactctctgggttatatatatgatccgttttaacctcaaaactacttacatggaggaaaaagacaacttcgctctctattatgtgctggcgccctgtgttgtgctagctgtatggattcatccatcaacgtcacacaatatattgaatagaatatcctggggattctgtgtttacctcgaagctgtttcagtactgccacagttgagagtgatgcagaacacaaagattgtcgaacccttcacggctcattatgtttttgcacttggagtagcaagattttttagctgtgcacactgggttttacagatgatggacacgcacggacgactgcttgtagtgctgggttatggactatggccatcgatggttataatctcagaaatagtccaaacattcatattggcagatttctgttactactacgttaaaagtgttttcggtggccagcttgttctaaggcttccatctggggttgtgtaagttataaaggaaaaaagataagacacattatgacgaaatttgttacacgaagatagatctcagcttggtgtaatctgagtagcctctggttactctcaagttactccctcaggccaagtcctaattctattaactgtgttgtatatttttgtgtgggtcatcatcatagacagtcccttggatattattgacatgattttttccactgcatttgtgctaaattatccttggttcccacggc

SEQ ID NO: 42096 - protein, 269 aa, Arabidopsis thaliana
  peptide (1)..(269): Ceres Seq. ID no. 13497660
  misc_feature (44)..(255): Pfam Name: ER lumen protein retaining receptor Pfam Description: ER lumen protein retaining receptor
  misc_feature (1)..(265): Homolog of NCBI NO: 15230808 NR Description: ER lumen protein retaining receptor -related
  misc_feature (2)..(256): Homolog of NCBI NO: 25518365 NR Description: hypothetical protein T20H2.24 - Arabidopsis
  misc_feature (2)..(269): Homolog of NCBI NO: 15223724 NR Description: ER lumen protein-retaining receptor [Arabidopsis
  misc_feature (4)..(269): Homolog of NCBI NO: 9369358 NR Description: F10A5.5 [Arabidopsis thaliana]
  misc_feature (4)..(269): Homolog of NCBI NO: 15222871 NR Description: ER lumen protein retaining receptor -related
  misc_feature (1)..(256): Homolog of NCBI NO: 25412019 NR Description: probable ER lumen protein retaining receptor
  misc_feature (2)..(269): Homolog of NCBI NO: 18420309 NR Description: expressed protein [Arabidopsis thaliana]
  misc_feature (1)..(269): Homolog of NCBI NO: 21537286 NR Description: putative ER lumen protein retaining receptor
  misc_feature (1)..(269): Homolog of NCBI NO: 18399619 NR Description: ER lumen protein retaining receptor -related
  misc_feature (1)..(269): Homolog of NCBI NO: 13430654 NR Description: putative ER lumen protein retaining receptor
MRTPIHAVSTWVRRQPPKVKAFLAVVSGMAALVLLKLIVHDHDNLFVAAEAVHSIGISVLIYKLMKEKTCAGLSLKSQELTAIFLAVRLYCSFVMEYDIHTILDLATLGTTLWVIYMIRFNLKTTYMEEKDNFALYYVLAPCVVLAVWIHPSTSHNILNRISWGFCVYLEAVSVLPQLRVMQNTKIVEPFTAHYVFALGVARFFSCAHWVLQMMDTHGRLLVVLGYGLWPSMVIISEIVQTFILADFCYYYVKSVFGGQLVLRLPSGVV

SEQ ID NO: 42097 - protein, 241 aa, Arabidopsis thaliana
  peptide (1)..(241): Ceres Seq. ID no. 13497661
  misc_feature (16)..(227): Pfam Name: ER lumen protein retaining receptor Pfam Description: ER lumen protein retaining receptor
  misc_feature (1)..(237): Homolog of NCBI NO: 15230808 NR Description: ER lumen protein retaining receptor -related
  misc_feature (1)..(228): Homolog of NCBI NO: 25518365 NR Description: hypothetical protein T20H2.24 - Arabidopsis
  misc_feature (1)..(241): Homolog of NCBI NO: 15223724 NR Description: ER lumen protein-retaining receptor [Arabidopsis
  misc_feature (1)..(241): Homolog of NCBI NO: 9369358 NR Description: F10A5.5 [Arabidopsis thaliana]
  misc_feature (1)..(241): Homolog of NCBI NO: 15222871 NR Description: ER lumen protein retaining receptor -related
  misc_feature (1)..(228): Homolog of NCBI NO: 25412019 NR Description: probable ER lumen protein retaining receptor
  misc_feature (1)..(241): Homolog of NCBI NO: 18420309 NR Description: expressed protein [Arabidopsis thaliana]
  misc_feature (1)..(241): Homolog of NCBI NO: 21537286 NR Description: putative ER lumen protein retaining receptor
  misc_feature (1)..(241): Homolog of NCBI NO: 18399619 NR Description: ER lumen protein retaining receptor -related
  misc_feature (1)..(241): Homolog of NCBI NO: 13430654 NR Description: putative ER lumen protein retaining receptor
MAALVLLKLIVHDHDNLFVAAEAVHSIGISVLIYKLMKEKTCAGLSLKSQELTAIFLAVRLYCSFVMEYDIHTILDLATLGTTLWVIYMIRFNLKTTYMEEKDNFALYYVLAPCVVLAVWIHPSTSHNILNRISWGFCVYLEAVSVLPQLRVMQNTKIVEPFTAHYVFALGVARFFSCAHWVLQMMDTHGRLLVVLGYGLWPSMVIISEIVQTFILADFCYYYVKSVFGGQLVLRLPSGVV

SEQ ID NO: 42098 - protein, 205 aa, Arabidopsis thaliana
  peptide (1)..(205): Ceres Seq. ID no. 13497662
  misc_feature (1)..(191): Pfam Name: ER lumen protein retaining receptor Pfam Description: ER lumen protein retaining receptor
  misc_feature (1)..(201): Homolog of NCBI NO: 15230808 NR Description: ER lumen protein retaining receptor -related
  misc_feature (1)..(192): Homolog of NCBI NO: 25518365 NR Description: hypothetical protein T20H2.24 - Arabidopsis
  misc_feature (1)..(205): Homolog of NCBI NO: 15223724 NR Description: ER lumen protein-retaining receptor [Arabidopsis
  misc_feature (1)..(205): Homolog of NCBI NO: 9369358 NR Description: F10A5.5 [Arabidopsis thaliana]
  misc_feature (1)..(205): Homolog of NCBI NO: 15222871 NR Description: ER lumen protein retaining receptor -related
  misc_feature (1)..(192): Homolog of NCBI NO: 25412019 NR Description: probable ER lumen protein retaining receptor
  misc_feature (1)..(205): Homolog of NCBI NO: 18420309 NR Description: expressed protein [Arabidopsis thaliana]
  misc_feature (1)..(205): Homolog of NCBI NO: 21537286 NR Description: putative ER lumen protein retaining receptor
  misc_feature (1)..(205): Homolog of NCBI NO: 18399619 NR Description: ER lumen protein retaining receptor -related
  misc_feature (1)..(205): Homolog of NCBI NO: 13430654 NR Description: putative ER lumen protein retaining receptor
MKEKTCAGLSLKSQELTAIFLAVRLYCSFVMEYDIHTILDLATLGTTLWVIYMIRFNLKTTYMEEKDNFALYYVLAPCVVLAVWIHPSTSHNILNRISWGFCVYLEAVSVLPQLRVMQNTKIVEPFTAHYVFALGVARFFSCAHWVLQMMDTHGRLLVVLGYGLWPSMVIISEIVQTFILADFCYYYVKSVFGGQLVLRLPSGVV

SEQ ID NO: 42099 - DNA, 1132 bp, Arabidopsis thaliana
  misc_feature (1)..(1132): Ceres Seq. ID no. 12395551
  misc_feature: MA Experiment ID: 108434 Result: Down-regulated in Transcription
  misc_feature: MA Experiment 108434 PARAMETER Experiment Name: At_Root_Tips_cDNA_P Parameter: Tissue Value: Root Tips
  misc_feature: MA Experiment ID: 108462 Result: Down-regulated in Transcription
  misc_feature: MA Experiment 108462 PARAMETER Experiment Name: At_Germinating_Seeds_cDNA_P Parameter: Age (day) Value: 2 vs. 0
  misc_feature: MA Experiment 108462 PARAMETER Experiment Name: At_Germinating_Seeds_cDNA_P Parameter: Tissue Value: Germinating Seeds
  misc_feature: MA Experiment ID: 108463 Result: Down-regulated in Transcription
  misc_feature: MA Experiment 108463 PARAMETER Experiment Name: At_Germinating_Seeds_cDNA_P Parameter: Age (day) Value: 3 vs. 0
  misc_feature: MA Experiment 108463 PARAMETER Experiment Name: At_Germinating_Seeds_cDNA_P Parameter: Tissue Value: Germinating Seeds
  misc_feature: MA Experiment ID: 108464 Result: Down-regulated in Transcription
  misc_feature: MA Experiment 108464 PARAMETER Experiment Name: At_Germinating_Seeds_cDNA_P Parameter: Age (day) Value: 4 vs. 0
  misc_feature: MA Experiment 108464 PARAMETER Experiment Name: At_Germinating_Seeds_cDNA_P Parameter: Tissue Value: Germinating Seeds
  misc_feature: MA Experiment ID: 108489 Result: Up-regulated in Transcription
  misc_feature: MA Experiment ID: 108608 Result: Up-regulated in Transcription
  misc_feature: MA Experiment 108608 PARAMETER Experiment Name: At_100uM_ABA_cDNA_P Parameter: Timepoint (hr) Value: 1
  misc_feature: MA Experiment 108608 PARAMETER Experiment Name: At_100uM_ABA_cDNA_P Parameter: Tissue Value: Aerial
  misc_feature: MA Experiment 108608 PARAMETER Experiment Name: At_100uM_ABA_cDNA_P Parameter: Treatment Value: 100uM ABA vs. No Treatment
  misc_feature: MA Experiment ID: 108668 Result: Up-regulated in Transcription
  misc_feature: MA Experiment 108668 PARAMETER Experiment Name: At_2mM_SA_cDNA_P Parameter: Plant Line Value: WS
  misc_feature: MA Experiment 108668 PARAMETER Experiment Name: At_2mM_SA_cDNA_P Parameter: Timepoint (hr) Value: 6
  misc_feature: MA Experiment 108668 PARAMETER Experiment Name: At_2mM_SA_cDNA_P Parameter: Treatment Value: 2mM SA vs. No Treatment
  misc_feature: MA Experiment ID: 20000070 Result: Up-regulated in Transcription
  misc_feature: MA Experiment 20000070 PARAMETER Experiment Name: At_100uM_ABA_Mutants_cDNA_P Parameter: Plant Line Value: CS24
  misc_feature: MA Experiment 20000070 PARAMETER Experiment Name: At_100uM_ABA_Mutants_cDNA_P Parameter: Timepoint (hr) Value: 6
  misc_feature: MA Experiment 20000070 PARAMETER Experiment Name: At_100uM_ABA_Mutants_cDNA_P Parameter: Tissue Value: Aerial
  misc_feature: MA Experiment 20000070 PARAMETER Experiment Name: At_100uM_ABA_Mutants_cDNA_P Parameter: Treatment Value: 100uM ABA vs. No Treatment
  misc_feature: MA Experiment ID: 20000087 Result: Up-regulated in Transcription
  misc_feature: MA Experiment 20000087 PARAMETER Experiment Name: At_100uM_ABA_Mutants_cDNA_P Parameter: Plant Line Value: WS
  misc_feature: MA Experiment 20000087 PARAMETER Experiment Name: At_100uM_ABA_Mutants_cDNA_P Parameter: Timepoint (hr) Value: 6
  misc_feature: MA Experiment 20000087 PARAMETER Experiment Name: At_100uM_ABA_Mutants_cDNA_P Parameter: Tissue Value: Aerial
  misc_feature: MA Experiment 20000087 PARAMETER Experiment Name: At_100uM_ABA_Mutants_cDNA_P Parameter: Treatment Value: 100uM ABA vs. No Treatment
  misc_feature: MA Experiment ID: 20000166 Result: Up-regulated in Transcription
  misc_feature: MA Experiment 20000166 PARAMETER Experiment Name: At_100uM_ABA_P Parameter: Age (day) Value: 14
  misc_feature: MA Experiment 20000166 PARAMETER Experiment Name: At_100uM_ABA_P Parameter: Organism Value: A. thaliana
  misc_feature: MA Experiment 20000166 PARAMETER Experiment Name: At_100uM_ABA_P Parameter: Plant Line Value: WS
  misc_feature: MA Experiment 20000166 PARAMETER Experiment Name: At_100uM_ABA_P Parameter: Timepoint (hr) Value: 1
  misc_feature: MA Experiment 20000166 PARAMETER Experiment Name: At_100uM_ABA_P Parameter: Tissue Value: Aerial
  misc_feature: MA Experiment 20000166 PARAMETER Experiment Name: At_100uM_ABA_P Parameter: Treatment Value: 100uM ABA vs. No Treatment
  misc_feature: MA Experiment ID: 20000169 Result: Up-regulated in Transcription
  misc_feature: MA Experiment 20000169 PARAMETER Experiment Name: At_100uM_ABA_P Parameter: Age (day) Value: 14
  misc_feature: MA Experiment 20000169 PARAMETER Experiment Name: At_100uM_ABA_P Parameter: Organism Value: A. thaliana
  misc_feature: MA Experiment 20000169 PARAMETER Experiment Name: At_100uM_ABA_P Parameter: Plant Line Value: WS
  misc_feature: MA Experiment 20000169 PARAMETER Experiment Name: At_100uM_ABA_P Parameter: Timepoint (hr) Value: 6
  misc_feature: MA Experiment 20000169 PARAMETER Experiment Name: At_100uM_ABA_P Parameter: Tissue Value: Aerial
  misc_feature: MA Experiment 20000169 PARAMETER Experiment Name: At_100uM_ABA_P Parameter: Treatment Value: 100uM ABA vs. No Treatment
  misc_feature: MA Experiment ID: 20000182 Result: Up-regulated in Transcription
  misc_feature: MA Experiment 20000182 PARAMETER Experiment Name: At_2mM_SA_P Parameter: Age (day) Value: 14
  misc_feature: MA Experiment 20000182 PARAMETER Experiment Name: At_2mM_SA_P Parameter: Organism Value: A. thaliana
  misc_feature: MA Experiment 20000182 PARAMETER Experiment Name: At_2mM_SA_P Parameter: Plant Line Value: WS
  misc_feature: MA Experiment 20000182 PARAMETER Experiment Name: At_2mM_SA_P Parameter: Timepoint (hr) Value: 6
  misc_feature: MA Experiment 20000182 PARAMETER Experiment Name: At_2mM_SA_P Parameter: Tissue Value: Aerial
  misc_feature: MA Experiment 20000182 PARAMETER Experiment Name: At_2mM_SA_P Parameter: Treatment Value: 2mM SA vs. No Treatment
  misc_feature: MA Experiment ID: 20000211 Result: Up-regulated in Transcription
  misc_feature: MA Experiment 20000211 PARAMETER Experiment Name: At_0.001percent_MeJA__P Parameter: Age (day) Value: 14
  misc_feature: MA Experiment 20000211 PARAMETER Experiment Name: At_0.001percent_MeJA__P Parameter: Organism Value: A. thaliana
  misc_feature: MA Experiment 20000211 PARAMETER Experiment Name: At_0.001percent_MeJA__P Parameter: Plant Line Value: WS
  misc_feature: MA Experiment 20000211 PARAMETER Experiment Name: At_0.001percent_MeJA__P Parameter: Timepoint (hr) Value: 1
  misc_feature: MA Experiment 20000211 PARAMETER Experiment Name: At_0.001percent_MeJA__P Parameter: Tissue Value: Aerial
  misc_feature: MA Experiment 20000211 PARAMETER Experiment Name: At_0.001percent_MeJA__P Parameter: Treatment Value: 0.001percent MeJA vs. No Treatment
  misc_feature: MA Experiment ID: 20000286 Result: Down-regulated in Transcription
  misc_feature: MA Experiment 20000286 PARAMETER Experiment Name: At_Open_Flower_P Parameter: Age (day) Value: 21
  misc_feature: MA Experiment 20000286 PARAMETER Experiment Name: At_Open_Flower_P Parameter: Plant Line Value: WS
  misc_feature: MA Experiment 20000286 PARAMETER Experiment Name: At_Open_Flower_P Parameter: Tissue Value: Half Open vs. Whole Plant
  misc_feature: MA Experiment ID: 20000527 Result: Down-regulated in Transcription
  misc_feature: MA Experiment 20000527 PARAMETER Experiment Name: At_10percent_PEG_P Parameter: Age (day) Value: 20
  misc_feature: MA Experiment 20000527 PARAMETER Experiment Name: At_10percent_PEG_P Parameter: Organism Value: A. thaliana
  misc_feature: MA Experiment 20000527 PARAMETER Experiment Name: At_10percent_PEG_P Parameter: Plant Line Value: WS
  misc_feature: MA Experiment 20000527 PARAMETER Experiment Name: At_10percent_PEG_P Parameter: Timepoint (day) Value: 20
  misc_feature: MA Experiment 20000527 PARAMETER Experiment Name: At_10percent_PEG_P Parameter: Tissue Value: Whole Plant
  misc_feature: MA Experiment 20000527 PARAMETER Experiment Name: At_10percent_PEG_P Parameter: Treatment Value: 10percent PEG vs. No Treatment
  misc_feature: MA Experiment ID: 20000709 Result: Up-regulated in Transcription
  misc_feature: MA Experiment 20000709 PARAMETER Experiment Name: At_15mM_NH4NO3_L-to-H_P Parameter: Age (hr) Value: 14
  misc_feature: MA Experiment 20000709 PARAMETER Experiment Name: At_15mM_NH4NO3_L-to-H_P Parameter: Organism Value: A. thaliana
  misc_feature: MA Experiment 20000709 PARAMETER Experiment Name: At_15mM_NH4NO3_L-to-H_P Parameter: Plant Line Value: WS
  misc_feature: MA Experiment 20000709 PARAMETER Experiment Name: At_15mM_NH4NO3_L-to-H_P Parameter: Timepoint (hr) Value: 4
  misc_feature: MA Experiment 20000709 PARAMETER Experiment Name: At_15mM_NH4NO3_L-to-H_P Parameter: Tissue Value: Aerial
  misc_feature: MA Experiment 20000709 PARAMETER Experiment Name: At_15mM_NH4NO3_L-to-H_P Parameter: Treatment Value: 15mM NH4NO3 vs. 30mM Mannitol
  misc_feature: MA Experiment ID: 20000794 Result: Down-regulated in Transcription
  misc_feature: MA Experiment 20000794 PARAMETER Experiment Name: At_Petals_P Parameter: Age (day) Value: 23-25 days
  misc_feature: MA Experiment 20000794 PARAMETER Experiment Name: At_Petals_P Parameter: Plant Line Value: WS
  misc_feature: MA Experiment 20000794 PARAMETER Experiment Name: At_Petals_P Parameter: Tissue Value: Petals vs. Whole plant
  misc_feature: MA Experiment ID: 20001556 Result: Up-regulated in Transcription
  misc_feature: MA Experiment 20001556 PARAMETER Experiment Name: At_Drought_Soil_Dry_P Parameter: Age (day) Value: 26
  misc_feature: MA Experiment 20001556 PARAMETER Experiment Name: At_Drought_Soil_Dry_P Parameter: Organism Value: A. thaliana
  misc_feature: MA Experiment 20001556 PARAMETER Experiment Name: At_Drought_Soil_Dry_P Parameter: Plant Line Value: WS
  misc_feature: MA Experiment 20001556 PARAMETER Experiment Name: At_Drought_Soil_Dry_P Parameter: Post Timepoint (hr) Value: None
  misc_feature: MA Experiment 20001556 PARAMETER Experiment Name: At_Drought_Soil_Dry_P Parameter: Post-Treatment Value: None
  misc_feature: MA Experiment 20001556 PARAMETER Experiment Name: At_Drought_Soil_Dry_P Parameter: Timepoint (day) Value: 12
  misc_feature: MA Experiment 20001556 PARAMETER Experiment Name: At_Drought_Soil_Dry_P Parameter: Treatment Value: Drought vs. No Drought
  misc_feature: MA Experiment ID: 20001557 Result: Up-regulated in Transcription
  misc_feature: MA Experiment 20001557 PARAMETER Experiment Name: At_Drought_Soil_Dry_P Parameter: Age (day) Value: 27
  misc_feature: MA Experiment 20001557 PARAMETER Experiment Name: At_Drought_Soil_Dry_P Parameter: Organism Value: A. thaliana
  misc_feature: MA Experiment 20001557 PARAMETER Experiment Name: At_Drought_Soil_Dry_P Parameter: Plant Line Value: WS
  misc_feature: MA Experiment 20001557 PARAMETER Experiment Name: At_Drought_Soil_Dry_P Parameter: Post Timepoint (hr) Value: 3
  misc_feature: MA Experiment 20001557 PARAMETER Experiment Name: At_Drought_Soil_Dry_P Parameter: Post-Treatment Value: Re-Water vs. No Drought
  misc_feature: MA Experiment 20001557 PARAMETER Experiment Name: At_Drought_Soil_Dry_P Parameter: Timepoint (day) Value: 13
  misc_feature: MA Experiment 20001557 PARAMETER Experiment Name: At_Drought_Soil_Dry_P Parameter: Treatment Value: Drought vs. No Drought
  misc_feature: MA Experiment ID: 20001904 Result: Up-regulated in Transcription
  misc_feature: MA Experiment 20001904 PARAMETER Experiment Name: At_Drought_Reproduction_P Parameter: Age (day) Value: 37
  misc_feature: MA Experiment 20001904 PARAMETER Experiment Name: At_Drought_Reproduction_P Parameter: Organism Value: A. thaliana
  misc_feature: MA Experiment 20001904 PARAMETER Experiment Name: At_Drought_Reproduction_P Parameter: Plant Line Value: WS
  misc_feature: MA Experiment 20001904 PARAMETER Experiment Name: At_Drought_Reproduction_P Parameter: Timepoint (day) Value: 7
  misc_feature: MA Experiment 20001904 PARAMETER Experiment Name: At_Drought_Reproduction_P Parameter: Tissue Value: Rosettes
  misc_feature: MA Experiment 20001904 PARAMETER Experiment Name: At_Drought_Reproduction_P Parameter: Treatment Value: Drought vs. No Drought
  misc_feature: MA Experiment ID: 20001905 Result: Up-regulated in Transcription
  misc_feature: MA Experiment 20001905 PARAMETER Experiment Name: At_Drought_Reproduction_P Parameter: Age (day) Value: 40
  misc_feature: MA Experiment 20001905 PARAMETER Experiment Name: At_Drought_Reproduction_P Parameter: Organism Value: A. thaliana
  misc_feature: MA Experiment 20001905 PARAMETER Experiment Name: At_Drought_Reproduction_P Parameter: Plant Line Value: WS
  misc_feature: MA Experiment 20001905 PARAMETER Experiment Name: At_Drought_Reproduction_P Parameter: Timepoint (day) Value: 10
  misc_feature: MA Experiment 20001905 PARAMETER Experiment Name: At_Drought_Reproduction_P Parameter: Tissue Value: Rosettes
  misc_feature: MA Experiment 20001905 PARAMETER Experiment Name: At_Drought_Reproduction_P Parameter: Treatment Value: Drought vs. No Drought
acaagctttcatgctctgtttcatgttttctctctacacgcttaaatattcaatcttttaatcaaatctgattcaaccgtgtcgtagatttgcttcaatggagtggattcgaggagaaactatcggatacggaactttttctacagtaagtctagcgacgcggtctaataacgattccggcgagtttcctccgttaatggctgtgaaatctgcagactcatacggcgctgcttctctggcaaacgagaaatcagttctagataatctcggagacgattgcaacgagatcgtacggtgtttcggcgaggatcggacggtcgaaaacggtgaagagatgcataatttgttcttggaatacgcttctagaggaagcttagagagttatcttaagaaattagccggtgaaggtgtaccggaatccaccgtgcgtcgccacacaggatcggtgcttagaggtctacgacacatccacgctaacggattcgctcactgtgatttaaaactcgggaatattctgttgttcggtgacggcgccgttaagattgcggattttggattggcgaagagaattggggatttaacggcgttaaattacggtgtgcagattagaggtacgccgttgtacatggcgccggaatctgttaacgataacgagtacggatcagaaggtgacgtgtgggctttaggatgcgtagtagttgagatgtttagtggtaaaacggcatggagtttaaaagaagggtcgaacttcatgtcgttgttgttacgcatcggtgttggtgacgaggttccgatgattcccgaggagttgtcggaacaaggaagagattttttgtcaaagtgtttcgttaaagatcccaaaaagagatggacggctgagatgcttctaaaccatccatttgtaaccgtcgatgttgatcacgacgttttagtcaaagaagaagatttcgttgttaatatgaaaacagaggacgtctcgacatcgccgagatgcccattcgaatttcccgattgggtttcggtttcttccggttcacaaacgatcgattcgccggatgagagagttgctagtttggtgactgatatgatccctgattggtctgttaccaatagctgggtcaccgtacggtga

SEQ ID NO: 42100 - protein, 344 aa, Arabidopsis thaliana
  peptide (1)..(344): Ceres Seq. ID no. 12395552
  misc_feature (3)..(269): Pfam Name: Protein kinase domain Pfam Description: Protein kinase domain
  misc_feature (1)..(279): Homolog of NCBI NO: 15225692 NR Description: putative protein kinase; protein id: At2g32510.1
  misc_feature (3)..(270): Homolog of NCBI NO: 15222311 NR Description: MAP3K gamma protein kinase, putative; protein id:
  misc_feature (1)..(344): Homolog of NCBI NO: 19423926 NR Description: unknown protein [Arabidopsis thaliana]
  misc_feature (1)..(344): Homolog of NCBI NO: 15236903 NR Description: putative NPK1-related protein kinase; protein id:
  misc_feature (3)..(344): Homolog of NCBI NO: 15240456 NR Description: putative protein; protein id: At5g55090.1
  misc_feature (1)..(343): Homolog of NCBI NO: 25407778 NR Description: MAP3K-like protein kinase [imported] -
  misc_feature (1)..(344): Homolog of NCBI NO: 17979279 NR Description: unknown protein [Arabidopsis thaliana]
  misc_feature (1)..(344): Homolog of NCBI NO: 21554379 NR Description: protein kinase-like protein [Arabidopsis thaliana]
  misc_feature (1)..(344): Homolog of NCBI NO: 15229715 NR Description: protein kinase -like protein
  misc_feature (1)..(344): Homolog of NCBI NO: 15240194 NR Description: protein kinase-like protein; protein id:
MEWIRGETIGYGTFSTVSLATRSNNDSGEFPPLMAVKSADSYGAASLANEKSVLDNLGDDCNEIVRCFGEDRTVENGEEMHNLFLEYASRGSLESYLKKLAGEGVPESTVRRHTGSVLRGLRHIHANGFAHCDLKLGNILLFGDGAVKIADFGLAKRIGDLTALNYGVQIRGTPLYMAPESVNDNEYGSEGDVWALGCVVVEMFSGKTAWSLKEGSNFMSLLLRIGVGDEVPMIPEELSEQGRDFLSKCFVKDPKKRWTAEMLLNHPFVTVDVDHDVLVKEEDFVVNMKTEDVSTSPRCPFEFPDWVSVSSGSQTIDSPDERVASLVTDMIPDWSVTNSWVTVR

SEQ ID NO: 42101 - protein, 311 aa, Arabidopsis thaliana
  peptide (1)..(311): Ceres Seq. ID no. 12395553
  misc_feature (1)..(236): Pfam Name: Protein kinase domain Pfam Description: Protein kinase domain
  misc_feature (1)..(246): Homolog of NCBI NO: 15225692 NR Description: putative protein kinase; protein id: At2g32510.1
  misc_feature (1)..(237): Homolog of NCBI NO: 15222311 NR Description: MAP3K gamma protein kinase, putative; protein id:
  misc_feature (1)..(311): Homolog of NCBI NO: 19423926 NR Description: unknown protein [Arabidopsis thaliana]
  misc_feature (1)..(311): Homolog of NCBI NO: 15236903 NR Description: putative NPK1-related protein kinase; protein id:
  misc_feature (1)..(311): Homolog of NCBI NO: 15240456 NR Description: putative protein; protein id: At5g55090.1
  misc_feature (1)..(310): Homolog of NCBI NO: 25407778 NR Description: MAP3K-like protein kinase [imported] -
  misc_feature (1)..(311): Homolog of NCBI NO: 17979279 NR Description: unknown protein [Arabidopsis thaliana]
  misc_feature (1)..(311): Homolog of NCBI NO: 21554379 NR Description: protein kinase-like protein [Arabidopsis thaliana]
  misc_feature (1)..(311): Homolog of NCBI NO: 15229715 NR Description: protein kinase -like protein
  misc_feature (1)..(311): Homolog of NCBI NO: 15240194 NR Description: protein kinase-like protein; protein id:
MAVKSADSYGAASLANEKSVLDNLGDDCNEIVRCFGEDRTVENGEEMHNLFLEYASRGSLESYLKKLAGEGVPESTVRRHTGSVLRGLRHIHANGFAHCDLKLGNILLFGDGAVKIADFGLAKRIGDLTALNYGVQIRGTPLYMAPESVNDNEYGSEGDVWALGCVVVEMFSGKTAWSLKEGSNFMSLLLRIGVGDEVPMIPEELSEQGRDFLSKCFVKDPKKRWTAEMLLNHPFVTVDVDHDVLVKEEDFVVNMKTEDVSTSPRCPFEFPDWVSVSSGSQTIDSPDERVASLVTDMIPDWSVTNSWVTVR

SEQ ID NO: 42102 - protein, 265 aa, Arabidopsis thaliana
  peptide (1)..(265): Ceres Seq. ID no. 12395554
  misc_feature (1)..(190): Pfam Name: Protein kinase domain Pfam Description: Protein kinase domain
  misc_feature (1)..(200): Homolog of NCBI NO: 15225692 NR Description: putative protein kinase; protein id: At2g32510.1
  misc_feature (1)..(191): Homolog of NCBI NO: 15222311 NR Description: MAP3K gamma protein kinase, putative; protein id:
  misc_feature (1)..(265): Homolog of NCBI NO: 19423926 NR Description: unknown protein [Arabidopsis thaliana]
  misc_feature (1)..(265): Homolog of NCBI NO: 15236903 NR Description: putative NPK1-related protein kinase; protein id:
  misc_feature (1)..(265): Homolog of NCBI NO: 15240456 NR Description: putative protein; protein id: At5g55090.1
  misc_feature (1)..(264): Homolog of NCBI NO: 25407778 NR Description: MAP3K-like protein kinase [imported] -
  misc_feature (1)..(265): Homolog of NCBI NO: 17979279 NR Description: unknown protein [Arabidopsis thaliana]
  misc_feature (1)..(265): Homolog of NCBI NO: 21554379 NR Description: protein kinase-like protein [Arabidopsis thaliana]
  misc_feature (1)..(265): Homolog of NCBI NO: 15229715 NR Description: protein kinase -like protein
  misc_feature (1)..(265): Homolog of NCBI NO: 15240194 NR Description: protein kinase-like protein; protein id:
MHNLFLEYASRGSLESYLKKLAGEGVPESTVRRHTGSVLRGLRHIHANGFAHCDLKLGNILLFGDGAVKIADFGLAKRIGDLTALNYGVQIRGTPLYMAPESVNDNEYGSEGDVWALGCVVVEMFSGKTAWSLKEGSNFMSLLLRIGVGDEVPMIPEELSEQGRDFLSKCFVKDPKKRWTAEMLLNHPFVTVDVDHDVLVKEEDFVVNMKTEDVSTSPRCPFEFPDWVSVSSGSQTIDSPDERVASLVTDMIPDWSVTNSWVTVR

SEQ ID NO: 42103 - DNA, 1227 bp, Arabidopsis thaliana; identical to SEQ ID NO: 36064
  misc_feature (1)..(1227): Ceres Seq. ID no. 12334796
  misc_feature: MA Experiment ID: 108434 Result: Up-regulated in Transcription
  misc_feature: MA Experiment 108434 PARAMETER Experiment Name: At_Root_Tips_cDNA_P Parameter: Tissue Value: Root Tips
  misc_feature: MA Experiment ID: 108463 Result: Down-regulated in Transcription
  misc_feature: MA Experiment 108463 PARAMETER Experiment Name: At_Germinating_Seeds_cDNA_P Parameter: Age (day) Value: 3 vs. 0
  misc_feature: MA Experiment 108463 PARAMETER Experiment Name: At_Germinating_Seeds_cDNA_P Parameter: Tissue Value: Germinating Seeds

SEQ ID NO: 42104 - protein, 290 aa, Arabidopsis thaliana; identical to SEQ ID NO: 36065
  peptide (1)..(290): Ceres Seq. ID no. 12334797
  misc_feature (198)..(290): Homolog of NCBI NO: 38346224 NR Description: OJ990528_30.4 [Oryza sativa (japonica
  misc_feature (26)..(194): Homolog of NCBI NO: 38346224 NR Description: OJ990528_30.4 [Oryza sativa (japonica
  misc_feature (198)..(290): Homolog of NCBI NO: 16226903 NR Description: At2g43320/T1O24.6 [Arabidopsis thaliana]
  misc_feature (26)..(196): Homolog of NCBI NO: 16226903 NR Description: At2g43320/T1O24.6 [Arabidopsis thaliana]
  misc_feature (198)..(290): Homolog of NCBI NO: 18406207 NR Description: expressed protein
  misc_feature (26)..(196): Homolog of NCBI NO: 18406207 NR Description: expressed protein
  misc_feature (161)..(271): Homolog of NCBI NO: 7485012 NR Description: hypothetical protein - Arabidopsis thaliana
  misc_feature (1)..(148): Homolog of NCBI NO: 7485012 NR Description: hypothetical protein - Arabidopsis thaliana
  misc_feature (1)..(290): Homolog of NCBI NO: 21554662 NR Description: unknown [Arabidopsis thaliana]
  misc_feature (1)..(290): Homolog of NCBI NO: 18414120 NR Description: expressed protein
  misc_feature (198)..(290): Homolog of NCBI NO: 38346224 NR Description: OJ990528_30.4 [Oryza sativa (japonica
  misc_feature (26)..(194): Homolog of NCBI NO: 38346224 NR Description: OJ990528_30.4 [Oryza sativa (japonica
  misc_feature (198)..(290): Homolog of NCBI NO: 16226903 NR Description: At2g43320/T1O24.6 [Arabidopsis thaliana]
  misc_feature (26)..(196): Homolog of NCBI NO: 16226903 NR Description: At2g43320/T1O24.6 [Arabidopsis thaliana]
  misc_feature (198)..(290): Homolog of NCBI NO: 18406207 NR Description: expressed protein
  misc_feature (26)..(196): Homolog of NCBI NO: 18406207 NR Description: expressed protein
  misc_feature (161)..(271): Homolog of NCBI NO: 7485012 NR Description: hypothetical protein - Arabidopsis thaliana
  misc_feature (1)..(148): Homolog of NCBI NO: 7485012 NR Description: hypothetical protein - Arabidopsis thaliana
  misc_feature (1)..(290): Homolog of NCBI NO: 21554662 NR Description: unknown [Arabidopsis thaliana]
  misc_feature (1)..(290): Homolog of NCBI NO: 18414120 NR Description: expressed protein

SEQ ID NO: 42105 - DNA, 1110 bp, Arabidopsis thaliana
  misc_feature (1)..(1110): Ceres Seq. ID no. 12327704
  misc_feature: MA Experiment ID: 108488 Result: Down-regulated in Transcription
  misc_feature: MA Experiment ID: 108579 Result: Down-regulated in Transcription
  misc_feature: MA Experiment 108579 PARAMETER Experiment Name: At_4deg_Cold_cDNA_P Parameter: Temperature (deg C) Value: 4 vs. 22
  misc_feature: MA Experiment 108579 PARAMETER Experiment Name: At_4deg_Cold_cDNA_P Parameter: Timepoint (hr) Value: 6
  misc_feature: MA Experiment 108579 PARAMETER Experiment Name: At_4deg_Cold_cDNA_P Parameter: Tissue Value: Aerial
  misc_feature: MA Experiment ID: 20000184 Result: Down-regulated in Transcription
  misc_feature: MA Experiment 20000184 PARAMETER Experiment Name: At_Shoots__P Parameter: Age (day) Value: 7
  misc_feature: MA Experiment 20000184 PARAMETER Experiment Name: At_Shoots__P Parameter: Tissue Value: Shoots vs. Whole Plant
  misc_feature: MA Experiment ID: 20000234 Result: Down-regulated in Transcription
  misc_feature: MA Experiment 20000234 PARAMETER Experiment Name: At_Siliques_P Parameter: Age (day) Value: 21
  misc_feature: MA Experiment 20000234 PARAMETER Experiment Name: At_Siliques_P Parameter: Organism Value: A. thaliana
  misc_feature: MA Experiment 20000234 PARAMETER Experiment Name: At_Siliques_P Parameter: Plant Line Value: WS
  misc_feature: MA Experiment 20000234 PARAMETER Experiment Name: At_Siliques_P Parameter: Tissue Value: Less Than 5mm Siliques vs. Whole Plant
  misc_feature: MA Experiment ID: 20000235 Result: Down-regulated in Transcription
  misc_feature: MA Experiment 20000235 PARAMETER Experiment Name: At_Siliques_P Parameter: Age (day) Value: 21
  misc_feature: MA Experiment 20000235 PARAMETER Experiment Name: At_Siliques_P Parameter: Organism Value: A. thaliana
  misc_feature: MA Experiment 20000235 PARAMETER Experiment Name: At_Siliques_P Parameter: Plant Line Value: WS
  misc_feature: MA Experiment 20000235 PARAMETER Experiment Name: At_Siliques_P Parameter: Tissue Value: 5-10mm Siliques vs. Whole Plant
  misc_feature: MA Experiment ID: 20000264 Result: Down-regulated in Transcription
  misc_feature: MA Experiment 20000264 PARAMETER Experiment Name: At_Open_Flower_P Parameter: Age (day) Value: 21
  misc_feature: MA Experiment 20000264 PARAMETER Experiment Name: At_Open_Flower_P Parameter: Plant Line Value: WS
  misc_feature: MA Experiment 20000264 PARAMETER Experiment Name: At_Open_Flower_P Parameter: Tissue Value: Open Flower vs. Whole Plant
  misc_feature: MA Experiment ID: 20001248 Result: Up-regulated in Transcription
  misc_feature: MA Experiment 20001248 PARAMETER Experiment Name: At_Far-red-induction_P Parameter: Age (day) Value: 7
  misc_feature: MA Experiment 20001248 PARAMETER Experiment Name: At_Far-red-induction_P Parameter: Light Value: Far-red vs. White
  misc_feature: MA Experiment 20001248 PARAMETER Experiment Name: At_Far-red-induction_P Parameter: Organism Value: A. thaliana
  misc_feature: MA Experiment 20001248 PARAMETER Experiment Name: At_Far-red-induction_P Parameter: Plant Line Value: Columbia
  misc_feature: MA Experiment 20001248 PARAMETER Experiment Name: At_Far-red-induction_P Parameter: Timepoint (hr) Value: 4
  misc_feature: MA Experiment 20001248 PARAMETER Experiment Name: At_Far-red-induction_P Parameter: Tissue Value: Whole Plant
  misc_feature: MA Experiment ID: 20001450 Result: Up-regulated in Transcription
  misc_feature: MA Experiment 20001450 PARAMETER Experiment Name: At_Far-red-induction_P Parameter: Age (day) Value: 7
  misc_feature: MA Experiment 20001450 PARAMETER Experiment Name: At_Far-red-induction_P Parameter: Light Value: Far-red vs. White
  misc_feature: MA Experiment 20001450 PARAMETER Experiment Name: At_Far-red-induction_P Parameter: Organism Value: A. thaliana
  misc_feature: MA Experiment 20001450 PARAMETER Experiment Name: At_Far-red-induction_P Parameter: Plant Line Value: Columbia
  misc_feature: MA Experiment 20001450 PARAMETER Experiment Name: At_Far-red-induction_P Parameter: Timepoint (hr) Value: 8
  misc_feature: MA Experiment 20001450 PARAMETER Experiment Name: At_Far-red-induction_P Parameter: Tissue Value: Whole Plant
  misc_feature: MA Experiment ID: 20001451 Result: Up-regulated in Transcription
  misc_feature: MA Experiment 20001451 PARAMETER Experiment Name: At_Far-red-induction_P Parameter: Age (day) Value: 7
  misc_feature: MA Experiment 20001451 PARAMETER Experiment Name: At_Far-red-induction_P Parameter: Light Value: Far-red vs. White
  misc_feature: MA Experiment 20001451 PARAMETER Experiment Name: At_Far-red-induction_P Parameter: Organism Value: A. thaliana
  misc_feature: MA Experiment 20001451 PARAMETER Experiment Name: At_Far-red-induction_P Parameter: Plant Line Value: Columbia
  misc_feature: MA Experiment 20001451 PARAMETER Experiment Name: At_Far-red-induction_P Parameter: Timepoint (hr) Value: 24
  misc_feature: MA Experiment 20001451 PARAMETER Experiment Name: At_Far-red-induction_P Parameter: Tissue Value: Whole Plant
aaaaaaatccgatccaacagaaattcttatcctaagcctctttctccaccgcgcacgttagcctcctctctttcccactccgagatggagacgacgccggagactcagtcgaagactcaccgtctaccggcgggaagagaggattggtggagcgaagacgctacggcgacattgatcgaagcttggggagatcgttacgtcaatctcaaccggggaaatctccggcaaaacgattggaaagaagtcgccgacgccgtcaattcaagccacgggaatggccggccaaagaccgatgtacagtgcaaaaaccggatcgatacgttgaagaagaagtacaaaactgaaaaggcgaaacctttatcgaattggtgcttctttgatagactcgatttcttaatcggtccggttatgaagaaatcgtccggtgctgttgttaaatcggcgttgatgaaccctaatttgaatcctactggatctaaatcaactggtagctctctcgatgacgatgatgatgatgatgatgacgacgaagaagatgatgatgatgcgggtgattggggatttgtggtgaggaagcatcgtaaagttgaagatgtagattcgagtgaaggatcagcctttagggagctagcgagatcgattctgaagttaggggaagcgtttgagagaatcgaggggaagaagcaacagatgatgattgaattggagaaacagagaatggaagttgcaaaggagcttgagttacaacgaatgaatatgttgatggagatgcaattggagcttgagaaatctaaacttgggaaacgaagagctgcttcaggtaagaagttgtaggattgtagattgtggaggagttactgatgtgaagcaaggagcaatggttggatctaaagctcatacgatttggagaagatgttattattattgatctttaggttttcttaagttatagcgcgatgctttttttcttcttcttctttttcattctcttttttagcattgtagagttacattggtagtagcaatgcgaattaccaaaagaactctcatagtatctgacatatcaagatgtacttttgtgaagtatcaatgtatgatggtttgtgtacc

SEQ ID NO: 42106 - protein, 277 aa, Arabidopsis thaliana
  peptide (1)..(277): Ceres Seq. ID no. 12327705
  misc_feature (170)..(269): Homolog of NCBI NO: 15231799 NR Description: hypothetical protein
  misc_feature (133)..(275): Homolog of NCBI NO: 18149189 NR Description: 6b-interacting protein 1 [Nicotiana tabacum]
  misc_feature (5)..(144): Homolog of NCBI NO: 18149189 NR Description: 6b-interacting protein 1 [Nicotiana tabacum]
  misc_feature (29)..(273): Homolog of NCBI NO: 30680994 NR Description: expressed protein [Arabidopsis thaliana]
  misc_feature (29)..(276): Homolog of NCBI NO: 10178132 NR Description: gb|AAF01512.1~gene_id:MOP10.9~similar to unknown
  misc_feature (29)..(277): Homolog of NCBI NO: 18414919 NR Description: putative protein
  misc_feature (29)..(276): Homolog of NCBI NO: 21537288 NR Description: unknown [Arabidopsis thaliana]
  misc_feature (29)..(275): Homolog of NCBI NO: 6016685 NR Description: hypothetical protein [Arabidopsis thaliana]
  misc_feature (29)..(277): Homolog of NCBI NO: 18399118 NR Description: expressed protein
  misc_feature (29)..(273): Homolog of NCBI NO: 12321891 NR Description: hypothetical protein; 14486-13072 [Arabidopsis
KKIRSNRNSYPKPLSPPRTLASSLSHSEMETTPETQSKTHRLPAGREDWWSEDATATLIEAWGDRYVNLNRGNLRQNDWKEVADAVNSSHGNGRPKTDVQCKNRIDTLKKKYKTEKAKPLSNWCFFDRLDFLIGPVMKKSSGAVVKSALMNPNLNPTGSKSTGSSLDDDDDDDDDDEEDDDDAGDWGFVVRKHRKVEDVDSSEGSAFRELARSILKLGEAFERIEGKKQQMMIELEKQRMEVAKELELQRMNMLMEMQLELEKSKLGKRRAASGKKL

SEQ ID NO: 42107 - protein, 249 aa, Arabidopsis thaliana
  peptide (1)..(249): Ceres Seq. ID no. 12327706
  misc_feature (142)..(241): Homolog of NCBI NO: 15231799 NR Description: hypothetical protein
  misc_feature (105)..(247): Homolog of NCBI NO: 18149189 NR Description: 6b-interacting protein 1 [Nicotiana tabacum]
  misc_feature (1)..(116): Homolog of NCBI NO: 18149189 NR Description: 6b-interacting protein 1 [Nicotiana tabacum]
  misc_feature (1)..(245): Homolog of NCBI NO: 30680994 NR Description: expressed protein [Arabidopsis thaliana]
  misc_feature (1)..(248): Homolog of NCBI NO: 10178132 NR Description: gb|AAF01512.1~gene_id:MOP10.9~similar to unknown
  misc_feature (1)..(249): Homolog of NCBI NO: 18414919 NR Description: putative protein
  misc_feature (1)..(248): Homolog of NCBI NO: 21537288 NR Description: unknown [Arabidopsis thaliana]
  misc_feature (1)..(247): Homolog of NCBI NO: 6016685 NR Description: hypothetical protein [Arabidopsis thaliana]
  misc_feature (1)..(249): Homolog of NCBI NO: 18399118 NR Description: expressed protein
  misc_feature (1)..(245): Homolog of NCBI NO: 12321891 NR Description: hypothetical protein; 14486-13072 [Arabidopsis
METTPETQSKTHRLPAGREDWWSEDATATLIEAWGDRYVNLNRGNLRQNDWKEVADAVNSSHGNGRPKTDVQCKNRIDTLKKKYKTEKAKPLSNWCFFDRLDFLIGPVMKKSSGAVVKSALMNPNLNPTGSKSTGSSLDDDDDDDDDDEEDDDDAGDWGFVVRKHRKVEDVDSSEGSAFRELARSILKLGEAFERIEGKKQQMMIELEKQRMEVAKELELQRMNMLMEMQLELEKSKLGKRRAASGKKL

SEQ ID NO: 42108 - protein, 141 aa, Arabidopsis thaliana
  peptide (1)..(141): Ceres Seq. ID no. 12327707
  misc_feature (64)..(129): Homolog of NCBI NO: 38344545 NR Description: OSJNBa0027P08.13 [Oryza sativa (japonica
  misc_feature (34)..(133): Homolog of NCBI NO: 15231799 NR Description: hypothetical protein
  misc_feature (1)..(139): Homolog of NCBI NO: 18149189 NR Description: 6b-interacting protein 1 [Nicotiana tabacum]
  misc_feature (1)..(137): Homolog of NCBI NO: 30680994 NR Description: expressed protein [Arabidopsis thaliana]
  misc_feature (1)..(140): Homolog of NCBI NO: 10178132 NR Description: gb|AAF01512.1~gene_id:MOP10.9~similar to unknown
  misc_feature (1)..(141): Homolog of NCBI NO: 18414919 NR Description: putative protein
  misc_feature (1)..(140): Homolog of NCBI NO: 21537288 NR Description: unknown [Arabidopsis thaliana]
  misc_feature (1)..(139): Homolog of NCBI NO: 6016685 NR Description: hypothetical protein [Arabidopsis thaliana]
  misc_feature (1)..(141): Homolog of NCBI NO: 18399118 NR Description: expressed protein
  misc_feature (1)..(137): Homolog of NCBI NO: 12321891 NR Description: hypothetical protein; 14486-13072 [Arabidopsis
MKKSSGAVVKSALMNPNLNPTGSKSTGSSLDDDDDDDDDDEEDDDDAGDWGFVVRKHRKVEDVDSSEGSAFRELARSILKLGEAFERIEGKKQQMMIELEKQRMEVAKELELQRMNMLMEMQLELEKSKLGKRRAASGKKL

SEQ ID NO: 42109 - DNA, 1783 bp, Arabidopsis thaliana; identical to SEQ ID NO: 23493
  misc_feature (1)..(1783): Ceres Seq. ID no. 12335228
  misc_feature: MA Experiment ID: 20000169 Result: Up-regulated in Transcription
  misc_feature: MA Experiment 20000169 PARAMETER Experiment Name: At_100uM_ABA_P Parameter: Age (day) Value: 14
  misc_feature: MA Experiment 20000169 PARAMETER Experiment Name: At_100uM_ABA_P Parameter: Organism Value: A. thaliana
  misc_feature: MA Experiment 20000169 PARAMETER Experiment Name: At_100uM_ABA_P Parameter: Plant Line Value: WS
  misc_feature: MA Experiment 20000169 PARAMETER Experiment Name: At_100uM_ABA_P Parameter: Timepoint (hr) Value: 6
  misc_feature: MA Experiment 20000169 PARAMETER Experiment Name: At_100uM_ABA_P Parameter: Tissue Value: Aerial
  misc_feature: MA Experiment 20000169 PARAMETER Experiment Name: At_100uM_ABA_P Parameter: Treatment Value: 100uM ABA vs. No Treatment
  misc_feature: MA Experiment ID: 20000179 Result: Up-regulated in Transcription
  misc_feature: MA Experiment 20000179 PARAMETER Experiment Name: At_Germinating_Seeds_P Parameter: Age (hr) Value: 6 vs. 0
  misc_feature: MA Experiment 20000179 PARAMETER Experiment Name: At_Germinating_Seeds_P Parameter: Tissue Value: Germinating Seeds
  misc_feature: MA Experiment ID: 20000185 Result: Down-regulated in Transcription
  misc_feature: MA Experiment 20000185 PARAMETER Experiment Name: At_Roots__P Parameter: Age (day) Value: 7 vs. 21
  misc_feature: MA Experiment 20000185 PARAMETER Experiment Name: At_Roots__P Parameter: Organism Value: A. thaliana
  misc_feature: MA Experiment 20000185 PARAMETER Experiment Name: At_Roots__P Parameter: Tissue Value: Roots vs. Whole Plant
  misc_feature: MA Experiment ID: 20000227 Result: Down-regulated in Transcription
  misc_feature: MA Experiment 20000227 PARAMETER Experiment Name: At_Root-Tips-vs-Tops_P Parameter: Tissue Value: Root Tips vs. Root Tops
  misc_feature: MA Experiment ID: 20000234 Result: Down-regulated in Transcription
  misc_feature: MA Experiment 20000234 PARAMETER Experiment Name: At_Siliques_P Parameter: Age (day) Value: 21
  misc_feature: MA Experiment 20000234 PARAMETER Experiment Name: At_Siliques_P Parameter: Organism Value: A. thaliana
  misc_feature: MA Experiment 20000234 PARAMETER Experiment Name: At_Siliques_P Parameter: Plant Line Value: WS
  misc_feature: MA Experiment 20000234 PARAMETER Experiment Name: At_Siliques_P Parameter: Tissue Value: Less Than 5mm Siliques vs. Whole Plant
  misc_feature: MA Experiment ID: 20000265 Result: Down-regulated in Transcription
  misc_feature: MA Experiment 20000265 PARAMETER Experiment Name: At_Open_Flower_P Parameter: Age (day) Value: 21
  misc_feature: MA Experiment 20000265 PARAMETER Experiment Name: At_Open_Flower_P Parameter: Plant Line Value: WS
  misc_feature: MA Experiment 20000265 PARAMETER Experiment Name: At_Open_Flower_P Parameter: Tissue Value: Closed Flower vs. Whole Plant
  misc_feature: MA Experiment ID: 20000437 Result: Up-regulated in Transcription
  misc_feature: MA Experiment 20000437 PARAMETER Experiment Name: At_Drought_P Parameter: Age (day) Value: 8
  misc_feature: MA Experiment 20000437 PARAMETER Experiment Name: At_Drought_P Parameter: Organism Value: A. thaliana
  misc_feature: MA Experiment 20000437 PARAMETER Experiment Name: At_Drought_P Parameter: Plant Line Value: WS
  misc_feature: MA Experiment 20000437 PARAMETER Experiment Name: At_Drought_P Parameter: Timepoint (hr) Value: 24
  misc_feature: MA Experiment 20000437 PARAMETER Experiment Name: At_Drought_P Parameter: Tissue Value: Whole Plant
  misc_feature: MA Experiment 20000437 PARAMETER Experiment Name: At_Drought_P Parameter: Treatment Value: Drought vs. No Drought
  misc_feature: MA Experiment ID: 20000438 Result: Down-regulated in Transcription
  misc_feature: MA Experiment 20000438 PARAMETER Experiment Name: At_Shoots__P Parameter: Age (day) Value: 14
  misc_feature: MA Experiment 20000438 PARAMETER Experiment Name: At_Shoots__P Parameter: Tissue Value: Shoots vs. Whole Plant
  misc_feature: MA Experiment ID: 20000439 Result: Down-regulated in Transcription
  misc_feature: MA Experiment 20000439 PARAMETER Experiment Name: At_Roots__P Parameter: Age (day) Value: 14 vs. 21
  misc_feature: MA Experiment 20000439 PARAMETER Experiment Name: At_Roots__P Parameter: Organism Value: A. thaliana
  misc_feature: MA Experiment 20000439 PARAMETER Experiment Name: At_Roots__P Parameter: Tissue Value: Roots vs. Whole Plant
  misc_feature: MA Experiment ID: 20000455 Result: Up-regulated in Transcription
  misc_feature: MA Experiment 20000455 PARAMETER Experiment Name: At_100uM_ABA_P Parameter: Age (day) Value: 16
  misc_feature: MA Experiment 20000455 PARAMETER Experiment Name: At_100uM_ABA_P Parameter: Organism Value: A. thaliana
  misc_feature: MA Experiment 20000455 PARAMETER Experiment Name: At_100uM_ABA_P Parameter: Plant Line Value: WS
  misc_feature: MA Experiment 20000455 PARAMETER Experiment Name: At_100uM_ABA_P Parameter: Timepoint (hr) Value: 48
  misc_feature: MA Experiment 20000455 PARAMETER Experiment Name: At_100uM_ABA_P Parameter: Tissue Value: Aerial
  misc_feature: MA Experiment 20000455 PARAMETER Experiment Name: At_100uM_ABA_P Parameter: Treatment Value: 100uM ABA vs. No Treatment
  misc_feature: MA Experiment ID: 20000495 Result: Down-regulated in Transcription
  misc_feature: MA Experiment 20000495 PARAMETER Experiment Name: At_Guard_Cells_P Parameter: Harvest Date Value: 8/2/2002
  misc_feature: MA Experiment 20000495 PARAMETER Experiment Name: At_Guard_Cells_P Parameter: Organism Value: A. thaliana
  misc_feature: MA Experiment 20000495 PARAMETER Experiment Name: At_Guard_Cells_P Parameter: Tissue Value: Guard Cells vs. Leaves
  misc_feature: MA Experiment ID: 20000496 Result: Down-regulated in Transcription
  misc_feature: MA Experiment 20000496 PARAMETER Experiment Name: At_Guard_Cells_P Parameter: Harvest Date Value: 7/19/2002
  misc_feature: MA Experiment 20000496 PARAMETER Experiment Name: At_Guard_Cells_P Parameter: Organism Value: Canola
  misc_feature: MA Experiment 20000496 PARAMETER Experiment Name: At_Guard_Cells_P Parameter: Tissue Value: Guard Cells vs. Leaves
  misc_feature: MA Experiment ID: 20001451 Result: Down-regulated in Transcription
  misc_feature: MA Experiment 20001451 PARAMETER Experiment Name: At_Far-red-induction_P Parameter: Age (day) Value: 7
  misc_feature: MA Experiment 20001451 PARAMETER Experiment Name: At_Far-red-induction_P Parameter: Light Value: Far-red vs. White
  misc_feature: MA Experiment 20001451 PARAMETER Experiment Name: At_Far-red-induction_P Parameter: Organism Value: A. thaliana
  misc_feature: MA Experiment 20001451 PARAMETER Experiment Name: At_Far-red-induction_P Parameter: Plant Line Value: Columbia
  misc_feature: MA Experiment 20001451 PARAMETER Experiment Name: At_Far-red-induction_P Parameter: Timepoint (hr) Value: 24
  misc_feature: MA Experiment 20001451 PARAMETER Experiment Name: At_Far-red-induction_P Parameter: Tissue Value: Whole Plant
  misc_feature: MA Experiment ID: 20001560 Result: Down-regulated in Transcription
  misc_feature: MA Experiment 20001560 PARAMETER Experiment Name: At_Drought_Soil_Dry_P Parameter: Age (day) Value: 28
  misc_feature: MA Experiment 20001560 PARAMETER Experiment Name: At_Drought_Soil_Dry_P Parameter: Organism Value: A. thaliana
  misc_feature: MA Experiment 20001560 PARAMETER Experiment Name: At_Drought_Soil_Dry_P Parameter: Plant Line Value: WS
  misc_feature: MA Experiment 20001560 PARAMETER Experiment Name: At_Drought_Soil_Dry_P Parameter: Post Timepoint (hr) Value: None
  misc_feature: MA Experiment 20001560 PARAMETER Experiment Name: At_Drought_Soil_Dry_P Parameter: Post-Treatment Value: None
  misc_feature: MA Experiment 20001560 PARAMETER Experiment Name: At_Drought_Soil_Dry_P Parameter: Timepoint (day) Value: 14
  misc_feature: MA Experiment 20001560 PARAMETER Experiment Name: At_Drought_Soil_Dry_P Parameter: Treatment Value: Drought vs. No Drought

SEQ ID NO: 42110 - protein, 462 aa, Arabidopsis thaliana; identical to SEQ ID NO: 23494
  peptide (1)..(462): Ceres Seq. ID no. 12335229
  misc_feature (49)..(307): Pfam Name: Thiolase, N-terminal domain Pfam Description: Thiolase, N-terminal domain
  misc_feature (49)..(307): Pfam Name: Thiolase, N-terminal domain Pfam Description: Thiolase, N-terminal domain
  misc_feature (1)..(381): Homolog of NCBI NO: 16648799 NR Description: At2g33150/F25I18.11 [Arabidopsis thaliana]
  misc_feature (1)..(426): Homolog of NCBI NO: 7433645 NR Description: acetyl-CoA C-acyltransferase (EC 2.3.1.16) B
  misc_feature (1)..(451): Homolog of NCBI NO: 21537268 NR Description: putative acetyl-CoA acyltransferase [Arabidopsis
  misc_feature (1)..(426): Homolog of NCBI NO: 1129145 NR Description: 3-ketoacyl-CoA thiolase B; acetyl-CoA
  misc_feature (1)..(451): Homolog of NCBI NO: 15219797 NR Description: putative acetyl-CoA acyltransferase
  misc_feature (1)..(381): Homolog of NCBI NO: 16648799 NR Description: At2g33150/F25I18.11 [Arabidopsis thaliana]
  misc_feature (1)..(451): Homolog of NCBI NO: 21537268 NR Description: putative acetyl-CoA acyltransferase [Arabidopsis
  misc_feature (1)..(451): Homolog of NCBI NO: 15219797 NR Description: putative acetyl-CoA acyltransferase
  misc_feature (1)..(462): Homolog of NCBI NO: 15225798 NR Description: 3-ketoacyl-CoA thiolase
  misc_feature (1)..(462): Homolog of NCBI NO: 7433644 NR Description: acetyl-CoA C-acyltransferase (EC 2.3.1.16)
  misc_feature (1)..(462): Homolog of NCBI NO: 7433647 NR Description: acetyl-CoA C-acyltransferase (EC 2.3.1.16)
  misc_feature (1)..(462): Homolog of NCBI NO: 393707 NR Description: 3-ketoacyl-CoA thiolase; acetyl-CoA
  misc_feature (1)..(462): Homolog of NCBI NO: 421810 NR Description: acetyl-CoA C-acyltransferase (EC 2.3.1.16)
  misc_feature (1)..(426): Homolog of NCBI NO: 1129145 NR Description: 3-ketoacyl-CoA thiolase B; acetyl-CoA
  misc_feature (1)..(426): Homolog of NCBI NO: 7433645 NR Description: acetyl-CoA C-acyltransferase (EC 2.3.1.16) B
  misc_feature (1)..(462): Homolog of NCBI NO: 421810 NR Description: acetyl-CoA C-acyltransferase (EC 2.3.1.16)
  misc_feature (1)..(462): Homolog of NCBI NO: 393707 NR Description: 3-ketoacyl-CoA thiolase; acetyl-CoA
  misc_feature (1)..(462): Homolog of NCBI NO: 7433647 NR Description: acetyl-CoA C-acyltransferase (EC 2.3.1.16)
  misc_feature (1)..(462): Homolog of NCBI NO: 7433644 NR Description: acetyl-CoA C-acyltransferase (EC 2.3.1.16)
  misc_feature (1)..(462): Homolog of NCBI NO: 15225798 NR Description: 3-ketoacyl-CoA thiolase

SEQ ID NO: 42111 - protein, 345 aa, Arabidopsis thaliana; identical to SEQ ID NO: 23495
  peptide (1)..(345): Ceres Seq. ID no. 12335230
  misc_feature (1)..(190): Pfam Name: Thiolase, N-terminal domain Pfam Description: Thiolase, N-terminal domain
  misc_feature (1)..(190): Pfam Name: Thiolase, N-terminal domain Pfam Description: Thiolase, N-terminal domain
  misc_feature (1)..(264): Homolog of NCBI NO: 16648799 NR Description: At2g33150/F25I18.11 [Arabidopsis thaliana]
  misc_feature (1)..(309): Homolog of NCBI NO: 7433645 NR Description: acetyl-CoA C-acyltransferase (EC 2.3.1.16) B
  misc_feature (1)..(334): Homolog of NCBI NO: 21537268 NR Description: putative acetyl-CoA acyltransferase [Arabidopsis
  misc_feature (1)..(309): Homolog of NCBI NO: 1129145 NR Description: 3-ketoacyl-CoA thiolase B; acetyl-CoA
  misc_feature (1)..(334): Homolog of NCBI NO: 15219797 NR Description: putative acetyl-CoA acyltransferase
  misc_feature (1)..(264): Homolog of NCBI NO: 16648799 NR Description: At2g33150/F25I18.11 [Arabidopsis thaliana]
  misc_feature (1)..(334): Homolog of NCBI NO: 21537268 NR Description: putative acetyl-CoA acyltransferase [Arabidopsis
  misc_feature (1)..(334): Homolog of NCBI NO: 15219797 NR Description: putative acetyl-CoA acyltransferase
  misc_feature (1)..(345): Homolog of NCBI NO: 15225798 NR Description: 3-ketoacyl-CoA thiolase
  misc_feature (1)..(345): Homolog of NCBI NO: 7433644 NR Description: acetyl-CoA C-acyltransferase (EC 2.3.1.16)
  misc_feature (1)..(345): Homolog of NCBI NO: 7433647 NR Description: acetyl-CoA C-acyltransferase (EC 2.3.1.16)
  misc_feature (1)..(345): Homolog of NCBI NO: 393707 NR Description: 3-ketoacyl-CoA thiolase; acetyl-CoA
  misc_feature (1)..(345): Homolog of NCBI NO: 421810 NR Description: acetyl-CoA C-acyltransferase (EC 2.3.1.16)
  misc_feature (1)..(309): Homolog of NCBI NO: 1129145 NR Description: 3-ketoacyl-CoA thiolase B; acetyl-CoA
  misc_feature (1)..(309): Homolog of NCBI NO: 7433645 NR Description: acetyl-CoA C-acyltransferase (EC 2.3.1.16) B
  misc_feature (1)..(345): Homolog of NCBI NO: 421810 NR Description: acetyl-CoA C-acyltransferase (EC 2.3.1.16)
  misc_feature (1)..(345): Homolog of NCBI NO: 393707 NR Description: 3-ketoacyl-CoA thiolase; acetyl-CoA
  misc_feature (1)..(345): Homolog of NCBI NO: 7433647 NR Description: acetyl-CoA C-acyltransferase (EC 2.3.1.16)
  misc_feature (1)..(345): Homolog of NCBI NO: 7433644 NR Description: acetyl-CoA C-acyltransferase (EC 2.3.1.16)
  misc_feature (1)..(345): Homolog of NCBI NO: 15225798 NR Description: 3-ketoacyl-CoA thiolase

SEQ ID NO: 42112 - protein, 295 aa, Arabidopsis thaliana; identical to SEQ ID NO: 23496
  peptide (1)..(295): Ceres Seq. ID no. 12335231
  misc_feature (1)..(140): Pfam Name: Thiolase, N-terminal domain Pfam Description: Thiolase, N-terminal domain
  misc_feature (1)..(140): Pfam Name: Thiolase, N-terminal domain Pfam Description: Thiolase, N-terminal domain
  misc_feature (1)..(214): Homolog of NCBI NO: 16648799 NR Description: At2g33150/F25I18.11 [Arabidopsis thaliana]
  misc_feature (1)..(259): Homolog of NCBI NO: 7433645 NR Description: acetyl-CoA C-acyltransferase (EC 2.3.1.16) B
  misc_feature (1)..(284): Homolog of NCBI NO: 21537268 NR Description: putative acetyl-CoA acyltransferase [Arabidopsis
  misc_feature (1)..(259): Homolog of NCBI NO: 1129145 NR Description: 3-ketoacyl-CoA thiolase B; acetyl-CoA
  misc_feature (1)..(284): Homolog of NCBI NO: 15219797 NR Description: putative acetyl-CoA acyltransferase
  misc_feature (1)..(214): Homolog of NCBI NO: 16648799 NR Description: At2g33150/F25I18.11 [Arabidopsis thaliana]
  misc_feature (1)..(284): Homolog of NCBI NO: 21537268 NR Description: putative acetyl-CoA acyltransferase [Arabidopsis
  misc_feature (1)..(284): Homolog of NCBI NO: 15219797 NR Description: putative acetyl-CoA acyltransferase
  misc_feature (1)..(295): Homolog of NCBI NO: 15225798 NR Description: 3-ketoacyl-CoA thiolase
  misc_feature (1)..(295): Homolog of NCBI NO: 7433644 NR Description: acetyl-CoA C-acyltransferase (EC 2.3.1.16)
  misc_feature (1)..(295): Homolog of NCBI NO: 7433647 NR Description: acetyl-CoA C-acyltransferase (EC 2.3.1.16)
  misc_feature (1)..(295): Homolog of NCBI NO: 393707 NR Description: 3-ketoacyl-CoA thiolase; acetyl-CoA
  misc_feature (1)..(295): Homolog of NCBI NO: 421810 NR Description: acetyl-CoA C-acyltransferase (EC 2.3.1.16)
  misc_feature (1)..(259): Homolog of NCBI NO: 1129145 NR Description: 3-ketoacyl-CoA thiolase B; acetyl-CoA
  misc_feature (1)..(259): Homolog of NCBI NO: 7433645 NR Description: acetyl-CoA C-acyltransferase (EC 2.3.1.16) B
  misc_feature (1)..(295): Homolog of NCBI NO: 421810 NR Description: acetyl-CoA C-acyltransferase (EC 2.3.1.16)
  misc_feature (1)..(295): Homolog of NCBI NO: 393707 NR Description: 3-ketoacyl-CoA thiolase; acetyl-CoA
  misc_feature (1)..(295): Homolog of NCBI NO: 7433647 NR Description: acetyl-CoA C-acyltransferase (EC 2.3.1.16)
  misc_feature (1)..(295): Homolog of NCBI NO: 7433644 NR Description: acetyl-CoA C-acyltransferase (EC 2.3.1.16)
  misc_feature (1)..(295): Homolog of NCBI NO: 15225798 NR Description: 3-ketoacyl-CoA thiolase

SEQ ID NO: 42113 - DNA, 1552 bp, Arabidopsis thaliana
  misc_feature (1)..(1552): Ceres Seq. ID no. 13645834
  misc_feature: MA Experiment ID: 20000173 Result: Down-regulated in Transcription
  misc_feature: MA Experiment 20000173 PARAMETER Experiment Name: At_42deg_Heat_P Parameter: Age (day) Value: 14
  misc_feature: MA Experiment 20000173 PARAMETER Experiment Name: At_42deg_Heat_P Parameter: Organism Value: A. thaliana
  misc_feature: MA Experiment 20000173 PARAMETER Experiment Name: At_42deg_Heat_P Parameter: Plant Line Value: WS
  misc_feature: MA Experiment 20000173 PARAMETER Experiment Name: At_42deg_Heat_P Parameter: Temperature (deg C) Value: 42 vs. 22
  misc_feature: MA Experiment 20000173 PARAMETER Experiment Name: At_42deg_Heat_P Parameter: Timepoint (hr) Value: 6
  misc_feature: MA Experiment 20000173 PARAMETER Experiment Name: At_42deg_Heat_P Parameter: Tissue Value: Aerial
  misc_feature: MA Experiment ID: 20000182 Result: Up-regulated in Transcription
  misc_feature: MA Experiment 20000182 PARAMETER Experiment Name: At_2mM_SA_P Parameter: Age (day) Value: 14
  misc_feature: MA Experiment 20000182 PARAMETER Experiment Name: At_2mM_SA_P Parameter: Organism Value: A. thaliana
  misc_feature: MA Experiment 20000182 PARAMETER Experiment Name: At_2mM_SA_P Parameter: Plant Line Value: WS
  misc_feature: MA Experiment 20000182 PARAMETER Experiment Name: At_2mM_SA_P Parameter: Timepoint (hr) Value: 6
  misc_feature: MA Experiment 20000182 PARAMETER Experiment Name: At_2mM_SA_P Parameter: Tissue Value: Aerial
  misc_feature: MA Experiment 20000182 PARAMETER Experiment Name: At_2mM_SA_P Parameter: Treatment Value: 2mM SA vs. No Treatment
  misc_feature: MA Experiment ID: 20000184 Result: Down-regulated in Transcription
  misc_feature: MA Experiment 20000184 PARAMETER Experiment Name: At_Shoots__P Parameter: Age (day) Value: 7
  misc_feature: MA Experiment 20000184 PARAMETER Experiment Name: At_Shoots__P Parameter: Tissue Value: Shoots vs. Whole Plant
  misc_feature: MA Experiment ID: 20000234 Result: Down-regulated in Transcription
  misc_feature: MA Experiment 20000234 PARAMETER Experiment Name: At_Siliques_P Parameter: Age (day) Value: 21
  misc_feature: MA Experiment 20000234 PARAMETER Experiment Name: At_Siliques_P Parameter: Organism Value: A. thaliana
  misc_feature: MA Experiment 20000234 PARAMETER Experiment Name: At_Siliques_P Parameter: Plant Line Value: WS
  misc_feature: MA Experiment 20000234 PARAMETER Experiment Name: At_Siliques_P Parameter: Tissue Value: Less Than 5mm Siliques vs. Whole Plant
  misc_feature: MA Experiment ID: 20000235 Result: Down-regulated in Transcription
  misc_feature: MA Experiment 20000235 PARAMETER Experiment Name: At_Siliques_P Parameter: Age (day) Value: 21
  misc_feature: MA Experiment 20000235 PARAMETER Experiment Name: At_Siliques_P Parameter: Organism Value: A. thaliana
  misc_feature: MA Experiment 20000235 PARAMETER Experiment Name: At_Siliques_P Parameter: Plant Line Value: WS
  misc_feature: MA Experiment 20000235 PARAMETER Experiment Name: At_Siliques_P Parameter: Tissue Value: 5-10mm Siliques vs. Whole Plant
  misc_feature: MA Experiment ID: 20000264 Result: Down-regulated in Transcription
  misc_feature: MA Experiment 20000264 PARAMETER Experiment Name: At_Open_Flower_P Parameter: Age (day) Value: 21
  misc_feature: MA Experiment 20000264 PARAMETER Experiment Name: At_Open_Flower_P Parameter: Plant Line Value: WS
  misc_feature: MA Experiment 20000264 PARAMETER Experiment Name: At_Open_Flower_P Parameter: Tissue Value: Open Flower vs. Whole Plant
  misc_feature: MA Experiment ID: 20000265 Result: Down-regulated in Transcription
  misc_feature: MA Experiment 20000265 PARAMETER Experiment Name: At_Open_Flower_P Parameter: Age (day) Value: 21
  misc_feature: MA Experiment 20000265 PARAMETER Experiment Name: At_Open_Flower_P Parameter: Plant Line Value: WS
  misc_feature: MA Experiment 20000265 PARAMETER Experiment Name: At_Open_Flower_P Parameter: Tissue Value: Closed Flower vs. Whole Plant
  misc_feature: MA Experiment ID: 20000286 Result: Down-regulated in Transcription
  misc_feature: MA Experiment 20000286 PARAMETER Experiment Name: At_Open_Flower_P Parameter: Age (day) Value: 21
  misc_feature: MA Experiment 20000286 PARAMETER Experiment Name: At_Open_Flower_P Parameter: Plant Line Value: WS
  misc_feature: MA Experiment 20000286 PARAMETER Experiment Name: At_Open_Flower_P Parameter: Tissue Value: Half Open vs. Whole Plant
  misc_feature: MA Experiment ID: 20000438 Result: Down-regulated in Transcription
  misc_feature: MA Experiment 20000438 PARAMETER Experiment Name: At_Shoots__P Parameter: Age (day) Value: 14
  misc_feature: MA Experiment 20000438 PARAMETER Experiment Name: At_Shoots__P Parameter: Tissue Value: Shoots vs. Whole Plant
  misc_feature: MA Experiment ID: 20000794 Result: Down-regulated in Transcription
  misc_feature: MA Experiment 20000794 PARAMETER Experiment Name: At_Petals_P Parameter: Age (day) Value: 23-25 days
  misc_feature: MA Experiment 20000794 PARAMETER Experiment Name: At_Petals_P Parameter: Plant Line Value: WS
  misc_feature: MA Experiment 20000794 PARAMETER Experiment Name: At_Petals_P Parameter: Tissue Value: Petals vs. Whole plant
  misc_feature: MA Experiment ID: 20001248 Result: Up-regulated in Transcription
  misc_feature: MA Experiment 20001248 PARAMETER Experiment Name: At_Far-red-induction_P Parameter: Age (day) Value: 7
  misc_feature: MA Experiment 20001248 PARAMETER Experiment Name: At_Far-red-induction_P Parameter: Light Value: Far-red vs. White
  misc_feature: MA Experiment 20001248 PARAMETER Experiment Name: At_Far-red-induction_P Parameter: Organism Value: A. thaliana
  misc_feature: MA Experiment 20001248 PARAMETER Experiment Name: At_Far-red-induction_P Parameter: Plant Line Value: Columbia
  misc_feature: MA Experiment 20001248 PARAMETER Experiment Name: At_Far-red-induction_P Parameter: Timepoint (hr) Value: 4
  misc_feature: MA Experiment 20001248 PARAMETER Experiment Name: At_Far-red-induction_P Parameter: Tissue Value: Whole Plant
  misc_feature: MA Experiment ID: 20001557 Result: Down-regulated in Transcription
  misc_feature: MA Experiment 20001557 PARAMETER Experiment Name: At_Drought_Soil_Dry_P Parameter: Age (day) Value: 27
  misc_feature: MA Experiment 20001557 PARAMETER Experiment Name: At_Drought_Soil_Dry_P Parameter: Organism Value: A. thaliana
  misc_feature: MA Experiment 20001557 PARAMETER Experiment Name: At_Drought_Soil_Dry_P Parameter: Plant Line Value: WS
  misc_feature: MA Experiment 20001557 PARAMETER Experiment Name: At_Drought_Soil_Dry_P Parameter: Post Timepoint (hr) Value: 3
  misc_feature: MA Experiment 20001557 PARAMETER Experiment Name: At_Drought_Soil_Dry_P Parameter: Post-Treatment Value: Re-Water vs. No Drought
  misc_feature: MA Experiment 20001557 PARAMETER Experiment Name: At_Drought_Soil_Dry_P Parameter: Timepoint (day) Value: 13
  misc_feature: MA Experiment 20001557 PARAMETER Experiment Name: At_Drought_Soil_Dry_P Parameter: Treatment Value: Drought vs. No Drought
  misc_feature: MA Experiment ID: 20001560 Result: Down-regulated in Transcription
  misc_feature: MA Experiment 20001560 PARAMETER Experiment Name: At_Drought_Soil_Dry_P Parameter: Age (day) Value: 28
  misc_feature: MA Experiment 20001560 PARAMETER Experiment Name: At_Drought_Soil_Dry_P Parameter: Organism Value: A. thaliana
  misc_feature: MA Experiment 20001560 PARAMETER Experiment Name: At_Drought_Soil_Dry_P Parameter: Plant Line Value: WS
  misc_feature: MA Experiment 20001560 PARAMETER Experiment Name: At_Drought_Soil_Dry_P Parameter: Post Timepoint (hr) Value: None
  misc_feature: MA Experiment 20001560 PARAMETER Experiment Name: At_Drought_Soil_Dry_P Parameter: Post-Treatment Value: None
  misc_feature: MA Experiment 20001560 PARAMETER Experiment Name: At_Drought_Soil_Dry_P Parameter: Timepoint (day) Value: 14
  misc_feature: MA Experiment 20001560 PARAMETER Experiment Name: At_Drought_Soil_Dry_P Parameter: Treatment Value: Drought vs. No Drought
  misc_feature: MA Experiment ID: 20001904 Result: Down-regulated in Transcription
  misc_feature: MA Experiment 20001904 PARAMETER Experiment Name: At_Drought_Reproduction_P Parameter: Age (day) Value: 37
  misc_feature: MA Experiment 20001904 PARAMETER Experiment Name: At_Drought_Reproduction_P Parameter: Organism Value: A. thaliana
  misc_feature: MA Experiment 20001904 PARAMETER Experiment Name: At_Drought_Reproduction_P Parameter: Plant Line Value: WS
  misc_feature: MA Experiment 20001904 PARAMETER Experiment Name: At_Drought_Reproduction_P Parameter: Timepoint (day) Value: 7
  misc_feature: MA Experiment 20001904 PARAMETER Experiment Name: At_Drought_Reproduction_P Parameter: Tissue Value: Rosettes
  misc_feature: MA Experiment 20001904 PARAMETER Experiment Name: At_Drought_Reproduction_P Parameter: Treatment Value: Drought vs. No Drought
actgatgaactttcttctgcacttcttctcattaagcctccttgttaaaataatttgagatggcgataggaaacccagaagtagcaactatggggaaggagaacactgaagccgagtcctctaatggaaacgagtctcagttaagttctgacttaacgaagagtcttgatctggctgaagtgaaggaagacgaaaaggataataaccaagaagaagaagatggactgaaagctgaggcttcaacgaagaagaagaagaagaaaagtaaaagcaagaagaagaagagttctcttcaacagactgatcctccttcaattcctgttcttgagctcttcccttctggagattttcctcaaggtgaaatccaacagtacaatgatgataatttgtggagaacaacatctgaagagaagagagagatggagaggctgcaaaagccgatatataactctcttcgccaagcagcggaagttcatcgtcaagttaggaagtatatgagaagtatattgaagcctggaatgttgatgattgatctctgtgagactttagagaacactgttcgtaagttgatatcagagaatggtcttcaagctggtatcgcctttcctacaggatgttcactgaataatgttgctgctcattggacaccaaactctggagataagactgtccttcagtatgatgatgtgatgaagctggattttggaacacatattgatgggcacattgttgattctgcttttacagttgcgttcaatcctatgtttgatcctcttttagcagcctcgcgtgacgcaacatatactggtatcaaggaagccggggtagatgtccggctctgtgatgttggtgctgcagttcaggaggtcatggagtcttatgaggttgaaatcaatggaaaagtctaccaagtcaaaagtatcagaaacctgaatgggcacagcattggacgctatcagatacacgctgaaaaatcagttcctaatgttagaggaggcgagcagacgaaaatggaagagggtgaattatatgccattgaaacttttggatcaacagggaaaggatatgtaagagaagacttagaatgtagccattacatgaaaaactatgatgtgggtcatgtacctttgaggttaccaagggcaaaacaactccttgccactattaacaagaacttctccacgctagccttctgcagacgttatttggaccgccttggtgaaacaaaatacttgatggctttaaagaatctttgtgattctggcataattgagccatgtcctccagtgtgtgatgtcaaaggaagctatatttctcagtttgagcatacaatcctgttgcgaccaacttgcaaagagattatttccaaaggagacgattattgaaatagtgattttcacagaacttgaagcagttgttcttcttgagtttgtataatagttttggaaggctttttaagtcttgtgctcaaatatttgtatgttcttcgaagatgattctaagtataagagcttaggggatccttcatcaattatagctacatgttagctta

SEQ ID NO: 42114 - protein, 441 aa, Arabidopsis thaliana
  peptide (1)..(441): Ceres Seq. ID no. 13645835
  misc_feature (19)..(441): Homolog of NCBI NO: 5803092 NR Description: methionyl aminopeptidase 2
  misc_feature (25)..(441): Homolog of NCBI NO: 1703275 NR Description: Methionine aminopeptidase 2 (MetAP 2) (Peptidase
  misc_feature (28)..(441): Homolog of NCBI NO: 9789873 NR Description: methionine aminopeptidase 2
  misc_feature (13)..(441): Homolog of NCBI NO: 27694969 NR Description: Similar to methionine aminopeptidase 2 [Xenopus
  misc_feature (1)..(441): Homolog of NCBI NO: 11264654 NR Description: hypothetical protein F24G16.260 - Arabidopsis
  misc_feature (1)..(441): Homolog of NCBI NO: 17473819 NR Description: putative protein [Arabidopsis thaliana]
  misc_feature (1)..(441): Homolog of NCBI NO: 18411408 NR Description: methionine aminopeptidase 2 -related [Arabidopsis
  misc_feature (11)..(441): Homolog of NCBI NO: 7435570 NR Description: methionyl aminopeptidase (EC 3.4.11.18) F6E13.31
  misc_feature (1)..(441): Homolog of NCBI NO: 11320962 NR Description: methionine aminopeptidase-like protein
  misc_feature (1)..(441): Homolog of NCBI NO: 18406472 NR Description: methionine aminopeptidase -related [Arabidopsis
MAIGNPEVATMGKENTEAESSNGNESQLSSDLTKSLDLAEVKEDEKDNNQEEEDGLKAEASTKKKKKKSKSKKKKSSLQQTDPPSIPVLELFPSGDFPQGEIQQYNDDNLWRTTSEEKREMERLQKPIYNSLRQAAEVHRQVRKYMRSILKPGMLMIDLCETLENTVRKLISENGLQAGIAFPTGCSLNNVAAHWTPNSGDKTVLQYDDVMKLDFGTHIDGHIVDSAFTVAFNPMFDPLLAASRDATYTGIKEAGVDVRLCDVGAAVQEVMESYEVEINGKVYQVKSIRNLNGHSIGRYQIHAEKSVPNVRGGEQTKMEEGELYAIETFGSTGKGYVREDLECSHYMKNYDVGHVPLRLPRAKQLLATINKNFSTLAFCRRYLDRLGETKYLMALKNLCDSGIIEPCPPVCDVKGSYISQFEHTILLRPTCKEIISKGDDY

SEQ ID NO: 42115 - protein, 431 aa, Arabidopsis thaliana
  peptide (1)..(431): Ceres Seq. ID no. 13645836
  misc_feature (9)..(431): Homolog of NCBI NO: 5803092 NR Description: methionyl aminopeptidase 2
  misc_feature (15)..(431): Homolog of NCBI NO: 1703275 NR Description: Methionine aminopeptidase 2 (MetAP 2) (Peptidase
  misc_feature (18)..(431): Homolog of NCBI NO: 9789873 NR Description: methionine aminopeptidase 2
  misc_feature (3)..(431): Homolog of NCBI NO: 27694969 NR Description: Similar to methionine aminopeptidase 2 [Xenopus
  misc_feature (1)..(431): Homolog of NCBI NO: 11264654 NR Description: hypothetical protein F24G16.260 - Arabidopsis
  misc_feature (1)..(431): Homolog of NCBI NO: 17473819 NR Description: putative protein [Arabidopsis thaliana]
  misc_feature (1)..(431): Homolog of NCBI NO: 18411408 NR Description: methionine aminopeptidase 2 -related [Arabidopsis
  misc_feature (1)..(431): Homolog of NCBI NO: 7435570 NR Description: methionyl aminopeptidase (EC 3.4.11.18) F6E13.31
  misc_feature (1)..(431): Homolog of NCBI NO: 11320962 NR Description: methionine aminopeptidase-like protein
  misc_feature (1)..(431): Homolog of NCBI NO: 18406472 NR Description: methionine aminopeptidase -related [Arabidopsis
MGKENTEAESSNGNESQLSSDLTKSLDLAEVKEDEKDNNQEEEDGLKAEASTKKKKKKSKSKKKKSSLQQTDPPSIPVLELFPSGDFPQGEIQQYNDDNLWRTTSEEKREMERLQKPIYNSLRQAAEVHRQVRKYMRSILKPGMLMIDLCETLENTVRKLISENGLQAGIAFPTGCSLNNVAAHWTPNSGDKTVLQYDDVMKLDFGTHIDGHIVDSAFTVAFNPMFDPLLAASRDATYTGIKEAGVDVRLCDVGAAVQEVMESYEVEINGKVYQVKSIRNLNGHSIGRYQIHAEKSVPNVRGGEQTKMEEGELYAIETFGSTGKGYVREDLECSHYMKNYDVGHVPLRLPRAKQLLATINKNFSTLAFCRRYLDRLGETKYLMALKNLCDSGIIEPCPPVCDVKGSYISQFEHTILLRPTCKEIISKGDDY

SEQ ID NO: 42116 - protein, 321 aa, Arabidopsis thaliana
  peptide (1)..(321): Ceres Seq. ID no. 13645837
  misc_feature (1)..(321): Homolog of NCBI NO: 5803092 NR Description: methionyl aminopeptidase 2
  misc_feature (1)..(321): Homolog of NCBI NO: 1703275 NR Description: Methionine aminopeptidase 2 (MetAP 2) (Peptidase
  misc_feature (1)..(321): Homolog of NCBI NO: 9789873 NR Description: methionine aminopeptidase 2
  misc_feature (1)..(321): Homolog of NCBI NO: 27694969 NR Description: Similar to methionine aminopeptidase 2 [Xenopus
  misc_feature (1)..(321): Homolog of NCBI NO: 11264654 NR Description: hypothetical protein F24G16.260 - Arabidopsis
  misc_feature (1)..(321): Homolog of NCBI NO: 17473819 NR Description: putative protein [Arabidopsis thaliana]
  misc_feature (1)..(321): Homolog of NCBI NO: 18411408 NR Description: methionine aminopeptidase 2 -related [Arabidopsis
  misc_feature (1)..(321): Homolog of NCBI NO: 7435570 NR Description: methionyl aminopeptidase (EC 3.4.11.18) F6E13.31
  misc_feature (1)..(321): Homolog of NCBI NO: 11320962 NR Description: methionine aminopeptidase-like protein
  misc_feature (1)..(321): Homolog of NCBI NO: 18406472 NR Description: methionine aminopeptidase -related [Arabidopsis
MERLQKPIYNSLRQAAEVHRQVRKYMRSILKPGMLMIDLCETLENTVRKLISENGLQAGIAFPTGCSLNNVAAHWTPNSGDKTVLQYDDVMKLDFGTHIDGHIVDSAFTVAFNPMFDPLLAASRDATYTGIKEAGVDVRLCDVGAAVQEVMESYEVEINGKVYQVKSIRNLNGHSIGRYQIHAEKSVPNVRGGEQTKMEEGELYAIETFGSTGKGYVREDLECSHYMKNYDVGHVPLRLPRAKQLLATINKNFSTLAFCRRYLDRLGETKYLMALKNLCDSGIIEPCPPVCDVKGSYISQFEHTILLRPTCKEIISKGDDY

SEQ ID NO: 42117 - DNA, 2548 bp, Arabidopsis thaliana
  misc_feature (1)..(2548): Ceres Seq. ID no. 12337038
  misc_feature: MA Experiment ID: 108434 Result: Up-regulated in Transcription
  misc_feature: MA Experiment 108434 PARAMETER Experiment Name: At_Root_Tips_cDNA_P Parameter: Tissue Value: Root Tips
  misc_feature: MA Experiment ID: 108461 Result: Up-regulated in Transcription
  misc_feature: MA Experiment 108461 PARAMETER Experiment Name: At_Germinating_Seeds_cDNA_P Parameter: Age (day) Value: 1 vs. 0
  misc_feature: MA Experiment 108461 PARAMETER Experiment Name: At_Germinating_Seeds_cDNA_P Parameter: Tissue Value: Germinating Seeds
  misc_feature: MA Experiment ID: 20000166 Result: Down-regulated in Transcription
  misc_feature: MA Experiment 20000166 PARAMETER Experiment Name: At_100uM_ABA_P Parameter: Age (day) Value: 14
  misc_feature: MA Experiment 20000166 PARAMETER Experiment Name: At_100uM_ABA_P Parameter: Organism Value: A. thaliana
  misc_feature: MA Experiment 20000166 PARAMETER Experiment Name: At_100uM_ABA_P Parameter: Plant Line Value: WS
  misc_feature: MA Experiment 20000166 PARAMETER Experiment Name: At_100uM_ABA_P Parameter: Timepoint (hr) Value: 1
  misc_feature: MA Experiment 20000166 PARAMETER Experiment Name: At_100uM_ABA_P Parameter: Tissue Value: Aerial
  misc_feature: MA Experiment 20000166 PARAMETER Experiment Name: At_100uM_ABA_P Parameter: Treatment Value: 100uM ABA vs. No Treatment
  misc_feature: MA Experiment ID: 20000171 Result: Down-regulated in Transcription
  misc_feature: MA Experiment 20000171 PARAMETER Experiment Name: At_42deg_Heat_P Parameter: Age (day) Value: 14
  misc_feature: MA Experiment 20000171 PARAMETER Experiment Name: At_42deg_Heat_P Parameter: Organism Value: A. thaliana
  misc_feature: MA Experiment 20000171 PARAMETER Experiment Name: At_42deg_Heat_P Parameter: Plant Line Value: WS
  misc_feature: MA Experiment 20000171 PARAMETER Experiment Name: At_42deg_Heat_P Parameter: Temperature (deg C) Value: 42 vs. 22
  misc_feature: MA Experiment 20000171 PARAMETER Experiment Name: At_42deg_Heat_P Parameter: Timepoint (hr) Value: 1
  misc_feature: MA Experiment 20000171 PARAMETER Experiment Name: At_42deg_Heat_P Parameter: Tissue Value: Aerial
  misc_feature: MA Experiment ID: 20000179 Result: Up-regulated in Transcription
  misc_feature: MA Experiment 20000179 PARAMETER Experiment Name: At_Germinating_Seeds_P Parameter: Age (hr) Value: 6 vs. 0
  misc_feature: MA Experiment 20000179 PARAMETER Experiment Name: At_Germinating_Seeds_P Parameter: Tissue Value: Germinating Seeds
  misc_feature: MA Experiment ID: 20000180 Result: Up-regulated in Transcription
  misc_feature: MA Experiment 20000180 PARAMETER Experiment Name: At_Germinating_Seeds_P Parameter: Age (hr) Value: 24 vs. 0
  misc_feature: MA Experiment 20000180 PARAMETER Experiment Name: At_Germinating_Seeds_P Parameter: Tissue Value: Germinating Seeds
  misc_feature: MA Experiment ID: 20000224 Result: Up-regulated in Transcription
  misc_feature: MA Experiment ID: 20001451 Result: Down-regulated in Transcription
  misc_feature: MA Experiment 20001451 PARAMETER Experiment Name: At_Far-red-induction_P Parameter: Age (day) Value: 7
  misc_feature: MA Experiment 20001451 PARAMETER Experiment Name: At_Far-red-induction_P Parameter: Light Value: Far-red vs. White
  misc_feature: MA Experiment 20001451 PARAMETER Experiment Name: At_Far-red-induction_P Parameter: Organism Value: A. thaliana
  misc_feature: MA Experiment 20001451 PARAMETER Experiment Name: At_Far-red-induction_P Parameter: Plant Line Value: Columbia
  misc_feature: MA Experiment 20001451 PARAMETER Experiment Name: At_Far-red-induction_P Parameter: Timepoint (hr) Value: 24
  misc_feature: MA Experiment 20001451 PARAMETER Experiment Name: At_Far-red-induction_P Parameter: Tissue Value: Whole Plant
atcatcactctctctctttcgttacagttccctaatcaagcaagttgcatatcacgagctctctcaactctcaatccaatccatctctctctcacgcattttcgtttgtttcttcgttttcctcttttcagattcttctcttcgattcttcacattgataaaacttgtctatggtggttgttacgtcgattgagtagatgaagttcaccggaaaatcaaatttgacggctacattacccgcaactgtcccaaatatcagggctattcatagaaggagagcgcgaaaacccgagcttcactcgtcaacgaagatctggcgtgtctgtcaggaggctaagcaggccggagactcctcaattgaaatcgaaggtggaggatcaaaacattgagcgatgcggcggggttgaagatgatgataacgaggatgatgattgtaataagatgcgttgtcaggaacggagtaggagtgtacggcctgatactgttaggaaacttgctgccggagtgtggcaattgcgagtcccggatgcggtttctagcggcggagataagaggagcaaggatcggttacggtttcaggaaactgctggtcctgctggaaacttgggtcctctgttttattatcaccaccatgatgacaaacattctggctttcaaagcaacaattcaagaaacaagcatagtggattcttgtgtaagcatgagccttcagttccatttccccactgcgcgatggagggagcaacaaaatgggatcccatctgcttggatacaagggatgatgtacaccaaatctatagcaacgtgaagtggaataatcaacaagtgaatgatgtttcattagcttcttctattgaattgaaacttcaggaagctcgtgcttgcatcaaggatcttgagagtgagaagcgatctcagaaaaagaagcttgagcagttcctgaagaaagttagcgaggagagggcagcttggcggagcagagagcatgagaaggtccgagcaattattgatgacatgaaagctgacatgaaccaggaaaagaagactcgtcagagattagaaatcgtcaattcaaaattagtcaatgagcttgcagattcaaagttagcagtaaagcgttacatgcatgattaccaacaggaaaggaaggcaagagaattgatcgaagaagtttgtgatgaactggcaaaggaaatagaagaagataaagctgagattgaagcattgaagagcgaatccatgaatctcagagaggaagtagacgatgaaagaagaatgctgcagatggctgaggtttggcgtgaggaacgtgtccagatgaagcttattgatgccaaagtaacactcgagaacaagtattcacaaatgaacaaactcgtaggagatatggaagccttcctcagttcaagaaatactacaggtgtgaaagaggtgaaagttgcggaattgttaagagaaactgctgcatcagttgataatatccaagaaatcaaggaatttacatatgaaccctcaaagccggacgatatcctcatgttgtttgaacaaatgaacatgggtgaaaaccaggatagagaaatcgagcaatatgttgcctacagtccggtcagccacgcttcaaaagctcacacggtaagtccagatgtcaatttgattaacaaagggagacattcgaatgctttcactgatcagaatggtgaatttgaagaagatgacagtggctgggaaactgtgagccattctgaagaacacggatccagttactctccagatgagagcatccctaatattagcaacactcatcaccgtaacagcaatgtatcgatgaatggaacagagtatgaaaagactctattgagagaaataaaagaagtgtgctcggttccaagacgacaatccaaaaagttaccgtcaatggcaaagctctggagttcattagaaggtatgaatggaagggtatcaaacgcgagaaaatcaaccatggagatggtttcaccagagacaggctcaaacaaaggcggattcaacacattggacctggttggtcaatggagctcatcaccagactcggctaatgctaatttaaatcgaggagggaggaaagggtgcatagagtggccaagaggtgcacataagaacagcttgaagacaaagctcatagaagcacaaatcgagagccaaaaggttcagctgaagcatgtccttgagcataagatctaggccacaacatattccaaaactaccagtcctaggccatactactattctttgtggctgagcagcagaactggatttttgatcccgttctcctgctattgccattgtcgcgtgatctagcgctggtcaagccaatcaacgtggtatattttcgttagctaaaagcaaaatgatctttgtgattgattgctgtcgtagcttggctgggctagctacagccacttaattaccaacaacctcttggttgctaggaacagaggcacaatggtgttttcctttaatgaattttgttcctctttagtccaacgctaggtcaataatatcttctttt

SEQ ID NO: 42118 - protein, 592 aa, Arabidopsis thaliana
  peptide (1)..(592): Ceres Seq. ID no. 12337039
  misc_feature (112)..(311): Pfam Name: Myosin tail Pfam Description: Myosin tail
  misc_feature (124)..(394): Homolog of NCBI NO: 38346645 NR Description: OSJNBa0072D21.15 [Oryza sativa (japonica
  misc_feature (150)..(377): Homolog of NCBI NO: 34394172 NR Description: hypothetical protein [Oryza sativa (japonica
  misc_feature (109)..(346): Homolog of NCBI NO: 18399293 NR Description: expressed protein
  misc_feature (109)..(346): Homolog of NCBI NO: 15724288 NR Description: AT3g11590/F24K9_26 [Arabidopsis thaliana]
  misc_feature (168)..(322): Homolog of NCBI NO: 29367527 NR Description: unknown [Oryza sativa (japonica cultivar-group)]
  misc_feature (1)..(591): Homolog of NCBI NO: 40253811 NR Description: hypothetical protein [Oryza sativa (japonica
  misc_feature (1)..(86): Homolog of NCBI NO: 9294552 NR Description: gene_id:MQC12.9~unknown protein [Arabidopsis
  misc_feature (1)..(532): Homolog of NCBI NO: 38344183 NR Description: OSJNBa0053K19.22 [Oryza sativa (japonica
  misc_feature (1)..(524): Homolog of NCBI NO: 15223613 NR Description: unknown protein; protein id: At1g50660.1
  misc_feature (98)..(592): Homolog of NCBI NO: 9294553 NR Description: gb|AAF00675.1~gene_id:MQC12.10~similar to unknown
MRCQERSRSVRPDTVRKLAAGVWQLRVPDAVSSGGDKRSKDRLRFQETAGPAGNLGPLFYYHHHDDKHSGFQSNNSRNKHSGFLCKHEPSVPFPHCAMEGATKWDPICLDTRDDVHQIYSNVKWNNQQVNDVSLASSIELKLQEARACIKDLESEKRSQKKKLEQFLKKVSEERAAWRSREHEKVRAIIDDMKADMNQEKKTRQRLEIVNSKLVNELADSKLAVKRYMHDYQQERKARELIEEVCDELAKEIEEDKAEIEALKSESMNLREEVDDERRMLQMAEVWREERVQMKLIDAKVTLENKYSQMNKLVGDMEAFLSSRNTTGVKEVKVAELLRETAASVDNIQEIKEFTYEPSKPDDILMLFEQMNMGENQDREIEQYVAYSPVSHASKAHTVSPDVNLINKGRHSNAFTDQNGEFEEDDSGWETVSHSEEHGSSYSPDESIPNISNTHHRNSNVSMNGTEYEKTLLREIKEVCSVPRRQSKKLPSMAKLWSSLEGMNGRVSNARKSTMEMVSPETGSNKGGFNTLDLVGQWSSSPDSANANLNRGGRKGCIEWPRGAHKNSLKTKLIEAQIESQKVQLKHVLEHKI

SEQ ID NO: 42119 - protein, 495 aa, Arabidopsis thaliana
  peptide (1)..(495): Ceres Seq. ID no. 12337040
  misc_feature (15)..(214): Pfam Name: Myosin tail Pfam Description: Myosin tail
  misc_feature (46)..(495): Homolog of NCBI NO: 15223613 NR Description: unknown protein; protein id: At1g50660.1
  misc_feature (27)..(297): Homolog of NCBI NO: 38346645 NR Description: OSJNBa0072D21.15 [Oryza sativa (japonica
  misc_feature (53)..(280): Homolog of NCBI NO: 34394172 NR Description: hypothetical protein [Oryza sativa (japonica
  misc_feature (12)..(249): Homolog of NCBI NO: 18399293 NR Description: expressed protein
  misc_feature (12)..(249): Homolog of NCBI NO: 15724288 NR Description: AT3g11590/F24K9_26 [Arabidopsis thaliana]
  misc_feature (71)..(225): Homolog of NCBI NO: 29367527 NR Description: unknown [Oryza sativa (japonica cultivar-group)]
  misc_feature (1)..(494): Homolog of NCBI NO: 40253811 NR Description: hypothetical protein [Oryza sativa (japonica
  misc_feature (1)..(435): Homolog of NCBI NO: 38344183 NR Description: OSJNBa0053K19.22 [Oryza sativa (japonica
  misc_feature (1)..(427): Homolog of NCBI NO: 15223613 NR Description: unknown protein; protein id: At1g50660.1
  misc_feature (1)..(495): Homolog of NCBI NO: 9294553 NR Description: gb|AAF00675.1~gene_id:MQC12.10~similar to unknown
MEGATKWDPICLDTRDDVHQIYSNVKWNNQQVNDVSLASSIELKLQEARACIKDLESEKRSQKKKLEQFLKKVSEERAAWRSREHEKVRAIIDDMKADMNQEKKTRQRLEIVNSKLVNELADSKLAVKRYMHDYQQERKARELIEEVCDELAKEIEEDKAEIEALKSESMNLREEVDDERRMLQMAEVWREERVQMKLIDAKVTLENKYSQMNKLVGDMEAFLSSRNTTGVKEVKVAELLRETAASVDNIQEIKEFTYEPSKPDDILMLFEQMNMGENQDREIEQYVAYSPVSHASKAHTVSPDVNLINKGRHSNAFTDQNGEFEEDDSGWETVSHSEEHGSSYSPDESIPNISNTHHRNSNVSMNGTEYEKTLLREIKEVCSVPRRQSKKLPSMAKLWSSLEGMNGRVSNARKSTMEMVSPETGSNKGGFNTLDLVGQWSSSPDSANANLNRGGRKGCIEWPRGAHKNSLKTKLIEAQIESQKVQLKHVLEHKI

SEQ ID NO: 42120 - protein, 401 aa, Arabidopsis thaliana
  peptide (1)..(401): Ceres Seq. ID no. 12337041
  misc_feature (1)..(120): Pfam Name: Myosin tail Pfam Description: Myosin tail
  misc_feature (1)..(401): Homolog of NCBI NO: 15223613 NR Description: unknown protein; protein id: At1g50660.1
  misc_feature (1)..(203): Homolog of NCBI NO: 38346645 NR Description: OSJNBa0072D21.15 [Oryza sativa (japonica
  misc_feature (1)..(186): Homolog of NCBI NO: 34394172 NR Description: hypothetical protein [Oryza sativa (japonica
  misc_feature (1)..(155): Homolog of NCBI NO: 18399293 NR Description: expressed protein
  misc_feature (1)..(155): Homolog of NCBI NO: 15724288 NR Description: AT3g11590/F24K9_26 [Arabidopsis thaliana]
  misc_feature (1)..(131): Homolog of NCBI NO: 29367527 NR Description: unknown [Oryza sativa (japonica cultivar-group)]
  misc_feature (1)..(400): Homolog of NCBI NO: 40253811 NR Description: hypothetical protein [Oryza sativa (japonica
  misc_feature (1)..(341): Homolog of NCBI NO: 38344183 NR Description: OSJNBa0053K19.22 [Oryza sativa (japonica
  misc_feature (1)..(333): Homolog of NCBI NO: 15223613 NR Description: unknown protein; protein id: At1g50660.1
  misc_feature (1)..(401): Homolog of NCBI NO: 9294553 NR Description: gb|AAF00675.1~gene_id:MQC12.10~similar to unknown
MKADMNQEKKTRQRLEIVNSKLVNELADSKLAVKRYMHDYQQERKARELIEEVCDELAKEIEEDKAEIEALKSESMNLREEVDDERRMLQMAEVWREERVQMKLIDAKVTLENKYSQMNKLVGDMEAFLSSRNTTGVKEVKVAELLRETAASVDNIQEIKEFTYEPSKPDDILMLFEQMNMGENQDREIEQYVAYSPVSHASKAHTVSPDVNLINKGRHSNAFTDQNGEFEEDDSGWETVSHSEEHGSSYSPDESIPNISNTHHRNSNVSMNGTEYEKTLLREIKEVCSVPRRQSKKLPSMAKLWSSLEGMNGRVSNARKSTMEMVSPETGSNKGGFNTLDLVGQWSSSPDSANANLNRGGRKGCIEWPRGAHKNSLKTKLIEAQIESQKVQLKHVLEHKI

SEQ ID NO: 42121 - DNA, 1505 bp, Arabidopsis thaliana
  misc_feature (1)..(1505): Ceres Seq. ID no. 12395386
  misc_feature: MA Experiment ID: 108434 Result: Down-regulated in Transcription
  misc_feature: MA Experiment 108434 PARAMETER Experiment Name: At_Root_Tips_cDNA_P Parameter: Tissue Value: Root Tips
  misc_feature: MA Experiment ID: 108595 Result: Up-regulated in Transcription
  misc_feature: MA Experiment 108595 PARAMETER Experiment Name: At_Ler-pi_Ovule_cDNA_P Parameter: Plant Line Value: null
  misc_feature: MA Experiment ID: 20000179 Result: Down-regulated in Transcription
  misc_feature: MA Experiment 20000179 PARAMETER Experiment Name: At_Germinating_Seeds_P Parameter: Age (hr) Value: 6 vs. 0
  misc_feature: MA Experiment 20000179 PARAMETER Experiment Name: At_Germinating_Seeds_P Parameter: Tissue Value: Germinating Seeds
  misc_feature: MA Experiment ID: 20000438 Result: Down-regulated in Transcription
  misc_feature: MA Experiment 20000438 PARAMETER Experiment Name: At_Shoots__P Parameter: Age (day) Value: 14
  misc_feature: MA Experiment 20000438 PARAMETER Experiment Name: At_Shoots__P Parameter: Tissue Value: Shoots vs. Whole Plant
  misc_feature: MA Experiment ID: 20000495 Result: Up-regulated in Transcription
  misc_feature: MA Experiment 20000495 PARAMETER Experiment Name: At_Guard_Cells_P Parameter: Harvest Date Value: 8/2/2002
  misc_feature: MA Experiment 20000495 PARAMETER Experiment Name: At_Guard_Cells_P Parameter: Organism Value: A. thaliana
  misc_feature: MA Experiment 20000495 PARAMETER Experiment Name: At_Guard_Cells_P Parameter: Tissue Value: Guard Cells vs. Leaves
  misc_feature: MA Experiment ID: 20001451 Result: Up-regulated in Transcription
  misc_feature: MA Experiment 20001451 PARAMETER Experiment Name: At_Far-red-induction_P Parameter: Age (day) Value: 7
  misc_feature: MA Experiment 20001451 PARAMETER Experiment Name: At_Far-red-induction_P Parameter: Light Value: Far-red vs. White
  misc_feature: MA Experiment 20001451 PARAMETER Experiment Name: At_Far-red-induction_P Parameter: Organism Value: A. thaliana
  misc_feature: MA Experiment 20001451 PARAMETER Experiment Name: At_Far-red-induction_P Parameter: Plant Line Value: Columbia
  misc_feature: MA Experiment 20001451 PARAMETER Experiment Name: At_Far-red-induction_P Parameter: Timepoint (hr) Value: 24
  misc_feature: MA Experiment 20001451 PARAMETER Experiment Name: At_Far-red-induction_P Parameter: Tissue Value: Whole Plant
  misc_feature: MA Experiment ID: 20001906 Result: Down-regulated in Transcription
  misc_feature: MA Experiment 20001906 PARAMETER Experiment Name: At_Drought_Reproduction_P Parameter: Age (day) Value: 35
  misc_feature: MA Experiment 20001906 PARAMETER Experiment Name: At_Drought_Reproduction_P Parameter: Organism Value: A. thaliana
  misc_feature: MA Experiment 20001906 PARAMETER Experiment Name: At_Drought_Reproduction_P Parameter: Plant Line Value: WS
  misc_feature: MA Experiment 20001906 PARAMETER Experiment Name: At_Drought_Reproduction_P Parameter: Timepoint (day) Value: 5
  misc_feature: MA Experiment 20001906 PARAMETER Experiment Name: At_Drought_Reproduction_P Parameter: Tissue Value: Siliques
  misc_feature: MA Experiment 20001906 PARAMETER Experiment Name: At_Drought_Reproduction_P Parameter: Treatment Value: Drought vs. No Drought
atatcgtcccaaaaaaagcaaaagtccaaaaaaaacaactccaaaacattccctcttagctctttactctttagtttctctctctctctgcctttctctttgttgaagttcatggatgctacgaagtggactcagggttttcaagaaatgataaacgtaaagccaatggagcaaatgatttctagcaccaacaacaacacaccgcaacaacaaccaacattcatcgccaccaacacaaggccaaacgccaccgcatccaatggtggctccggaggaaataccaacaacacggctacgatggaaactagaaaggcgaggccacaagagaaagtaaattgtccaagatgcaactcaacaaacacaaagttctgttattacaacaactacagtctcacgcaaccaagatacttctgcaaaggttgtcgaaggtattggaccgaaggtggctctcttcgtaacgtcccagtcggaggtagctcaagaaagaacaagagatcctctacacctttagcttcaccttctaatcccaaacttccagatctaaacccaccgattcttttctcaagccaaatccctaataagtcaaataaagatctcaacttgctatctttcccggtcatgcaagatcatcatcatcatgctcttgagcttctaagatccaatggagtctcttcaagaggcatgaacacgttcttgcctggtcaaatgatggattcaaactcagtcctgtactcatctttagggtttccaacaatgcctgattacaaacagagtaataacaacctttcattctccattgatcatcatcaagggattggacataacaccatcaacagtaaccaaagagctcaagataacaatgatgacatgaatggagcaagtagggttttgttccctttttcagacatgaaagagctttcaagcacaacccaagagaagagtcatggtaataatacatactggaatgggatgttcagtaatacaggaggatcttcatggtgaaaaaaggttaaaaagagctcatgaactattagctttcttctctttttctgtttttttctcctattttattatagtttttactttgatgatcttttgttttttctcacatggggaactttacttaaagttgtcagaacttagtttacagattgtctttttattccttctttctggttttttttttttttttttcctttttaatcagtctttttaaaatatgtatttcataattgggtttgatcattcatatttattagtatcaaaatagagtctatgttcatgagggagtgtttaggggtgtgagggtagaagaataagtgaatacgagggcttcgtgtggcatcagtgagatctgtattcatcatttcttctatttgtagaagtatttctgtaatttattcatatttttcaaaaaaaaatattcatctttatatccaatcattatccgattgaaattaaaattgtgttaaccctaagcttgaatagattgttttaatttgttg

SEQ ID NO: 42122 - protein, 333 aa, Arabidopsis thaliana
  peptide (1)..(333): Ceres Seq. ID no. 12395387
  misc_feature (106)..(168): Pfam Name: Dof domain, zinc finger Pfam Description: Dof domain, zinc finger
  misc_feature (103)..(273): Homolog of NCBI NO: 7489124 NR Description: finger protein BBF1.1 - common tobacco (fragment)
  misc_feature (60)..(333): Homolog of NCBI NO: 25352302 NR Description: hypothetical protein AT4g00940 [imported] -
  misc_feature (58)..(333): Homolog of NCBI NO: 22328198 NR Description: Dof zinc finger protein; protein id: At4g00940.1
  misc_feature (58)..(333): Homolog of NCBI NO: 7485287 NR Description: hypothetical protein A_TM018A10.2 - Arabidopsis
  misc_feature (103)..(331): Homolog of NCBI NO: 7489130 NR Description: finger protein Dof - common tobacco (fragment)
  misc_feature (51)..(319): Homolog of NCBI NO: 25352313 NR Description: probable DOF zinc finger protein
  misc_feature (50)..(319): Homolog of NCBI NO: 30690446 NR Description: Dof zinc finger protein [Arabidopsis thaliana]
  misc_feature (38)..(319): Homolog of NCBI NO: 24211633 NR Description: DOF zinc finger protein DAG2 (Dof affecting
  misc_feature (50)..(333): Homolog of NCBI NO: 30695501 NR Description: Dof zinc finger transcription factor (DAG1)
  misc_feature (38)..(333): Homolog of NCBI NO: 15228621 NR Description: Dof zinc finger transcription factor, DAG1/BBFa
ISSQKKQKSKKNNSKTFPLSSLLFSFSLSLPFSLLKFMDATKWTQGFQEMINVKPMEQMISSTNNNTPQQQPTFIATNTRPNATASNGGSGGNTNNTATMETRKARPQEKVNCPRCNSTNTKFCYYNNYSLTQPRYFCKGCRRYWTEGGSLRNVPVGGSSRKNKRSSTPLASPSNPKLPDLNPPILFSSQIPNKSNKDLNLLSFPVMQDHHHHALELLRSNGVSSRGMNTFLPGQMMDSNSVLYSSLGFPTMPDYKQSNNNLSFSIDHHQGIGHNTINSNQRAQDNNDDMNGASRVLFPFSDMKELSSTTQEKSHGNNTYWNGMFSNTGGSSW

SEQ ID NO: 42123 - protein, 296 aa, Arabidopsis thaliana
  peptide (1)..(296): Ceres Seq. ID no. 12395388
  misc_feature (69)..(131): Pfam Name: Dof domain, zinc finger Pfam Description: Dof domain, zinc finger
  misc_feature (66)..(236): Homolog of NCBI NO: 7489124 NR Description: finger protein BBF1.1 - common tobacco (fragment)
  misc_feature (23)..(296): Homolog of NCBI NO: 25352302 NR Description: hypothetical protein AT4g00940 [imported] -
  misc_feature (21)..(296): Homolog of NCBI NO: 22328198 NR Description: Dof zinc finger protein; protein id: At4g00940.1
  misc_feature (21)..(296): Homolog of NCBI NO: 7485287 NR Description: hypothetical protein A_TM018A10.2 - Arabidopsis
  misc_feature (66)..(294): Homolog of NCBI NO: 7489130 NR Description: finger protein Dof - common tobacco (fragment)
  misc_feature (14)..(282): Homolog of NCBI NO: 25352313 NR Description: probable DOF zinc finger protein
  misc_feature (13)..(282): Homolog of NCBI NO: 30690446 NR Description: Dof zinc finger protein [Arabidopsis thaliana]
  misc_feature (1)..(282): Homolog of NCBI NO: 24211633 NR Description: DOF zinc finger protein DAG2 (Dof affecting
  misc_feature (13)..(296): Homolog of NCBI NO: 30695501 NR Description: Dof zinc finger transcription factor (DAG1)
  misc_feature (1)..(296): Homolog of NCBI NO: 15228621 NR Description: Dof zinc finger transcription factor, DAG1/BBFa
MDATKWTQGFQEMINVKPMEQMISSTNNNTPQQQPTFIATNTRPNATASNGGSGGNTNNTATMETRKARPQEKVNCPRCNSTNTKFCYYNNYSLTQPRYFCKGCRRYWTEGGSLRNVPVGGSSRKNKRSSTPLASPSNPKLPDLNPPILFSSQIPNKSNKDLNLLSFPVMQDHHHHALELLRSNGVSSRGMNTFLPGQMMDSNSVLYSSLGFPTMPDYKQSNNNLSFSIDHHQGIGHNTINSNQRAQDNNDDMNGASRVLFPFSDMKELSSTTQEKSHGNNTYWNGMFSNTGGSSW

SEQ ID NO: 42124 - protein, 284 aa, Arabidopsis thaliana
  peptide (1)..(284): Ceres Seq. ID no. 12395389
  misc_feature (57)..(119): Pfam Name: Dof domain, zinc finger Pfam Description: Dof domain, zinc finger
  misc_feature (54)..(224): Homolog of NCBI NO: 7489124 NR Description: finger protein BBF1.1 - common tobacco (fragment)
  misc_feature (11)..(284): Homolog of NCBI NO: 25352302 NR Description: hypothetical protein AT4g00940 [imported] -
  misc_feature (9)..(284): Homolog of NCBI NO: 22328198 NR Description: Dof zinc finger protein; protein id: At4g00940.1
  misc_feature (9)..(284): Homolog of NCBI NO: 7485287 NR Description: hypothetical protein A_TM018A10.2 - Arabidopsis
  misc_feature (54)..(282): Homolog of NCBI NO: 7489130 NR Description: finger protein Dof - common tobacco (fragment)
  misc_feature (2)..(270): Homolog of NCBI NO: 25352313 NR Description: probable DOF zinc finger protein
  misc_feature (1)..(270): Homolog of NCBI NO: 30690446 NR Description: Dof zinc finger protein [Arabidopsis thaliana]
  misc_feature (1)..(270): Homolog of NCBI NO: 24211633 NR Description: DOF zinc finger protein DAG2 (Dof affecting
  misc_feature (1)..(284): Homolog of NCBI NO: 30695501 NR Description: Dof zinc finger transcription factor (DAG1)
  misc_feature (1)..(284): Homolog of NCBI NO: 15228621 NR Description: Dof zinc finger transcription factor, DAG1/BBFa
MINVKPMEQMISSTNNNTPQQQPTFIATNTRPNATASNGGSGGNTNNTATMETRKARPQEKVNCPRCNSTNTKFCYYNNYSLTQPRYFCKGCRRYWTEGGSLRNVPVGGSSRKNKRSSTPLASPSNPKLPDLNPPILFSSQIPNKSNKDLNLLSFPVMQDHHHHALELLRSNGVSSRGMNTFLPGQMMDSNSVLYSSLGFPTMPDYKQSNNNLSFSIDHHQGIGHNTINSNQRAQDNNDDMNGASRVLFPFSDMKELSSTTQEKSHGNNTYWNGMFSNTGGSSW

SEQ ID NO: 42125 - DNA, 1249 bp, Arabidopsis thaliana
  misc_feature (1)..(1249): Ceres Seq. ID no. 12361241
  misc_feature: MA Experiment ID: 108434 Result: Down-regulated in Transcription
  misc_feature: MA Experiment 108434 PARAMETER Experiment Name: At_Root_Tips_cDNA_P Parameter: Tissue Value: Root Tips
  misc_feature: MA Experiment ID: 108569 Result: Up-regulated in Transcription
  misc_feature: MA Experiment 108569 PARAMETER Experiment Name: At_0.001%_MeJA__cDNA_P Parameter: Timepoint (hr) Value: 6
  misc_feature: MA Experiment 108569 PARAMETER Experiment Name: At_0.001%_MeJA__cDNA_P Parameter: Tissue Value: Aerial
  misc_feature: MA Experiment 108569 PARAMETER Experiment Name: At_0.001%_MeJA__cDNA_P Parameter: Treatment Value: 0.001% MeJA vs. No Treatment
  misc_feature: MA Experiment ID: 108573 Result: Up-regulated in Transcription
  misc_feature: MA Experiment 108573 PARAMETER Experiment Name: At_Drought_cDNA_P Parameter: Timepoint (hr) Value: 6
  misc_feature: MA Experiment 108573 PARAMETER Experiment Name: At_Drought_cDNA_P Parameter: Tissue Value: Aerial
  misc_feature: MA Experiment 108573 PARAMETER Experiment Name: At_Drought_cDNA_P Parameter: Treatment Value: Drought vs. No Drought
  misc_feature: MA Experiment ID: 108577 Result: Up-regulated in Transcription
  misc_feature: MA Experiment 108577 PARAMETER Experiment Name: At_42deg_Heat_cDNA_P Parameter: Temperature (deg C) Value: 42 vs. 22
  misc_feature: MA Experiment 108577 PARAMETER Experiment Name: At_42deg_Heat_cDNA_P Parameter: Timepoint (hr) Value: 6
  misc_feature: MA Experiment 108577 PARAMETER Experiment Name: At_42deg_Heat_cDNA_P Parameter: Tissue Value: Aerial
  misc_feature: MA Experiment ID: 20000111 Result: Up-regulated in Transcription
  misc_feature: MA Experiment 20000111 PARAMETER Experiment Name: At_42deg_Heat_cDNA_P Parameter: Temperature (deg C) Value: 42 vs. 22
  misc_feature: MA Experiment 20000111 PARAMETER Experiment Name: At_42deg_Heat_cDNA_P Parameter: Timepoint (hr) Value: 6
  misc_feature: MA Experiment 20000111 PARAMETER Experiment Name: At_42deg_Heat_cDNA_P Parameter: Tissue Value: Aerial
  misc_feature: MA Experiment ID: 20000112 Result: Up-regulated in Transcription
  misc_feature: MA Experiment 20000112 PARAMETER Experiment Name: At_42deg_Heat_cDNA_P Parameter: Temperature (deg C) Value: 42 vs. 22
  misc_feature: MA Experiment 20000112 PARAMETER Experiment Name: At_42deg_Heat_cDNA_P Parameter: Timepoint (hr) Value: 2
  misc_feature: MA Experiment 20000112 PARAMETER Experiment Name: At_42deg_Heat_cDNA_P Parameter: Tissue Value: Aerial
  misc_feature: MA Experiment ID: 20000113 Result: Up-regulated in Transcription
  misc_feature: MA Experiment 20000113 PARAMETER Experiment Name: At_42deg_Heat_cDNA_P Parameter: Temperature (deg C) Value: 42 vs. 22
  misc_feature: MA Experiment 20000113 PARAMETER Experiment Name: At_42deg_Heat_cDNA_P Parameter: Timepoint (hr) Value: 8
  misc_feature: MA Experiment 20000113 PARAMETER Experiment Name: At_42deg_Heat_cDNA_P Parameter: Tissue Value: Aerial
  misc_feature: MA Experiment ID: 20000173 Result: Up-regulated in Transcription
  misc_feature: MA Experiment 20000173 PARAMETER Experiment Name: At_42deg_Heat_P Parameter: Age (day) Value: 14
  misc_feature: MA Experiment 20000173 PARAMETER Experiment Name: At_42deg_Heat_P Parameter: Organism Value: A. thaliana
  misc_feature: MA Experiment 20000173 PARAMETER Experiment Name: At_42deg_Heat_P Parameter: Plant Line Value: WS
  misc_feature: MA Experiment 20000173 PARAMETER Experiment Name: At_42deg_Heat_P Parameter: Temperature (deg C) Value: 42 vs. 22
  misc_feature: MA Experiment 20000173 PARAMETER Experiment Name: At_42deg_Heat_P Parameter: Timepoint (hr) Value: 6
  misc_feature: MA Experiment 20000173 PARAMETER Experiment Name: At_42deg_Heat_P Parameter: Tissue Value: Aerial
  misc_feature: MA Experiment ID: 20000527 Result: Down-regulated in Transcription
  misc_feature: MA Experiment 20000527 PARAMETER Experiment Name: At_10percent_PEG_P Parameter: Age (day) Value: 20
  misc_feature: MA Experiment 20000527 PARAMETER Experiment Name: At_10percent_PEG_P Parameter: Organism Value: A. thaliana
  misc_feature: MA Experiment 20000527 PARAMETER Experiment Name: At_10percent_PEG_P Parameter: Plant Line Value: WS
  misc_feature: MA Experiment 20000527 PARAMETER Experiment Name: At_10percent_PEG_P Parameter: Timepoint (day) Value: 20
  misc_feature: MA Experiment 20000527 PARAMETER Experiment Name: At_10percent_PEG_P Parameter: Tissue Value: Whole Plant
  misc_feature: MA Experiment 20000527 PARAMETER Experiment Name: At_10percent_PEG_P Parameter: Treatment Value: 10percent PEG vs. No Treatment
  misc_feature: MA Experiment ID: 20001905 Result: Up-regulated in Transcription
  misc_feature: MA Experiment 20001905 PARAMETER Experiment Name: At_Drought_Reproduction_P Parameter: Age (day) Value: 40
  misc_feature: MA Experiment 20001905 PARAMETER Experiment Name: At_Drought_Reproduction_P Parameter: Organism Value: A. thaliana
  misc_feature: MA Experiment 20001905 PARAMETER Experiment Name: At_Drought_Reproduction_P Parameter: Plant Line Value: WS
  misc_feature: MA Experiment 20001905 PARAMETER Experiment Name: At_Drought_Reproduction_P Parameter: Timepoint (day) Value: 10
  misc_feature: MA Experiment 20001905 PARAMETER Experiment Name: At_Drought_Reproduction_P Parameter: Tissue Value: Rosettes
  misc_feature: MA Experiment 20001905 PARAMETER Experiment Name: At_Drought_Reproduction_P Parameter: Treatment Value: Drought vs. No Drought
atcaaaagtctaagctactctgcaattcatttgccggcgaaaattctcagctaaaaaatggatcaagagtgtccctttgctgccgaaagcataatccagaaatgccctttcctgagaaacatcaacaagcctaccaatttgtccttctcctccttgagttttccaattccggtgcaaggaggtaaaggtcctatttttgaagatggtcctggatttgattcagcattcaagctcttccatgggaaagatggtattgtgccgctttctggtttcgctgatgattctgaagatgaggcgggtcgtcgtgctctgcaattcaatccacttgctggtaaggtagctacaataagcctatcagcttttggtcctggaggcccttttggttttggtcctttctcagagaaatggaagaaacaacagaagaaacctaaaccttccaaaaaccaacagtctggggactcttcgaaacatgaggcagttggagacgaatggttaaaaaccgggaattgtcctatcgccaagtcttttagagctgcaagcaaagtcatgcctcttatttctaaagcattaacgctaccacctggtatgaaatatagatgtccagctcctatagtagctgctagagctgcactttcgaagactgctttggtcaaaagtcttcgccctcagcctttacctgaaaagatgcttgcaatcgctctcatgggaatggctgcaaatgtgcctctaggtgtatggagagaacacacaaagaagttttcgcctgcatggtttttggctgtccatgctgctgtgccttttatagcaatgcttaggaaatctgttctgatgcccaaaacagccatggctttgaccattggagcttcgatcttgggacaggtgattgggtcaagagctgagcgttaccgtctcaaagcagtagctgagaaaatggttcctgtaaccgctatggtttctggatacaaccagagccctggcgactcaggcatttctgggggacattgtggtataggggagggagtgaagcaggtttattacaatgtaaatattggagagtctgctaaatcaactggactctgttattgagagaatgttcttattgatttcagaaactacaaattactatgtaaggattggatatttgtgtgtgagggaaggtttttgtaattcagtgaattgtgtaaaccataacaatggtgtcgttttatcccttcaaaatgggtctaaataaaaggttaataattccctc

SEQ ID NO: 42126 - protein, 342 aa, Arabidopsis thaliana
  peptide (1)..(342): Ceres Seq. ID no. 12361242
  misc_feature (13)..(132): Homolog of NCBI NO: 33146734 NR Description: unknown protein [Oryza sativa (japonica
  misc_feature (52)..(342): Homolog of NCBI NO: 33146734 NR Description: unknown protein [Oryza sativa (japonica
  misc_feature (13)..(290): Homolog of NCBI NO: 37537220 NR Description: unknown protein [Oryza sativa (japonica
  misc_feature (7)..(123): Homolog of NCBI NO: 34897958 NR Description: contains ESTs AU068434(C30250)~similar to Oryza sativa chromosome 7,
  misc_feature (130)..(342): Homolog of NCBI NO: 34897958 NR Description: contains ESTs AU068434(C30250)~similar to Oryza sativa chromosome 7,
  misc_feature (4)..(317): Homolog of NCBI NO: 15234866 NR Description: putative protein
  misc_feature (12)..(342): Homolog of NCBI NO: 21954084 NR Description: unknown protein [Arabidopsis thaliana]
  misc_feature (1)..(342): Homolog of NCBI NO: 21595083 NR Description: unknown [Arabidopsis thaliana]
  misc_feature (1)..(342): Homolog of NCBI NO: 30694759 NR Description: expressed protein [Arabidopsis thaliana]
MDQECPFAAESIIQKCPFLRNINKPTNLSFSSLSFPIPVQGGKGPIFEDGPGFDSAFKLFHGKDGIVPLSGFADDSEDEAGRRALQFNPLAGKVATISLSAFGPGGPFGFGPFSEKWKKQQKKPKPSKNQQSGDSSKHEAVGDEWLKTGNCPIAKSFRAASKVMPLISKALTLPPGMKYRCPAPIVAARAALSKTALVKSLRPQPLPEKMLAIALMGMAANVPLGVWREHTKKFSPAWFLAVHAAVPFIAMLRKSVLMPKTAMALTIGASILGQVIGSRAERYRLKAVAEKMVPVTAMVSGYNQSPGDSGISGGHCGIGEGVKQVYYNVNIGESAKSTGLCY

SEQ ID NO: 42127 - protein, 179 aa, Arabidopsis thaliana
  peptide (1)..(179): Ceres Seq. ID no. 12361243
  misc_feature (1)..(179): Homolog of NCBI NO: 33146734 NR Description: unknown protein [Oryza sativa (japonica
  misc_feature (1)..(127): Homolog of NCBI NO: 37537220 NR Description: unknown protein [Oryza sativa (japonica
  misc_feature (1)..(179): Homolog of NCBI NO: 34897958 NR Description: contains ESTs AU068434(C30250)~similar to Oryza sativa chromosome 7,
  misc_feature (1)..(154): Homolog of NCBI NO: 15234866 NR Description: putative protein
  misc_feature (1)..(179): Homolog of NCBI NO: 21954084 NR Description: unknown protein [Arabidopsis thaliana]
  misc_feature (1)..(179): Homolog of NCBI NO: 21595083 NR Description: unknown [Arabidopsis thaliana]
  misc_feature (1)..(179): Homolog of NCBI NO: 30694759 NR Description: expressed protein [Arabidopsis thaliana]
MPLISKALTLPPGMKYRCPAPIVAARAALSKTALVKSLRPQPLPEKMLAIALMGMAANVPLGVWREHTKKFSPAWFLAVHAAVPFIAMLRKSVLMPKTAMALTIGASILGQVIGSRAERYRLKAVAEKMVPVTAMVSGYNQSPGDSGISGGHCGIGEGVKQVYYNVNIGESAKSTGLCY

SEQ ID NO: 42128 - DNA, 1016 bp, Arabidopsis thaliana
  misc_feature (1)..(1016): Ceres Seq. ID no. 12482777
  misc_feature: MA Experiment ID: 108461 Result: Up-regulated in Transcription
  misc_feature: MA Experiment 108461 PARAMETER Experiment Name: At_Germinating_Seeds_cDNA_P Parameter: Age (day) Value: 1 vs. 0
  misc_feature: MA Experiment 108461 PARAMETER Experiment Name: At_Germinating_Seeds_cDNA_P Parameter: Tissue Value: Germinating Seeds
  misc_feature: MA Experiment ID: 108463 Result: Down-regulated in Transcription
  misc_feature: MA Experiment 108463 PARAMETER Experiment Name: At_Germinating_Seeds_cDNA_P Parameter: Age (day) Value: 3 vs. 0
  misc_feature: MA Experiment 108463 PARAMETER Experiment Name: At_Germinating_Seeds_cDNA_P Parameter: Tissue Value: Germinating Seeds
  misc_feature: MA Experiment ID: 108464 Result: Down-regulated in Transcription
  misc_feature: MA Experiment 108464 PARAMETER Experiment Name: At_Germinating_Seeds_cDNA_P Parameter: Age (day) Value: 4 vs. 0
  misc_feature: MA Experiment 108464 PARAMETER Experiment Name: At_Germinating_Seeds_cDNA_P Parameter: Tissue Value: Germinating Seeds
  misc_feature: MA Experiment ID: 108585 Result: Down-regulated in Transcription
  misc_feature: MA Experiment 108585 PARAMETER Experiment Name: At_5mM_NaNP_cDNA_P Parameter: Timepoint (hr) Value: 6
  misc_feature: MA Experiment 108585 PARAMETER Experiment Name: At_5mM_NaNP_cDNA_P Parameter: Tissue Value: Aerial
  misc_feature: MA Experiment 108585 PARAMETER Experiment Name: At_5mM_NaNP_cDNA_P Parameter: Treatment Value: null
  misc_feature: MA Experiment ID: 108595 Result: Down-regulated in Transcription
  misc_feature: MA Experiment 108595 PARAMETER Experiment Name: At_Ler-pi_Ovule_cDNA_P Parameter: Plant Line Value: null
  misc_feature: MA Experiment ID: 20000184 Result: Down-regulated in Transcription
  misc_feature: MA Experiment 20000184 PARAMETER Experiment Name: At_Shoots__P Parameter: Age (day) Value: 7
  misc_feature: MA Experiment 20000184 PARAMETER Experiment Name: At_Shoots__P Parameter: Tissue Value: Shoots vs. Whole Plant
  misc_feature: MA Experiment ID: 20000185 Result: Down-regulated in Transcription
  misc_feature: MA Experiment 20000185 PARAMETER Experiment Name: At_Roots__P Parameter: Age (day) Value: 7 vs. 21
  misc_feature: MA Experiment 20000185 PARAMETER Experiment Name: At_Roots__P Parameter: Organism Value: A. thaliana
  misc_feature: MA Experiment 20000185 PARAMETER Experiment Name: At_Roots__P Parameter: Tissue Value: Roots vs. Whole Plant
  misc_feature: MA Experiment ID: 20000234 Result: Up-regulated in Transcription
  misc_feature: MA Experiment 20000234 PARAMETER Experiment Name: At_Siliques_P Parameter: Age (day) Value: 21
  misc_feature: MA Experiment 20000234 PARAMETER Experiment Name: At_Siliques_P Parameter: Organism Value: A. thaliana
  misc_feature: MA Experiment 20000234 PARAMETER Experiment Name: At_Siliques_P Parameter: Plant Line Value: WS
  misc_feature: MA Experiment 20000234 PARAMETER Experiment Name: At_Siliques_P Parameter: Tissue Value: Less Than 5mm Siliques vs. Whole Plant
  misc_feature: MA Experiment ID: 20000265 Result: Up-regulated in Transcription
  misc_feature: MA Experiment 20000265 PARAMETER Experiment Name: At_Open_Flower_P Parameter: Age (day) Value: 21
  misc_feature: MA Experiment 20000265 PARAMETER Experiment Name: At_Open_Flower_P Parameter: Plant Line Value: WS
  misc_feature: MA Experiment 20000265 PARAMETER Experiment Name: At_Open_Flower_P Parameter: Tissue Value: Closed Flower vs. Whole Plant
  misc_feature: MA Experiment ID: 20000439 Result: Down-regulated in Transcription
  misc_feature: MA Experiment 20000439 PARAMETER Experiment Name: At_Roots__P Parameter: Age (day) Value: 14 vs. 21
  misc_feature: MA Experiment 20000439 PARAMETER Experiment Name: At_Roots__P Parameter: Organism Value: A. thaliana
  misc_feature: MA Experiment 20000439 PARAMETER Experiment Name: At_Roots__P Parameter: Tissue Value: Roots vs. Whole Plant
  misc_feature: MA Experiment ID: 20001450 Result: Down-regulated in Transcription
  misc_feature: MA Experiment 20001450 PARAMETER Experiment Name: At_Far-red-induction_P Parameter: Age (day) Value: 7
  misc_feature: MA Experiment 20001450 PARAMETER Experiment Name: At_Far-red-induction_P Parameter: Light Value: Far-red vs. White
  misc_feature: MA Experiment 20001450 PARAMETER Experiment Name: At_Far-red-induction_P Parameter: Organism Value: A. thaliana
  misc_feature: MA Experiment 20001450 PARAMETER Experiment Name: At_Far-red-induction_P Parameter: Plant Line Value: Columbia
  misc_feature: MA Experiment 20001450 PARAMETER Experiment Name: At_Far-red-induction_P Parameter: Timepoint (hr) Value: 8
  misc_feature: MA Experiment 20001450 PARAMETER Experiment Name: At_Far-red-induction_P Parameter: Tissue Value: Whole Plant
  misc_feature: MA Experiment ID: 20001451 Result: Down-regulated in Transcription
  misc_feature: MA Experiment 20001451 PARAMETER Experiment Name: At_Far-red-induction_P Parameter: Age (day) Value: 7
  misc_feature: MA Experiment 20001451 PARAMETER Experiment Name: At_Far-red-induction_P Parameter: Light Value: Far-red vs. White
  misc_feature: MA Experiment 20001451 PARAMETER Experiment Name: At_Far-red-induction_P Parameter: Organism Value: A. thaliana
  misc_feature: MA Experiment 20001451 PARAMETER Experiment Name: At_Far-red-induction_P Parameter: Plant Line Value: Columbia
  misc_feature: MA Experiment 20001451 PARAMETER Experiment Name: At_Far-red-induction_P Parameter: Timepoint (hr) Value: 24
  misc_feature: MA Experiment 20001451 PARAMETER Experiment Name: At_Far-red-induction_P Parameter: Tissue Value: Whole Plant
  misc_feature: MA Experiment ID: 20001556 Result: Up-regulated in Transcription
  misc_feature: MA Experiment 20001556 PARAMETER Experiment Name: At_Drought_Soil_Dry_P Parameter: Age (day) Value: 26
  misc_feature: MA Experiment 20001556 PARAMETER Experiment Name: At_Drought_Soil_Dry_P Parameter: Organism Value: A. thaliana
  misc_feature: MA Experiment 20001556 PARAMETER Experiment Name: At_Drought_Soil_Dry_P Parameter: Plant Line Value: WS
  misc_feature: MA Experiment 20001556 PARAMETER Experiment Name: At_Drought_Soil_Dry_P Parameter: Post Timepoint (hr) Value: None
  misc_feature: MA Experiment 20001556 PARAMETER Experiment Name: At_Drought_Soil_Dry_P Parameter: Post-Treatment Value: None
  misc_feature: MA Experiment 20001556 PARAMETER Experiment Name: At_Drought_Soil_Dry_P Parameter: Timepoint (day) Value: 12
  misc_feature: MA Experiment 20001556 PARAMETER Experiment Name: At_Drought_Soil_Dry_P Parameter: Treatment Value: Drought vs. No Drought
  misc_feature: MA Experiment ID: 20001558 Result: Up-regulated in Transcription
  misc_feature: MA Experiment 20001558 PARAMETER Experiment Name: At_Drought_Soil_Dry_P Parameter: Age (day) Value: 27
  misc_feature: MA Experiment 20001558 PARAMETER Experiment Name: At_Drought_Soil_Dry_P Parameter: Organism Value: A. thaliana
  misc_feature: MA Experiment 20001558 PARAMETER Experiment Name: At_Drought_Soil_Dry_P Parameter: Plant Line Value: WS
  misc_feature: MA Experiment 20001558 PARAMETER Experiment Name: At_Drought_Soil_Dry_P Parameter: Post Timepoint (hr) Value: 6
  misc_feature: MA Experiment 20001558 PARAMETER Experiment Name: At_Drought_Soil_Dry_P Parameter: Post-Treatment Value: Re-Water vs. No Drought
  misc_feature: MA Experiment 20001558 PARAMETER Experiment Name: At_Drought_Soil_Dry_P Parameter: Timepoint (day) Value: 13
  misc_feature: MA Experiment 20001558 PARAMETER Experiment Name: At_Drought_Soil_Dry_P Parameter: Treatment Value: Drought vs. No Drought
  misc_feature: MA Experiment ID: 20001560 Result: Up-regulated in Transcription
  misc_feature: MA Experiment 20001560 PARAMETER Experiment Name: At_Drought_Soil_Dry_P Parameter: Age (day) Value: 28
  misc_feature: MA Experiment 20001560 PARAMETER Experiment Name: At_Drought_Soil_Dry_P Parameter: Organism Value: A. thaliana
  misc_feature: MA Experiment 20001560 PARAMETER Experiment Name: At_Drought_Soil_Dry_P Parameter: Plant Line Value: WS
  misc_feature: MA Experiment 20001560 PARAMETER Experiment Name: At_Drought_Soil_Dry_P Parameter: Post Timepoint (hr) Value: None
  misc_feature: MA Experiment 20001560 PARAMETER Experiment Name: At_Drought_Soil_Dry_P Parameter: Post-Treatment Value: None
  misc_feature: MA Experiment 20001560 PARAMETER Experiment Name: At_Drought_Soil_Dry_P Parameter: Timepoint (day) Value: 14
  misc_feature: MA Experiment 20001560 PARAMETER Experiment Name: At_Drought_Soil_Dry_P Parameter: Treatment Value: Drought vs. No Drought
gttgaatcaaaaataatcagtaacgctttgagtgaagatgatgaatgttgcagtgacagccactccctcgtctctcttgtactctcctctgcttcttccttctcaagggccaaaccggcgaatgcaatggaaaagaaacggaaagagacggttagggacaaaggtggctgtttccggtgttatcacagctggatttgagctgaagccacctccatatcctcttgatgctctggaaccgcatatgagccgggaaaccttggattatcactggggcaaacatcacaaaacttatgtagagaacctgaacaagcaaatcttaggcacggatctagatgcattatccttggaagaagttgtgcttctttcatacaacaaaggcaatatgcttcctgctttcaacaacgctgcacaggcttggaaccacgagttcttctgggagtctatccaacctggaggtggaggaaagccaactggagagctcctcagattaatagaaagagattttgggtctttcgaagagtttttggaaaggttcaagtcggctgcagcttcgaattttggttcgggttggacatggcttgcatataaggcgaatagacttgacgttgcaaatgccgttaatcctctcccaaaggaggaagacaagaaacttgttatagtgaagacgcccaatgcagtaaatccgctcgtatgggattattctccacttctcaccattgatacctgggagcacgcttactatctggattttgagaaccgaagagctgaatacataaatacattcatggaaaagcttgtgtcatgggaaactgtaagcacaaggttggaatccgcaattgctcgagcagtgcaaagagaacaagaaggaacagagacagaagatgaagagaatccagatgatgaagtaccagaggtctatttagatagtgacatcgatgtatctgaggttgactaaaacttgtgaagcaataacattagcatcttaaatgttaattacacagagcaaatttttttgc

SEQ ID NO: 42129 - protein, 305 aa, Arabidopsis thaliana
  peptide (1)..(305): Ceres Seq. ID no. 12482778
  misc_feature (49)..(268): Homolog of NCBI NO: 6840824 NR Description: iron-superoxide dismutase precursor [Vigna
  misc_feature (16)..(300): Homolog of NCBI NO: 3719455 NR Description: iron superoxide dismutase [Zantedeschia
  misc_feature (1)..(300): Homolog of NCBI NO: 16974682 NR Description: Fe-superoxide dismutase precursor [Medicago
  misc_feature (1)..(305): Homolog of NCBI NO: 15241373 NR Description: iron superoxide dismutase, putative
MMNVAVTATPSSLLYSPLLLPSQGPNRRMQWKRNGKRRLGTKVAVSGVITAGFELKPPPYPLDALEPHMSRETLDYHWGKHHKTYVENLNKQILGTDLDALSLEEVVLLSYNKGNMLPAFNNAAQAWNHEFFWESIQPGGGGKPTGELLRLIERDFGSFEEFLERFKSAAASNFGSGWTWLAYKANRLDVANAVNPLPKEEDKKLVIVKTPNAVNPLVWDYSPLLTIDTWEHAYYLDFENRRAEYINTFMEKLVSWETVSTRLESAIARAVQREQEGTETEDEENPDDEVPEVYLDSDIDVSEVD

SEQ ID NO: 42130 - protein, 304 aa, Arabidopsis thaliana
  peptide (1)..(304): Ceres Seq. ID no. 12482779
  misc_feature (48)..(267): Homolog of NCBI NO: 6840824 NR Description: iron-superoxide dismutase precursor [Vigna
  misc_feature (15)..(299): Homolog of NCBI NO: 3719455 NR Description: iron superoxide dismutase [Zantedeschia
  misc_feature (1)..(299): Homolog of NCBI NO: 16974682 NR Description: Fe-superoxide dismutase precursor [Medicago
  misc_feature (1)..(304): Homolog of NCBI NO: 15241373 NR Description: iron superoxide dismutase, putative
MNVAVTATPSSLLYSPLLLPSQGPNRRMQWKRNGKRRLGTKVAVSGVITAGFELKPPPYPLDALEPHMSRETLDYHWGKHHKTYVENLNKQILGTDLDALSLEEVVLLSYNKGNMLPAFNNAAQAWNHEFFWESIQPGGGGKPTGELLRLIERDFGSFEEFLERFKSAAASNFGSGWTWLAYKANRLDVANAVNPLPKEEDKKLVIVKTPNAVNPLVWDYSPLLTIDTWEHAYYLDFENRRAEYINTFMEKLVSWETVSTRLESAIARAVQREQEGTETEDEENPDDEVPEVYLDSDIDVSEVD

SEQ ID NO: 42131 - protein, 277 aa, Arabidopsis thaliana
  peptide (1)..(277): Ceres Seq. ID no. 12482780
  misc_feature (21)..(240): Homolog of NCBI NO: 6840824 NR Description: iron-superoxide dismutase precursor [Vigna
  misc_feature (1)..(272): Homolog of NCBI NO: 3719455 NR Description: iron superoxide dismutase [Zantedeschia
  misc_feature (1)..(272): Homolog of NCBI NO: 16974682 NR Description: Fe-superoxide dismutase precursor [Medicago
  misc_feature (1)..(277): Homolog of NCBI NO: 15241373 NR Description: iron superoxide dismutase, putative
MQWKRNGKRRLGTKVAVSGVITAGFELKPPPYPLDALEPHMSRETLDYHWGKHHKTYVENLNKQILGTDLDALSLEEVVLLSYNKGNMLPAFNNAAQAWNHEFFWESIQPGGGGKPTGELLRLIERDFGSFEEFLERFKSAAASNFGSGWTWLAYKANRLDVANAVNPLPKEEDKKLVIVKTPNAVNPLVWDYSPLLTIDTWEHAYYLDFENRRAEYINTFMEKLVSWETVSTRLESAIARAVQREQEGTETEDEENPDDEVPEVYLDSDIDVSEVD

SEQ ID NO: 42132 - DNA, 1384 bp, Arabidopsis thaliana
  misc_feature (1)..(1384): Ceres Seq. ID no. 12328018
  misc_feature: MA Experiment ID: 108433 Result: Down-regulated in Transcription
  misc_feature: MA Experiment 108433 PARAMETER Experiment Name: At_rhl_Mutant2_cDNA_P Parameter: Age (day) Value: 7
  misc_feature: MA Experiment 108433 PARAMETER Experiment Name: At_rhl_Mutant2_cDNA_P Parameter: Organism Value: A. thaliana
  misc_feature: MA Experiment 108433 PARAMETER Experiment Name: At_rhl_Mutant2_cDNA_P Parameter: Plant Line Value: rhl Mutant vs. wt landsburg
  misc_feature: MA Experiment 108433 PARAMETER Experiment Name: At_rhl_Mutant2_cDNA_P Parameter: Tissue Value: Roots
  misc_feature: MA Experiment ID: 108462 Result: Up-regulated in Transcription
  misc_feature: MA Experiment 108462 PARAMETER Experiment Name: At_Germinating_Seeds_cDNA_P Parameter: Age (day) Value: 2 vs. 0
  misc_feature: MA Experiment 108462 PARAMETER Experiment Name: At_Germinating_Seeds_cDNA_P Parameter: Tissue Value: Germinating Seeds
  misc_feature: MA Experiment ID: 108463 Result: Up-regulated in Transcription
  misc_feature: MA Experiment 108463 PARAMETER Experiment Name: At_Germinating_Seeds_cDNA_P Parameter: Age (day) Value: 3 vs. 0
  misc_feature: MA Experiment 108463 PARAMETER Experiment Name: At_Germinating_Seeds_cDNA_P Parameter: Tissue Value: Germinating Seeds
  misc_feature: MA Experiment ID: 108464 Result: Up-regulated in Transcription
  misc_feature: MA Experiment 108464 PARAMETER Experiment Name: At_Germinating_Seeds_cDNA_P Parameter: Age (day) Value: 4 vs. 0
  misc_feature: MA Experiment 108464 PARAMETER Experiment Name: At_Germinating_Seeds_cDNA_P Parameter: Tissue Value: Germinating Seeds
  misc_feature: MA Experiment ID: 108594 Result: Down-regulated in Transcription
  misc_feature: MA Experiment 108594 PARAMETER Experiment Name: At_Ler-rhl_Root_cDNA_P Parameter: Plant Line Value: null
  misc_feature: MA Experiment ID: 20000227 Result: Down-regulated in Transcription
  misc_feature: MA Experiment 20000227 PARAMETER Experiment Name: At_Root-Tips-vs-Tops_P Parameter: Tissue Value: Root Tips vs. Root Tops
  misc_feature: MA Experiment ID: 20000439 Result: Up-regulated in Transcription
  misc_feature: MA Experiment 20000439 PARAMETER Experiment Name: At_Roots__P Parameter: Age (day) Value: 14 vs. 21
  misc_feature: MA Experiment 20000439 PARAMETER Experiment Name: At_Roots__P Parameter: Organism Value: A. thaliana
  misc_feature: MA Experiment 20000439 PARAMETER Experiment Name: At_Roots__P Parameter: Tissue Value: Roots vs. Whole Plant
  misc_feature: MA Experiment ID: 20001761 Result: Down-regulated in Transcription
  misc_feature: MA Experiment 20001761 PARAMETER Experiment Name: At_50mM_NH4NO3_L-to-H_P Parameter: Timepoint (hr) Value: 4
  misc_feature: MA Experiment 20001761 PARAMETER Experiment Name: At_50mM_NH4NO3_L-to-H_P Parameter: Tissue Value: Siliques
  misc_feature: MA Experiment 20001761 PARAMETER Experiment Name: At_50mM_NH4NO3_L-to-H_P Parameter: Treatment Value: 50mM NH4NO3 vs 100mM Mannitol
  misc_feature: MA Experiment ID: 20001904 Result: Up-regulated in Transcription
  misc_feature: MA Experiment 20001904 PARAMETER Experiment Name: At_Drought_Reproduction_P Parameter: Age (day) Value: 37
  misc_feature: MA Experiment 20001904 PARAMETER Experiment Name: At_Drought_Reproduction_P Parameter: Organism Value: A. thaliana
  misc_feature: MA Experiment 20001904 PARAMETER Experiment Name: At_Drought_Reproduction_P Parameter: Plant Line Value: WS
  misc_feature: MA Experiment 20001904 PARAMETER Experiment Name: At_Drought_Reproduction_P Parameter: Timepoint (day) Value: 7
  misc_feature: MA Experiment 20001904 PARAMETER Experiment Name: At_Drought_Reproduction_P Parameter: Tissue Value: Rosettes
  misc_feature: MA Experiment 20001904 PARAMETER Experiment Name: At_Drought_Reproduction_P Parameter: Treatment Value: Drought vs. No Drought
gtccaaattagagaataagtaactcaagaaggagtgaaatcaacacaaaacacaatgatgatcctaaggctggctctagccatcgtcatctccgcctatgcaaccgcacaaccagcctcaacatcgtcgcttgtaacctatatattcggtgactcgctaaccgaagttggtaacaataatttcttgcagtattcgctagcaagagcagactttccatattatggagttgatttctccggtggtaaagctaccggaagattcaccaacggtcgaactatcggcgatatcatatctacgaagctcgggatactatcaccaccaccatatctatcgttatcacaaaacgacgatgcatttctcagtggtataaactacgcatctggaggagctggaattctcaatgaaactggcatttacttcatccaaaggctaactttcaatgatcaaataaattgtttcaagaaaactaaagaagttattagggcgaaaatcggagatggagctgcgaacaagcatataaatgatgccatgtacttcattggtttgggaagcaacgattatgtaaacaatttcttgcagccatttatggcagatgggcagcaatatacacatgacgagtttgtcgaactcttgacctcaaccctacacaatcagcttacgacaatatacaaattaggagcgaggaaggtaatatttcatgggttaggcccattgggctgtatcccatcacagagagtgaagtcaaagacacgcatgtgcctgaaccgtgtcaacgaatgggtattggaattcaattcaagaacgaagaagctattaatagatctcaacaaacgcctccccggagctaaattctctttcgcagacacttatcccgccgttctcgatctcatcaacaatcccactcactacggatttaagatagcaaacacgtcatgttgcaatgtggacacaagtgttggaggtctttgtcttcccaattccaagatgtgtaaaaaccgtcaagactttgtcttctgggacgcatttcatccgtccgattcggctaatcaaatcctagccgatcatcttttctcttctcttctttcttcctcttctccttctcctgctcctaaaccacgttaatagtttagcatttacaaaaataaaaacagttaaccaatttttgttaaattggacctacttgctatatacatgtgtaactaattttatgttcttgatgtaaccatcaggacaaatatgtgtgttttgttacacacaagtattatatattataagataattatggtttgtatgtatcatgaacacattgttatatatacacatatattcgtgtttagtgtttctagacatgtgttataaataaacatctacaccaattttggtc

SEQ ID NO: 42133 - protein, 355 aa, Arabidopsis thaliana
  peptide (1)..(355): Ceres Seq. ID no. 12328019
  misc_feature (28)..(338): Pfam Name: GDSL-like Lipase/Acylhydrolase Pfam Description: GDSL-like Lipase/Acylhydrolase
  misc_feature (1)..(350): Homolog of NCBI NO: 7485419 NR Description: hypothetical protein F13C5.140 - Arabidopsis
  misc_feature (1)..(338): Homolog of NCBI NO: 34899288 NR Description: similar to GDSL-motif lipase/hydrolase
  misc_feature (1)..(348): Homolog of NCBI NO: 15224005 NR Description: putative GDSL-motif lipase/acylhydrolase; protein
  misc_feature (28)..(338): Homolog of NCBI NO: 15229742 NR Description: putative protein; protein id: At3g50400.1
  misc_feature (29)..(348): Homolog of NCBI NO: 11280578 NR Description: hypothetical protein F14F8_100 - Arabidopsis
  misc_feature (1)..(355): Homolog of NCBI NO: 15227849 NR Description: putative GDSL-motif lipase/hydrolase
  misc_feature (29)..(348): Homolog of NCBI NO: 18417760 NR Description: putative protein
  misc_feature (26)..(352): Homolog of NCBI NO: 15221260 NR Description: putative lipase/acylhydrolase
  misc_feature (1)..(355): Homolog of NCBI NO: 30693137 NR Description: lipase family [Arabidopsis thaliana]
  misc_feature (1)..(355): Homolog of NCBI NO: 21537293 NR Description: GDSL-motif lipase/hydrolase-like protein
MMILRLALAIVISAYATAQPASTSSLVTYIFGDSLTEVGNNNFLQYSLARADFPYYGVDFSGGKATGRFTNGRTIGDIISTKLGILSPPPYLSLSQNDDAFLSGINYASGGAGILNETGIYFIQRLTFNDQINCFKKTKEVIRAKIGDGAANKHINDAMYFIGLGSNDYVNNFLQPFMADGQQYTHDEFVELLTSTLHNQLTTIYKLGARKVIFHGLGPLGCIPSQRVKSKTRMCLNRVNEWVLEFNSRTKKLLIDLNKRLPGAKFSFADTYPAVLDLINNPTHYGFKIANTSCCNVDTSVGGLCLPNSKMCKNRQDFVFWDAFHPSDSANQILADHLFSSLLSSSSPSPAPKPR

SEQ ID NO: 42134 - protein, 354 aa, Arabidopsis thaliana
  peptide (1)..(354): Ceres Seq. ID no. 12328020
  misc_feature (27)..(337): Pfam Name: GDSL-like Lipase/Acylhydrolase Pfam Description: GDSL-like Lipase/Acylhydrolase
  misc_feature (1)..(349): Homolog of NCBI NO: 7485419 NR Description: hypothetical protein F13C5.140 - Arabidopsis
  misc_feature (1)..(337): Homolog of NCBI NO: 34899288 NR Description: similar to GDSL-motif lipase/hydrolase
  misc_feature (1)..(347): Homolog of NCBI NO: 15224005 NR Description: putative GDSL-motif lipase/acylhydrolase; protein
  misc_feature (27)..(337): Homolog of NCBI NO: 15229742 NR Description: putative protein; protein id: At3g50400.1
  misc_feature (28)..(347): Homolog of NCBI NO: 11280578 NR Description: hypothetical protein F14F8_100 - Arabidopsis
  misc_feature (1)..(354): Homolog of NCBI NO: 15227849 NR Description: putative GDSL-motif lipase/hydrolase
  misc_feature (28)..(347): Homolog of NCBI NO: 18417760 NR Description: putative protein
  misc_feature (25)..(351): Homolog of NCBI NO: 15221260 NR Description: putative lipase/acylhydrolase
  misc_feature (1)..(354): Homolog of NCBI NO: 30693137 NR Description: lipase family [Arabidopsis thaliana]
  misc_feature (1)..(354): Homolog of NCBI NO: 21537293 NR Description: GDSL-motif lipase/hydrolase-like protein
MILRLALAIVISAYATAQPASTSSLVTYIFGDSLTEVGNNNFLQYSLARADFPYYGVDFSGGKATGRFTNGRTIGDIISTKLGILSPPPYLSLSQNDDAFLSGINYASGGAGILNETGIYFIQRLTFNDQINCFKKTKEVIRAKIGDGAANKHINDAMYFIGLGSNDYVNNFLQPFMADGQQYTHDEFVELLTSTLHNQLTTIYKLGARKVIFHGLGPLGCIPSQRVKSKTRMCLNRVNEWVLEFNSRTKKLLIDLNKRLPGAKFSFADTYPAVLDLINNPTHYGFKIANTSCCNVDTSVGGLCLPNSKMCKNRQDFVFWDAFHPSDSANQILADHLFSSLLSSSSPSPAPKPR

SEQ ID NO: 42135 - protein, 197 aa, Arabidopsis thaliana
  peptide (1)..(197): Ceres Seq. ID no. 12328021
  misc_feature (1)..(180): Pfam Name: GDSL-like Lipase/Acylhydrolase Pfam Description: GDSL-like Lipase/Acylhydrolase
  misc_feature (1)..(192): Homolog of NCBI NO: 7485419 NR Description: hypothetical protein F13C5.140 - Arabidopsis
  misc_feature (1)..(180): Homolog of NCBI NO: 34899288 NR Description: similar to GDSL-motif lipase/hydrolase
  misc_feature (1)..(190): Homolog of NCBI NO: 15224005 NR Description: putative GDSL-motif lipase/acylhydrolase; protein
  misc_feature (1)..(180): Homolog of NCBI NO: 15229742 NR Description: putative protein; protein id: At3g50400.1
  misc_feature (1)..(190): Homolog of NCBI NO: 11280578 NR Description: hypothetical protein F14F8_100 - Arabidopsis
  misc_feature (1)..(197): Homolog of NCBI NO: 15227849 NR Description: putative GDSL-motif lipase/hydrolase
  misc_feature (1)..(190): Homolog of NCBI NO: 18417760 NR Description: putative protein
  misc_feature (1)..(194): Homolog of NCBI NO: 15221260 NR Description: putative lipase/acylhydrolase
  misc_feature (1)..(197): Homolog of NCBI NO: 30693137 NR Description: lipase family [Arabidopsis thaliana]
  misc_feature (1)..(197): Homolog of NCBI NO: 21537293 NR Description: GDSL-motif lipase/hydrolase-like protein
MYFIGLGSNDYVNNFLQPFMADGQQYTHDEFVELLTSTLHNQLTTIYKLGARKVIFHGLGPLGCIPSQRVKSKTRMCLNRVNEWVLEFNSRTKKLLIDLNKRLPGAKFSFADTYPAVLDLINNPTHYGFKIANTSCCNVDTSVGGLCLPNSKMCKNRQDFVFWDAFHPSDSANQILADHLFSSLLSSSSPSPAPKPR

SEQ ID NO: 42136 - DNA, 1325 bp, Arabidopsis thaliana
  misc_feature (1)..(1325): Ceres Seq. ID no. 13488668
  misc_feature: MA Experiment ID: 108561 Result: Up-regulated in Transcription
  misc_feature: MA Experiment 108561 PARAMETER Experiment Name: At_100uM_ABA_cDNA_P Parameter: Timepoint (hr) Value: 6
  misc_feature: MA Experiment 108561 PARAMETER Experiment Name: At_100uM_ABA_cDNA_P Parameter: Tissue Value: Aerial
  misc_feature: MA Experiment 108561 PARAMETER Experiment Name: At_100uM_ABA_cDNA_P Parameter: Treatment Value: 100uM ABA vs. No Treatment
  misc_feature: MA Experiment ID: 20000179 Result: Up-regulated in Transcription
  misc_feature: MA Experiment 20000179 PARAMETER Experiment Name: At_Germinating_Seeds_P Parameter: Age (hr) Value: 6 vs. 0
  misc_feature: MA Experiment 20000179 PARAMETER Experiment Name: At_Germinating_Seeds_P Parameter: Tissue Value: Germinating Seeds
  misc_feature: MA Experiment ID: 20000184 Result: Down-regulated in Transcription
  misc_feature: MA Experiment 20000184 PARAMETER Experiment Name: At_Shoots__P Parameter: Age (day) Value: 7
  misc_feature: MA Experiment 20000184 PARAMETER Experiment Name: At_Shoots__P Parameter: Tissue Value: Shoots vs. Whole Plant
cggtatgcctagcgatatttttcaacgccattgacgacgctttatataccactgtgactgttcttttagttttgagtatgttaatgatcgcgaggaaagctttggcctcggcgcatactaaggcgtttcgtttggcaacaagggatgtacattgctttagttccatcttagtgtctcctcctctcgtgtcacttgacttgcctgaaaattggattccttactctgatcctccacctcctgtttcctttgagactgaacagaagactgtggtgatagatggtaatgttatcgctgaggaaatcagaacaaagattattagtgaagtggggaagatgaaaaaggctgttggaaaagtccctggtcttgctgttgttttggttggtgaacaaagagactcgcaaacttatgttcgcaacaaaattaaagcttgtgaagaaactggcattaaatctgttttggctgaattaccagaggattgtactgaaggacagattatcagtgtattgagaaaattcaatgaagacacgtctattcacggaattcttgtgcaacttcctttaccccaacatcttaatgaatcaaaaatcttgaatatggtgagattggagaaagatgttgatgggtttcatccattaaacgtggggaatcttgcaatgagagggagggaaccgctgtttgtatcttgcactcctaagggctgtgtggagttgttgataagaacgggtgttgaaatagcaggaaaaaatgctgtggtcataggcagaagcaacatcgttggactaccaatgtctttattattgcaggcatgacgcgacagtaagcacggtgcatgcgtttacaaaggatccagagcacattactaggaaggcggatatcgttatagcagcagcgggtatacctaatttagttcgtggaagttggcttaagcctggagcagttgtcattgatgttggaacaactccagtcgaggatagtagctgtgagtttggttaccgtcttgtcggggatgtatgttacgaggaagcgttaggtgttgcctcggctatcactcccgtaccgggaggagttggacctatgacgatcaccatgctactatgcaatactttggaggctgctaagcggatcttcctctgagtatggtatctctgtctattactaaatatattttgtaatgttagataggagactccatgctgttcgagttattaacgatctcttttgaattattgtataatagacctggcgattgtgatgccatggtttatcctaactcatcagcatctttagcatcaagttcaactaaacaagtattcatgttttcgttt

SEQ ID NO: 42137 - protein, 268 aa, Arabidopsis thaliana
  peptide (1)..(268): Ceres Seq. ID no. 13488669
  misc_feature (208)..(267): Pfam Name: Tetrahydrofolate dehydrogenase/cyclohydrolase, Pfam Description: Tetrahydrofolate dehydrogenase/cyclohydrolase,
  misc_feature (90)..(266): Homolog of NCBI NO: 16803400 NR Description: highly similar to methylenetetrahydrofolate
  misc_feature (122)..(267): Homolog of NCBI NO: 15236884 NR Description: tetrahydrofolate dehydrogenase/cyclohydrolase,
  misc_feature (90)..(266): Homolog of NCBI NO: 12083525 NR Description: similar to Pisum sativum
  misc_feature (90)..(266): Homolog of NCBI NO: 11252953 NR Description: methylenetetrahydrofolate dehydrogenase (NADP)
  misc_feature (90)..(266): Homolog of NCBI NO: 15230449 NR Description: tetrahydrofolate dehydrogenase/cyclohydrolase,
  misc_feature (90)..(266): Homolog of NCBI NO: 21553669 NR Description: 5,10-methylenetetrahydrofolate
  misc_feature (74)..(267): Homolog of NCBI NO: 15236888 NR Description: tetrahydrofolate dehydrogenase/cyclohydrolase,
  misc_feature (26)..(268): Homolog of NCBI NO: 28393825 NR Description: putative methylenetetrahydrofolate dehydrogenase
  misc_feature (28)..(267): Homolog of NCBI NO: 25284864 NR Description: methylenetetrahydrofolate dehydrogenase
  misc_feature (26)..(267): Homolog of NCBI NO: 30687594 NR Description: tetrahydrofolate dehydrogenase/cyclohydrolase,
VCLAIFFNAIDDALYTTVTVLLVLSMLMIARKALASAHTKAFRLATRDVHCFSSILVSPPLVSLDLPENWIPYSDPPPPVSFETEQKTVVIDGNVIAEEIRTKIISEVGKMKKAVGKVPGLAVVLVGEQRDSQTYVRNKIKACEETGIKSVLAELPEDCTEGQIISVLRKFNEDTSIHGILVQLPLPQHLNESKILNMVRLEKDVDGFHPLNVGNLAMRGREPLFVSCTPKGCVELLIRTGVEIAGKNAVVIGRSNIVGLPMSLLLQA

SEQ ID NO: 42138 - protein, 243 aa, Arabidopsis thaliana
  peptide (1)..(243): Ceres Seq. ID no. 13488670
  misc_feature (183)..(242): Pfam Name: Tetrahydrofolate dehydrogenase/cyclohydrolase, Pfam Description: Tetrahydrofolate dehydrogenase/cyclohydrolase,
  misc_feature (65)..(241): Homolog of NCBI NO: 16803400 NR Description: highly similar to methylenetetrahydrofolate
  misc_feature (97)..(242): Homolog of NCBI NO: 15236884 NR Description: tetrahydrofolate dehydrogenase/cyclohydrolase,
  misc_feature (65)..(241): Homolog of NCBI NO: 12083525 NR Description: similar to Pisum sativum
  misc_feature (65)..(241): Homolog of NCBI NO: 11252953 NR Description: methylenetetrahydrofolate dehydrogenase (NADP)
  misc_feature (65)..(241): Homolog of NCBI NO: 15230449 NR Description: tetrahydrofolate dehydrogenase/cyclohydrolase,
  misc_feature (65)..(241): Homolog of NCBI NO: 21553669 NR Description: 5,10-methylenetetrahydrofolate
  misc_feature (49)..(242): Homolog of NCBI NO: 15236888 NR Description: tetrahydrofolate dehydrogenase/cyclohydrolase,
  misc_feature (1)..(243): Homolog of NCBI NO: 28393825 NR Description: putative methylenetetrahydrofolate dehydrogenase
  misc_feature (3)..(242): Homolog of NCBI NO: 25284864 NR Description: methylenetetrahydrofolate dehydrogenase
  misc_feature (1)..(242): Homolog of NCBI NO: 30687594 NR Description: tetrahydrofolate dehydrogenase/cyclohydrolase,
MLMIARKALASAHTKAFRLATRDVHCFSSILVSPPLVSLDLPENWIPYSDPPPPVSFETEQKTVVIDGNVIAEEIRTKIISEVGKMKKAVGKVPGLAVVLVGEQRDSQTYVRNKIKACEETGIKSVLAELPEDCTEGQIISVLRKFNEDTSIHGILVQLPLPQHLNESKILNMVRLEKDVDGFHPLNVGNLAMRGREPLFVSCTPKGCVELLIRTGVEIAGKNAVVIGRSNIVGLPMSLLLQA

SEQ ID NO: 42139 - protein, 241 aa, Arabidopsis thaliana
  peptide (1)..(241): Ceres Seq. ID no. 13488671
  misc_feature (181)..(240): Pfam Name: Tetrahydrofolate dehydrogenase/cyclohydrolase, Pfam Description: Tetrahydrofolate dehydrogenase/cyclohydrolase,
  misc_feature (63)..(239): Homolog of NCBI NO: 16803400 NR Description: highly similar to methylenetetrahydrofolate
  misc_feature (95)..(240): Homolog of NCBI NO: 15236884 NR Description: tetrahydrofolate dehydrogenase/cyclohydrolase,
  misc_feature (63)..(239): Homolog of NCBI NO: 12083525 NR Description: similar to Pisum sativum
  misc_feature (63)..(239): Homolog of NCBI NO: 11252953 NR Description: methylenetetrahydrofolate dehydrogenase (NADP)
  misc_feature (63)..(239): Homolog of NCBI NO: 15230449 NR Description: tetrahydrofolate dehydrogenase/cyclohydrolase,
  misc_feature (63)..(239): Homolog of NCBI NO: 21553669 NR Description: 5,10-methylenetetrahydrofolate
  misc_feature (47)..(240): Homolog of NCBI NO: 15236888 NR Description: tetrahydrofolate dehydrogenase/cyclohydrolase,
  misc_feature (1)..(241): Homolog of NCBI NO: 28393825 NR Description: putative methylenetetrahydrofolate dehydrogenase
  misc_feature (1)..(240): Homolog of NCBI NO: 25284864 NR Description: methylenetetrahydrofolate dehydrogenase
  misc_feature (1)..(240): Homolog of NCBI NO: 30687594 NR Description: tetrahydrofolate dehydrogenase/cyclohydrolase,
MIARKALASAHTKAFRLATRDVHCFSSILVSPPLVSLDLPENWIPYSDPPPPVSFETEQKTVVIDGNVIAEEIRTKIISEVGKMKKAVGKVPGLAVVLVGEQRDSQTYVRNKIKACEETGIKSVLAELPEDCTEGQIISVLRKFNEDTSIHGILVQLPLPQHLNESKILNMVRLEKDVDGFHPLNVGNLAMRGREPLFVSCTPKGCVELLIRTGVEIAGKNAVVIGRSNIVGLPMSLLLQA

SEQ ID NO: 42140 - DNA, 1185 bp, Arabidopsis thaliana
  misc_feature (1)..(1185): Ceres Seq. ID no. 12328026
  misc_feature: MA Experiment ID: 108474 Result: Down-regulated in Transcription
  misc_feature: MA Experiment 108474 PARAMETER Experiment Name: At_Drought_Flowers_cDNA_P Parameter: Timepoint (hr) Value: null
  misc_feature: MA Experiment 108474 PARAMETER Experiment Name: At_Drought_Flowers_cDNA_P Parameter: Treatment Value: Drought vs. No Drought
  misc_feature: MA Experiment ID: 108501 Result: Down-regulated in Transcription
  misc_feature: MA Experiment 108501 PARAMETER Experiment Name: At_ap2_floral_buds_cDNA_P Parameter: Plant Line Value: ap2 (Ler.)
  misc_feature: MA Experiment 108501 PARAMETER Experiment Name: At_ap2_floral_buds_cDNA_P Parameter: Tissue Value: Closed Flower
  misc_feature: MA Experiment ID: 20000185 Result: Down-regulated in Transcription
  misc_feature: MA Experiment 20000185 PARAMETER Experiment Name: At_Roots__P Parameter: Age (day) Value: 7 vs. 21
  misc_feature: MA Experiment 20000185 PARAMETER Experiment Name: At_Roots__P Parameter: Organism Value: A. thaliana
  misc_feature: MA Experiment 20000185 PARAMETER Experiment Name: At_Roots__P Parameter: Tissue Value: Roots vs. Whole Plant
  misc_feature: MA Experiment ID: 20000265 Result: Up-regulated in Transcription
  misc_feature: MA Experiment 20000265 PARAMETER Experiment Name: At_Open_Flower_P Parameter: Age (day) Value: 21
  misc_feature: MA Experiment 20000265 PARAMETER Experiment Name: At_Open_Flower_P Parameter: Plant Line Value: WS
  misc_feature: MA Experiment 20000265 PARAMETER Experiment Name: At_Open_Flower_P Parameter: Tissue Value: Closed Flower vs. Whole Plant
  misc_feature: MA Experiment ID: 20000286 Result: Up-regulated in Transcription
  misc_feature: MA Experiment 20000286 PARAMETER Experiment Name: At_Open_Flower_P Parameter: Age (day) Value: 21
  misc_feature: MA Experiment 20000286 PARAMETER Experiment Name: At_Open_Flower_P Parameter: Plant Line Value: WS
  misc_feature: MA Experiment 20000286 PARAMETER Experiment Name: At_Open_Flower_P Parameter: Tissue Value: Half Open vs. Whole Plant
  misc_feature: MA Experiment ID: 20000439 Result: Down-regulated in Transcription
  misc_feature: MA Experiment 20000439 PARAMETER Experiment Name: At_Roots__P Parameter: Age (day) Value: 14 vs. 21
  misc_feature: MA Experiment 20000439 PARAMETER Experiment Name: At_Roots__P Parameter: Organism Value: A. thaliana
  misc_feature: MA Experiment 20000439 PARAMETER Experiment Name: At_Roots__P Parameter: Tissue Value: Roots vs. Whole Plant
  misc_feature: MA Experiment ID: 20001910 Result: Down-regulated in Transcription
  misc_feature: MA Experiment 20001910 PARAMETER Experiment Name: At_Drought_Reproduction_P Parameter: Age (day) Value: 37
  misc_feature: MA Experiment 20001910 PARAMETER Experiment Name: At_Drought_Reproduction_P Parameter: Organism Value: A. thaliana
  misc_feature: MA Experiment 20001910 PARAMETER Experiment Name: At_Drought_Reproduction_P Parameter: Plant Line Value: WS
  misc_feature: MA Experiment 20001910 PARAMETER Experiment Name: At_Drought_Reproduction_P Parameter: Timepoint (day) Value: 7
  misc_feature: MA Experiment 20001910 PARAMETER Experiment Name: At_Drought_Reproduction_P Parameter: Tissue Value: Flowers
  misc_feature: MA Experiment 20001910 PARAMETER Experiment Name: At_Drought_Reproduction_P Parameter: Treatment Value: Drought vs. No Drought
tctgattaggtaagtatcgttcatggactaaaaatttcagagagaaatgagtgtaattctggattagtggctggatttaatcaaaatatgcaacagtctcctaaggtcagtttcatttccatcaatcaaagagcccaaaagtcaaatataagctaaattatatggttaatatatcttattaaatgtcatggactaaatatagaaattagagtatatatgtatatgtttgttgttgtaggccgagttcaagaaatctgagaataatagatctaagtcagtgtcagagatgaatactaataatgtcgacgatgaggtgatggagcaaggaaaactttggagagatgcagagaagaaatatccatggtatgatgcccctcctaaagtcaaggtgacaacaaaaaagggtctttgccatatgtacatagaattgacatttggattgcctccacgatcagtcttcgagcttttcactaatccagacaacttaccactcttcagtgacaagtcttggcgccaacttctggtaaacaaaaaaaggaaggttttgaagagggatggaccaaggcagatagtggaggtagaaaaagttgtggcctgggatttcctgtggtggtctggaggtatgccaataaatctaattgcggatgaaaatgagaaagatcttagaggaaaatataagaaacagaaaatgaagttcatgaaagtgttcgagggtagctataacgtggagccaatttatgtagactccgaacgcttttgcaagcataaggagccaaagagtccagaagaatacaaaaaatgtagcggtgggcaaggaaagattgcatcaaaagtgacaatggaccaatattttcagccatatcctatttttaatttgccgccgctttcttggtacattcgtaggaccaccatcaagaccaccacgactctgctcaaaatgcttcaagatatgggtgccaagatgcgagtagacccgtacgaaagttctaattagcacaagggtgaattaggagatttgttcctaattgttacggttgtctttgtcgtcgtttctagatttagttttcgtatgtgtatataaagtttggatatacttttcttcgttttttagtttgtataaaatctataccaaaatgactataatgtttgtctctatgtaaatcaataaatttatatgaaaaatgt

SEQ ID NO: 42141 - protein, 235 aa, Arabidopsis thaliana; identical to SEQ ID NO: 27321
  peptide (1)..(235): Ceres Seq. ID no. 12328027
  misc_feature (109)..(182): Pfam Name: Domain of unknown function DUF220 Pfam Description: Domain of unknown function DUF220
  misc_feature (1)..(80): Homolog of NCBI NO: 8778583 NR Description: F28C11.19 [Arabidopsis thaliana]
  misc_feature (82)..(227): Homolog of NCBI NO: 8778583 NR Description: F28C11.19 [Arabidopsis thaliana]
  misc_feature (1)..(227): Homolog of NCBI NO: 15220845 NR Description: putative OBP32pep protein; protein id:
  misc_feature (1)..(227): Homolog of NCBI NO: 8778583 NR Description: F28C11.19 [Arabidopsis thaliana]
  misc_feature (1)..(231): Homolog of NCBI NO: 15220802 NR Description: putative OBP32pep protein; protein id:
  misc_feature (1)..(203): Homolog of NCBI NO: 8778583 NR Description: F28C11.19 [Arabidopsis thaliana]
  misc_feature (1)..(195): Homolog of NCBI NO: 18395262 NR Description: putative OBP32pep protein
  misc_feature (1)..(195): Homolog of NCBI NO: 21593977 NR Description: putative OBP32pep protein [Arabidopsis thaliana]
  misc_feature (1)..(182): Homolog of NCBI NO: 25373404 NR Description: hypothetical protein F5O8.15 - Arabidopsis
  misc_feature (1)..(182): Homolog of NCBI NO: 8778583 NR Description: F28C11.19 [Arabidopsis thaliana]

SEQ ID NO: 42142 - protein, 225 aa, Arabidopsis thaliana; identical to SEQ ID NO: 27322
  peptide (1)..(225): Ceres Seq. ID no. 12328028
  misc_feature (99)..(172): Pfam Name: Domain of unknown function DUF220 Pfam Description: Domain of unknown function DUF220
  misc_feature (1)..(70): Homolog of NCBI NO: 8778583 NR Description: F28C11.19 [Arabidopsis thaliana]
  misc_feature (72)..(217): Homolog of NCBI NO: 8778583 NR Description: F28C11.19 [Arabidopsis thaliana]
  misc_feature (1)..(217): Homolog of NCBI NO: 15220845 NR Description: putative OBP32pep protein; protein id:
  misc_feature (1)..(217): Homolog of NCBI NO: 8778583 NR Description: F28C11.19 [Arabidopsis thaliana]
  misc_feature (1)..(221): Homolog of NCBI NO: 15220802 NR Description: putative OBP32pep protein; protein id:
  misc_feature (1)..(193): Homolog of NCBI NO: 8778583 NR Description: F28C11.19 [Arabidopsis thaliana]
  misc_feature (1)..(185): Homolog of NCBI NO: 18395262 NR Description: putative OBP32pep protein
  misc_feature (1)..(185): Homolog of NCBI NO: 21593977 NR Description: putative OBP32pep protein [Arabidopsis thaliana]
  misc_feature (1)..(172): Homolog of NCBI NO: 25373404 NR Description: hypothetical protein F5O8.15 - Arabidopsis
  misc_feature (1)..(172): Homolog of NCBI NO: 8778583 NR Description: F28C11.19 [Arabidopsis thaliana]

SEQ ID NO: 42143 - protein, 192 aa, Arabidopsis thaliana
  peptide (1)..(192): Ceres Seq. ID no. 12328029
  misc_feature (66)..(139): Pfam Name: Domain of unknown function DUF220 Pfam Description: Domain of unknown function DUF220
  misc_feature (1)..(37): Homolog of NCBI NO: 8778583 NR Description: F28C11.19 [Arabidopsis thaliana]
  misc_feature (39)..(184): Homolog of NCBI NO: 8778583 NR Description: F28C11.19 [Arabidopsis thaliana]
  misc_feature (1)..(184): Homolog of NCBI NO: 15220845 NR Description: putative OBP32pep protein; protein id:
  misc_feature (1)..(184): Homolog of NCBI NO: 8778583 NR Description: F28C11.19 [Arabidopsis thaliana]
  misc_feature (1)..(188): Homolog of NCBI NO: 15220802 NR Description: putative OBP32pep protein; protein id:
  misc_feature (1)..(160): Homolog of NCBI NO: 8778583 NR Description: F28C11.19 [Arabidopsis thaliana]
  misc_feature (1)..(152): Homolog of NCBI NO: 18395262 NR Description: putative OBP32pep protein
  misc_feature (1)..(152): Homolog of NCBI NO: 21593977 NR Description: putative OBP32pep protein [Arabidopsis thaliana]
  misc_feature (1)..(139): Homolog of NCBI NO: 25373404 NR Description: hypothetical protein F5O8.15 - Arabidopsis
  misc_feature (1)..(139): Homolog of NCBI NO: 8778583 NR Description: F28C11.19 [Arabidopsis thaliana]
MYIELTFGLPPRSVFELFTNPDNLPLFSDKSWRQLLVNKKRKVLKRDGPRQIVEVEKVVAWDFLWWSGGMPINLIADENEKDLRGKYKKQKMKFMKVFEGSYNVEPIYVDSERFCKHKEPKSPEEYKKCSGGQGKIASKVTMDQYFQPYPIFNLPPLSWYIRRTTIKTTTTLLKMLQDMGAKMRVDPYESSN

SEQ ID NO: 42144 - DNA, 1645 bp, Arabidopsis thaliana
  misc_feature (1)..(1645): Ceres Seq. ID no. 13497112
  misc_feature: MA Experiment ID: 108434 Result: Down-regulated in Transcription
  misc_feature: MA Experiment 108434 PARAMETER Experiment Name: At_Root_Tips_cDNA_P Parameter: Tissue Value: Root Tips
  misc_feature: MA Experiment ID: 108461 Result: Up-regulated in Transcription
  misc_feature: MA Experiment 108461 PARAMETER Experiment Name: At_Germinating_Seeds_cDNA_P Parameter: Age (day) Value: 1 vs. 0
  misc_feature: MA Experiment 108461 PARAMETER Experiment Name: At_Germinating_Seeds_cDNA_P Parameter: Tissue Value: Germinating Seeds
  misc_feature: MA Experiment ID: 108462 Result: Up-regulated in Transcription
  misc_feature: MA Experiment 108462 PARAMETER Experiment Name: At_Germinating_Seeds_cDNA_P Parameter: Age (day) Value: 2 vs. 0
  misc_feature: MA Experiment 108462 PARAMETER Experiment Name: At_Germinating_Seeds_cDNA_P Parameter: Tissue Value: Germinating Seeds
  misc_feature: MA Experiment ID: 108463 Result: Up-regulated in Transcription
  misc_feature: MA Experiment 108463 PARAMETER Experiment Name: At_Germinating_Seeds_cDNA_P Parameter: Age (day) Value: 3 vs. 0
  misc_feature: MA Experiment 108463 PARAMETER Experiment Name: At_Germinating_Seeds_cDNA_P Parameter: Tissue Value: Germinating Seeds
  misc_feature: MA Experiment ID: 108464 Result: Up-regulated in Transcription
  misc_feature: MA Experiment 108464 PARAMETER Experiment Name: At_Germinating_Seeds_cDNA_P Parameter: Age (day) Value: 4 vs. 0
  misc_feature: MA Experiment 108464 PARAMETER Experiment Name: At_Germinating_Seeds_cDNA_P Parameter: Tissue Value: Germinating Seeds
  misc_feature: MA Experiment ID: 108469 Result: Up-regulated in Transcription
  misc_feature: MA Experiment ID: 108489 Result: Down-regulated in Transcription
  misc_feature: MA Experiment ID: 108572 Result: Up-regulated in Transcription
  misc_feature: MA Experiment 108572 PARAMETER Experiment Name: At_Drought_cDNA_P Parameter: Timepoint (hr) Value: 1
  misc_feature: MA Experiment 108572 PARAMETER Experiment Name: At_Drought_cDNA_P Parameter: Tissue Value: Aerial
  misc_feature: MA Experiment 108572 PARAMETER Experiment Name: At_Drought_cDNA_P Parameter: Treatment Value: Drought vs. No Drought
  misc_feature: MA Experiment ID: 108574 Result: Up-regulated in Transcription
  misc_feature: MA Experiment 108574 PARAMETER Experiment Name: At_Wounding__cDNA_P Parameter: Timepoint (hr) Value: 1
  misc_feature: MA Experiment 108574 PARAMETER Experiment Name: At_Wounding__cDNA_P Parameter: Tissue Value: Aerial
  misc_feature: MA Experiment 108574 PARAMETER Experiment Name: At_Wounding__cDNA_P Parameter: Treatment Value: Wounding vs. No Wounding
  misc_feature: MA Experiment ID: 108577 Result: Down-regulated in Transcription
  misc_feature: MA Experiment 108577 PARAMETER Experiment Name: At_42deg_Heat_cDNA_P Parameter: Temperature (deg C) Value: 42 vs. 22
  misc_feature: MA Experiment 108577 PARAMETER Experiment Name: At_42deg_Heat_cDNA_P Parameter: Timepoint (hr) Value: 6
  misc_feature: MA Experiment 108577 PARAMETER Experiment Name: At_42deg_Heat_cDNA_P Parameter: Tissue Value: Aerial
  misc_feature: MA Experiment ID: 108585 Result: Up-regulated in Transcription
  misc_feature: MA Experiment 108585 PARAMETER Experiment Name: At_5mM_NaNP_cDNA_P Parameter: Timepoint (hr) Value: 6
  misc_feature: MA Experiment 108585 PARAMETER Experiment Name: At_5mM_NaNP_cDNA_P Parameter: Tissue Value: Aerial
  misc_feature: MA Experiment 108585 PARAMETER Experiment Name: At_5mM_NaNP_cDNA_P Parameter: Treatment Value: null
  misc_feature: MA Experiment ID: 108594 Result: Down-regulated in Transcription
  misc_feature: MA Experiment 108594 PARAMETER Experiment Name: At_Ler-rhl_Root_cDNA_P Parameter: Plant Line Value: null
  misc_feature: MA Experiment ID: 108605 Result: Up-regulated in Transcription
  misc_feature: MA Experiment 108605 PARAMETER Experiment Name: At_100uM_ABA_cDNA_P Parameter: Timepoint (hr) Value: 6
  misc_feature: MA Experiment 108605 PARAMETER Experiment Name: At_100uM_ABA_cDNA_P Parameter: Tissue Value: Aerial
  misc_feature: MA Experiment 108605 PARAMETER Experiment Name: At_100uM_ABA_cDNA_P Parameter: Treatment Value: 100uM ABA vs. No Treatment
  misc_feature: MA Experiment ID: 108608 Result: Up-regulated in Transcription
  misc_feature: MA Experiment 108608 PARAMETER Experiment Name: At_100uM_ABA_cDNA_P Parameter: Timepoint (hr) Value: 1
  misc_feature: MA Experiment 108608 PARAMETER Experiment Name: At_100uM_ABA_cDNA_P Parameter: Tissue Value: Aerial
  misc_feature: MA Experiment 108608 PARAMETER Experiment Name: At_100uM_ABA_cDNA_P Parameter: Treatment Value: 100uM ABA vs. No Treatment
  misc_feature: MA Experiment ID: 108667 Result: Up-regulated in Transcription
  misc_feature: MA Experiment 108667 PARAMETER Experiment Name: At_2mM_SA_cDNA_P Parameter: Plant Line Value: WS
  misc_feature: MA Experiment 108667 PARAMETER Experiment Name: At_2mM_SA_cDNA_P Parameter: Timepoint (hr) Value: 1
  misc_feature: MA Experiment 108667 PARAMETER Experiment Name: At_2mM_SA_cDNA_P Parameter: Treatment Value: 2mM SA vs. No Treatment
  misc_feature: MA Experiment ID: 108668 Result: Up-regulated in Transcription
  misc_feature: MA Experiment 108668 PARAMETER Experiment Name: At_2mM_SA_cDNA_P Parameter: Plant Line Value: WS
  misc_feature: MA Experiment 108668 PARAMETER Experiment Name: At_2mM_SA_cDNA_P Parameter: Timepoint (hr) Value: 6
  misc_feature: MA Experiment 108668 PARAMETER Experiment Name: At_2mM_SA_cDNA_P Parameter: Treatment Value: 2mM SA vs. No Treatment
  misc_feature: MA Experiment ID: 20000030 Result: Down-regulated in Transcription
  misc_feature: MA Experiment 20000030 PARAMETER Experiment Name: At_CS6630_Roots_cDNA_P Parameter: Plant Line Value: CS6630 vs. WS
  misc_feature: MA Experiment 20000030 PARAMETER Experiment Name: At_CS6630_Roots_cDNA_P Parameter: Tissue Value: Roots
  misc_feature: MA Experiment ID: 20000111 Result: Down-regulated in Transcription
  misc_feature: MA Experiment 20000111 PARAMETER Experiment Name: At_42deg_Heat_cDNA_P Parameter: Temperature (deg C) Value: 42 vs. 22
  misc_feature: MA Experiment 20000111 PARAMETER Experiment Name: At_42deg_Heat_cDNA_P Parameter: Timepoint (hr) Value: 6
  misc_feature: MA Experiment 20000111 PARAMETER Experiment Name: At_42deg_Heat_cDNA_P Parameter: Tissue Value: Aerial
  misc_feature: MA Experiment ID: 20000113 Result: Down-regulated in Transcription
  misc_feature: MA Experiment 20000113 PARAMETER Experiment Name: At_42deg_Heat_cDNA_P Parameter: Temperature (deg C) Value: 42 vs. 22
  misc_feature: MA Experiment 20000113 PARAMETER Experiment Name: At_42deg_Heat_cDNA_P Parameter: Timepoint (hr) Value: 8
  misc_feature: MA Experiment 20000113 PARAMETER Experiment Name: At_42deg_Heat_cDNA_P Parameter: Tissue Value: Aerial
  misc_feature: MA Experiment ID: 20000166 Result: Up-regulated in Transcription
  misc_feature: MA Experiment 20000166 PARAMETER Experiment Name: At_100uM_ABA_P Parameter: Age (day) Value: 14
  misc_feature: MA Experiment 20000166 PARAMETER Experiment Name: At_100uM_ABA_P Parameter: Organism Value: A. thaliana
  misc_feature: MA Experiment 20000166 PARAMETER Experiment Name: At_100uM_ABA_P Parameter: Plant Line Value: WS
  misc_feature: MA Experiment 20000166 PARAMETER Experiment Name: At_100uM_ABA_P Parameter: Timepoint (hr) Value: 1
  misc_feature: MA Experiment 20000166 PARAMETER Experiment Name: At_100uM_ABA_P Parameter: Tissue Value: Aerial
  misc_feature: MA Experiment 20000166 PARAMETER Experiment Name: At_100uM_ABA_P Parameter: Treatment Value: 100uM ABA vs. No Treatment
  misc_feature: MA Experiment ID: 20000173 Result: Down-regulated in Transcription
  misc_feature: MA Experiment 20000173 PARAMETER Experiment Name: At_42deg_Heat_P Parameter: Age (day) Value: 14
  misc_feature: MA Experiment 20000173 PARAMETER Experiment Name: At_42deg_Heat_P Parameter: Organism Value: A. thaliana
  misc_feature: MA Experiment 20000173 PARAMETER Experiment Name: At_42deg_Heat_P Parameter: Plant Line Value: WS
  misc_feature: MA Experiment 20000173 PARAMETER Experiment Name: At_42deg_Heat_P Parameter: Temperature (deg C) Value: 42 vs. 22
  misc_feature: MA Experiment 20000173 PARAMETER Experiment Name: At_42deg_Heat_P Parameter: Timepoint (hr) Value: 6
  misc_feature: MA Experiment 20000173 PARAMETER Experiment Name: At_42deg_Heat_P Parameter: Tissue Value: Aerial
  misc_feature: MA Experiment ID: 20000180 Result: Up-regulated in Transcription
  misc_feature: MA Experiment 20000180 PARAMETER Experiment Name: At_Germinating_Seeds_P Parameter: Age (hr) Value: 24 vs. 0
  misc_feature: MA Experiment 20000180 PARAMETER Experiment Name: At_Germinating_Seeds_P Parameter: Tissue Value: Germinating Seeds
  misc_feature: MA Experiment ID: 20000182 Result: Up-regulated in Transcription
  misc_feature: MA Experiment 20000182 PARAMETER Experiment Name: At_2mM_SA_P Parameter: Age (day) Value: 14
  misc_feature: MA Experiment 20000182 PARAMETER Experiment Name: At_2mM_SA_P Parameter: Organism Value: A. thaliana
  misc_feature: MA Experiment 20000182 PARAMETER Experiment Name: At_2mM_SA_P Parameter: Plant Line Value: WS
  misc_feature: MA Experiment 20000182 PARAMETER Experiment Name: At_2mM_SA_P Parameter: Timepoint (hr) Value: 6
  misc_feature: MA Experiment 20000182 PARAMETER Experiment Name: At_2mM_SA_P Parameter: Tissue Value: Aerial
  misc_feature: MA Experiment 20000182 PARAMETER Experiment Name: At_2mM_SA_P Parameter: Treatment Value: 2mM SA vs. No Treatment
  misc_feature: MA Experiment ID: 20000224 Result: Up-regulated in Transcription
  misc_feature: MA Experiment ID: 20000234 Result: Down-regulated in Transcription
  misc_feature: MA Experiment 20000234 PARAMETER Experiment Name: At_Siliques_P Parameter: Age (day) Value: 21
  misc_feature: MA Experiment 20000234 PARAMETER Experiment Name: At_Siliques_P Parameter: Organism Value: A. thaliana
  misc_feature: MA Experiment 20000234 PARAMETER Experiment Name: At_Siliques_P Parameter: Plant Line Value: WS
  misc_feature: MA Experiment 20000234 PARAMETER Experiment Name: At_Siliques_P Parameter: Tissue Value: Less Than 5mm Siliques vs. Whole Plant
  misc_feature: MA Experiment ID: 20000439 Result: Up-regulated in Transcription
  misc_feature: MA Experiment 20000439 PARAMETER Experiment Name: At_Roots__P Parameter: Age (day) Value: 14 vs. 21
  misc_feature: MA Experiment 20000439 PARAMETER Experiment Name: At_Roots__P Parameter: Organism Value: A. thaliana
  misc_feature: MA Experiment 20000439 PARAMETER Experiment Name: At_Roots__P Parameter: Tissue Value: Roots vs. Whole Plant
  misc_feature: MA Experiment ID: 20000460 Result: Down-regulated in Transcription
  misc_feature: MA Experiment 20000460 PARAMETER Experiment Name: At_10percent_PEG_P Parameter: Age (day) Value: 12
  misc_feature: MA Experiment 20000460 PARAMETER Experiment Name: At_10percent_PEG_P Parameter: Organism Value: A. thaliana
  misc_feature: MA Experiment 20000460 PARAMETER Experiment Name: At_10percent_PEG_P Parameter: Plant Line Value: WS
  misc_feature: MA Experiment 20000460 PARAMETER Experiment Name: At_10percent_PEG_P Parameter: Timepoint (day) Value: 12
  misc_feature: MA Experiment 20000460 PARAMETER Experiment Name: At_10percent_PEG_P Parameter: Tissue Value: Whole Plant
  misc_feature: MA Experiment 20000460 PARAMETER Experiment Name: At_10percent_PEG_P Parameter: Treatment Value: 10percent PEG vs. No Treatment
  misc_feature: MA Experiment ID: 20000495 Result: Down-regulated in Transcription
  misc_feature: MA Experiment 20000495 PARAMETER Experiment Name: At_Guard_Cells_P Parameter: Harvest Date Value: 8/2/2002
  misc_feature: MA Experiment 20000495 PARAMETER Experiment Name: At_Guard_Cells_P Parameter: Organism Value: A. thaliana
  misc_feature: MA Experiment 20000495 PARAMETER Experiment Name: At_Guard_Cells_P Parameter: Tissue Value: Guard Cells vs. Leaves
  misc_feature: MA Experiment ID: 20000527 Result: Down-regulated in Transcription
  misc_feature: MA Experiment 20000527 PARAMETER Experiment Name: At_10percent_PEG_P Parameter: Age (day) Value: 20
  misc_feature: MA Experiment 20000527 PARAMETER Experiment Name: At_10percent_PEG_P Parameter: Organism Value: A. thaliana
  misc_feature: MA Experiment 20000527 PARAMETER Experiment Name: At_10percent_PEG_P Parameter: Plant Line Value: WS
  misc_feature: MA Experiment 20000527 PARAMETER Experiment Name: At_10percent_PEG_P Parameter: Timepoint (day) Value: 20
  misc_feature: MA Experiment 20000527 PARAMETER Experiment Name: At_10percent_PEG_P Parameter: Tissue Value: Whole Plant
  misc_feature: MA Experiment 20000527 PARAMETER Experiment Name: At_10percent_PEG_P Parameter: Treatment Value: 10percent PEG vs. No Treatment
  misc_feature: MA Experiment ID: 20000573 Result: Down-regulated in Transcription
  misc_feature: MA Experiment 20000573 PARAMETER Experiment Name: At_100uM_ABA_Mutants__P Parameter: Organism Value: A. thaliana
  misc_feature: MA Experiment 20000573 PARAMETER Experiment Name: At_100uM_ABA_Mutants__P Parameter: Plant Line Value: CS22 vs. Ler wt
  misc_feature: MA Experiment 20000573 PARAMETER Experiment Name: At_100uM_ABA_Mutants__P Parameter: Timepoint (hr) Value: N/A
  misc_feature: MA Experiment 20000573 PARAMETER Experiment Name: At_100uM_ABA_Mutants__P Parameter: Tissue Value: Whole Plant
  misc_feature: MA Experiment 20000573 PARAMETER Experiment Name: At_100uM_ABA_Mutants__P Parameter: Treatment Value: None
  misc_feature: MA Experiment ID: 20001248 Result: Down-regulated in Transcription
  misc_feature: MA Experiment 20001248 PARAMETER Experiment Name: At_Far-red-induction_P Parameter: Age (day) Value: 7
  misc_feature: MA Experiment 20001248 PARAMETER Experiment Name: At_Far-red-induction_P Parameter: Light Value: Far-red vs. White
  misc_feature: MA Experiment 20001248 PARAMETER Experiment Name: At_Far-red-induction_P Parameter: Organism Value: A. thaliana
  misc_feature: MA Experiment 20001248 PARAMETER Experiment Name: At_Far-red-induction_P Parameter: Plant Line Value: Columbia
  misc_feature: MA Experiment 20001248 PARAMETER Experiment Name: At_Far-red-induction_P Parameter: Timepoint (hr) Value: 4
  misc_feature: MA Experiment 20001248 PARAMETER Experiment Name: At_Far-red-induction_P Parameter: Tissue Value: Whole Plant
  misc_feature: MA Experiment ID: 20001450 Result: Down-regulated in Transcription
  misc_feature: MA Experiment 20001450 PARAMETER Experiment Name: At_Far-red-induction_P Parameter: Age (day) Value: 7
  misc_feature: MA Experiment 20001450 PARAMETER Experiment Name: At_Far-red-induction_P Parameter: Light Value: Far-red vs. White
  misc_feature: MA Experiment 20001450 PARAMETER Experiment Name: At_Far-red-induction_P Parameter: Organism Value: A. thaliana
  misc_feature: MA Experiment 20001450 PARAMETER Experiment Name: At_Far-red-induction_P Parameter: Plant Line Value: Columbia
  misc_feature: MA Experiment 20001450 PARAMETER Experiment Name: At_Far-red-induction_P Parameter: Timepoint (hr) Value: 8
  misc_feature: MA Experiment 20001450 PARAMETER Experiment Name: At_Far-red-induction_P Parameter: Tissue Value: Whole Plant
  misc_feature: MA Experiment ID: 20001911 Result: Up-regulated in Transcription
  misc_feature: MA Experiment 20001911 PARAMETER Experiment Name: At_Drought_Reproduction_P Parameter: Age (day) Value: 40
  misc_feature: MA Experiment 20001911 PARAMETER Experiment Name: At_Drought_Reproduction_P Parameter: Organism Value: A. thaliana
  misc_feature: MA Experiment 20001911 PARAMETER Experiment Name: At_Drought_Reproduction_P Parameter: Plant Line Value: WS
  misc_feature: MA Experiment 20001911 PARAMETER Experiment Name: At_Drought_Reproduction_P Parameter: Timepoint (day) Value: 10
  misc_feature: MA Experiment 20001911 PARAMETER Experiment Name: At_Drought_Reproduction_P Parameter: Tissue Value: Flowers
  misc_feature: MA Experiment 20001911 PARAMETER Experiment Name: At_Drought_Reproduction_P Parameter: Treatment Value: Drought vs. No Drought
aacaaaaaaaaaaaagaaaaaaggagataataatcacaaactacaaaagtagaaagaagaaaaaagaacaaagtatcagttcttgaatatttgcatcaatggaggaatccaaaacacctcacgttgcgatcataccaagtccgggaatgggtcatctcataccactcgtcgagtttgctaaacgactcgtccatcttcacggcctcaccgttaccttcgtcatcgccggcgaaggtccaccatcaaaagctcagagaaccgtcctcgactctctcccttcttcaatctcctccgtctttctccctcctgttgatctcaccgatctctcttcgtccactcgcatcgaatctcggatctccctcaccgtgactcgttcaaacccggagctccggaaagtcttcgactcgttcgtggagggaggtcgtttgccaacggcgctcgtcgtcgatctcttcggtacggacgctttcgacgtggccgtagaatttcacgtgccaccgtatattttctacccaacaacggccaacgtcttgtcgttttttctccatttgcctaaactatacgaaacggtgtcgtgtgagttcagggaattaaccgaaccgcttatgcttcctggatgtgtaccggttgccgggaaagatttccttgacccggcccaagaccggaaagacgatgcatacaaatggcttctccataacaccaagaggtacaaagaagccgaaggtattcttgtgaataccttctttgagctagagccaaatgctataaaggccttgcaagaaccgggtcttgataaaccaccggtttatccggttggaccgttggttaacattggtaagcaagaggctaagcaaaccgaagagtctgaatgtttaaagtggttggataaccagccgctcggttcggttttatatgtgtcctttggtagtggcggtaccctcacatgtgagcagctcaatgagcttgctcttggtcttgcagatagtgagcaacggtttctttgggtcatacgaagtcctagtgggatcgctaattcgtcgtattttgattcacatagccaaacagatccattgacatttttaccaccgggatttttagagcggactaaaaaaagaggttttgtgatccctttttgggctccacaagcccaagtcttggcgcatccatccacgggaggatttttaactcattgtggatggaattcgactctagagagtgtagtaagcggtattccacttatagcatggccattatacgcagaacagaagatgaatgcggttttgttgagtgaagatattcgtgcggcacttaggccgcgtgccggggacgatgggttagttagaagagaagaggtggctagagtggtaaaaggattgatggaaggtgaagaaggcaaaggagtgaggaacaagatgaaggagttgaaggaagcagcttgtagggtgttgaaggatgatgggacttcgacaaaagcacttagtcttgtggccttaaagtggaaagcccacaaaaaagagttagagcaaaatggcaaccactaaatatttgatgttctaatatgatttgtataatcaacggtgggatttgtgcaaatgtgtttctgtatgtatatgtatgttctacttttctttgcttcgtttgtctc

SEQ ID NO: 42145 - protein, 480 aa, Arabidopsis thaliana
  peptide (1)..(480): Ceres Seq. ID no. 13497113
  misc_feature (7)..(471): Pfam Name: UDP-glucoronosyl and UDP-glucosyl transferase Pfam Description: UDP-glucoronosyl and UDP-glucosyl transferase
  misc_feature (6)..(468): Homolog of NCBI NO: 34912752 NR Description: putative UTP-glucose glucosyltransferase
  misc_feature (3)..(468): Homolog of NCBI NO: 34912764 NR Description: putative UTP-glucose glucosyltransferase
  misc_feature (5)..(469): Homolog of NCBI NO: 19911209 NR Description: glucosyltransferase-13 [Vigna angularis]
  misc_feature (6)..(468): Homolog of NCBI NO: 28380078 NR Description: Hydroquinone glucosyltransferase (Arbutin
  misc_feature (12)..(480): Homolog of NCBI NO: 25286808 NR Description: protein probable UTP-glucose glucosyltransferase
  misc_feature (1)..(480): Homolog of NCBI NO: 15223392 NR Description: glycosyltransferase family [Arabidopsis thaliana]
  misc_feature (1)..(476): Homolog of NCBI NO: 15223396 NR Description: glycosyltransferase family [Arabidopsis thaliana]
  misc_feature (1)..(145): Homolog of NCBI NO: 7433902 NR Description: UTP-glucose glucosyltransferase homolog
  misc_feature (138)..(480): Homolog of NCBI NO: 7433902 NR Description: UTP-glucose glucosyltransferase homolog
  misc_feature (1)..(480): Homolog of NCBI NO: 15234056 NR Description: glycosyltransferase family [Arabidopsis thaliana]
MEESKTPHVAIIPSPGMGHLIPLVEFAKRLVHLHGLTVTFVIAGEGPPSKAQRTVLDSLPSSISSVFLPPVDLTDLSSSTRIESRISLTVTRSNPELRKVFDSFVEGGRLPTALVVDLFGTDAFDVAVEFHVPPYIFYPTTANVLSFFLHLPKLYETVSCEFRELTEPLMLPGCVPVAGKDFLDPAQDRKDDAYKWLLHNTKRYKEAEGILVNTFFELEPNAIKALQEPGLDKPPVYPVGPLVNIGKQEAKQTEESECLKWLDNQPLGSVLYVSFGSGGTLTCEQLNELALGLADSEQRFLWVIRSPSGIANSSYFDSHSQTDPLTFLPPGFLERTKKRGFVIPFWAPQAQVLAHPSTGGFLTHCGWNSTLESVVSGIPLIAWPLYAEQKMNAVLLSEDIRAALRPRAGDDGLVRREEVARVVKGLMEGEEGKGVRNKMKELKEAACRVLKDDGTSTKALSLVALKWKAHKKELEQNGNH

SEQ ID NO: 42146 - protein, 464 aa, Arabidopsis thaliana
  peptide (1)..(464): Ceres Seq. ID no. 13497114
  misc_feature (1)..(455): Pfam Name: UDP-glucoronosyl and UDP-glucosyl transferase Pfam Description: UDP-glucoronosyl and UDP-glucosyl transferase
  misc_feature (1)..(452): Homolog of NCBI NO: 34912752 NR Description: putative UTP-glucose glucosyltransferase
  misc_feature (1)..(452): Homolog of NCBI NO: 34912764 NR Description: putative UTP-glucose glucosyltransferase
  misc_feature (1)..(453): Homolog of NCBI NO: 19911209 NR Description: glucosyltransferase-13 [Vigna angularis]
  misc_feature (1)..(452): Homolog of NCBI NO: 28380078 NR Description: Hydroquinone glucosyltransferase (Arbutin
  misc_feature (1)..(464): Homolog of NCBI NO: 25286808 NR Description: protein probable UTP-glucose glucosyltransferase
  misc_feature (1)..(464): Homolog of NCBI NO: 15223392 NR Description: glycosyltransferase family [Arabidopsis thaliana]
  misc_feature (1)..(460): Homolog of NCBI NO: 15223396 NR Description: glycosyltransferase family [Arabidopsis thaliana]
  misc_feature (1)..(129): Homolog of NCBI NO: 7433902 NR Description: UTP-glucose glucosyltransferase homolog
  misc_feature (122)..(464): Homolog of NCBI NO: 7433902 NR Description: UTP-glucose glucosyltransferase homolog
  misc_feature (1)..(464): Homolog of NCBI NO: 15234056 NR Description: glycosyltransferase family [Arabidopsis thaliana]
MGHLIPLVEFAKRLVHLHGLTVTFVIAGEGPPSKAQRTVLDSLPSSISSVFLPPVDLTDLSSSTRIESRISLTVTRSNPELRKVFDSFVEGGRLPTALVVDLFGTDAFDVAVEFHVPPYIFYPTTANVLSFFLHLPKLYETVSCEFRELTEPLMLPGCVPVAGKDFLDPAQDRKDDAYKWLLHNTKRYKEAEGILVNTFFELEPNAIKALQEPGLDKPPVYPVGPLVNIGKQEAKQTEESECLKWLDNQPLGSVLYVSFGSGGTLTCEQLNELALGLADSEQRFLWVIRSPSGIANSSYFDSHSQTDPLTFLPPGFLERTKKRGFVIPFWAPQAQVLAHPSTGGFLTHCGWNSTLESVVSGIPLIAWPLYAEQKMNAVLLSEDIRAALRPRAGDDGLVRREEVARVVKGLMEGEEGKGVRNKMKELKEAACRVLKDDGTSTKALSLVALKWKAHKKELEQNGNH

SEQ ID NO: 42147 - protein, 311 aa, Arabidopsis thaliana; identical to SEQ ID NO: 25937
  peptide (1)..(311): Ceres Seq. ID no. 13497115
  misc_feature (1)..(302): Pfam Name: UDP-glucoronosyl and UDP-glucosyl transferase Pfam Description: UDP-glucoronosyl and UDP-glucosyl transferase
  misc_feature (1)..(285): Homolog of NCBI NO: 19911195 NR Description: glucosyltransferase-6 [Vigna angularis]
  misc_feature (1)..(299): Homolog of NCBI NO: 34912752 NR Description: putative UTP-glucose glucosyltransferase
  misc_feature (1)..(299): Homolog of NCBI NO: 34912764 NR Description: putative UTP-glucose glucosyltransferase
  misc_feature (1)..(300): Homolog of NCBI NO: 19911209 NR Description: glucosyltransferase-13 [Vigna angularis]
  misc_feature (1)..(299): Homolog of NCBI NO: 28380078 NR Description: Hydroquinone glucosyltransferase (Arbutin
  misc_feature (1)..(311): Homolog of NCBI NO: 25286808 NR Description: protein probable UTP-glucose glucosyltransferase
  misc_feature (1)..(311): Homolog of NCBI NO: 15223392 NR Description: glycosyltransferase family [Arabidopsis thaliana]
  misc_feature (1)..(307): Homolog of NCBI NO: 15223396 NR Description: glycosyltransferase family [Arabidopsis thaliana]
  misc_feature (1)..(311): Homolog of NCBI NO: 7433902 NR Description: UTP-glucose glucosyltransferase homolog
  misc_feature (1)..(311): Homolog of NCBI NO: 15234056 NR Description: glycosyltransferase family [Arabidopsis thaliana]

SEQ ID NO: 42148 - DNA, 2015 bp, Arabidopsis thaliana
  misc_feature (1)..(2015): Ceres Seq. ID no. 12601323
  misc_feature: MA Experiment ID: 108434 Result: Up-regulated in Transcription
  misc_feature: MA Experiment 108434 PARAMETER Experiment Name: At_Root_Tips_cDNA_P Parameter: Tissue Value: Root Tips
  misc_feature: MA Experiment ID: 108461 Result: Up-regulated in Transcription
  misc_feature: MA Experiment 108461 PARAMETER Experiment Name: At_Germinating_Seeds_cDNA_P Parameter: Age (day) Value: 1 vs. 0
  misc_feature: MA Experiment 108461 PARAMETER Experiment Name: At_Germinating_Seeds_cDNA_P Parameter: Tissue Value: Germinating Seeds
  misc_feature: MA Experiment ID: 108462 Result: Up-regulated in Transcription
  misc_feature: MA Experiment 108462 PARAMETER Experiment Name: At_Germinating_Seeds_cDNA_P Parameter: Age (day) Value: 2 vs. 0
  misc_feature: MA Experiment 108462 PARAMETER Experiment Name: At_Germinating_Seeds_cDNA_P Parameter: Tissue Value: Germinating Seeds
  misc_feature: MA Experiment ID: 108463 Result: Up-regulated in Transcription
  misc_feature: MA Experiment 108463 PARAMETER Experiment Name: At_Germinating_Seeds_cDNA_P Parameter: Age (day) Value: 3 vs. 0
  misc_feature: MA Experiment 108463 PARAMETER Experiment Name: At_Germinating_Seeds_cDNA_P Parameter: Tissue Value: Germinating Seeds
  misc_feature: MA Experiment ID: 108464 Result: Up-regulated in Transcription
  misc_feature: MA Experiment 108464 PARAMETER Experiment Name: At_Germinating_Seeds_cDNA_P Parameter: Age (day) Value: 4 vs. 0
  misc_feature: MA Experiment 108464 PARAMETER Experiment Name: At_Germinating_Seeds_cDNA_P Parameter: Tissue Value: Germinating Seeds
  misc_feature: MA Experiment ID: 108577 Result: Up-regulated in Transcription
  misc_feature: MA Experiment 108577 PARAMETER Experiment Name: At_42deg_Heat_cDNA_P Parameter: Temperature (deg C) Value: 42 vs. 22
  misc_feature: MA Experiment 108577 PARAMETER Experiment Name: At_42deg_Heat_cDNA_P Parameter: Timepoint (hr) Value: 6
  misc_feature: MA Experiment 108577 PARAMETER Experiment Name: At_42deg_Heat_cDNA_P Parameter: Tissue Value: Aerial
  misc_feature: MA Experiment ID: 108579 Result: Up-regulated in Transcription
  misc_feature: MA Experiment 108579 PARAMETER Experiment Name: At_4deg_Cold_cDNA_P Parameter: Temperature (deg C) Value: 4 vs. 22
  misc_feature: MA Experiment 108579 PARAMETER Experiment Name: At_4deg_Cold_cDNA_P Parameter: Timepoint (hr) Value: 6
  misc_feature: MA Experiment 108579 PARAMETER Experiment Name: At_4deg_Cold_cDNA_P Parameter: Tissue Value: Aerial
  misc_feature: MA Experiment ID: 108595 Result: Down-regulated in Transcription
  misc_feature: MA Experiment 108595 PARAMETER Experiment Name: At_Ler-pi_Ovule_cDNA_P Parameter: Plant Line Value: null
  misc_feature: MA Experiment ID: 20000112 Result: Up-regulated in Transcription
  misc_feature: MA Experiment 20000112 PARAMETER Experiment Name: At_42deg_Heat_cDNA_P Parameter: Temperature (deg C) Value: 42 vs. 22
  misc_feature: MA Experiment 20000112 PARAMETER Experiment Name: At_42deg_Heat_cDNA_P Parameter: Timepoint (hr) Value: 2
  misc_feature: MA Experiment 20000112 PARAMETER Experiment Name: At_42deg_Heat_cDNA_P Parameter: Tissue Value: Aerial
  misc_feature: MA Experiment ID: 20000794 Result: Up-regulated in Transcription
  misc_feature: MA Experiment 20000794 PARAMETER Experiment Name: At_Petals_P Parameter: Age (day) Value: 23-25 days
  misc_feature: MA Experiment 20000794 PARAMETER Experiment Name: At_Petals_P Parameter: Plant Line Value: WS
  misc_feature: MA Experiment 20000794 PARAMETER Experiment Name: At_Petals_P Parameter: Tissue Value: Petals vs. Whole plant
  misc_feature: MA Experiment ID: 20001248 Result: Down-regulated in Transcription
  misc_feature: MA Experiment 20001248 PARAMETER Experiment Name: At_Far-red-induction_P Parameter: Age (day) Value: 7
  misc_feature: MA Experiment 20001248 PARAMETER Experiment Name: At_Far-red-induction_P Parameter: Light Value: Far-red vs. White
  misc_feature: MA Experiment 20001248 PARAMETER Experiment Name: At_Far-red-induction_P Parameter: Organism Value: A. thaliana
  misc_feature: MA Experiment 20001248 PARAMETER Experiment Name: At_Far-red-induction_P Parameter: Plant Line Value: Columbia
  misc_feature: MA Experiment 20001248 PARAMETER Experiment Name: At_Far-red-induction_P Parameter: Timepoint (hr) Value: 4
  misc_feature: MA Experiment 20001248 PARAMETER Experiment Name: At_Far-red-induction_P Parameter: Tissue Value: Whole Plant
ggtagcggacttgtggctgtaaatttacttgtctcacacttgtctcttctacacgtcttctcttccgaccacacccttcattcaattcaacgtctcctctctggctctctctctcaaatatataaacaccaataatgtctccaatttgagatttttaactgaacccaagtcatgacgaagcttctagagattaatcatattcaaaccctttgttttgccaagggtttttctcctgccagattaaatgttgcaacttcaccttttctgatatctcgtcgtggtggtggtggatattgcagcaatgcttgtatcccttatcggttgaaatttacttgttatgcaacactatctgctgtggtaaaggagcaagcatcagactttagtggaaaagaagcagctttgcttgtagatgagctcagaagcaacttcaactctggcagaacgaagagctacgagtggagaatttctcagcttcaaaacattgctaggatgattgatgagaaggagaaatgcatcaccgaagctttgtatcaagatctttctaagcctgagcttgaagcttttctagctgagatttcgaatacaaaatcatcctgtatgcttgcaatcaaagagttaaagaactggatggctccagaaacggtcaaaacttctgtgacaacatttccctcgtctgcacaaatagtctcagaaccgcttggagttgttttggttatttcagcctggaatttccctttcttattgtctgtcgagccagtcattggagctattgcagctggtaatgcggttgtgctaaaaccttctgaaattgctccagcagcatcttctcttttagcaaagttgtttagtgaatacttggacaatacaacaatcagagttatcgagggaggagtccctgaaacaacggcactactggatcaaaaatgggacaagatctttttcactggtggagcaagagttgctcgcattataatggctgcggctgcgagaaatcttactccagtggttctcgaacttggtgggaagtgcccagctcttgttgattcagatgttaatctacaagtggctgctaggaggatcattgcagggaaatgggcttgtaacagtggacaggcttgcattggtgttgattacgtgatcacaacaaaggattttgcatcaaaattgatagatgctctgaagactgaactggagacattttttgggcaaaacgcattagaatcaaaggacctgtcgcggattgtgaactctttccacttcaaaaggttggaaagtatgttaaaagagaatggagtagccaacaaaattgttcatggtggccgaataaccgaagataaacttaaaatatcaccaacaatactactggatgtgcctgaagcatcttccatgatgcaggaagagatatttggacctttacttcccataattacggtacaaaagattgaagatggctttcaggttatacgttcaaagccaaagcctttagcagcgtatctcttcacaaacaacaaagagttggagaaacaattcgtgcaggacgtatcagcaggaggaattaccatcaatgacactgtcttacacgtgactgtaaaagatctgccatttggtggggttggggagagtgggatcggtgcttaccatgggaaattctcgtatgagacgtttagccataagaaaggagttctttaccggagcttttcaggggacgcggatcttagatatcctccttacacaccaaaaaagaagatggtgcttaaggctttgctctcttcaaacatatttgctgccattttggctttctttgggttctctaaagactcatgatcacatgttataatcactgaacttgctggaatagtacaactgagaaagttgaatatttccatagagaaactaagatcaataaaactatagcctcccctatatatgtaaacagtgaataattttagttacttgaataacaattttacatagttactaggacagctaattatatattgaaaattccttctgct

SEQ ID NO: 42149 - protein, 550 aa, Arabidopsis thaliana
  peptide (1)..(550): Ceres Seq. ID no. 12601324
  misc_feature (70)..(508): Pfam Name: Aldehyde dehydrogenase family Pfam Description: Aldehyde dehydrogenase family
  misc_feature (70)..(508): Pfam Name: Aldehyde dehydrogenase family Pfam Description: Aldehyde dehydrogenase family
  misc_feature (78)..(532): Homolog of NCBI NO: 17231164 NR Description: aldehyde dehydrogenase [Nostoc sp. PCC 7120]
  misc_feature (79)..(524): Homolog of NCBI NO: 14010869 NR Description: Aldehyde dehydrogenase family 3, subfamily A1
  misc_feature (79)..(524): Homolog of NCBI NO: 2392056 NR Description: Chain A, Class 3 Aldehyde Dehydrogenase Complex
  misc_feature (72)..(548): Homolog of NCBI NO: 33317836 NR Description: aldehyde dehydrogenase [Oryza sativa (indica
  misc_feature (74)..(547): Homolog of NCBI NO: 17065918 NR Description: aldehyde dehydrogenase [Craterostigma
  misc_feature (78)..(532): Homolog of NCBI NO: 17231164 NR Description: aldehyde dehydrogenase [Nostoc sp. PCC 7120]
  misc_feature (79)..(524): Homolog of NCBI NO: 2392056 NR Description: Chain A, Class 3 Aldehyde Dehydrogenase Complex
  misc_feature (74)..(547): Homolog of NCBI NO: 17065918 NR Description: aldehyde dehydrogenase [Craterostigma
  misc_feature (1)..(550): Homolog of NCBI NO: 18418408 NR Description: putative aldehyde dehydrogenase
  misc_feature (1)..(550): Homolog of NCBI NO: 17065876 NR Description: aldehyde dehydrogenase [Arabidopsis thaliana]
  misc_feature (190)..(550): Homolog of NCBI NO: 7484798 NR Description: aldehyde dehydrogenase (NAD+) homolog F10M10.10 -
  misc_feature (70)..(547): Homolog of NCBI NO: 15219358 NR Description: aldehyde dehydrogenase, putative
  misc_feature (70)..(547): Homolog of NCBI NO: 21536879 NR Description: aldehyde dehydrogenase, putative [Arabidopsis
  misc_feature (72)..(548): Homolog of NCBI NO: 33317836 NR Description: aldehyde dehydrogenase [Oryza sativa (indica
  misc_feature (79)..(524): Homolog of NCBI NO: 14010869 NR Description: Aldehyde dehydrogenase family 3, subfamily A1
  misc_feature (70)..(547): Homolog of NCBI NO: 21536879 NR Description: aldehyde dehydrogenase, putative [Arabidopsis
  misc_feature (70)..(547): Homolog of NCBI NO: 15219358 NR Description: aldehyde dehydrogenase, putative
  misc_feature (190)..(550): Homolog of NCBI NO: 7484798 NR Description: aldehyde dehydrogenase (NAD+) homolog F10M10.10 -
  misc_feature (1)..(550): Homolog of NCBI NO: 17065876 NR Description: aldehyde dehydrogenase [Arabidopsis thaliana]
  misc_feature (1)..(550): Homolog of NCBI NO: 18418408 NR Description: putative aldehyde dehydrogenase
MTKLLEINHIQTLCFAKGFSPARLNVATSPFLISRRGGGGYCSNACIPYRLKFTCYATLSAVVKEQASDFSGKEAALLVDELRSNFNSGRTKSYEWRISQLQNIARMIDEKEKCITEALYQDLSKPELEAFLAEISNTKSSCMLAIKELKNWMAPETVKTSVTTFPSSAQIVSEPLGVVLVISAWNFPFLLSVEPVIGAIAAGNAVVLKPSEIAPAASSLLAKLFSEYLDNTTIRVIEGGVPETTALLDQKWDKIFFTGGARVARIIMAAAARNLTPVVLELGGKCPALVDSDVNLQVAARRIIAGKWACNSGQACIGVDYVITTKDFASKLIDALKTELETFFGQNALESKDLSRIVNSFHFKRLESMLKENGVANKIVHGGRITEDKLKISPTILLDVPEASSMMQEEIFGPLLPIITVQKIEDGFQVIRSKPKPLAAYLFTNNKELEKQFVQDVSAGGITINDTVLHVTVKDLPFGGVGESGIGAYHGKFSYETFSHKKGVLYRSFSGDADLRYPPYTPKKKMVLKALLSSNIFAAILAFFGFSKDS

SEQ ID NO: 42150 - protein, 444 aa, Arabidopsis thaliana
  peptide (1)..(444): Ceres Seq. ID no. 12601325
  misc_feature (1)..(402): Pfam Name: Aldehyde dehydrogenase family Pfam Description: Aldehyde dehydrogenase family
  misc_feature (1)..(402): Pfam Name: Aldehyde dehydrogenase family Pfam Description: Aldehyde dehydrogenase family
  misc_feature (1)..(426): Homolog of NCBI NO: 17231164 NR Description: aldehyde dehydrogenase [Nostoc sp. PCC 7120]
  misc_feature (1)..(418): Homolog of NCBI NO: 14010869 NR Description: Aldehyde dehydrogenase family 3, subfamily A1
  misc_feature (1)..(418): Homolog of NCBI NO: 2392056 NR Description: Chain A, Class 3 Aldehyde Dehydrogenase Complex
  misc_feature (1)..(442): Homolog of NCBI NO: 33317836 NR Description: aldehyde dehydrogenase [Oryza sativa (indica
  misc_feature (1)..(441): Homolog of NCBI NO: 17065918 NR Description: aldehyde dehydrogenase [Craterostigma
  misc_feature (1)..(426): Homolog of NCBI NO: 17231164 NR Description: aldehyde dehydrogenase [Nostoc sp. PCC 7120]
  misc_feature (1)..(418): Homolog of NCBI NO: 2392056 NR Description: Chain A, Class 3 Aldehyde Dehydrogenase Complex
  misc_feature (1)..(441): Homolog of NCBI NO: 17065918 NR Description: aldehyde dehydrogenase [Craterostigma
  misc_feature (1)..(444): Homolog of NCBI NO: 18418408 NR Description: putative aldehyde dehydrogenase
  misc_feature (1)..(444): Homolog of NCBI NO: 17065876 NR Description: aldehyde dehydrogenase [Arabidopsis thaliana]
  misc_feature (84)..(444): Homolog of NCBI NO: 7484798 NR Description: aldehyde dehydrogenase (NAD+) homolog F10M10.10 -
  misc_feature (1)..(441): Homolog of NCBI NO: 15219358 NR Description: aldehyde dehydrogenase, putative
  misc_feature (1)..(441): Homolog of NCBI NO: 21536879 NR Description: aldehyde dehydrogenase, putative [Arabidopsis
  misc_feature (1)..(442): Homolog of NCBI NO: 33317836 NR Description: aldehyde dehydrogenase [Oryza sativa (indica
  misc_feature (1)..(418): Homolog of NCBI NO: 14010869 NR Description: Aldehyde dehydrogenase family 3, subfamily A1
  misc_feature (1)..(441): Homolog of NCBI NO: 21536879 NR Description: aldehyde dehydrogenase, putative [Arabidopsis
  misc_feature (1)..(441): Homolog of NCBI NO: 15219358 NR Description: aldehyde dehydrogenase, putative
  misc_feature (84)..(444): Homolog of NCBI NO: 7484798 NR Description: aldehyde dehydrogenase (NAD+) homolog F10M10.10 -
  misc_feature (1)..(444): Homolog of NCBI NO: 17065876 NR Description: aldehyde dehydrogenase [Arabidopsis thaliana]
  misc_feature (1)..(444): Homolog of NCBI NO: 18418408 NR Description: putative aldehyde dehydrogenase
MIDEKEKCITEALYQDLSKPELEAFLAEISNTKSSCMLAIKELKNWMAPETVKTSVTTFPSSAQIVSEPLGVVLVISAWNFPFLLSVEPVIGAIAAGNAVVLKPSEIAPAASSLLAKLFSEYLDNTTIRVIEGGVPETTALLDQKWDKIFFTGGARVARIIMAAAARNLTPVVLELGGKCPALVDSDVNLQVAARRIIAGKWACNSGQACIGVDYVITTKDFASKLIDALKTELETFFGQNALESKDLSRIVNSFHFKRLESMLKENGVANKIVHGGRITEDKLKISPTILLDVPEASSMMQEEIFGPLLPIITVQKIEDGFQVIRSKPKPLAAYLFTNNKELEKQFVQDVSAGGITINDTVLHVTVKDLPFGGVGESGIGAYHGKFSYETFSHKKGVLYRSFSGDADLRYPPYTPKKKMVLKALLSSNIFAAILAFFGFSKDS

SEQ ID NO: 42151 - protein, 408 aa, Arabidopsis thaliana
  peptide (1)..(408): Ceres Seq. ID no. 12601326
  misc_feature (1)..(366): Pfam Name: Aldehyde dehydrogenase family Pfam Description: Aldehyde dehydrogenase family
  misc_feature (1)..(366): Pfam Name: Aldehyde dehydrogenase family Pfam Description: Aldehyde dehydrogenase family
  misc_feature (1)..(390): Homolog of NCBI NO: 17231164 NR Description: aldehyde dehydrogenase [Nostoc sp. PCC 7120]
  misc_feature (1)..(382): Homolog of NCBI NO: 14010869 NR Description: Aldehyde dehydrogenase family 3, subfamily A1
  misc_feature (1)..(382): Homolog of NCBI NO: 2392056 NR Description: Chain A, Class 3 Aldehyde Dehydrogenase Complex
  misc_feature (1)..(406): Homolog of NCBI NO: 33317836 NR Description: aldehyde dehydrogenase [Oryza sativa (indica
  misc_feature (1)..(405): Homolog of NCBI NO: 17065918 NR Description: aldehyde dehydrogenase [Craterostigma
  misc_feature (1)..(390): Homolog of NCBI NO: 17231164 NR Description: aldehyde dehydrogenase [Nostoc sp. PCC 7120]
  misc_feature (1)..(382): Homolog of NCBI NO: 2392056 NR Description: Chain A, Class 3 Aldehyde Dehydrogenase Complex
  misc_feature (1)..(405): Homolog of NCBI NO: 17065918 NR Description: aldehyde dehydrogenase [Craterostigma
  misc_feature (1)..(408): Homolog of NCBI NO: 18418408 NR Description: putative aldehyde dehydrogenase
  misc_feature (1)..(408): Homolog of NCBI NO: 17065876 NR Description: aldehyde dehydrogenase [Arabidopsis thaliana]
  misc_feature (48)..(408): Homolog of NCBI NO: 7484798 NR Description: aldehyde dehydrogenase (NAD+) homolog F10M10.10 -
  misc_feature (1)..(405): Homolog of NCBI NO: 15219358 NR Description: aldehyde dehydrogenase, putative
  misc_feature (1)..(405): Homolog of NCBI NO: 21536879 NR Description: aldehyde dehydrogenase, putative [Arabidopsis
  misc_feature (1)..(406): Homolog of NCBI NO: 33317836 NR Description: aldehyde dehydrogenase [Oryza sativa (indica
  misc_feature (1)..(382): Homolog of NCBI NO: 14010869 NR Description: Aldehyde dehydrogenase family 3, subfamily A1
  misc_feature (1)..(405): Homolog of NCBI NO: 21536879 NR Description: aldehyde dehydrogenase, putative [Arabidopsis
  misc_feature (1)..(405): Homolog of NCBI NO: 15219358 NR Description: aldehyde dehydrogenase, putative
  misc_feature (48)..(408): Homolog of NCBI NO: 7484798 NR Description: aldehyde dehydrogenase (NAD+) homolog F10M10.10 -
  misc_feature (1)..(408): Homolog of NCBI NO: 17065876 NR Description: aldehyde dehydrogenase [Arabidopsis thaliana]
  misc_feature (1)..(408): Homolog of NCBI NO: 18418408 NR Description: putative aldehyde dehydrogenase
MLAIKELKNWMAPETVKTSVTTFPSSAQIVSEPLGVVLVISAWNFPFLLSVEPVIGAIAAGNAVVLKPSEIAPAASSLLAKLFSEYLDNTTIRVIEGGVPETTALLDQKWDKIFFTGGARVARIIMAAAARNLTPVVLELGGKCPALVDSDVNLQVAARRIIAGKWACNSGQACIGVDYVITTKDFASKLIDALKTELETFFGQNALESKDLSRIVNSFHFKRLESMLKENGVANKIVHGGRITEDKLKISPTILLDVPEASSMMQEEIFGPLLPIITVQKIEDGFQVIRSKPKPLAAYLFTNNKELEKQFVQDVSAGGITINDTVLHVTVKDLPFGGVGESGIGAYHGKFSYETFSHKKGVLYRSFSGDADLRYPPYTPKKKMVLKALLSSNIFAAILAFFGFSKDS

SEQ ID NO: 42152 - DNA, 824 bp, Arabidopsis thaliana
  misc_feature (1)..(824): Ceres Seq. ID no. 12326290
  misc_feature: MA Experiment ID: 108463 Result: Up-regulated in Transcription
  misc_feature: MA Experiment 108463 PARAMETER Experiment Name: At_Germinating_Seeds_cDNA_P Parameter: Age (day) Value: 3 vs. 0
  misc_feature: MA Experiment 108463 PARAMETER Experiment Name: At_Germinating_Seeds_cDNA_P Parameter: Tissue Value: Germinating Seeds
  misc_feature: MA Experiment ID: 108464 Result: Up-regulated in Transcription
  misc_feature: MA Experiment 108464 PARAMETER Experiment Name: At_Germinating_Seeds_cDNA_P Parameter: Age (day) Value: 4 vs. 0
  misc_feature: MA Experiment 108464 PARAMETER Experiment Name: At_Germinating_Seeds_cDNA_P Parameter: Tissue Value: Germinating Seeds
  misc_feature: MA Experiment ID: 108607 Result: Up-regulated in Transcription
  misc_feature: MA Experiment 108607 PARAMETER Experiment Name: At_100uM_ABA_cDNA_P Parameter: Timepoint (hr) Value: 4
  misc_feature: MA Experiment 108607 PARAMETER Experiment Name: At_100uM_ABA_cDNA_P Parameter: Tissue Value: Aerial
  misc_feature: MA Experiment 108607 PARAMETER Experiment Name: At_100uM_ABA_cDNA_P Parameter: Treatment Value: 100uM ABA vs. No Treatment
  misc_feature: MA Experiment ID: 20000113 Result: Down-regulated in Transcription
  misc_feature: MA Experiment 20000113 PARAMETER Experiment Name: At_42deg_Heat_cDNA_P Parameter: Temperature (deg C) Value: 42 vs. 22
  misc_feature: MA Experiment 20000113 PARAMETER Experiment Name: At_42deg_Heat_cDNA_P Parameter: Timepoint (hr) Value: 8
  misc_feature: MA Experiment 20000113 PARAMETER Experiment Name: At_42deg_Heat_cDNA_P Parameter: Tissue Value: Aerial
  misc_feature: MA Experiment ID: 20000173 Result: Down-regulated in Transcription
  misc_feature: MA Experiment 20000173 PARAMETER Experiment Name: At_42deg_Heat_P Parameter: Age (day) Value: 14
  misc_feature: MA Experiment 20000173 PARAMETER Experiment Name: At_42deg_Heat_P Parameter: Organism Value: A. thaliana
  misc_feature: MA Experiment 20000173 PARAMETER Experiment Name: At_42deg_Heat_P Parameter: Plant Line Value: WS
  misc_feature: MA Experiment 20000173 PARAMETER Experiment Name: At_42deg_Heat_P Parameter: Temperature (deg C) Value: 42 vs. 22
  misc_feature: MA Experiment 20000173 PARAMETER Experiment Name: At_42deg_Heat_P Parameter: Timepoint (hr) Value: 6
  misc_feature: MA Experiment 20000173 PARAMETER Experiment Name: At_42deg_Heat_P Parameter: Tissue Value: Aerial
  misc_feature: MA Experiment ID: 20000179 Result: Up-regulated in Transcription
  misc_feature: MA Experiment 20000179 PARAMETER Experiment Name: At_Germinating_Seeds_P Parameter: Age (hr) Value: 6 vs. 0
  misc_feature: MA Experiment 20000179 PARAMETER Experiment Name: At_Germinating_Seeds_P Parameter: Tissue Value: Germinating Seeds
  misc_feature: MA Experiment ID: 20000180 Result: Up-regulated in Transcription
  misc_feature: MA Experiment 20000180 PARAMETER Experiment Name: At_Germinating_Seeds_P Parameter: Age (hr) Value: 24 vs. 0
  misc_feature: MA Experiment 20000180 PARAMETER Experiment Name: At_Germinating_Seeds_P Parameter: Tissue Value: Germinating Seeds
  misc_feature: MA Experiment ID: 20000184 Result: Down-regulated in Transcription
  misc_feature: MA Experiment 20000184 PARAMETER Experiment Name: At_Shoots__P Parameter: Age (day) Value: 7
  misc_feature: MA Experiment 20000184 PARAMETER Experiment Name: At_Shoots__P Parameter: Tissue Value: Shoots vs. Whole Plant
  misc_feature: MA Experiment ID: 20000224 Result: Up-regulated in Transcription
  misc_feature: MA Experiment ID: 20000264 Result: Up-regulated in Transcription
  misc_feature: MA Experiment 20000264 PARAMETER Experiment Name: At_Open_Flower_P Parameter: Age (day) Value: 21
  misc_feature: MA Experiment 20000264 PARAMETER Experiment Name: At_Open_Flower_P Parameter: Plant Line Value: WS
  misc_feature: MA Experiment 20000264 PARAMETER Experiment Name: At_Open_Flower_P Parameter: Tissue Value: Open Flower vs. Whole Plant
  misc_feature: MA Experiment ID: 20000286 Result: Up-regulated in Transcription
  misc_feature: MA Experiment 20000286 PARAMETER Experiment Name: At_Open_Flower_P Parameter: Age (day) Value: 21
  misc_feature: MA Experiment 20000286 PARAMETER Experiment Name: At_Open_Flower_P Parameter: Plant Line Value: WS
  misc_feature: MA Experiment 20000286 PARAMETER Experiment Name: At_Open_Flower_P Parameter: Tissue Value: Half Open vs. Whole Plant
  misc_feature: MA Experiment ID: 20000573 Result: Down-regulated in Transcription
  misc_feature: MA Experiment 20000573 PARAMETER Experiment Name: At_100uM_ABA_Mutants__P Parameter: Organism Value: A. thaliana
  misc_feature: MA Experiment 20000573 PARAMETER Experiment Name: At_100uM_ABA_Mutants__P Parameter: Plant Line Value: CS22 vs. Ler wt
  misc_feature: MA Experiment 20000573 PARAMETER Experiment Name: At_100uM_ABA_Mutants__P Parameter: Timepoint (hr) Value: N/A
  misc_feature: MA Experiment 20000573 PARAMETER Experiment Name: At_100uM_ABA_Mutants__P Parameter: Tissue Value: Whole Plant
  misc_feature: MA Experiment 20000573 PARAMETER Experiment Name: At_100uM_ABA_Mutants__P Parameter: Treatment Value: None
  misc_feature: MA Experiment ID: 20000574 Result: Down-regulated in Transcription
  misc_feature: MA Experiment 20000574 PARAMETER Experiment Name: At_100uM_ABA_Mutants__P Parameter: Organism Value: A. thaliana
  misc_feature: MA Experiment 20000574 PARAMETER Experiment Name: At_100uM_ABA_Mutants__P Parameter: Plant Line Value: CS23 vs. Ler wt
  misc_feature: MA Experiment 20000574 PARAMETER Experiment Name: At_100uM_ABA_Mutants__P Parameter: Timepoint (hr) Value: N/A
  misc_feature: MA Experiment 20000574 PARAMETER Experiment Name: At_100uM_ABA_Mutants__P Parameter: Tissue Value: Whole Plant
  misc_feature: MA Experiment 20000574 PARAMETER Experiment Name: At_100uM_ABA_Mutants__P Parameter: Treatment Value: None
  misc_feature: MA Experiment ID: 20000794 Result: Up-regulated in Transcription
  misc_feature: MA Experiment 20000794 PARAMETER Experiment Name: At_Petals_P Parameter: Age (day) Value: 23-25 days
  misc_feature: MA Experiment 20000794 PARAMETER Experiment Name: At_Petals_P Parameter: Plant Line Value: WS
  misc_feature: MA Experiment 20000794 PARAMETER Experiment Name: At_Petals_P Parameter: Tissue Value: Petals vs. Whole plant
  misc_feature: MA Experiment ID: 20001911 Result: Down-regulated in Transcription
  misc_feature: MA Experiment 20001911 PARAMETER Experiment Name: At_Drought_Reproduction_P Parameter: Age (day) Value: 40
  misc_feature: MA Experiment 20001911 PARAMETER Experiment Name: At_Drought_Reproduction_P Parameter: Organism Value: A. thaliana
  misc_feature: MA Experiment 20001911 PARAMETER Experiment Name: At_Drought_Reproduction_P Parameter: Plant Line Value: WS
  misc_feature: MA Experiment 20001911 PARAMETER Experiment Name: At_Drought_Reproduction_P Parameter: Timepoint (day) Value: 10
  misc_feature: MA Experiment 20001911 PARAMETER Experiment Name: At_Drought_Reproduction_P Parameter: Tissue Value: Flowers
  misc_feature: MA Experiment 20001911 PARAMETER Experiment Name: At_Drought_Reproduction_P Parameter: Treatment Value: Drought vs. No Drought
cgctttattcagatctgaagaagaagaagaaacatagttcaagtctctgctaatatgtcttcaacaacaacagattctacagaattgcaaaatctgatcaaactgtttcaaaattgccaaactcatcctcgtcaacattttcctgcaaaatcttcagctgtattagtttgtctataccaagaacaaagagaagacataaaccagctacgcgtaatcttaaccaaacgctcctctactctctcttctcatcctggggaagtagcattgcctggaggaaaaagagaccaagaagataaagatgatatagctactgcgttgagagaagctcgtgaagaaatcggtttagatccttctcttgttacaatcatttctgttcttgaaccatttgttaacaagaagggaatgtcggtagcaccagttatcggttttctacacgataagaaagcgtttaaaccgttaccaaatccagctgaagtggaagagatctttgatgtgccattagagatgttcctcaaggacagaaacaggcgagcagaggaacgagagcatgaaggagagagatatcttcttcaatactttgattactattccgaagataaagagagaagctttatcatatgggcactcactgctggtattctgatcagagttgcctccattgtttatcagagattaccggagtttcaagaacgtaaaccgagtttcttgaatcagcctaactgattcttgacttgatctgattgagaaaattgaaacttttatgtataataagcgatacagattgaatcttctttaaatgtgtttcaagaatctatctttactct

SEQ ID NO: 42153 - protein, 222 aa, Arabidopsis thaliana
  peptide (1)..(222): Ceres Seq. ID no. 12326291
  misc_feature (32)..(170): Pfam Name: NUDIX domain Pfam Description: NUDIX domain
  misc_feature (28)..(211): Homolog of NCBI NO: 18859595 NR Description: nudix (nucleoside diphosphate linked moiety
  misc_feature (27)..(204): Homolog of NCBI NO: 23470438 NR Description: hypothetical protein [Pseudomonas syringae pv.
  misc_feature (29)..(221): Homolog of NCBI NO: 40253324 NR Description: putative phosphohydrolase
  misc_feature (29)..(216): Homolog of NCBI NO: 18403412 NR Description: expressed protein
  misc_feature (29)..(217): Homolog of NCBI NO: 10764850 NR Description: F1K23.5 [Arabidopsis thaliana]
  misc_feature (29)..(217): Homolog of NCBI NO: 26450576 NR Description: unknown protein [Arabidopsis thaliana]
  misc_feature (29)..(217): Homolog of NCBI NO: 30690557 NR Description: MutT/nudix family protein [Arabidopsis thaliana]
  misc_feature (29)..(217): Homolog of NCBI NO: 18396900 NR Description: Expressed protein
  misc_feature (1)..(222): Homolog of NCBI NO: 15242543 NR Description: putative protein
  misc_feature (1)..(222): Homolog of NCBI NO: 21553389 NR Description: unknown [Arabidopsis thaliana]
MSSTTTDSTELQNLIKLFQNCQTHPRQHFPAKSSAVLVCLYQEQREDINQLRVILTKRSSTLSSHPGEVALPGGKRDQEDKDDIATALREAREEIGLDPSLVTIISVLEPFVNKKGMSVAPVIGFLHDKKAFKPLPNPAEVEEIFDVPLEMFLKDRNRRAEEREHEGERYLLQYFDYYSEDKERSFIIWALTAGILIRVASIVYQRLPEFQERKPSFLNQPN

SEQ ID NO: 42154 - DNA, 1616 bp, Arabidopsis thaliana; identical to SEQ ID NO: 36446
  misc_feature (1)..(1616): Ceres Seq. ID no. 13493832
  misc_feature: MA Experiment ID: 20000179 Result: Up-regulated in Transcription
  misc_feature: MA Experiment 20000179 PARAMETER Experiment Name: At_Germinating_Seeds_P Parameter: Age (hr) Value: 6 vs. 0
  misc_feature: MA Experiment 20000179 PARAMETER Experiment Name: At_Germinating_Seeds_P Parameter: Tissue Value: Germinating Seeds
  misc_feature: MA Experiment ID: 20000180 Result: Up-regulated in Transcription
  misc_feature: MA Experiment 20000180 PARAMETER Experiment Name: At_Germinating_Seeds_P Parameter: Age (hr) Value: 24 vs. 0
  misc_feature: MA Experiment 20000180 PARAMETER Experiment Name: At_Germinating_Seeds_P Parameter: Tissue Value: Germinating Seeds
  misc_feature: MA Experiment ID: 20000184 Result: Up-regulated in Transcription
  misc_feature: MA Experiment 20000184 PARAMETER Experiment Name: At_Shoots__P Parameter: Age (day) Value: 7
  misc_feature: MA Experiment 20000184 PARAMETER Experiment Name: At_Shoots__P Parameter: Tissue Value: Shoots vs. Whole Plant
  misc_feature: MA Experiment ID: 20000185 Result: Up-regulated in Transcription
  misc_feature: MA Experiment 20000185 PARAMETER Experiment Name: At_Roots__P Parameter: Age (day) Value: 7 vs. 21
  misc_feature: MA Experiment 20000185 PARAMETER Experiment Name: At_Roots__P Parameter: Organism Value: A. thaliana
  misc_feature: MA Experiment 20000185 PARAMETER Experiment Name: At_Roots__P Parameter: Tissue Value: Roots vs. Whole Plant
  misc_feature: MA Experiment ID: 20001450 Result: Up-regulated in Transcription
  misc_feature: MA Experiment 20001450 PARAMETER Experiment Name: At_Far-red-induction_P Parameter: Age (day) Value: 7
  misc_feature: MA Experiment 20001450 PARAMETER Experiment Name: At_Far-red-induction_P Parameter: Light Value: Far-red vs. White
  misc_feature: MA Experiment 20001450 PARAMETER Experiment Name: At_Far-red-induction_P Parameter: Organism Value: A. thaliana
  misc_feature: MA Experiment 20001450 PARAMETER Experiment Name: At_Far-red-induction_P Parameter: Plant Line Value: Columbia
  misc_feature: MA Experiment 20001450 PARAMETER Experiment Name: At_Far-red-induction_P Parameter: Timepoint (hr) Value: 8
  misc_feature: MA Experiment 20001450 PARAMETER Experiment Name: At_Far-red-induction_P Parameter: Tissue Value: Whole Plant
  misc_feature: Phenotype: INFLORESCENCE Flowering Time-Late Flowering
  misc_feature: Phenotype: INFLORESCENCE Flowering Time-Late Flowering

SEQ ID NO: 42155 - protein, 468 aa, Arabidopsis thaliana; identical to SEQ ID NO: 36447
  peptide (1)..(468): Ceres Seq. ID no. 13493833
  misc_feature (129)..(433): Pfam Name: Dehydrogenase E1 component Pfam Description: Dehydrogenase E1 component
  misc_feature (129)..(433): Pfam Name: Dehydrogenase E1 component Pfam Description: Dehydrogenase E1 component
  misc_feature (129)..(433): Pfam Name: Dehydrogenase E1 component Pfam Description: Dehydrogenase E1 component
  misc_feature (119)..(442): Homolog of NCBI NO: 33861844 NR Description: Pyruvate dehydrogenase E1 alpha subunit
  misc_feature (119)..(442): Homolog of NCBI NO: 22298712 NR Description: pyruvate dehydrogenase E1 component, alpha
  misc_feature (112)..(442): Homolog of NCBI NO: 11465733 NR Description: pyruvate dehydrogenase E1 component alpha subunit
  misc_feature (113)..(442): Homolog of NCBI NO: 16331186 NR Description: pyruvate dehydrogenase E1 component, alpha
  misc_feature (113)..(442): Homolog of NCBI NO: 23128827 NR Description: hypothetical protein [Nostoc punctiforme]
  misc_feature (119)..(442): Homolog of NCBI NO: 33861844 NR Description: Pyruvate dehydrogenase E1 alpha subunit
  misc_feature (112)..(442): Homolog of NCBI NO: 11465733 NR Description: pyruvate dehydrogenase E1 component alpha subunit
  misc_feature (113)..(442): Homolog of NCBI NO: 23128827 NR Description: hypothetical protein [Nostoc punctiforme]
  misc_feature (113)..(442): Homolog of NCBI NO: 16331186 NR Description: pyruvate dehydrogenase E1 component, alpha
  misc_feature (112)..(442): Homolog of NCBI NO: 11465733 NR Description: pyruvate dehydrogenase E1 component alpha subunit
  misc_feature (119)..(442): Homolog of NCBI NO: 22298712 NR Description: pyruvate dehydrogenase E1 component, alpha
  misc_feature (119)..(442): Homolog of NCBI NO: 33861844 NR Description: Pyruvate dehydrogenase E1 alpha subunit
  misc_feature (41)..(468): Homolog of NCBI NO: 15223294 NR Description: pyruvate dehydrogenase E1 alpha subunit
  misc_feature (41)..(457): Homolog of NCBI NO: 6715645 NR Description: T25K16.8 [Arabidopsis thaliana]
  misc_feature (119)..(468): Homolog of NCBI NO: 38344868 NR Description: OSJNBa0020P07.11 [Oryza sativa (japonica
  misc_feature (102)..(442): Homolog of NCBI NO: 23041416 NR Description: hypothetical protein [Trichodesmium erythraeum
  misc_feature (102)..(442): Homolog of NCBI NO: 17230200 NR Description: pyruvate dehydrogenase E1 component, alpha
  misc_feature (41)..(468): Homolog of NCBI NO: 15223294 NR Description: pyruvate dehydrogenase E1 alpha subunit
  misc_feature (41)..(457): Homolog of NCBI NO: 6715645 NR Description: T25K16.8 [Arabidopsis thaliana]
  misc_feature (119)..(468): Homolog of NCBI NO: 38344868 NR Description: OSJNBa0020P07.11 [Oryza sativa (japonica
  misc_feature (102)..(442): Homolog of NCBI NO: 23041416 NR Description: hypothetical protein [Trichodesmium erythraeum
  misc_feature (102)..(442): Homolog of NCBI NO: 17230200 NR Description: pyruvate dehydrogenase E1 component, alpha
  misc_feature (113)..(442): Homolog of NCBI NO: 23128827 NR Description: hypothetical protein [Nostoc punctiforme]
  misc_feature (113)..(442): Homolog of NCBI NO: 16331186 NR Description: pyruvate dehydrogenase E1 component, alpha
  misc_feature (119)..(442): Homolog of NCBI NO: 22298712 NR Description: pyruvate dehydrogenase E1 component, alpha
  misc_feature (102)..(442): Homolog of NCBI NO: 17230200 NR Description: pyruvate dehydrogenase E1 component, alpha
  misc_feature (102)..(442): Homolog of NCBI NO: 23041416 NR Description: hypothetical protein [Trichodesmium erythraeum
  misc_feature (119)..(468): Homolog of NCBI NO: 38344868 NR Description: OSJNBa0020P07.11 [Oryza sativa (japonica
  misc_feature (41)..(457): Homolog of NCBI NO: 6715645 NR Description: T25K16.8 [Arabidopsis thaliana]
  misc_feature (41)..(468): Homolog of NCBI NO: 15223294 NR Description: pyruvate dehydrogenase E1 alpha subunit

SEQ ID NO: 42156 - protein, 428 aa, Arabidopsis thaliana; identical to SEQ ID NO: 36448
  peptide (1)..(428): Ceres Seq. ID no. 13493834
  misc_feature (89)..(393): Pfam Name: Dehydrogenase E1 component Pfam Description: Dehydrogenase E1 component
  misc_feature (89)..(393): Pfam Name: Dehydrogenase E1 component Pfam Description: Dehydrogenase E1 component
  misc_feature (89)..(393): Pfam Name: Dehydrogenase E1 component Pfam Description: Dehydrogenase E1 component
  misc_feature (79)..(402): Homolog of NCBI NO: 33861844 NR Description: Pyruvate dehydrogenase E1 alpha subunit
  misc_feature (79)..(402): Homolog of NCBI NO: 22298712 NR Description: pyruvate dehydrogenase E1 component, alpha
  misc_feature (72)..(402): Homolog of NCBI NO: 11465733 NR Description: pyruvate dehydrogenase E1 component alpha subunit
  misc_feature (73)..(402): Homolog of NCBI NO: 16331186 NR Description: pyruvate dehydrogenase E1 component, alpha
  misc_feature (73)..(402): Homolog of NCBI NO: 23128827 NR Description: hypothetical protein [Nostoc punctiforme]
  misc_feature (79)..(402): Homolog of NCBI NO: 33861844 NR Description: Pyruvate dehydrogenase E1 alpha subunit
  misc_feature (72)..(402): Homolog of NCBI NO: 11465733 NR Description: pyruvate dehydrogenase E1 component alpha subunit
  misc_feature (73)..(402): Homolog of NCBI NO: 23128827 NR Description: hypothetical protein [Nostoc punctiforme]
  misc_feature (73)..(402): Homolog of NCBI NO: 16331186 NR Description: pyruvate dehydrogenase E1 component, alpha
  misc_feature (72)..(402): Homolog of NCBI NO: 11465733 NR Description: pyruvate dehydrogenase E1 component alpha subunit
  misc_feature (79)..(402): Homolog of NCBI NO: 22298712 NR Description: pyruvate dehydrogenase E1 component, alpha
  misc_feature (79)..(402): Homolog of NCBI NO: 33861844 NR Description: Pyruvate dehydrogenase E1 alpha subunit
  misc_feature (1)..(428): Homolog of NCBI NO: 15223294 NR Description: pyruvate dehydrogenase E1 alpha subunit
  misc_feature (1)..(417): Homolog of NCBI NO: 6715645 NR Description: T25K16.8 [Arabidopsis thaliana]
  misc_feature (79)..(428): Homolog of NCBI NO: 38344868 NR Description: OSJNBa0020P07.11 [Oryza sativa (japonica
  misc_feature (62)..(402): Homolog of NCBI NO: 23041416 NR Description: hypothetical protein [Trichodesmium erythraeum
  misc_feature (62)..(402): Homolog of NCBI NO: 17230200 NR Description: pyruvate dehydrogenase E1 component, alpha
  misc_feature (1)..(428): Homolog of NCBI NO: 15223294 NR Description: pyruvate dehydrogenase E1 alpha subunit
  misc_feature (1)..(417): Homolog of NCBI NO: 6715645 NR Description: T25K16.8 [Arabidopsis thaliana]
  misc_feature (79)..(428): Homolog of NCBI NO: 38344868 NR Description: OSJNBa0020P07.11 [Oryza sativa (japonica
  misc_feature (62)..(402): Homolog of NCBI NO: 23041416 NR Description: hypothetical protein [Trichodesmium erythraeum
  misc_feature (62)..(402): Homolog of NCBI NO: 17230200 NR Description: pyruvate dehydrogenase E1 component, alpha
  misc_feature (73)..(402): Homolog of NCBI NO: 23128827 NR Description: hypothetical protein [Nostoc punctiforme]
  misc_feature (73)..(402): Homolog of NCBI NO: 16331186 NR Description: pyruvate dehydrogenase E1 component, alpha
  misc_feature (79)..(402): Homolog of NCBI NO: 22298712 NR Description: pyruvate dehydrogenase E1 component, alpha
  misc_feature (62)..(402): Homolog of NCBI NO: 17230200 NR Description: pyruvate dehydrogenase E1 component, alpha
  misc_feature (62)..(402): Homolog of NCBI NO: 23041416 NR Description: hypothetical protein [Trichodesmium erythraeum
  misc_feature (79)..(428): Homolog of NCBI NO: 38344868 NR Description: OSJNBa0020P07.11 [Oryza sativa (japonica
  misc_feature (1)..(417): Homolog of NCBI NO: 6715645 NR Description: T25K16.8 [Arabidopsis thaliana]
  misc_feature (1)..(428): Homolog of NCBI NO: 15223294 NR Description: pyruvate dehydrogenase E1 alpha subunit
